United States Patent Application Publication US 2024/0327476 A1 - sequence listing, part 9

SEQ ID NO: 9169 - DNA, 3949 bp, Homo sapiens
  source 1..3949: mol_type = unassigned DNA
ctgttgctcagacggacctgcaggcattctccatgcagaacggtctgaatggacaagtggatgtctcacttgcttctgcagcctctgctgtggagagcctgaagccagcactccttgctggccagcctctagtgtatgtgccctctgcctcactgttcatgctgtatggaagtctgcaggagggaccagcgtcagggtcagggtcagagagggatgacagaagctcagaagccccagccacagtagagctgtcatctgcaccctcagctcagaagcgcctctgtgaggagaggaaacctcaggaggaggatgagccagccactaaaaggcaaagtagggaatatgaagacggcccgctgtcgcttgtcatgcccaagaaaccctcagattccacagaccttgcctctcccaagactatgggtaacagggcatctatacccctcaaagacattcatgtgaatggccaactccctgctgcagaagagatttcaggaaaggcaacagcaaactctcttgtttcttctgagtggggaaatccttcaagaaatacagatgttgaaaagccttcaaaagaaaatgaaagcaccaaagagccttctttgctacaatatctttgtgtgcagtctcctgcaggattaaatggtttcaatgtacttttatctggcagtcaaaccccccctactgtgggcccgtcctcaggtcagctgccgtctttcagtgtcccttgcatggtcttaccatctccacctctgggcccttttcctgttctctattctcctgcaatgccgggcccggtttcttctactcttggatcaatagcccagcttctcgtcggccccacagctgtggttaatccaaagtcgtccacactcccttctgcagaccctcagcttcagagtcagccctcactaaacctaagtccagtgatgtcaaggtcacacagtgtcgtccaacaacctgagtcccccgtttacgtgggacatccagtctcagtagtaaaattacatcagtcaccagttccagtgacccccaagagcatccaacgcacacatcgtgagacgtttttcaagacacccggcagccttggagaccctgtcctgaagagaagagaaaggaaccagtcacgaaacaccagctcggcccagaggagactagaaatccccagcggcggcgctgactaacctgccgctttgccaggtgggggtgggatcaaacgccctgagagtcccggatgtccgaggcgggatgcaaaccatcccgtcctgagcacgggtccttcctctctctttcatccacacttctgttaacttcccaccaccatcaatcatctgatttcctgaaagtaattaattgtgcatttaataccagttagagttccgactctgcatggtgtcacagtgaaagcgccgactgacttatggttttgattcaagaatcgtcttattctggaagtagatctgaataggctaccggagccttgtttttctaaaggggggcgctgtctagcacttaactagggtaagcattcttaacatgtatttccacttgccctgagtaaatctgtggtgagagaagcttcctttctgcagtttaaaaaagctactgcttccttaggcttcatcaggaagccaccttcagttgtgaatcctatggtgttatttattttgttcctgaaatgggatttagtgcaaaaagtttacaactacagtctttaacacatttttttcagggtatgacgacttgaatgtttatacttttattctataatttgccctgcacttattttacaacctagtaataatgtggataaatgtatctacatgacacatgtcaagaccaaaataactgtgaatgacacaccttgctgtaaatgaactgtgctaaccctgactgtgggcttgagaacaaagatgaactctagaactctagcagcctaactgctgcttctcaaataactgtgtgaacagtgagatattactgtttgtttctaaaaatcctactgtgcccagtttccttcactacatgccctgcattttttatttaaatatttagctgtagcgccatcagatatggatgccttctaacaattgctgtttgtaaaataaatcaggatggtagaaagtgattatatggaaaattggaacctggatgagaccttttcgttgaattctgaagagtaatgatgtgaaaattgatacagggcaagagatgattcttttgtttttcttctacttcatgtccagaagagtaagagggaaaatggacatatgtttcatatccaagggtattcaaactgtagttagttggtacctctgaaaaatgagaatggtgagcgcacgggttggttgttctagcatgaatacaattctggaaactgttatgcaatttcccttttttaacccacattactttaggggtgcattaagtcgccaaactatactagttctttgtattcctagacttgctgatatttacctctctcttgtctcttcagagtaaatggttcccttctttccttcctactttccttcattctctcttccttccctccttcctacttcttttcttccttcctcttcctctcttaaaactatcttagatgtagaatcctggtgtagggttttattttatttttattttttgacccaataaaatgttatatgaaagaatgaaaatattaatttaagagactctgggagtctgaataaagtagctttatattaactacaggataatattagccttattacccccacaagattttttaaaacttgaggtaggtagctacattaaataaatttgctacttatataaaaatttttatcaacactaaacttttaaagtttacaagttttttttttcttttttacagtcttctatagagttaggttaaaaatgtggttctaaccatcaacaattgcatggttaaatgaccctgaactaaaactgatgggttccctatcaaaacaaataaaaatatacctttttcaggtttcaatctgtgcagggtatatgcatgttaattctaccatgcttaagaacttccacaaaatatttcatggagaggtctgcatttagacggaaacagaaattgcttttcccctcactgttcctgaatgctctatacttgttttaacatttttgctatctttttttattattctgatcatgatatgaccatttaacctcagaattcataattcctgaggggtgttaagaagcagtcccattggtgaggatattatgacttggtgaccattcttaggagtagaaaaccaaggacaattgcttctgtattcagtatccacttcttaatgtggctttatatgtaaaaataataatgcagtggttgtttctgtcaggaaaataaatcttacagaacaactggtggaattgaagctgctgcgctagacttggatattttgggtagtgaagaagcaatggcaatcttgagtctattattgtataatttagtaaaagaaaaaaataatcgttggtggtcctactaagagaatgcagcttttttgagttgtcacagaggctgtgtgtgccctacactgaccagggtttgtaaaaccctttcattctggtacaagagtcgggggtataacttttatacttgaatctacctaccaagtttacatttctcaattcctttttgtaaggtgctatttctgtatttaaataactttcttttaacgtaaagctgctttctgcttatcttattgcactgctagttgtatgtaggtattaattttattgctgcttactgcttttgttttcttattatttagctctgctctttttcctaatggctatattatctatagctatttacttgtaactgtactacatgtaaactgattttttgttctgattttttttctaatatttttaggaaaatattaagctttataaaatagcaataaaaaataattcatttaagaag

SEQ ID NO: 9170 - DNA, 5297 bp, Homo sapiens
  source 1..5297: mol_type = unassigned DNA
gatccaggctggagttgcgctcggccggtctgagcgctggcgctgcccggacgccgcggggtccccgccagcccagggcactcggcgcggggatctgcgcgcctcgctctcccttcccgatgccgccgcccggctgctgatcgccgcaccaccttccctcatcggcttgggtccgtggaggtccctgcagaggcaggaagcctccttaggaaagcagggatggaggtaaattgtttaacactaaaagacctgatcagccccaggcagcccagactagattttgcagttgaagatggggaaaatgcacaaaaggaaaatatatttgttgatcgatcaaggatggccccgaagactccaataaaaaatgaaccaattgatttatcgaagcaaaaaaaatttactccagaaagaaatcccattactccagttaagtttgttgacagacagcaagcggaaccatggacacccacagctaacctgaagatgctcattagtgctgccagcccagatataagggaccgggagaagaaaaagggactattccgacccattgaaaacaaggacgatgcatttacagattctctacagcttgatgttgttggggacagtgctgtggacgaatttgaaaagcaaaggccaagcagaaaacagaaaagtttaggactcctgtgccagaagtttctagctcgctatccaagttatcccttgtcaactgagaaaactaccatctccctagatgaagttgctgtcagtcttggtgtggaaaggagacgcatctatgacattgtaaatgtgctggagtcgctgcatctggtcagccgggtggctaagaatcagtatggctggcatggacggcacagcctgccaaaaaccctgaggaacctccagagactaggagaggagcagaaatatgaagagcaaatggcctacctccaacagaaagagctggacctgatagattataaatttggagaacgtaaaaaagatggtgatccagattcccaggaacaacagttactggatttctctgaacccgactgtccctcttcatctgcaaacagtagaaaagacaagtctctgagaattatgagccagaagtttgtcatgctgttcctcgtctccaaaaccaagattgtcactctggatgtggctgccaaaatactgatagaagaaagccaagatgccccagaccatagtaaatttaaaacaaaggtacgacgcctctatgacatagccaatgttctgaccagcttggctctgataaagaaagtgcatgtaacagaagagcgaggtcgtaaaccagccttcaagtggatcgggcctgtggacttcagctcaagtgatgaagaactggtggatgtttctgcatctgtcttaccagaattgaaaagagaaacatatggccagattcaagtctgtgcaaaacagaagctggctcgccatggttcttttaacacagttcaggcttctgagaggatccagaggaaagtgaactcagaaccgagcagcccgtacagagaagaacaaggatcaggtggctactctttagaaattggaagcctggcagctgtctatagacagaaaatagaagacaattcacagggaaaagcctttgccagtaagagagtggtgcctccatcaagcagcttggaccctgttgctcctttccctgtcctctctgttgacccagaatattgtgttaatcctttagcccacccagtattttctgttgctcagacggacctgcaggcattctccatgcagaacggtctgaatggacaagtggatgtctcacttgcttctgcagcctctgctgtggagagcctgaagccagcactccttgctggccagcctctagtgtatgtgccctctgcctcactgttcatgctgtatggaagtctgcaggagggaccagcgtcagggtcagggtcagagagggatgacagaagctcagaagccccagccacagtagagctgtcatctgcaccctcagctcagaagcgcctctgtgaggagaggaaacctcaggaggaggatgagccagccactaaaaggcaaagtagggaatatgaagacggcccgctgtcgcttgtcatgcccaagaaaccctcagattccacagaccttgcctctcccaagactatgggtaacagggcatctatacccctcaaagacattcatgtgaatggccaactccctgctgcagaagagatttcaggaaaggcaacagcaaactctcttgtttcttctgagtggggaaatccttcaagaaatacagatgttgaaaagccttcaaaagaaaatgaaagcaccaaagagccttctttgctacaatatctttgtgtgcagtctcctgcagtcaccagttccagtgacccccaagagcatccaacgcacacatcgtgagacgtttttcaagacacccggcagccttggagaccctgtcctgaagagaagagaaaggaaccagtcacgaaacaccagctcggcccagaggagactagaaatccccagcggcggcgctgactaacctgccgctttgccaggtgggggtgggatcaaacgccctgagagtcccggatgtccgaggcgggatgcaaaccatcccgtcctgagcacgggtccttcctctctctttcatccacacttctgttaacttcccaccaccatcaatcatctgatttcctgaaagtaattaattgtgcatttaataccagttagagttccgactctgcatggtgtcacagtgaaagcgccgactgacttatggttttgattcaagaatcgtcttattctggaagtagatctgaataggctaccggagccttgtttttctaaaggggggcgctgtctagcacttaactagggtaagcattcttaacatgtatttccacttgccctgagtaaatctgtggtgagagaagcttcctttctgcagtttaaaaaagctactgcttccttaggcttcatcaggaagccaccttcagttgtgaatcctatggtgttatttattttgttcctgaaatgggatttagtgcaaaaagtttacaactacagtctttaacacatttttttcagggtatgacgacttgaatgtttatacttttattctataatttgccctgcacttattttacaacctagtaataatgtggataaatgtatctacatgacacatgtcaagaccaaaataactgtgaatgacacaccttgctgtaaatgaactgtgctaaccctgactgtgggcttgagaacaaagatgaactctagaactctagcagcctaactgctgcttctcaaataactgtgtgaacagtgagatattactgtttgtttctaaaaatcctactgtgcccagtttccttcactacatgccctgcattttttatttaaatatttagctgtagcgccatcagatatggatgccttctaacaattgctgtttgtaaaataaatcaggatggtagaaagtgattatatggaaaattggaacctggatgagaccttttcgttgaattctgaagagtaatgatgtgaaaattgatacagggcaagagatgattcttttgtttttcttctacttcatgtccagaagagtaagagggaaaatggacatatgtttcatatccaagggtattcaaactgtagttagttggtacctctgaaaaatgagaatggtgagcgcacgggttggttgttctagcatgaatacaattctggaaactgttatgcaatttcccttttttaacccacattactttaggggtgcattaagtcgccaaactatactagttctttgtattcctagacttgctgatatttacctctctcttgtctcttcagagtaaatggttcccttctttccttcctactttccttcattctctcttccttccctccttcctacttcttttcttccttcctcttcctctcttaaaactatcttagatgtagaatcctggtgtagggttttattttatttttattttttgacccaataaaatgttatatgaaagaatgaaaatattaatttaagagactctgggagtctgaataaagtagctttatattaactacaggataatattagccttattacccccacaagattttttaaaacttgaggtaggtagctacattaaataaatttgctacttatataaaaatttttatcaacactaaacttttaaagtttacaagttttttttttcttttttacagtcttctatagagttaggttaaaaatgtggttctaaccatcaacaattgcatggttaaatgaccctgaactaaaactgatgggttccctatcaaaacaaataaaaatatacctttttcaggtttcaatctgtgcagggtatatgcatgttaattctaccatgcttaagaacttccacaaaatatttcatggagaggtctgcatttagacggaaacagaaattgcttttcccctcactgttcctgaatgctctatacttgttttaacatttttgctatctttttttattattctgatcatgatatgaccatttaacctcagaattcataattcctgaggggtgttaagaagcagtcccattggtgaggatattatgacttggtgaccattcttaggagtagaaaaccaaggacaattgcttctgtattcagtatccacttcttaatgtggctttatatgtaaaaataataatgcagtggttgtttctgtcaggaaaataaatcttacagaacaactggtggaattgaagctgctgcgctagacttggatattttgggtagtgaagaagcaatggcaatcttgagtctattattgtataatttagtaaaagaaaaaaataatcgttggtggtcctactaagagaatgcagcttttttgagttgtcacagaggctgtgtgtgccctacactgaccagggtttgtaaaaccctttcattctggtacaagagtcgggggtataacttttatacttgaatctacctaccaagtttacatttctcaattcctttttgtaaggtgctatttctgtatttaaataactttcttttaacgtaaagctgctttctgcttatcttattgcactgctagttgtatgtaggtattaattttattgctgcttactgcttttgttttcttattatttagctctgctctttttcctaatggctatattatctatagctatttacttgtaactgtactacatgtaaactgattttttgttctgattttttttctaatatttttaggaaaatattaagctttataaaatagcaataaaaaataattcatttaagaa

SEQ ID NO: 9171 - DNA, 570 bp, Homo sapiens
  source 1..570: mol_type = unassigned DNA
gttgcgctcggccggtctgagcgctggcgctgcccggacgccgcggggtccccgccagcccagggcactcggcgcggggatctgcgcgcctcgctctcccttcccgatgccgccgcccggctgctgatcgccgcaccaccttccctcatcggcttgggtccgtggaggtccctgcagaggcaggaagcctccttaggaaagcagggtgtaattgtgcattacagatggaggtaaattgtttaacactaaaagacctgatcagccccaggcagcccagactagattttgcagttgaagatggggaaaatgcacaaaaggaaaatatatttgttgatcgatcaaggatggccccgaagactccaataaaaaatgaaccaattgatttatcgaagcaaaaaaaatttactccagaaagaaatcccattactccagttaagtttgttgacagacagcaagcggaaccatggacacccacagctaacctgaagatgctcattagtgctgccagcccagatataagggaccgggagaagaaaaagggactattccgacccattgaaaacaaggacg

SEQ ID NO: 9172 - DNA, 3240 bp, Homo sapiens
  source 1..3240: mol_type = unassigned DNA
aagtgcactgagcgagtggcggccgggggacagtacctgcttgccttattgggcaaatacagccttccaaggtggagtctaacgccgtggtgtgaactggccacccgaacagggagtaaatagtgctttgtatctttaaggaagcccttttttaaatttaaaaaaaaagtcttaattataagactctttaaatgcccaactgcatacttggagctttgggactgaatttggaactttcctgtcaagcgacctcccacgactttactgctgagcctgtgcacgtgtgtgtaaggggagaaatccaggcatctagatgcagacttgtacccagttacttggggtcgcgtgcgctcagctgggacctgggctcgtgcgcttagtccggagccctgatctgcgaacaggatattaaaacttttagtacaattgattggactacttgaaccatcgggatttggggaggaactccagatttttcatttttaaactctaaatgtatgaggaatttacagaatggagaacgaaaaggaaaatctcttttgtgagccacataaaaggggactaatgaaaacacctctgaaagaatccaccacagcaaatatcgtgttggcagagatccagcctgactttggccctttaaccacacctaccaagcccaaggaaggctctcagggagagccgtggacaccgacagccaacctgaaaatgctcatcagtgctgtgagccctgagatccgcaacagagatcagaaaaggggtttgtttgacaacagaagtggattacctgaggccaaagactgtatacacgaacacttatctggagatgaatttgagaaatcccaaccaagtcgaaaagagaaaagtttaggattattgtgtcataagttcttagcacgatatcctaattatcccaaccctgctgtgaataatgacatctgccttgacgaagtggcagaggaacttaatgttgaacgtcgacgcatttacgatatcgtgaacgtcctagagagtttacatatggtgagccgcctcgccaaaaacaggtacacttggcacgggcgacacaatctcaacaaaacccttggcaccttgaagagcatcggggaggagaataagtacgccgagcagattatgatgatcaaaaagaaagaatatgagcaagagtttgactttattaagagttacagtatagaggatcatatcatcaaatcaaacactggcccaaatggacacccagacatgtgttttgtggaactccctggagtggaatttcgggcagcttctgtaaacagccgcaaagacaagtctttaagggtaatgagccagaaatttgtgatgctgtttttggtgtcaacgcctcagatagtaagcctagaagttgctgccaagattttaattggggaggaccatgtggaagatttggataaaagcaagtttaaaacaaaaattaggaggttgtatgatatagctaatgttctgagtagcctggatcttatcaagaaagttcatgttacagaggaaagaggccgaaaaccagctttcaaatggaccggcccagaaatcagtccaaataccagtggctccagcccagtcattcattttactccctctgatttggaggtgagacggtcttcaaaagagaactgtgccaaaaacctcttttccacacgtgggaaaccaaactttactcgacacccatctcttatcaaattggtaaagagtatagaaagtgatcggagaaagataaattctgcgcccagtagccctatcaagaccaacaaagctgagagttctcagaattctgcacccttcccaagtaaaatggctcagctcgcagctatttgtaaaatgcagttagaagagcaatcaagtgaatccagacagaaagtgaaagtacagctggcaagatctggaccctgcaaaccagtagcccctctggaccccccagtgaatgctgagatggagctgacagcaccgtccctcatccagcccctgggaatggttcccctgatccccagccccttgtcatcagcagtgcccctgatcctacctcaggccccttcaggcccatcctatgccatctacctgcagcccactcaagcccaccaaagtgtgacgccaccccaaggcctgagcccaacggtgtgcaccacccactcttctaaagctactggctcaaaagactccacagatgccaccactgagaaggcagccaatgatacctcaaaggccagtgcctctaccaggcctggaagcttgctgccagcaccagagaggcaaggggcaaagagccgaaccagggagccagctggagaaagaggctcaaagagggcaagcatgctcgaggacagtggttccaaaaagaaatttaaagaggacctaaaaggacttgaaaatgtctccgcaaccttgttcccatcaggatacctaatccctctcacgcagtgctcatccctgggggcagagtccattttgtctggtaaagaaaactcaagtgctctttccccaaaccacaggatttacagctccccaattgcaggtgttattccagtgacatcatctgaactcactgctgttaattttccctcttttcatgtaacaccgttgaagctaatggtctcaccaacttccgtggcagccgtacctgtcgggaacagcccggctctcgcttcaagccaccctgttcccatccagaacccaagctcagccattgtaaacttcaccctgcagcacctgggactcatctcacccaatgtgcagttgtctgccagccctgggtctggaatcgttcctgtgtctccaagaatagagtctgttaatgtcgcaccagaaaatgcaggcactcagcaaggaagggccaccaactatgactcaccagtcccaggccagagccagccaaatggacaatcagttgctgtgacaggggcacaacagcctgttcctgtgacacccaaagggtcacaattagtggccgaaagtttcttccgtaccccaggtggacccaccaagccaaccagctcatcctgcatggattttgagggtgctaataaaacctccttaggaactctctttgtcccacagcgaaaactggaagtctcaacagaggatgtccattaatcaacagatgttggcttagtttaattttctaaagagttgtttaatagagaaaatgtacacagactgatttggagaacacattctctgaaaatactgtaaatacgttggggatttgttcaatgt

SEQ ID NO: 9173 - DNA, 3191 bp, Homo sapiens
  source 1..3191: mol_type = unassigned DNA
atgcaaaaaaaaaaagaaaatctcttttgtgagccacataaaaggggactaatgaaaacacctctgaaagaatccaccacagcaaatatcgtgttggcagagatccagcctgactttggccctttaaccacacctaccaagcccaaggaaggctctcagggagagccgtggacaccgacagccaacctgaaaatgctcatcagtgctgtgagccctgagatccgcaacagagatcagaaaaggggtttgtttgacaacagaagtggattacctgaggccaaagactgtatacacgaacacttatctggagatgaatttgagaaatcccaaccaagtcgaaaagagaaaagtttaggattattgtgtcataagttcttagcacgatatcctaattatcccaaccctgctgtgaataatgacatctgccttgacgaagtggcagaggaacttaatgttgaacgtcgacgcatttacgatatcgtgaacgtcctagagagtttacatatggtgagccgcctcgccaaaaacaggtacacttggcacgggcgacacaatctcaacaaaacccttggcaccttgaagagcatcggggaggagaataagtacgccgagcagattatgatgatcaaaaagaaagaatatgagcaagagtttgactttattaagagttacagtatagaggatcatatcatcaaatcaaacactggcccaaatggacacccagacatgtgttttgtggaactccctggagtggaatttcgggcagcttctgtaaacagccgcaaagacaagtctttaagggtaatgagccagaaatttgtgatgctgtttttggtgtcaacgcctcagatagtaagcctagaagttgctgccaagattttaattggggaggaccatgtggaagatttggataaaagcaagtttaaaacaaaaattaggaggttgtatgatatagctaatgttctgagtagcctggatcttatcaagaaagttcatgttacagaggaaagaggccgaaaaccagctttcaaatggaccggcccagaaatcagtccaaataccagtggctccagcccagtcattcattttactccctctgatttggaggtgagacggtcttcaaaagagaactgtgccaaaaacctcttttccacacgtgggaaaccaaactttactcgacacccatctcttatcaaattggtaaagagtatagaaagtgatcggagaaagataaattctgcgcccagtagccctatcaagaccaacaaagctgagagttctcagaattctgcacccttcccaagtaaaatggctcagctcgcagctatttgtaaaatgcagttagaagagcaatcaagtgaatccagacagaaagtgaaagtacagctggcaagatctggaccctgcaaaccagtagcccctctggaccccccagtgaatgctgagatggagctgacagcaccgtccctcatccagcccctgggaatggttcccctgatccccagccccttgtcatcagcagtgcccctgatcctacctcaggccccttcaggcccatcctatgccatctacctgcagcccactcaagcccaccaaagtgtgacgccaccccaaggcctgagcccaacggtgtgcaccacccactcttctaaagctactggctcaaaagactccacagatgccaccactgagaaggcagccaatgatacctcaaaggccagtgcctctaccaggcctggaagcttgctgccagcaccagagaggcaaggggcaaagagccgaaccagggagccagctggagaaagaggctcaaagagggcaagcatgctcgaggacagtggttccaaaaagaaatttaaagaggacctaaaaggacttgaaaatgtctccgcaaccttgttcccatcaggatacctaatccctctcacgcagtgctcatccctgggggcagagtccattttgtctggtaaagaaaactcaagtgctctttccccaaaccacaggatttacagctccccaattgcaggtgttattccagtgacatcatctgaactcactgctgttaattttccctcttttcatgtaacaccgttgaagctaatggtctcaccaacttccgtggcagccgtacctgtcgggaacagcccggctctcgcttcaagccaccctgttcccatccagaacccaagctcagccattgtaaacttcaccctgcagcacctgggactcatctcacccaatgtgcagttgtctgccagccctgggtctggaatcgttcctgtgtctccaagaatagagtctgttaatgtcgcaccagaaaatgcaggcactcagcaaggaagggccaccaactatgactcaccagtcccaggccagagccagccaaatggacaatcagttgctgtgacaggggcacaacagcctgttcctgtgacacccaaagggtcacaattagtggccgaaagtttcttccgtaccccaggtggacccaccaagccaaccagctcatcctgcatggattttgagggtgctaataaaacctccttaggaactctctttgtcccacagcgaaaactggaagtctcaacagaggatgtccattaatcaacagatgttggcttagtttaattttctaaagagttgtttaatagagaaaatgtacacagactgatttggagaacacattctctgaaaatactgtaaatacgttggggatttgttcaatgtgaaatcagatagttgttttcatacatatatatatatacacacacacacacacacacacacacacatatatttgtataaagctaagtttagctttcaatcctacaaaataaaagtaaaatgttgaactctaagatatattaacttctagggggaaaaatccattattttagctatgcctatactattatgcaaagtaactgtattaaagtttacttccctctaagcaaatatgcttgacatgcctaacacagcattcccttaaacattttgcacaaagaaaatgctgtgtgatgtataatgttgtatttttaaataggggtatagctatattttttgtaatttctttaatctgttgttgcagtgtatctttttgtaaagtttgcaacaatcctcaatcaagtctatggaaaaattatttataaaatgtatttttaatcataagttgttcaaattaaaacttttct

SEQ ID NO: 9174 - DNA, 3432 bp, Homo sapiens
  source 1..3432: mol_type = unassigned DNA
aaatcgggggcttggctgctcctggacggtcacgctccctctgcccgccagccggcccgccagtcccggtcccggcgtctctctccggcacccacctcggcgctgcggaaagactgactgccaggatattaaaacttttagtacaattgattggactacttgaaccatcgggatttggggaggaactccagatttttcatttttaaactctaaatgtatgaggaatttacagaatggagaacgaaaaggaaaatctcttttgtgagccacataaaaggggactaatgaaaacacctctgaaagaatccaccacagcaaatatcgtgttggcagagatccagcctgactttggccctttaaccacacctaccaagcccaaggaaggctctcagggagagccgtggacaccgacagccaacctgaaaatgctcatcagtgctgtgagccctgagatccgcaacagagatcagaaaaggggtttgtttgacaacagaagtggattacctgaggccaaagactgtatacacgaacacttatctggagatgaatttgagaaatcccaaccaagtcgaaaagagaaaagtttaggattattgtgtcataagttcttagcacgatatcctaattatcccaaccctgctgtgaataatgacatctgccttgacgaagtggcagaggaacttaatgttgaacgtcgacgcatttacgatatcgtgaacgtcctagagagtttacatatggtgagccgcctcgccaaaaacaggtacacttggcacgggcgacacaatctcaacaaaacccttggcaccttgaagagcatcggggaggagaataagtacgccgagcagattatgatgatcaaaaagaaagaatatgagcaagagtttgactttattaagagttacagtatagaggatcatatcatcaaatcaaacactggcccaaatggacacccagacatgtgttttgtggaactccctggagtggaatttcgggcagcttctgtaaacagccgcaaagacaagtctttaagggtaatgagccagaaatttgtgatgctgtttttggtgtcaacgcctcagatagtaagcctagaagttgctgccaagattttaattggggaggaccatgtggaagatttggataaaagcaagtttaaaacaaaaattaggaggttgtatgatatagctaatgttctgagtagcctggatcttatcaagaaagttcatgttacagaggaaagaggccgaaaaccagctttcaaatggaccggcccagaaatcagtccaaataccagtggctccagcccagtcattcattttactccctctgatttggaggtgagacggtcttcaaaagagaactgtgccaaaaacctcttttccacacgtgggaaaccaaactttactcgacacccatctcttatcaaattggtaaagagtatagaaagtgatcggagaaagataaattctgcgcccagtagccctatcaagaccaacaaagctgagagttctcagaattctgcacccttcccaagtaaaatggctcagctcgcagctatttgtaaaatgcagttagaagagcaatcaagtgaatccagacagaaagtgaaagtacagctggcaagatctggaccctgcaaaccagtagcccctctggaccccccagtgaatgctgagatggagctgacagcaccgtccctcatccagcccctgggaatggttcccctgatccccagccccttgtcatcagcagtgcccctgatcctacctcaggccccttcaggcccatcctatgccatctacctgcagcccactcaagcccaccaaagtgtgacgccaccccaaggcctgagcccaacggtgtgcaccacccactcttctaaagctactggctcaaaagactccacagatgccaccactgagaaggcagccaatgatacctcaaaggccagtgcctctaccaggcctggaagcttgctgccagcaccagagaggcaaggggcaaagagccgaaccagggagccagctggagaaagaggctcaaagagggcaagcatgctcgaggacagtggttccaaaaagaaatttaaagaggacctaaaaggacttgaaaatgtctccgcaaccttgttcccatcaggatacctaatccctctcacgcagtgctcatccctgggggcagagtccattttgtctggtaaagaaaactcaagtgctctttccccaaaccacaggatttacagctccccaattgcaggtgttattccagtgacatcatctgaactcactgctgttaattttccctcttttcatgtaacaccgttgaagctaatggtctcaccaacttccgtggcagccgtacctgtcgggaacagcccggctctcgcttcaagccaccctgttcccatccagaacccaagctcagccattgtaaacttcaccctgcagcacctgggactcatctcacccaatgtgcagttgtctgccagccctgggtctggaatcgttcctgtgtctccaagaatagagtctgttaatgtcgcaccagaaaatgcaggcactcagcaaggaagggccaccaactatgactcaccagtcccaggccagagccagccaaatggacaatcagttgctgtgacaggggcacaacagcctgttcctgtgacacccaaagggtcacaattagtggccgaaagtttcttccgtaccccaggtggacccaccaagccaaccagctcatcctgcatggattttgagggtgctaataaaacctccttaggaactctctttgtcccacagcgaaaactggaagtctcaacagaggatgtccattaatcaacagatgttggcttagtttaattttctaaagagttgtttaatagagaaaatgtacacagactgatttggagaacacattctctgaaaatactgtaaatacgttggggatttgttcaatgtgaaatcagatagttgttttcatacatatatatatatacacacacacacacacacacacacacacatatatttgtataaagctaagtttagctttcaatcctacaaaataaaagtaaaatgttgaactctaagatatattaacttctagggggaaaaatccattattttagctatgcctatactattatgcaaagtaactgtattaaagtttacttccctctaagcaaatatgcttgacatgcctaacacagcattcccttaaacattttgcacaaagaaaatgctgtgtgatgtataatgttgtatttttaaataggggtatagctatattttttgtaatttctttaatctgttgttgcagtgtatctttttgtaaagtttgcaacaatcctcaatcaagtctatggaaaaattatttataaaatgtatttttaatcataagttgttcaaattaaaacttttctaaaatata

SEQ ID NO: 9175 - DNA, 2573 bp, Homo sapiens
  source 1..2573: mol_type = unassigned DNA
atgacgacatggtcgtaaatccgccatcttcctgcggcgcgttgcgacatggagggcgcgatggcagtgcgggtgacggccgctcatacggcagaagcccaggccgaagccgggcgggaagcgggcgagggtgcagttgcggcggtggcggcggccttggcccccagcggcttcctcggcctcccggcgcccttcagcgaggaagatgaggacgatgtgcacagatgcggccgctgccaggcagagttcaccgccttggaggattttgttcagcacaagattcagaaggcctgccagcgggcccctccggaggccctgcctgccacccctgccaccacagcgttgctgggccaggaggtggtgccggcagcaccaggcccagaggagcccatcactgtggcccacatcgtggtggaggcggcctctctggcagcagacatcagccacgcatctgaccttgttggtggtgggcacatcaaagaggtcatcgtggctgctgaggcggagctgggagacggtgagatggccgaggccccgggcagcccccgccagcaggggctggggctcgcaggggagggtgagcaggcccaggtgaagctactggtgaacaaggatggccgctatgtgtgtgcgctgtgccacaagaccttcaagacgggcagcatcctcaaggcccacatggtcactcacagcagccgcaaggaccacgagtgcaagctctgtggggcctccttccgcaccaagggctcactcatccggcaccaccggcggcacacggatgagcgcccctacaagtgctccaagtgtggaaagagcttccgggagtcgggtgcactgacccggcacctcaagtctctcaccccctgcacagagaaaatccgcttcagtgtgagcaaggacgtggttgtcagcaaagaggacgcacgtgcaggttctggagctggagctgccggcttggggacagccacatcatcggtgacaggcgagcctatagagacttcacccgtgattcacctggtgacagatgccaagggcaccgtcatccacgaagtccacgtccagatgcaggagctgtccctgggcatgaaagccctggccccagagccccccgtctcccaggagctcccctgctccagcgagggcagccgtgagaacctgctgcaccaggccatgcagaactccggcatcgtccttgagcgcgctgctggggaggagggtgccctggagccagctcctgctgccgggtccagtccccagcccctggcagtggcagccccgcagctgccggtactggaagtgcagccgctggagacacaggtggccagcgaggcctcagcggtgcccaggacccacccatgtcctcagtgcagtgagaccttcccgacagcagccaccctggaggcccacaagaggggccacaccgggccgaggccgttcgcctgcgcgcagtgtggcaaggccttccccaaggcctacctgctcaagaagcaccaggaggtgcacgtgcgtgagcgccgcttccgctgtggcgactgcgggaagctctacaagaccattgcccatgtgcgtggccaccggcgcgtccactcagacgagcggccctacccttgtcccaagtgtggcaagcgctacaagactaagaacgcacagcaggtgcacttcaggacacacctggaggagaagccgcacgtgtgccagttctgcagccgtggcttccgagagaagggctcactggtgcggcacgtgcgacaccacacaggcgagaagccgttcaagtgctacaagtgcggccgtggcttcgccgagcacggcacgctgaaccggcacctgcgcaccaaagggggctgcctgctggaggtggaggagttgctggtgtctgaggacagccccgcggcagccaccaccgtcctcacggaagacccgcacacagtgttggtggagttctcgtccgtggtagctgacacccaggagtatatcatcgaggccactgcggacgatgcggagaccagtgaggccacggagatcatcgagggcacccagacagaggtggacagccacatcatgaaggtggtgcagcagatcgtgcaccaggctagcgccggccaccagatcatcgtgcagaacgtcaccatggacgaggagacggcgctgggcccagaggcggctgccgccgacaccatcaccatcgccacccccgagagcctgacagagcaggtggccatgacgctggcctcggccatcagcgagggcactgtgcttgccgcccgggcagggacaagtggcactgaacaggccactgtgaccatggtgtcatcagaggacatcgagatcctggagcatgcaggcgagctggtcatcgcctcgccggagggccagctggaggtgcagacggtcatcgtctagcatgaggtctgcggggtcctggccgggcagggacagggcagaggactctgagcgccccacccatgcctgcctggcctggtagagaagatggcacaggatggaggcgccccaagacggacagtgtacataagagtttcttgttgctttacaataaaacatgagaacctgca

SEQ ID NO: 9176 - DNA, 1848 bp, Homo sapiens
  source 1..1848: mol_type = unassigned DNA
atttagagccgggtaggggagcgcagcggccagatacctcagcgctacctggcggaactggatttctctcccgcctgccggcctgcctgccacagccggactccgccactccggtagcctcatggctgcaacctgtgagattagcaacatttttagcaactacttcagtgcgatgtacagctcggaggactccaccctggcctctgttccccctgctgccacctttggggccgatgacttggtactgaccctgagcaacccccagatgtcattggagggtacagagaaggccagctggttgggggaacagccccagttctggtcgaagacgcaggttctggactggatcagctaccaagtggagaagaacaagtacgacgcaagcgccattgacttctcacgatgtgacatggatggcgccaccctctgcaattgtgcccttgaggagctgcgtctggtctttgggcctctgggggaccaactccatgcccagctgcgagacctcacttccagctcttctgatgagctcagttggatcattgagctgctggagaaggatggcatggccttccaggaggccctagacccagggccctttgaccagggcagcccctttgcccaggagctgctggacgacgtctccaccgcagggactggtgcttctcggagctcccactcctcagactccggtggaagtgacgtggacctggatcccactgatggcaagctcttccccagcgatggttttcgtgactgcaagaagggggatcccaagcacgggaagcggaaacgaggccggccccgaaagctgagcaaagagtactgggactgtctcgagggcaagaagagcaagcacgcgcccagaggcacccacctgtgggagttcatccgggacatcctcatccacccggagctcaacgagggcctcatgaagtgggagaatcggcatgaaggcgtcttcaagttcctgcgctccgaggctgtggcccaactatggggccaaaagaaaaagaacagcaacatgacctacgagaagctgagccgggccatgaggtactactacaaacgggagatcctggaacgggtggatggccggcgactcgtctacaagtttggcaaaaactcaagcggctggaaggaggaagaggttctccagagtcggaactgagggttggaactatacccgggaccaaactcacggaccactcgaggcctgcaaaccttcctgggaggacaggcaggccagatggcccctccactggggaatgctcccagctgtgctgtggagagaagctgatgttttggtgtattgtcagccatcgtcctgggactcggagactatggcctcgcctccccaccctcctcttggaattacaagccctggggtttgaagctgactttatagctgcaagtgtatctccttttatctggtgcctcctcaaacccagtctcagacactaaatgcagacaacaccttcctcctgcagacacctggactgagccaaggaggcctggggaggccctaggggagcaccgtgatggagaggacagagcaggggctccagcaccttctttctggactggcgttcacctccctgctcagtgcttgggctccacgggcaggggtcagagcactccctaatttatgtgctatataaatatgtcagatgtacatagagatctattttttctaaaacattcccctccccactcctctcccacagagtgctggactgttccaggccctccagtgggctgatgctgggacccttaggatggggctcccagctcctttctcctgtgaatggaggcagagacctccaataaagtgccttctgggctttttct

SEQ ID NO: 9177 - DNA, 4994 bp, Homo sapiens
  source 1..4994: mol_type = unassigned DNA
gtgctgccgtgtgggcaagctctgtggggagaggggaggccagtgggttgtttttgccatcacagaatactgggaagcccctggcatcctgctccatagctctcttcaccactatcctggaaccttctccccacccccatccccatgcctccaaggcactgacctcaaatccaagtctttctcacttatctcaagctgccagcctgtagggattccttatctcagctccatgtcagcggtgaggaagccccaagaaggcaagggagctgacagccttctcatttttctcgtacatcctcctgttcaccccgccatcccgggagccccagccagatgctcttcagggcagggagcacgtgagcagccctggggctagaagccggttctcccacattcctgggtgagggactgggtggagggtgtgcctgcctcaggctccttgggggaggccccctgaagggctggggaaaatcctactgagccccaggctctcctgcctgcactggcccagtgcgggggcgggggggcggggggatcctggacattaactctctcctaggcacctgggagcttcagagaggaagaaggtaaggtaagaagcagattctctgcgcaggactttcttagtcctcaggctatagagttaaagaaagaagtatctgtagaaggtggagtcaccttttgtttgagtaaccgtttcacccaccctggctgagggtggccaggaactccccaagttgtgcattaatggaggggggtcacacagatcctacatttttttgtttttgtttttttttttttgagacgcagtgattacaggtgtgagccaccggatcctacatttcaaatgcataaaaatctagatatgggctgggcgcagtagctcatgcctgtaatcccagcactttgggaggctgaggcaggcagatcatgaggtcaggagatcgagtccatcctggctaacatggtgaaaccccgtctctactaaaaatacagaaagccgggcatggcagcgggcgcctgtaatcccagctactcggaaagctgaggcaggagaatcgcttgaacccaggagtcagaggttgcagtgagcagagatcacgccactgcactccaacctgggcgacagagcgagactccacctcaaaacaaaataaacaaaatactagatctggaagagatcttagggattattaaattcagacaacctcattttttatagatggggaaacaagcacagactccaagggtctcatccaagatcacacagttgcagatgctggctacaagtctcctgcctcaaccacctgtattaccccattcagggtctcaagaagggtctataagacactatccattgtgtttcgggctgagtccatagagacaaccacagacatgggggactctgcccacagggaaggcaagggctctggccatggagctggatgggaagactctgaagcccgaagacattgaatcctgtgcagggaaagagcgagggttttgtgtacaacacacctgcatacctggatgtgaatctcagctccaccccttcaccaactctgtgtggcctgggcaagccattctaagggaaccctccacactgcaactttcatgtctataaaatgggaataaccatgcattccttacaggacttttttggtgtgaggattaaatgagagaatatgttgaaaagtgcttggtaaatatattaatactatgcattccctcttctttgaatgacgtgacccaggtagtcaggcttctgaccactagagggcagcagaaggtactggaaaactgggccgagtgaaccagagattagatggggtccagagagcagggatgaacttacccgtgtggattctggcaactccggcagggagggctccagcaggcgctgagggaagaactttcaagcagagccgggtctcttcaggagcgactgcagcaaccctgatgcttggatggagtccaggcaggtgatggtagtgaagaccttgccaacagagtgggcgctggagaaggagccctttagtggggaccctggggccacgactaggctggcaggcccagccagcaccaattaatccatgagtattgcccagcattgagcctggagcaccttccagcccctggccagagtcctgggtgttctgggaaaaacccctaaacctagtaactcctctccctactaggcctctttgttgctgaatctctggaatttaggggccagcagctttctgactcaggtcagccaggggttcatgttccctcacttgccctccccctgcctggcccatctctggcctggcccctgggaggaatttcctgggccagagggcagccgaaagcacagatgcccaccccagcaacgttcccgccacctgcccaggccagtgccccgtgcccaaccccagagggtgcgggatgacagactctgacaatcattaaaccagccgggcctgatttcccagcactgcctgctaagatccgggccaagtggcactgaatatgcaaatcacctggggccaggagcccagtctaaaggccaggaaatcccctccatccaatgagacaccagctcaggttactgcaggggacacactataaagccctgagctcagggaggagctccctccaggctctatttagagccgggtaggggagcgcagcggccagatacctcagcgctacctggcggaactggatttctctcccgcctgccggcctgcctgccacagccggactccgccactccggtaggattccccgcctgtcattccctagcccagctcttgggaaactgcagaggggtccagaggatttgcagttctgaacctgcacactccagtctaggatctccgagcaagagcgtaggtgtcctgagggtcaaagaacagagagagattgtctctgggaaggcagaatggccatgacgccgctagtctggctccagggccccagagatctgaggagggaagcccagctggaggctcctgtggtcctgccctggtctgagatcttggagcccttcttgaagagacggtgtccgcagagttgctgatcttcctgcccctgggggctactcttgcccagggttgggcaaagcagagtagctgggagtgtaaggagaggaccctcgtcccctcaccaacctcatcctctctccccctacccacaggtagcctcatggctgcaacctgtgagattagcaacatttttagcaactacttcagtgcgatgtacagctcggaggactccaccctggcctctgttccccctgctgccacctttggggccgatgacttggtactgaccctgagcaacccccagatgtcattggagggtacagagaaggccagctggttgggggaacagccccagttctggtcgaagacgcaggttctggactggatcagctaccaagtggagaagaacaagtacgacgcaagcgccattgacttctcacgatgtgacatggatggcgccaccctctgcaattgtgcccttgaggagctgcgtctggtctttgggcctctgggggaccaactccatgcccagctgcgagacctcacttccagctcttctgatgagctcagttggatcattgagctgctggagaaggatggcatggccttccaggaggccctagacccagggccctttgaccagggcagcccctttgcccaggagctgctggacgacggtcagcaagccagcccctaccaccccggcagctgtggcgcaggagccccctcccctggcagctctgacgtctccaccgcagggactggtgcttctcggagctcccactcctcagactccggtggaagtgacgtggacctggatcccactgatggcaagctcttccccagcgatggttttcgtgactgcaagaagggggatcccaagcacgggaagcggaaacgaggccggccccgaaagctgagcaaagagtactgggactgtctcgagggcaagaagagcaagcacgcgcccagaggcacccacctgtgggagttcatccgggacatcctcatccacccggagctcaacgagggcctcatgaagtgggagaatcggcatgaaggcgtcttcaagttcctgcgctccgaggctgtggcccaactatggggccaaaagaaaaagaacagcaacatgacctacgagaagctgagccgggccatgaggtactactacaaacgggagatcctggaacgggtggatggccggcgactcgtctacaagtttggcaaaaactcaagcggctggaaggaggaagaggttctccagagtcggaactgagggttggaactatacccgggaccaaactcacggaccactcgaggcctgcaaaccttcctgggaggacaggcaggccagatggcccctccactggggaatgctcccagctgtgctgtggagagaagctgatgttttggtgtattgtcagccatcgtcctgggactcggagactatggcctcgcctccccaccctcctcttggaattacaagccctggggtttgaagctgactttatagctgcaagtgtatctccttttatctggtgcctcctcaaacccagtctcagacactaaatgcagacaacaccttcctcctgcagacacctggactgagccaaggaggcctggggaggccctaggggagcaccgtgatggagaggacagagcaggggctccagcaccttctttctggactggcgttcacctccctgctcagtgcttgggctccacgggcaggggtcagagcactccctaatttatgtgctatataaatatgtcagatgtacatagagatctattttttctaaaacattcccctccccactcctctcccacagagtgctggactgttccaggccctccagtgggctgatgctgggacccttaggatggggctcccagctcctttctcctgtgaatggaggcagagacctccaataaagtgccttctgggctttttctaacctt

SEQ ID NO: 9178 - DNA, 2044 bp, Homo sapiens
  source 1..2044: mol_type = unassigned DNA
aggctctatttagagccgggtaggggagcgcagcggccagatacctcagcgctacctggcggaactggatttctctcccgcctgccggcctgcctgccacagccggactccgccactccggtaggattccccgcctgtcattccctagcccagctcttgggaaactgcagaggggtccagaggatttgcagttctgaacctgcacactccagtctaggatctccgagcaagagcgtagcctcatggctgcaacctgtgagattagcaacatttttagcaactacttcagtgcgatgtacagctcggaggactccaccctggcctctgttccccctgctgccacctttggggccgatgacttggtactgaccctgagcaacccccagatgtcattggagggtacagagaaggccagctggttgggggaacagccccagttctggtcgaagacgcaggttctggactggatcagctaccaagtggagaagaacaagtacgacgcaagcgccattgacttctcacgatgtgacatggatggcgccaccctctgcaattgtgcccttgaggagctgcgtctggtctttgggcctctgggggaccaactccatgcccagctgcgagacctcacttccagctcttctgatgagctcagttggatcattgagctgctggagaaggatggcatggccttccaggaggccctagacccagggccctttgaccagggcagcccctttgcccaggagctgctggacgacggtcagcaagccagcccctaccaccccggcagctgtggcgcaggagccccctcccctggcagctctgacgtctccaccgcagggactggtgcttctcggagctcccactcctcagactccggtggaagtgacgtggacctggatcccactgatggcaagctcttccccagcgatggttttcgtgactgcaagaagggggatcccaagcacgggaagcggaaacgaggccggccccgaaagctgagcaaagagtactgggactgtctcgagggcaagaagagcaagcacgcgcccagaggcacccacctgtgggagttcatccgggacatcctcatccacccggagctcaacgagggcctcatgaagtgggagaatcggcatgaaggcgtcttcaagttcctgcgctccgaggctgtggcccaactatggggccaaaagaaaaagaacagcaacatgacctacgagaagctgagccgggccatgaggtactactacaaacgggagatcctggaacgggtggatggccggcgactcgtctacaagtttggcaaaaactcaagcggctggaaggaggaagaggttctccagagtcggaactgagggttggaactatacccgggaccaaactcacggaccactcgaggcctgcaaaccttcctgggaggacaggcaggccagatggcccctccactggggaatgctcccagctgtgctgtggagagaagctgatgttttggtgtattgtcagccatcgtcctgggactcggagactatggcctcgcctccccaccctcctcttggaattacaagccctggggtttgaagctgactttatagctgcaagtgtatctccttttatctggtgcctcctcaaacccagtctcagacactaaatgcagacaacaccttcctcctgcagacacctggactgagccaaggaggcctggggaggccctaggggagcaccgtgatggagaggacagagcaggggctccagcaccttctttctggactggcgttcacctccctgctcagtgcttgggctccacgggcaggggtcagagcactccctaatttatgtgctatataaatatgtcagatgtacatagagatctattttttctaaaacattcccctccccactcctctcccacagagtgctggactgttccaggccctccagtgggctgatgctgggacccttaggatggggctcccagctcctttctcctgtgaatggaggcagagacctccaataaagtgccttctgggctttttctaacctt

SEQ ID NO: 9179 - DNA, 3179 bp, Homo sapiens
  source 1..3179: mol_type = unassigned DNA
atgagacaccagctcaggttactgcaggggacacactataaagccctgagctcagggaggagctccctccaggctctatttagagccgggtaggggagcgcagcggccagatacctcagcgctacctggcggaactggatttctctcccgcctgccggcctgcctgccacagccggactccgccactccggtagcctcatggctgcaacctgtgagattagcaacatttttagcaactacttcagtgcgatgtacagctcggaggactccaccctggcctctgttccccctgctgccacctttggggccgatgacttggtactgaccctgagcaacccccagatgtcattggagggtacagagaaggccagctggttgggggaacagccccagttctggtcgaagacgcaggttctggactggatcagctaccaagtggagaagaacaagtacgacgcaagcgccattgacttctcacgatgtgacatggatggcgccaccctctgcaattgtgcccttgaggagctgcgtctggtctttgggcctctgggggaccaactccatgcccagctgcgagacctcacttccagctcttctgatgagctcagttggatcattgagctgctggagaaggatggcatggccttccaggaggccctagacccagggccctttgaccagggcagcccctttgcccaggagctgctggacgacggtcagcaagccagcccctaccaccccggcagctgtggcgcaggagccccctcccctggcagctctgacgtctccaccgcagggactggtgcttctcggagctcccactcctcagactccggtggaagtgacgtggacctggatcccactgatggcaagctcttccccagcgatggttttcgtgactgcaagaagggggatcccaagcacgggaagcggaaacgaggccggccccgaaagctgagcaaagagtactgggactgtctcgagggcaagaagagcaagcacgcgcccagaggcacccacctgtgggagttcatccgggacatcctcatccacccggagctcaacgagggcctcatgaagtgggagaatcggcatgaaggcgtcttcaagttcctgcgctccgaggctgtggcccaactatggggccaaaagaaaaagaacagcaacatgacctacgagaagctgagccgggccatgaggtactactacaaacgggagatcctggaacgggtggatggccggcgactcgtctacaagtttggcaaaaactcaagcggctggaaggaggaagaggttctccagagtcggaactgagggttggaactatacccgggaccaaactcacggaccactcgaggcctgcaaaccttcctgggaggacaggcaggccagatggcccctccactggggaatgctcccagctgtgctgtggagagaagctgatgttttggtgtattgtcagccatcgtcctgggactcggagactatggcctcgcctccccaccctcctcttggaattacaagccctggggtttgaagctgactttatagctgcaagtgtatctccttttatctggtgcctcctcaaacccagtctcagacactaaatgcagacaacaccttcctcctgcagacacctggactgagccaaggaggcctggggaggccctaggggagcaccgtgatggagaggacagagcaggggctccagcaccttctttctggactggcgttcacctccctgctcagtgcttgggctccacgggcaggggtcagagcactccctaatttatgtgctatataaatatgtcagatgtacatagagatctattttttctaaaacattcccctccccactcctctcccacagagtgctggactgttccaggccctccagtgggctgatgctgggacccttaggatggggctcccagctcctttctcctgtgaatggaggcagagacctccaataaagtgccttctgggctttttctaacctttgtcttagctacctgtgtactgaaatttgggcctttggatcgaatatggtcaagaggttggaggggaggaaaatgaaggtctaccaggctgagggtgagggcaaaggctgacgaagaggggagttacagatttcctgtagcaggtgtgggcttacagacacatggactgggctgggaggcgagcaaaggaagcagctgagactgttggagaacgcttacaagacttcatgcaagcaaggacatgaactcagaacactgaggtcagaagcatcctgctgtcatgacaccgctcgagtgaccttgaccttgaccaagtctgtcctgtttaggactgatttttcctattaggctagggtttggacctgatgttctcaagatgtctagaattgcatggctggccttgtggaatagatggttttgcattccagccaagtgtgctgtaaactgtatatctgtaatatgaatcccagcttttgagtctgacaaaatcagagttaggatcttgtaaaggaaaaaaaaaaaaaaacaaaacaaaatggagatgagtacttgctgagaaagaatgagggaaggagttggcatttgttgaaagtgtagtctttttctcttttttttttaattgcaacttttactttagatttaggaggtcgtgcgcaggtttgttacatgggtatattgtgtgatgctgagcttgggatgcgaatgatcctgtcacccaggtagtgagtatagcacccagtgaaactgtagtctcatgccaggcactgtgctagcccactctggctcatttaatcctctcctaagaagagaggagacacagcgtccccatttgacagatgcagaaagaggttccacaggtgtgccttgattctgtcctaaaaccgtttcccggaagcttttcctggtgtgggcgcttctaacctaatcctcaatcgattccagaactattactctgtttccacagtgatactgtgtctaggttttagggaggacagttcattgatgttacttaagaatgctttccaggtggaaagttccttaagtttgaggcttcaaattccatacagcacattaaaatcccattcatgagtttgaaatactgctctgttgtcttggaaataccaatcagattgttggctgaagtgatgtggataaagaagggatcttagaaaaactaaa

SEQ ID NO: 9180 - DNA, 769 bp, Homo sapiens
  source 1..769: mol_type = unassigned DNA
ggcggaactggatttctctcccgcctgccggcctgcctgccacagccggactccgccactccggtagcctcatggctgcaacctgtgagattagcaacatttttagcaactacttcagtgcgatgtacagctcggaggactccaccctggcctctgttccccctgctgccacctttggggccgatgacttggtactgaccctgagcaacccccagatgtcattggaggagaaggccagctggttgggggaacagccccagttctggtcgaagacgcaggttctggactggatcagctaccaagtggagaagaacaagtacgacgcaagcgccattgacttctcacgatgtgacatggatggcgccaccctctgcaattgtgcccttgaggagctgcgtctggtctttgggcctctgggggaccaactccatgcccagctgcgagacctcacttccagctcttctgatgagctcagttggatcattgagctgctggagaaggatggcatggccttccaggaggccctagacccagggccctttgaccagggcagcccctttgcccaggagctgctggacgacggtcagcaagccagcccctaccaccccggcagctgtggcgcaggagccccctcccctggcagctctgacgtctccaccgcagggactggtgcttctcggagctcccactcctcagactccggtggaagtgacgtggacctggatcccactgatggcaagctcttccccagcgatggttttcgtgactg

SEQ ID NO: 9181 - DNA, 4165 bp, Homo sapiens
  source 1..4165: mol_type = unassigned DNA
ttctcctttcgccggcgccgagttcctggcgccgctcgcccggcccggcttccgaggggagaggacgggctggcggggctggggacccgcgtctcggcccccggagcggggaccacggagacagaccccggcccggcgaccgagctgggcccgtgagccactcggcctcaggtcgctcctgtggttggtccagcccagaatgcagccttgagcctggcttaggccaccacctactccagctctctccaccccctattttactgcagctcagggggtaggctctaggctccaaagtacctgggtattgtcccttcatcaagaaagccccacagctctggagggctctgataatcccgttgtcagctctctgaaaagacagcatggctattaccctacagcccagtgacctgatctttgagttcgcaagcaacgggatggatgatgatatccaccagctggaagacccctctgtgttcccagctgtgatcgtggagcaggtaccctaccctgatttactgcatctgtactcgggactggagttggacgacgttcacaatggcatcataacagacgggaccttgtgcatgacgcaggatcagatcctggaaggcagttttttgctgacagatgacaatgaggccacctcgcacaccatgtcaaccgcggaagtcttactcaatatggagtctcccagcgatatcctggatgagaagcagatcttcagtacctccgaaatgcttccagactcggaccctgcaccagctgtcactctgcccaactacctgtttcctgcctctgagcccgatgccctgaacagggcgggtgacactagtgaccaggaggggcattctctggaggagaaggcctccagagaggaaagtgccaagaagactgggaaatcaaagaagagaatccggaagaccaagggcaaccgaagtacctcacctgtcactgaccccagcatccccattaggaagaaatcaaaggatggcaaaggcagcaccatctatctgtgggagttcctcctggctcttctgcaagacagaaacacctgtcccaagtacatcaagtggacccagcgagagaaaggcatcttcaaactggtggactccaaagctgtgtccaagctgtgggggaagcagaaaaacaagcctgacatgaactatgagacaatggggcgggcactaagatactactaccaaagaggcatactggccaaagtggaagggcagaggctggtgtaccagtttaaggagatgcccaaggacctggtggtcattgaagatgaggatgagagcagcgaagccacagcagccccacctcaggcctccacggcctctgtggcctctgccagtaccacccggcgaaccagctccagggtctcatccagatctgccccccagggcaagggcagctcttcttgggagaagccaaaaattcagcatgtcggtctccagccatctgcgagtctggaattgggaccgtcgctagacgaggagatccccactacctccaccatgctcgtctctccagcagagggccaggtcaagctcaccaaagctgtgagtgcatcttcagtgcccagcaacatccacctaggagtggcccccgtggggtcgggctcggccctgaccctgcagacgatcccactgaccacggtgctgaccaatgggcctcctgccagtactactgctcccactcagctcgttctccagagtgttccagcggcctctactttcaaggacaccttcactttgcaggcctctttccccctgaacgccagtttccaagacagccaggtggcagccccaggggctccactgattctcagtggcctcccccaacttctggctggggccaaccgtccgaccaacccggcgccacccacggtcacaggggctggaccagcagggcccagctctcagccccctgggactgtcattgctgccttcatcaggacttctggcactacagcagcccctagggtcaaggaggggccactgaggtcctcctcctatgttcagggtatggtgacgggggcccccatggaggggctgctggttcctgaagagaccctgagggagctcctgagagatcaggctcatcttcagccacttccaacccaggtggtttccaggggttcccacaatccgagccttctgggcaaccagactttgtctcctcccagccgccccactgttgggctgaccccagtggctgaacttgagctctcctcaggctcagggtccctgctgatggctgagcctagtgtgaccacatctgggagccttctgacaagatcccccaccccagcccctttctccccattcaaccctacttccctcattaagatggagccccatgacatataagcaaaggggtcagggcaagtgtgacccaccaggcaaaattgagcagcattttcatagggaccgacttcagtagcacacctgcccctgcatttcagtgggatgtcaatacacttgaccccaagtcccccggccctgcctggtgtcactgtggccaaacagtgcccagcttaagcatccctggcatcagactatggccttcaagagcactagggcatatgcttttggcagcataacgggctgacttggtgatggagggaaaaagccttgagccaggcagaagtttgtggccagggtttgtgcagcagctttgtgagaagagcccttctacctggctctatctcactggctgcattccctacacagggaatttactaccctatatgtgaatatccctgtatgtacttgtgtgtacttgttggtctgtatcttagtttctttggggaggacagggctgtagctgtgaggtcttgtctccaagggtgtgtgtatgtctccgtggatcagccacagggatagggattttgtttttaagggaaagcattctctaattccctttgttcatgccgagattcagttgctctgagactatggggtacaagtttgatcctccgaatctggagatgttgtagagctggaacgagtgcagagtaggaacgctttgatgcgcatgcacattggggaagatgcgctcctcagggacacaaaggccgagtggggtaaaaccacgaagggagggaagggaagtcagctctgggagcagccctcactggctggaccaaggtactcttcctggagtttgccgtgttagcaaccacagtcaccttgcagtcaggctggaatcttgggccaccccaaagtgctttgctgaaggatttagacggggatgaagtgccctccagcctcagagctagccacaaagcccccagagctgaattcattgagtatttgtgcctagggcttgggctgtttgtgtgataccggccccccgccagacaatagcctttgctgacaccccagcctacttccccgatcctgggctccctcttgattactttttgacattttccagctgtcaggcatcactgcggctagtccggcagcgacctagatggggtccacccccattcctgctcaagcatgggcacctaccacatggtttctgctgctcagcctgcctgcaactcacctcgaaggcggaccagcctgcctctgtgatgactgcagcagacctccttgggtgtaccaatgcccctcatctcccactttcacacctaaccctgactccttcaccaagaagacgggagtcggcagccaggagttcccgtggcacctctctctcttcgtggctccctgcttcccccttccctctttccgaggaagggtcaacctattctctctcaaagccaacccctaggccaattgcctggatctcctcccctctcccttctttaaacgagcttgcctccctcctgccaagtttgagggcaaggctaagaaatgtcagccacggaaacaactctattatctggtgactttgggtaatgtgaatcagtgcctgaggacctttgctgtgtccttggtacagaaccatccacttgacctaactacctcccctggccgcgctctcgctcttctcttctttgttaagccaacaactatcaccctctcctactcttcttctccctgccccctggagggcactgtgtttggttgtgcaaatgtatttactatgcgtgtttccagcagttggcattaaagtgcctttttctaataaaatcagtttattatgacag

SEQ ID NO: 9182 - DNA, 4145 bp, Homo sapiens
  source 1..4145: mol_type = unassigned DNA
ggtatttgcatctctccctccaacttgccattggcggcgcgaagtgtgggagagccctgcgcctcgcccgcccggaccagcctgccccggcgccgaggtcgctcctgtggttggtccagcccagaatgcagccttgagcctggcttaggccaccacctactccagctctctccaccccctattttactgcagctcagggggtaggctctaggctccaaagtacctgggtattgtcccttcatcaagaaagccccacagctctggagggctctgataatcccgttgtcagctctctgaaaagacagcatggctattaccctacagcccagtgacctgatctttgagttcgcaagcaacgggatggatgatgatatccaccagctggaagacccctctgtgttcccagctgtgatcgtggagcaggtaccctaccctgatttactgcatctgtactcgggactggagttggacgacgttcacaatggcatcataacagacgggaccttgtgcatgacgcaggatcagatcctggaaggcagttttttgctgacagatgacaatgaggccacctcgcacaccatgtcaaccgcggaagtcttactcaatatggagtctcccagcgatatcctggatgagaagcagatcttcagtacctccgaaatgcttccagactcggaccctgcaccagctgtcactctgcccaactacctgtttcctgcctctgagcccgatgccctgaacagggcgggtgacactagtgaccaggaggggcattctctggaggagaaggcctccagagaggaaagtgccaagaagactgggaaatcaaagaagagaatccggaagaccaagggcaaccgaagtacctcacctgtcactgaccccagcatccccattaggaagaaatcaaaggatggcaaaggcagcaccatctatctgtgggagttcctcctggctcttctgcaagacagaaacacctgtcccaagtacatcaagtggacccagcgagagaaaggcatcttcaaactggtggactccaaagctgtgtccaagctgtgggggaagcagaaaaacaagcctgacatgaactatgagacaatggggcgggcactaagatactactaccaaagaggcatactggccaaagtggaagggcagaggctggtgtaccagtttaaggagatgcccaaggacctggtggtcattgaagatgaggatgagagcagcgaagccacagcagccccacctcaggcctccacggcctctgtggcctctgccagtaccacccggcgaaccagctccagggtctcatccagatctgccccccagggcaagggcagctcttcttgggagaagccaaaaattcagcatgtcggtctccagccatctgcgagtctggaattgggaccgtcgctagacgaggagatccccactacctccaccatgctcgtctctccagcagagggccaggtcaagctcaccaaagctgtgagtgcatcttcagtgcccagcaacatccacctaggagtggcccccgtggggtcgggctcggccctgaccctgcagacgatcccactgaccacggtgctgaccaatgggcctcctgccagtactactgctcccactcagctcgttctccagagtgttccagcggcctctactttcaaggacaccttcactttgcaggcctctttccccctgaacgccagtttccaagacagccaggtggcagccccaggggctccactgattctcagtggcctcccccaacttctggctggggccaaccgtccgaccaacccggcgccacccacggtcacaggggctggaccagcagggcccagctctcagccccctgggactgtcattgctgccttcatcaggacttctggcactacagcagcccctagggtcaaggaggggccactgaggtcctcctcctatgttcagggtatggtgacgggggcccccatggaggggctgctggttcctgaagagaccctgagggagctcctgagagatcaggctcatcttcagccacttccaacccaggtggtttccaggggttcccacaatccgagccttctgggcaaccagactttgtctcctcccagccgccccactgttgggctgaccccagtggctgaacttgagctctcctcaggctcagggtccctgctgatggctgagcctagtgtgaccacatctgggagccttctgacaagatcccccaccccagcccctttctccccattcaaccctacttccctcattaagatggagccccatgacatataagcaaaggggtcagggcaagtgtgacccaccaggcaaaattgagcagcattttcatagggaccgacttcagtagcacacctgcccctgcatttcagtgggatgtcaatacacttgaccccaagtcccccggccctgcctggtgtcactgtggccaaacagtgcccagcttaagcatccctggcatcagactatggccttcaagagcactagggcatatgcttttggcagcataacgggctgacttggtgatggagggaaaaagccttgagccaggcagaagtttgtggccagggtttgtgcagcagctttgtgagaagagcccttctacctggctctatctcactggctgcattccctacacagggaatttactaccctatatgtgaatatccctgtatgtacttgtgtgtacttgttggtctgtatcttagtttctttggggaggacagggctgtagctgtgaggtcttgtctccaagggtgtgtgtatgtctccgtggatcagccacagggatagggattttgtttttaagggaaagcattctctaattccctttgttcatgccgagattcagttgctctgagactatggggtacaagtttgatcctccgaatctggagatgttgtagagctggaacgagtgcagagtaggaacgctttgatgcgcatgcacattggggaagatgcgctcctcagggacacaaaggccgagtggggtaaaaccacgaagggagggaagggaagtcagctctgggagcagccctcactggctggaccaaggtactcttcctggagtttgccgtgttagcaaccacagtcaccttgcagtcaggctggaatcttgggccaccccaaagtgctttgctgaaggatttagacggggatgaagtgccctccagcctcagagctagccacaaagcccccagagctgaattcattgagtatttgtgcctagggcttgggctgtttgtgtgataccggccccccgccagacaatagcctttgctgacaccccagcctacttccccgatcctgggctccctcttgattactttttgacattttccagctgtcaggcatcactgcggctagtccggcagcgacctagatggggtccacccccattcctgctcaagcatgggcacctaccacatggtttctgctgctcagcctgcctgcaactcacctcgaaggcggaccagcctgcctctgtgatgactgcagcagacctccttgggtgtaccaatgcccctcatctcccactttcacacctaaccctgactccttcaccaagaagacgggagtcggcagccaggagttcccgtggcacctctctctcttcgtggctccctgcttcccccttccctctttccgaggaagggtcaacctattctctctcaaagccaacccctaggccaattgcctggatctcctcccctctcccttctttaaacgagcttgcctccctcctgccaagtttgagggcaaggctaagaaatgtcagccacggaaacaactctattatctggtgactttgggtaatgtgaatcagtgcctgaggacctttgctgtgtccttggtacagaaccatccacttgacctaactacctcccctggccgcgctctcgctcttctcttctttgttaagccaacaactatcaccctctcctactcttcttctccctgccccctggagggcactgtgtttggttgtgcaaatgtatttactatgcgtgtttccagcagttggcattaaagtgcctttttctaataaaatcagtttattatgacagtttcctgatggttgaaagtaagcatcttgataaagggtcaccattaaaaaaaaa

SEQ ID NO: 9183 - DNA, 406 bp, Homo sapiens
  source 1..406: mol_type = unassigned DNA
ggcgaccgagctgggcccgtgagccactcggcctcaggtcgctcctgtggttggtccagcccagaatgcagccttgagcctggcttaggccaccacctactccagctctctccaccccctattttactgcagctcaggggcccagtgacctgatctttgagttcgcaagcaacgggatggatgatgatatccaccagctggaagacccctctgtgttcccagctgtgatcgtggagcaggtaccctaccctgatttactgcatctgtactcgggactggagttggacgacgttcacaatggcatcataacagacgggaccttgtgcatgacgcaggatcagatcctggaaggcagttttttgctgacagatgacaatgaggccacctcgcacaccatgtcaaccgc

SEQ ID NO: 9184 - DNA, 2321 bp, Homo sapiens
  source 1..2321: mol_type = unassigned DNA
gtaggtgtcacttatatcacaaggctacaggtgtctttatttccactgcacgctggtgctgggagcgcctgccttctcttgccttgaaagcctcctctttggacctagccaccgctgccctcacggtaatgttggactcggtgacacacagcaccttcctgcctaatgcatccttctgcgatcccctgatgtcgtggactgatctgttcagcaatgaagagtactaccctgcctttgagcatcagacagcctgtgactcatactggacatcagtccaccctgaatactggactaagcgccatgtgtgggagtggctccagttctgctgcgaccagtacaagttggacaccaattgcatctccttctgcaacttcaacatcagtggcctgcagctgtgcagcatgacacaggaggagttcgtcgaggcagctggcctctgcggcgagtacctgtacttcatcctccagaacatccgcacacaaggttactccttttttaatgacgctgaagaaagcaaggccaccatcaaagactatgctgattccaactgcttgaaaacaagtggcatcaaaagtcaagactgtcacagtcatagtagaacaagcctccaaagttctcatctatgggaatttgtacgagacctgcttctatctcctgaagaaaactgtggcattctggaatgggaagatagggaacaaggaatttttcgggtggttaaatcggaagccctggcaaagatgtggggacaaaggaagaaaaatgacagaatgacatatgaaaagttgagcagagccctgagatactactataaaacaggaattttggagcgggttgaccgaaggttagtgtacaaatttggaaaaaatgcacacgggtggcaggaagacaagctatgatctgctccaggcatcaagctcattttatggatttctgtcttttaaaacaatcagattgcaatagacattcgaaaggcttcattttcttctctttttttttaacctgcaaacatgctgataaaatttctccacatctcagcttacatttggattcagagttgttgtctatggagggtgagagcagaaactcttaagaaatcctttcttctccctaaggggatgaggggatgatcttttgtggtgtcttgatcaaactttattttcctagagttgtggaatgacaacagcccatgccattgatgctgatcagagaaaaactattcaattctgccattagagacacatccaatgctcccatcccaaaggttcaaaagttttcaaataactgtggcagctcaccaaaggtgggggaaagcatgattagtttgcaggttatggtaggagagggtgagatataagacatacatactttagattttaaattattaaagtcaaaaatccatagaaaagtatccctttttttttttttgagacgggttctcactatgttgcccagggctggtcttgaactcctatgctcaagtgatcctcccacctcagcctcccaaagtactgtgattacaagcgtgagccacggcacctgggcagaaaagtatcttaattaatgaaagagctaagccatcaagctgggacttaattggatttaacataggttcacagaaagtttcctaaccagagcatctttttgaccactcagcaaaacttccacagacatccttctggacttaaacacttaacattaaccacattattaattgttgctgagtttattcccccttctaactgatggctggcatctgatatgcagagttagtcaacagacactggcatcaattacaaaatcactgctgtttctgtgattcaagctgtcaacacaataaaatcgaaattcattgattccatctcaggtccagatgttaaacgtttataaaaccggaaatgtcctaacaactctgtaatggcaaattaaattgtgtgtcttttttgttttgtctttctacctgatgtgtattcaagcgctataacacgtatttccttgacaaaaatagtgacagtgaattcacactaataaatgttcataggttaaagtctgcactgacattttctcatcaatcactggtatgtaagttatcagtgactgacagctaggtggactgcccctaggacttctgtttcaccagagcaggaatcaagtggtgaggcactgaatcgctgtacaggctgaagacctccttattagagttgaacttcaaagtaacttgttttaaaaaatatgaattactgtaaaataatctattttggattcatgtgttttccaggtggatatagtttgtaaacaatgtgaataaagtatttaacatgttc

SEQ ID NO: 9185 - DNA, 2450 bp, Homo sapiens
  source 1..2450: mol_type = unassigned DNA
ggctgagtggtttgctccttcccctctctctgggaggctgagcaggggtgccgggttgctcaggccatgggagccacacctgttattgctgcctctgatttgtgtgacactgagaagcccacaggcctgtccctccaactcggtggaccctctctgtgtgcatttggtgtgtgagccagctctgagaagggttcagaagccactggaggcatctggggacctcagcttccatgccatctctgcctcactcccacagggtaatgttggactcggtgacacacagcaccttcctgcctaatgcatccttctgcgatcccctgatgtcgtggactgatctgttcagcaatgaagagtactaccctgcctttgagcatcagacagcctgtgactcatactggacatcagtccaccctgaatactggactaagcgccatgtgtgggagtggctccagttctgctgcgaccagtacaagttggacaccaattgcatctccttctgcaacttcaacatcagtggcctgcagctgtgcagcatgacacaggaggagttcgtcgaggcagctggcctctgcggcgagtacctgtacttcatcctccagaacatccgcacacaaggttactccttttttaatgacgctgaagaaagcaaggccaccatcaaagactatgctgattccaactgcttgaaaacaagtggcatcaaaagtcaagactgtcacagtcatagtagaacaagcctccaaagttctcatctatgggaatttgtacgagacctgcttctatctcctgaagaaaactgtggcattctggaatgggaagatagggaacaaggaatttttcgggtggttaaatcggaagccctggcaaagatgtggggacaaaggaagaaaaatgacagaatgacatatgaaaagttgagcagagccctgagatactactataaaacaggaattttggagcgggttgaccgaaggttagtgtacaaatttggaaaaaatgcacacgggtggcaggaagacaagctatgatctgctccaggcatcaagctcattttatggatttctgtcttttaaaacaatcagattgcaatagacattcgaaaggcttcattttcttctctttttttttaacctgcaaacatgctgataaaatttctccacatctcagcttacatttggattcagagttgttgtctatggagggtgagagcagaaactcttaagaaatcctttcttctccctaaggggatgaggggatgatcttttgtggtgtcttgatcaaactttattttcctagagttgtggaatgacaacagcccatgccattgatgctgatcagagaaaaactattcaattctgccattagagacacatccaatgctcccatcccaaaggttcaaaagttttcaaataactgtggcagctcaccaaaggtgggggaaagcatgattagtttgcaggttatggtaggagagggtgagatataagacatacatactttagattttaaattattaaagtcaaaaatccatagaaaagtatccctttttttttttttgagacgggttctcactatgttgcccagggctggtcttgaactcctatgctcaagtgatcctcccacctcagcctcccaaagtactgtgattacaagcgtgagccacggcacctgggcagaaaagtatcttaattaatgaaagagctaagccatcaagctgggacttaattggatttaacataggttcacagaaagtttcctaaccagagcatctttttgaccactcagcaaaacttccacagacatccttctggacttaaacacttaacattaaccacattattaattgttgctgagtttattcccccttctaactgatggctggcatctgatatgcagagttagtcaacagacactggcatcaattacaaaatcactgctgtttctgtgattcaagctgtcaacacaataaaatcgaaattcattgattccatctcaggtccagatgttaaacgtttataaaaccggaaatgtcctaacaactctgtaatggcaaattaaattgtgtgtcttttttgttttgtctttctacctgatgtgtattcaagcgctataacacgtatttccttgacaaaaatagtgacagtgaattcacactaataaatgttcataggttaaagtctgcactgacattttctcatcaatcactggtatgtaagttatcagtgactgacagctaggtggactgcccctaggacttctgtttcaccagagcaggaatcaagtggtgaggcactgaatcgctgtacaggctgaagacctccttattagagttgaacttcaaagtaacttgttttaaaaaatatgaattactgtaaaataatctattttggattcatgtgttttccaggtggatatagtttgtaaacaatgtgaataaagtatttaacatg

SEQ ID NO: 9186 - DNA, 637 bp, Homo sapiens
  source 1..637: mol_type = unassigned DNA
tgtctgtaggtgtcacttatatcacaaggctacaggtgtctttatttccactgcacgctggtgctgggagcgcctgccttctcttgccttgaaagcctcctctttggacctagccaccgctgccctcacggtaatgttggactcggtgacacacagcaccttcctgcctaatgcatccttctgcgatcccctgatgtcgtggactgatctgttcagcaatgaagagtactaccctgcctttgagcatcagacagatgctgattccaactgcttgaaaacaagtggcatcaaaagtcaagactgtcacagtcatagtagaacaagcctccaaagttctcatctatgggaatttgtacgagacctgcttctatctcctgaagaaaactgtggcattctggaatgggaagatagggaacaaggaatttttcgggtggttaaatcggaagccctggcaaagatgtggggacaaaggaagaaaaatgacagaatgacatatgaaaagttgagcagagccctgagatactactataaaacaggaattttggagcgggttgaccgaaggttagtgtacaaatttggaaaaaatgcacacgggtggcaggaagacaagctatgatctgctccaggcatcaagctc

SEQ ID NO: 9187 - DNA, 5145 bp, Homo sapiens
  source 1..5145: mol_type = unassigned DNA
attcatggggcccgcgcgcggctgcagccgggctccgtggcgctcgcagccaccgcctcctctcggctccaggtcttccccttctttttacaactgatcctgttggggattttttttttttctaaattggaacggtggggaggagcagggaggggggacctggaggaaggggagagattaggcagccatcaatttcctccagtttctcccagaacaggtgatgcttctaaattgtgatcactttcaggaggcagcactgcagctggaaggatgcgagcgacctagggtggagtggctgaggcggcagatctgaacttgcggaggataagaacccaaactttgactacatcagtccgcacctcgccagtgaagcaaaggacgggttatcttttttttttttctaagactcaaacttgggcacttgatcccttttcttggattgctttggaggagacgatttgctggcaacgttgggaacagtcaggactgtgttgtaactcttacttttaaagcgacagtagaggatcagactttttaaatgtttggaattcaagatactttaggaagaggaccaactctgaaagagaaatcgctgggcgcggagatggattcggtcaggtcctgggtccggaatgtcggagtggtggacgctaatgtcgccgcgcagagcggggtcgccctgtcccgggcccactttgagaaacagcctccttccaacttgaggaaatccaacttctttcacttcgtcctggcgctctatgacaggcagggccagccggtggagatcgagcggacggccttcgtggactttgtggagaatgacaaagaacaaggcaacgagaagaccaacaacggcactcactacaagttacagctcctctacagcaacggtgtccgcacggaacaggacctctatgtcaggctcatcgactcggtcaccaagcagcccatcgcttacgagggacagaataagaatccggaaatgtgccgagttctcctgacgcacgaagtgatgtgtagtcgatgctgcgaaaagaaaagctgtggaaaccgaaatgagactccatcggacccagtcataattgacagattctttttaaaatttttcctcaagtgcaatcagaattgtttgaaaacagcaggaaacccaagggacatgagacggtttcaggttgtgttgtcaacaacggtgaatgtggatggacacgtcctggctgtttctgacaacatgtttgttcataacaactccaagcatggacggagagcaagaagactcgatccatcggaagctaccccctgcatcaaagccattagcccgagtgaaggctggaccacaggaggagccatggtcatcatcatcggggacaacttctttgatggtctccaagtggtgtttgggactatgcttgtatggagcgagctaataacccctcatgccatcagagtacagactcctccccggcacatcccaggcgtggtagaggtgacattatcttataaatctaaacagttctgcaaaggagccccaggaaggttcatttacacagcattaaatgaacccaccatagactatggcttccagagactgcagaaggtcatccctaggcatcctggagatcctgagagattagctaaggagatgctgttgaaaagagctgcagatctagtggaagctctttatggcacaccacacaataaccaggacatcattttgaagcgagccgcagacattgctgaagctctctacagcgtccccaggaatcccagccagcttccagccctctctagctccccagcgcacagtggcatgatgggaatcaactcctatggcagccagcttggggtcagcatctcagagtcaacacaaggaaataatcaagggtacatccgcaacacaagcagcatctctccgcggggatactcttccagctccacgcctcaacagtctaattacagtacctccagcaacagtatgaatggctacagcaatgtccccatggccaacttgggtgttccaggttcaccaggatttctaaatggctcacccaccggctctccttatggaatcatgtcatcaagtcccaccgttgggtcttccagcacatcctccatcctcccattttcctcttcagtttttcctgctgtcaaacagaagagtgcctttgcccctgtcatcaggccccaaggctccccttcacctgcctgctccagcggcaatggaaatggattcagagccatgaccggacttgttgtacccccgatgtaaagaagaactgctttcttatagcacaaaactacttactctgatggaccaataatgaagaaagcactaggagctcttttgggggtgtagtggtgcccccacatgaacatgatggacacccttgggtctgcaaggagccagcatcttacttggtcccacgtcctcctatagctctgatggtggctacacaaactgaccctcttgggacaaggacaaaagatgtcattgacgtagtcagtgctaagagcagaaatgcaattctttgttatgaacattatgaaaaccaccttcctatgtttgtaaaatatttaagaaaaaattggcaaacaattaatgcttaatattttggatactatttgtttttctttgtaggaaaaaaaagttgaaagtttctattttctatgaagcctttcagataccaatttagtttatgcagaaaaaaattgaacaaaacagggtaccagcacggaagactttcttaaaacgcaacctgaattgaatgatgaaatgttgtatgtgtgtttgcttatagcttaatctctttaaaaaatgaacaaaaaaagggaaaaattttaaaatgttttacaattatttaaataaataaatgtgtaacttattgtaagtagaggtagaaattaagacctttttttggaagagagagggatttctcttcctgatgtaaaatgaaaatgatgcaaacatgtagtaacaagttttaaaggtgtgtgattattactgcagttacttactagattcttatcccctgtcctgcaccccctccttttccatcactttattgacccaagggcaagaacatgtagattcccacagaacaccctaatgcagaaacagacactctagcacatgcacaaatactccaacccatcaattcattcccagctccgtctgatttctaaatagtccacactcttgtgaatactttttaaaattcctattattagctttcaacgttctcccctgagcagtccagagaattcccatgtttgagtctgtctcaggctttcagcatcccaaggaaagaagcacctcaccttctagcagagccaaaaccacagactttcttaaccaagggaccccttgggaattcctcctcaccagaaccccaccactccctccgctttgggtgcctggttcagtacagaggtacacagccccatagaacttcagcaacacggtttggagaagataactctgtttgatggactctttagagtcagtcttagaacatccaagtcctttcctctccctgtcaatttccccttttatggcattaaactctcttgaaaaacatagctatgccactcgacagtttctagtcaagaatgagacggaatgtgggagagggatattaaaagccctaatcccctcttctgatgttcgaagaaaggcaagaccagattcttgggagatccagagattaggggcatctgcgttctatgcagcacagttacccagccctttgatgggctcttcatcgttttgtgactagctcttagaggggaagaaccttgccttagctgctaacagtggttgattcttgaaagcttatgtaatcctagagacatatccaggcatattgggattgccaataaagatgtcacttgtttccacgttggggttctccttattgactcatgagcaccacaatagagtctatacacagacttagtttggggttcttggttgggatttcagcattagaaatagatgcagcactcatggaaaaacatcatgagtgcatctgagccaattttagatgatttcattaattctgcataccttctctttgacccattgatgcaggcccacatctatccagccccaactgtcttatttgcctttaacccattctggaattacccagtatgacttatattatttctatgcacatgagaatccaaggttttagaaacctggcatgcttataactactgctgacagtccctcatagtcagggcttaaagcgccaaaatacacggaaacataagagaaaaagtcccccagtgagaaacctgattgatggaaggggaagaatgtgtggaatatgaatgttaccttccaaaagtgaaggcagagcaaaattaagcatgtttagccctggatttgagccaatccaacataaggaaattttgttttttttaagtagcattgcttttagaacctgtgaattttccttttgcatgaagatgagtgcagtactgtcttcaaaatgattgtagaatttcttggtagctttacaccgaaaaatgcgtgtaactaaataccagacatcttgaccattcagctagaaccctggcagcaacagagctatttaattgtacaaatgtgtgtaaggattatttttagtgtactaataaattaaaaacaaagctaccctgtcctcgttagtcattgctattcaatcattccagtcccaagttatttttgtgccacttggaatatgagtatttctattggtaactacaaactctatcctgtgtttgtaagaggagctgtgtaagatttttttcatttaaagggacaatttacttcattatttatctttcttttgttatagcgttgtaattcttctcagtttttctttgcacatttcaatatgcatggtttaaaaaccattaacttctctaccttttgtacagtaaggtttcattttcacactgtatagtttcattttattgttttgctttgtcagttatatacagtataaagttgctatgcacagagctttttgtaaagacagcttttttgtttactgtttttaatggtcttacttaaagaatatcttgtttgtaaaatgaatatgtctacttcagttttaaactttaaattatcctaacaaaaaaataaaatttttgtactgt

SEQ ID NO: 9188 - DNA, 1017 bp, Homo sapiens
  source 1..1017: mol_type = unassigned DNA
atggtcatcatcatcggggacaacttctttgatggtctccaagtggtgtttgggactatgcttgtatggagcgagctaataacccctcatgccatcagagtacagactcctccccggcacatcccaggcgtggtagaggtgacattatcttataaatctaaacagttctgcaaaggagccccaggaaggttcatttacacagcattaaatgaacccaccatagactatggcttccagagactgcagaaggtcatccctaggcatcctggagatcctgagagattagctaaggagatgctgttgaaaagagctgcagatctagtggaagctctttatggcacaccacacaataaccaggacatcattttgaagcgagccgcagacattgctgaagctctctacagcgtccccaggaatcccagccagcttccagccctctctagctccccagcgcacagtggcatgatgggaatcaactcctatggcagccagcttggggtcagcatctcagagtcaacacaaggaaataatcaagggtacatccgcaacacaagcagcatctctccgcggggatactcttccagctccacgcctcaacagtctaattacagtacctccagcaacagtatgaatggctacagcaatgtccccatggccaacttgggtgttccaggttcaccaggatttctaaatggctcacccaccggctctccttatggaactggactttggctcacgtggttactcaaggccttttggggaaagaaaaggattgaaacaattccgtttttatagagaaagagcatgtgtggcctgttcatgtcatcaagtcccaccgttgggtcttccagcacatcctccatcctcccattttcctcttcagtttttcctgctgtcaaacagaagagtgcctttgcccctgtcatcaggccccaaggctccccttcacctgcctgctccagcggcaatggaaatggattcagagccatgaccggacttgttgtacccccgatgtaa

SEQ ID NO: 9189 - DNA, 4510 bp, Homo sapiens
  source 1..4510: mol_type = unassigned DNA
ccgccaagccccgagcgccgctgctcgaggaaacgctttcggccgggagctgcggccgccgccagcagttttcatgtttgggattcaggagaatattccgcgcggggggacgaccatgaaggaggagccgctgggcagcggcatgaacccggtgcgctcgtggatgcacacggcgggcgtggtggacgccaacacggccgcccagagcggcgtggggctggcgcgggcgcacttcgagaagcagccgccttccaacctccggaaatccaatttcttccacttcgtgctggcgctctacgataggcaggggcagccggtggagattgaaaggaccgcttttgtggactttgtggagaaagagaaagagccaaacaacgagaaaaccaacaacggcatccactataaactccagttattgtacagcaacggagtcagaacagagcaagatctgtatgttcgcctcatagattcaatgaccaaacaggccatcgtctacgagggccaggacaagaacccggagatgtgccgtgtgctgctgacccacgagatcatgtgcagccggtgctgtgacaagaaaagttgtggcaatagaaacgaaacgccctcagaccctgtaatcattgacagattctttctaaagtttttcctcaagtgcaatcagaactgtttgaagaatgcaggcaaccctcgagatatgcggagattccaggttgttgtatcgacaacagtcaacgtggacggccacgtgctggccgtgtcagacaacatgtttgtgcacaacaattccaaacacgggaggcgggcccgccgcctagacccgtcagaaggtacggccccttcttatctggaaaatgccactccgtgcatcaaggccatcagtcccagtgaaggctggaccacggggggtgccaccgtcatcataattggcgacaacttctttgacgggctgcaagttgtattcggaactatgttggtgtggagcgagctgataactccccatgccatccgagtccagaccccgccgaggcacattcctggcgtcgtcgaagtgaccctctcctacaaatccaagcagttctgcaaaggtgctcctgggcgctttgtctacaccgcccttaatgaaccaaccatagattacggctttcagaggttgcagaaagtgatcccaagacatccgggtgatcccgaaaggttacccaaggaggtgttactgaagcgggcggcggacctggtggaagccttatacggaatgcctcacaacaaccaggagatcatcttgaagcgagcggcggacatcgccgaggcgctgtacagcgttccccgcaatcacaaccagatccccaccctgggcaacaaccctgcacacacgggcatgatgggcgtcaactccttcagcagccagctagccgtcaacgtgtcagagacgtcacaagccaacgaccaagtcggctacagtcgcaatacaagcagcgtgtccccgcgaggctacgtccccagcagtactccccagcagtccaattacaacacagtcagcactagcatgaatggatatggaagtggcgccatggccagtctaggggtccctggctcgcctggatttcttaatggctcctccgctaactctccctacggcatagtgccgtccagccccaccatggcagcctcttcggtcaccctcccttcaaactgtagcagcacacacggcattttctcattctcacctgccaatgtcatctccgcagtgaaacagaagagcgccttcgcgcccgtggtccggccccaagcctctcctcctccttcctgcaccagcgccaacgggaatggactgcaagctatgtctgggctggtagtcccgccaatgtgagggacttctgtttaccttccgcagcacccagcatcaaaggacggacttcaggggacacgtttagtatattaagacatgctgatggaaacagtatcttcaaaaaaatcagcagcaattgaaatgctacaaaagactttgtttaaagattttatttaaactattaagaatcaacatgcaaacagcctacttcttcatgaacaattccattttattgactgaacttttctcatattttcacatttctcagtcctgaagaataaggaaaacaaagcgacgcctattttgtataaagtttccgactccgtcttggccatgtctagtaattgctatgtgttgggagaaactttgtgaatgcaccattttgatgatcatgaaacgctgatgaaaaatgcctccaaacatttttctgtactcatacttagattcacaatggttgtgtatctctataatgtgaaatatttttttgtggtgataaaaagagggccaaggaggtatgagccatcagactggaaaaaaggatgactatatgatgaggagaaactggggtggcagggagggagggagggtttatcactgcttaacttcatcttcatgaaatgaaactttgtaacttattgtagttagaaattgtaactttgatattgaattctcttgccttcaacaagcacactgacagagaaaaaatgctactgtctgttggttccaatattctcccactgctagagcttcctgttaagcaagtgtgatctgcaacattttttcaacttttgctagcactgtatactattgcattcttaggctactgtgaggtctatgtttcttgtaccagaaattgtccttttgacttctagatccttcttccctaatgtgttttgtatgtggttataaaattgtagacttttgtgattttgccaaagttgtagctaaatatttatacacttgtcttgaatttttttcagatccacttaaaatatttagaaaaacaagttttattccttatgtgtcttataaggaataaaatggtcttcatttgacacttactttcccatgaacacttgcagttgctaagggactttattttgtaacatatcaattataaatattgtatttatctttgaaattttgtacattgcttttcccaccttttcctttttcttctttcttgtctgtattggtttttgatcacggcctggtgttgtgatactgggaagagcattagccaagaacttgtctctttgatctgtttcgttaagctgaaccagtgtctttacatttcatttgtacttcaaaaaatatgctattgtttagactttccatcctttttttttttattttgaggaaaagtcaaattcattgtttatttttatattatttttaagttatctgaacaaatacttttgaaaaaaaagtttgttgtatagtcaaaacaaatcggtgccacccggccgtgacaaatcctagtagattctgtgcatgtggagcggccgcgaagaggtgacaccgtttggggctgtgtccttattttattttatttttttgtagaatgtaaaaagtcattttagatgccacccattgactttgccacatagctgaactgtgtttactggaaaaattcagaggcctaaagtttaaaataaaatttacttctgatgttttaattaaaatgtttgccacattaacttttctgatgccttaaaagtgaacttctttaaagaacctttgtgctattttatcacaggcttacactacaattgttaataaatacttcatttggagatgtatggtgtaaaacacacaaacacacacaaaaaagcacaagcccgctgcatgacccgtctctcctttctgggactatttctgctgcgtcctgcaccctcctgggcccacctccgattcacagaggtttcagggggacccaaatcactgctggttttcaatttttttttaacaatacatttttgtggtcagttccaacagcactgtccgtacttttaaaactggaatgacctccttcagatatcgtgcctcttagtgccaaacccacagtgagaccaaaagtgtcaggtgtttttttttttttctttctcctttgcactaagtgctttgcagacacggcacagcaaacattttgcaaactgcagcagaaatcgaatttaaaacaaaaaggagggactttaaaataccttcttgacaaaaatcaacaatgcacaacttacaaagtgttcattctagggacaaaattaaataaacagaatgtccccaggagtcagcaggtcacagtctggctttgtgatggttgacaaggtctagctacatgggaaagcctgagaagtcactttggaactaaattgcctccattttattttgtacgagtaagggtttgatctacaaaagagctcacatggacgcactgagaacgcctgccagcttccccatgccctcacttggtttgtgttttaggttaagtagtcaatgcccacatcacttcactgtctcaagactgagcacttcactaaatggtagattttactgttaaagaccctacaataagattgttttatctgtacattttttcagatatttaactgtataaaaatgttcattttacacaatatttaattaaagtatttcttgtctgtgaatttc

SEQ ID NO: 9190 - DNA, 4375 bp, Homo sapiens
  source 1..4375: mol_type = unassigned DNA
ccgccaagccccgagcgccgctgctcgaggaaacgctttcggccgggagctgcggccgccgccagcagttttcatgtttgggattcaggagaatattccgcgcggggggacgaccatgaaggaggagccgctgggcagcggcatgaacccggtgcgctcgtggatgcacacggcgggcgtggtggacgccaacacggccgcccagagcggcgtggggctggcgcgggcgcacttcgagaagcagccgccttccaacctccggaaatccaatttcttccacttcgtgctggcgctctacgataggcaggggcagccggtggagattgaaaggaccgcttttgtggactttgtggagaaagagaaagagccaaacaacgagaaaaccaacaacggcatccactataaactccagttattgtacagcaacggagtcagaacagagcaagatctgtatgttcgcctcatagattcaatgaccaaacaggccatcgtctacgagggccaggacaagaacccggagatgtgccgtgtgctgctgacccacgagatcatgtgcagccggtgctgtgacaagaaaagttgtggcaatagaaacgaaacgccctcagaccctgtaatcattgacagattctttctaaagtttttcctcaagtgcaatcagaactgtttgaagaatgcaggcaaccctcgagatatgcggagattccaggttgttgtatcgacaacagtcaacgtggacggccacgtgctggccgtgtcagacaacatgtttgtgcacaacaattccaaacacgggaggcgggcccgccgcctagacccgtcagaagccactccgtgcatcaaggccatcagtcccagtgaaggctggaccacggggggtgccaccgtcatcataattggcgacaacttctttgacgggctgcaagttgtattcggaactatgttggtgtggagcgagctgataactccccatgccatccgagtccagaccccgccgaggcacattcctggcgtcgtcgaagtgaccctctcctacaaatccaagcagttctgcaaaggtgctcctgggcgctttgtctacaccgcccttaatgaaccaaccatagattacggctttcagaggttgcagaaagtgatcccaagacatccgggtgatcccgaaaggttacccaaggaggtgttactgaagcgggcggcggacctggtggaagccttatacggaatgcctcacaacaaccaggagatcatcttgaagcgagcggcggacatcgccgaggcgctgtacagcgttccccgcaatcacaaccagatccccaccctgggcaacaaccctgcacacacgggcatgatgggcgtcaactccttcagcagccagctagccgtcaacgtgtcagagacgtcacaagccaacgaccaagtcggctacagtcgcaatacaagcagcgtgtccccgcgaggctacgtccccagcagtactccccagcagtccaattacaacacagtcagcactagcatgaatggatatggaagtggcgccatggccagtctaggggtccctggctcgcctggatttcttaatggctcctccgctaactctccctacggcatgaaacagaagagcgccttcgcgcccgtggtccggccccaagcctctcctcctccttcctgcaccagcgccaacgggaatggactgcaagctatgtctgggctggtagtcccgccaatgtgagggacttctgtttaccttccgcagcacccagcatcaaaggacggacttcaggggacacgtttagtatattaagacatgctgatggaaacagtatcttcaaaaaaatcagcagcaattgaaatgctacaaaagactttgtttaaagattttatttaaactattaagaatcaacatgcaaacagcctacttcttcatgaacaattccattttattgactgaacttttctcatattttcacatttctcagtcctgaagaataaggaaaacaaagcgacgcctattttgtataaagtttccgactccgtcttggccatgtctagtaattgctatgtgttgggagaaactttgtgaatgcaccattttgatgatcatgaaacgctgatgaaaaatgcctccaaacatttttctgtactcatacttagattcacaatggttgtgtatctctataatgtgaaatatttttttgtggtgataaaaagagggccaaggaggtatgagccatcagactggaaaaaaggatgactatatgatgaggagaaactggggtggcagggagggagggagggtttatcactgcttaacttcatcttcatgaaatgaaactttgtaacttattgtagttagaaattgtaactttgatattgaattctcttgccttcaacaagcacactgacagagaaaaaatgctactgtctgttggttccaatattctcccactgctagagcttcctgttaagcaagtgtgatctgcaacattttttcaacttttgctagcactgtatactattgcattcttaggctactgtgaggtctatgtttcttgtaccagaaattgtccttttgacttctagatccttcttccctaatgtgttttgtatgtggttataaaattgtagacttttgtgattttgccaaagttgtagctaaatatttatacacttgtcttgaatttttttcagatccacttaaaatatttagaaaaacaagttttattccttatgtgtcttataaggaataaaatggtcttcatttgacacttactttcccatgaacacttgcagttgctaagggactttattttgtaacatatcaattataaatattgtatttatctttgaaattttgtacattgcttttcccaccttttcctttttcttctttcttgtctgtattggtttttgatcacggcctggtgttgtgatactgggaagagcattagccaagaacttgtctctttgatctgtttcgttaagctgaaccagtgtctttacatttcatttgtacttcaaaaaatatgctattgtttagactttccatcctttttttttttattttgaggaaaagtcaaattcattgtttatttttatattatttttaagttatctgaacaaatacttttgaaaaaaaagtttgttgtatagtcaaaacaaatcggtgccacccggccgtgacaaatcctagtagattctgtgcatgtggagcggccgcgaagaggtgacaccgtttggggctgtgtccttattttattttatttttttgtagaatgtaaaaagtcattttagatgccacccattgactttgccacatagctgaactgtgtttactggaaaaattcagaggcctaaagtttaaaataaaatttacttctgatgttttaattaaaatgtttgccacattaacttttctgatgccttaaaagtgaacttctttaaagaacctttgtgctattttatcacaggcttacactacaattgttaataaatacttcatttggagatgtatggtgtaaaacacacaaacacacacaaaaaagcacaagcccgctgcatgacccgtctctcctttctgggactatttctgctgcgtcctgcaccctcctgggcccacctccgattcacagaggtttcagggggacccaaatcactgctggttttcaatttttttttaacaatacatttttgtggtcagttccaacagcactgtccgtacttttaaaactggaatgacctccttcagatatcgtgcctcttagtgccaaacccacagtgagaccaaaagtgtcaggtgtttttttttttttctttctcctttgcactaagtgctttgcagacacggcacagcaaacattttgcaaactgcagcagaaatcgaatttaaaacaaaaaggagggactttaaaataccttcttgacaaaaatcaacaatgcacaacttacaaagtgttcattctagggacaaaattaaataaacagaatgtccccaggagtcagcaggtcacagtctggctttgtgatggttgacaaggtctagctacatgggaaagcctgagaagtcactttggaactaaattgcctccattttattttgtacgagtaagggtttgatctacaaaagagctcacatggacgcactgagaacgcctgccagcttccccatgccctcacttggtttgtgttttaggttaagtagtcaatgcccacatcacttcactgtctcaagactgagcacttcactaaatggtagattttactgttaaagaccctacaataagattgttttatctgtacattttttcagatatttaactgtataaaaatgttcattttacacaatatttaattaaagtatttcttgtctgtgaatttc

SEQ ID NO: 9191 - DNA, 817 bp, Homo sapiens
  source 1..817: mol_type = unassigned DNA
cttcagcagccagctagccgtcaacgtgtcagagacgtcacaagccaacgaccaagtcggctacagtcgcaatacaagcagcgtgtccccgcgaggctacgtccccagcagtactccccagcagtccaattacaacacagtcagcactagcatgaatggatatggaagtggcgccatggccagtctaggggtccctggctcgcctggatttcttaatggctcctccgctaactctccctacggcatagtgccgtccagccccaccatggcagcctcttcggtcaccctcccttcaaactgtagcagcacacacggcattttctcattctcacctgccaatgtcatctccgcagtgaaacagaagagcgccttcgcgcccgtggtccggccccaagcctctcctcctccttcctgcaccagcgccaacgggaatggactgcaaggctctctgctgggtgctgaggacgtagccgcggagaagacaaactggcccttttgtgaagtcggtggcatatttcactttgatgaactaatgctcaaaaaaggaactggaaagctatgtctgggctggtagtcccgccaatgtgagggacttctgtttaccttccgcagcacccagcatcaaaggacggacttcaggggacacgtttagtatattaagacatgctgatggaaacagtatcttcaaaaaaatcagcagcaattgaaatgctacaaaagactttgtttaaagattttatttaaactattaagaatcaacatgcaaacagcctacttcttcatgaacaattccattttattgactgaacttttctca

SEQ ID NO: 9192 - DNA, 2648 bp, Homo sapiens
  source 1..2648: mol_type = unassigned DNA
atgttccctgcgcaggacgctctgccccgcagcgggctgaacctgaaggaggagccgctgctgcccgccggcctgggctcagtgcgctcctggatgcagggcgcgggcatcctggacgccagcaccgcggcgcagagtggcgtgggtctggcacgagcacattttgagaagcagcctccctccaacctcaggaaatccaacttcttccacttcgtgctggccatgtacgaccggcaggggcagcccgtggaggtggagcgcacagccttcatcgacttcgtggaaaaggaccgagagcccggggcggaaaagactaacaatgggatccattaccgcctccggctggtgtataacaatggactgcggacagagcaagacctctacgtgcgtctcatcgactccatgtccaaacaggccatcatctatgaggggcaggacaagaaccccgaaatgtgccgagtgctgctcacccatgagatcatgtgcagccggtgctgtgaccggaagagctgtggcaaccggaatgagacgccctcagaccccgtcatcattgacaggttcttcctcaagttcttcctcaaatgcaaccagaactgcctgaagaatgcggggaatcccagagacatgcgccgcttccaggtggtggtgtccacgacggtgagcgtggacggacacgtgctggccgtgtccgacaacatgtttgtgcacaacaactccaagcatggccgcagggcgcgccgcctggacccctccgaagctgccaccccctgcatcaaggccatcagccccggggagggctggaccacgggcggcgccaccgtcattgtcatcggcgacaacttcttcgacgggttgcaggtcgtgttcggaaacgtgctcgtgtggagcgagctcatcacgccccacgccatccgggtgcagacgcccccgcggcacatccccggggtggtggaggtgaccctctcctacaagtccaagcagttttgcaagggatgccccggccgctttgtctacacagctctgaacgagcccaccattgactacggattccagaggctacagaaagtcattcccagacaccccggagaccccgagaggctgcccaaggaagtgctgctgaagcgggcggccgacttggcagaagccctgtacggagtgcccggcagtaaccaggagctgctcctgaagcgcgcggcggacgtggccgaggctctgtacagcaccccccgcgcacccgggccgctcgcacccctggccccgagccacccacaccccgccgtcgtgggcatcaacgccttcagcagcccgctggccatcgccgtcggggacgccaccccggggcccgagccgggctacgcgcgcagctgcagcagcgcgtccccccgcgggttcgcgcccagccccggctcgcagcagagcggctacggcggcggcctcggagctggcctgggcggctacggcgcgccgggcgtggccggcctcggcgtgcctgggtcccccagcttcctcaatggctccaccgccacctcgcccttcgccatcatgccctctagccccccgctggcggctgcctcctccatgtccctcccggccgctgcccccaccaccagcgtgttctccttctcgcctgtcaacatgatctccgccgtcaaacagaggagcgccttcgcccccgtgctgcgccccccaagctccccaccccaggcctgccccagagcccacggagaggggcttccagaccagtcttttgaggattctgacaagtttcactctccagcccgggggcttcagggcctggcatactcctaattacggtctgcagctgttcccatggagcccggactggaggtccctctgggattcacagccacaccccggatggtggcacagacagatgcagggccagggccatgggcggacctcaacccgtgagctgaacggggagaggccttcaccccatgctcaagcctccccgctagcagccccacaggcttctctcgcctccctgtcttggggtagtcagaagccccagcactgtgcagatgctcttggcaggacagcatcgcagggaggtgctgggattctgggcctcactgtctgggtcttggttcctctgaaagagatggatcttgtgcagaccagggttgttgagtgaggggagcgtgggatggggaccgtgggaaagaggacagctcagggagaagtgacctggaaaggtcctgtttgcatctgacccatctcaactggcccagcatcccaacttctctgcagcgaaagggtggcgccccgcagcctcgggaggcctgcccaggctcccgtggagcttccaacagctgcttggccccgcagctgcccccacttcctttgagacctgcactctcatgcttgccgcatcatgcctccctgtgggggctttgggcatggaggaggcagaagagggggtgccaggcctcctgtatttggggtcttcccccagtggatgtctcatggactctggccccacacactcacaatgactctggctggccccacgcagcgggcccagccgccccccaggtggcctcacattctgctctgctaagtttggagaaaacagaacaataaaccagatgcaggtggtgcccgcccggcctctcacctgcctcctt

SEQ ID NO: 9193 - DNA, 2910 bp, Homo sapiens
  source 1..2910: mol_type = unassigned DNA
gcggccgcggcggggcggcgcgggaaccgggccccggggggagtcggccgggctgctgctgctgctgctccaggtgctgccgcccggggctacggcagggccgggacgccggggcacgcggggcgctggcgctggcggcggcggcgtctgctggcccggcgcggccccagcctttccccgggacgcgcggctgctgctgctcctgccgccgctgccgccactgtcgccgccgccgccgagctccgcgcccgcagcctccgcctcccggatggacgctctgccccgcagcgggctgaacctgaaggaggagccgctgctgcccgccggcctgggctcagtgcgctcctggatgcagggcgcgggcatcctggacgccagcaccgcggcgcagagtggcgtgggtctggcacgagcacattttgagaagcagcctccctccaacctcaggaaatccaacttcttccacttcgtgctggccatgtacgaccggcaggggcagcccgtggaggtggagcgcacagccttcatcgacttcgtggaaaaggaccgagagcccggggcggaaaagactaacaatgggatccattaccgcctccggctggtgtataacaatggactgcggacagagcaagacctctacgtgcgtctcatcgactccatgtccaaacaggccatcatctatgaggggcaggacaagaaccccgaaatgtgccgagtgctgctcacccatgagatcatgtgcagccggtgctgtgaccggaagagctgtggcaaccggaatgagacgccctcagaccccgtcatcattgacaggttcttcctcaagttcttcctcaaatgcaaccagaactgcctgaagaatgcggggaatcccagagacatgcgccgcttccaggtggtggtgtccacgacggtgagcgtggacggacacgtgctggccgtgtccgacaacatgtttgtgcacaacaactccaagcatggccgcagggcgcgccgcctggacccctccgaagctgccaccccctgcatcaaggccatcagccccggggagggctggaccacgggcggcgccaccgtcattgtcatcggcgacaacttcttcgacgggttgcaggtcgtgttcggaaacgtgctcgtgtggagcgagctcatcacgccccacgccatccgggtgcagacgcccccgcggcacatccccggggtggtggaggtgaccctctcctacaagtccaagcagttttgcaagggatgccccggccgctttgtctacacagctctgaacgagcccaccattgactacggattccagaggctacagaaagtcattcccagacaccccggagaccccgagaggctgcccaaggaagtgctgctgaagcgggcggccgacttggcagaagccctgtacggagtgcccggcagtaaccaggagctgctcctgaagcgcgcggcggacgtggccgaggctctgtacagcaccccccgcgcacccgggccgctcgcacccctggccccgagccacccacaccccgccgtcgtgggcatcaacgccttcagcagcccgctggccatcgccgtcggggacgccaccccggggcccgagccgggctacgcgcgcagctgcagcagcgcgtccccccgcgggttcgcgcccagccccggctcgcagcagagcggctacggcggcggcctcggagctggcctgggcggctacggcgcgccgggcgtggccggcctcggcgtgcctgggtcccccagcttcctcaatggctccaccgccacctcgcccttcgccatcatgccctctagccccccgctggcggctgcctcctccatgtccctcccggccgctgcccccaccaccagcgtgttctccttctcgcctgtcaacatgatctccgccgtcaaacagaggagcgccttcgcccccgtgctgcgccccccaagctccccaccccaggcctgccccagagcccacggagaggggcttccagaccagtcttttgaggattctgacaagtttcactctccagcccgggggcttcagggcctggcatactcctaattacggtctgcagctgttcccatggagcccggactggaggtccctctgggattcacagccacaccccggatggtggcacagacagatgcagggccagggccatgggcggacctcaacccgtgagctgaacggggagaggccttcaccccatgctcaagcctccccgctagcagccccacaggcttctctcgcctccctgtcttggggtagtcagaagccccagcactgtgcagatgctcttggcaggacagcatcgcagggaggtgctgggattctgggcctcactgtctgggtcttggttcctctgaaagagatggatcttgtgcagaccagggttgttgagtgaggggagcgtgggatggggaccgtgggaaagaggacagctcagggagaagtgacctggaaaggtcctgtttgcatctgacccatctcaactggcccagcatcccaacttctctgcagcgaaagggtggcgccccgcagcctcgggaggcctgcccaggctcccgtggagcttccaacagctgcttggccccgcagctgcccccacttcctttgagacctgcactctcatgcttgccgcatcatgcctccctgtgggggctttgggcatggaggaggcagaagagggggtgccaggcctcctgtatttggggtcttcccccagtggatgtctcatggactctggccccacacactcacaatgactctggctggccccacgcagcgggcccagccgccccccaggtggcctcacattctgctctgctaagtttggagaaaacagaacaataaaccagatgcaggtggtgcccgcccggcctctcacctgcctccttggtgtg

SEQ ID NO: 9194 - DNA, 1400 bp, Homo sapiens
  source 1..1400: mol_type = unassigned DNA
cgaggctctgtacagcaccccccggtcgtgggcatcaacgccttcagcagcccgctggccatcgccgtcggggacgccaccccggggcccgagccgggctacgcgcgcagctgcagcagcgcgtccccccgcgggttcgcgcccagccccggctcgcagcagagcggctacggcggcggcctcggagctggcctgggcggctacggcgcgccgggcgtggccggcctcggcgtgcctgggtcccccagcttcctcaatggctccaccgccacctcgcccttcgccatcatgccctctagccccccgctggcggctgcctcctccatgtccctcccggccgctgcccccaccaccagcgtgttctccttctcgcctgtcaacatgatctccgccgtcaaacagaggagcgccttcgcccccgtgctgcgccccccaagctccccaccccaggcctgccccagagcccacggagaggggcttccagaccagtcttttgaggattctgacaagtttcactctccagcccgggggcttcagggcctggcatactcctaattacggtctgcagctgttcccatggagcccggactggaggtccctctgggattcacagccacaccccggatggtggcacagacagatgcagggccagggccatgggcggacctcaacccgtgagctgaacggggagaggccttcaccccatgctcaagcctccccgctagcagccccacaggcttctctcgcctccctgtcttggggtagtcagaagccccagcactgtgcagatgctcttggcaggacagcatcgcagggaggtgctgggattctgggcctcactgtctgggtcttggttcctctgaaagagatggatcttgtgcagaccagggttgttgagtgaggggagcgtgggatggggaccgtgggaaagaggacagctcagggagaagtgacctggaaaggtcctgtttgcatctgacccatctcaactggcccagcatcccaacttctctgcagcgaaagggtggcgccccgcagcctcgggaggcctgcccaggctcccgtggagcttccaacagctgcttggccccgcagctgcccccacttcctttgagacctgcactctcatgcttgccgcatcatgcctccctgtgggggctttgggcatggaggaggcagaagagggggtgccaggcctcctgtatttggggtcttcccccagtggatgtctcatggactctggccccacacactcacaatgactctggctggccccacgcagcgggcccagccgccccccaggtggcctcacattctgctctgctaagtttggagaaaacagaacaataaaccagatgcaggtggtgcccgcccggcctctcacctgcctccttggtgtg

SEQ ID NO: 9195 - DNA, 3138 bp, Homo sapiens
  source 1..3138: mol_type = unassigned DNA
gcgcgcagaacttggggagccgccgccgccatccgccgccgcagccagcttccgccgccgcaggaccggcccctgccccagcctccgcagccgcggcgcgtccacgcccgcccgcgcccagggcgagtcggggtcgccgcctgcacgcttctcagtgttccccgcgccccgcatgtaacccggccaggcccccgcaactgtgtcccctgcagctccagccccgggctgcacccccccgccccgacaccagctctccagcctgctcgtccaggatggccgcggccaaggccgagatgcagctgatgtccccgctgcagatctctgacccgttcggatcctttcctcactcgcccaccatggacaactaccctaagctggaggagatgatgctgctgagcaacggggctccccagttcctcggcgccgccggggccccagagggcagcggcagcaacagcagcagcagcagcagcgggggcggtggaggcggcgggggcggcagcaacagcagcagcagcagcagcaccttcaaccctcaggcggacacgggcgagcagccctacgagcacctgaccgcagagtcttttcctgacatctctctgaacaacgagaaggtgctggtggagaccagttaccccagccaaaccactcgactgccccccatcacctatactggccgcttttccctggagcctgcacccaacagtggcaacaccttgtggcccgagcccctcttcagcttggtcagtggcctagtgagcatgaccaacccaccggcctcctcgtcctcagcaccatctccagcggcctcctccgcctccgcctcccagagcccacccctgagctgcgcagtgccatccaacgacagcagtcccatttactcagcggcacccaccttccccacgccgaacactgacattttccctgagccacaaagccaggccttcccgggctcggcagggacagcgctccagtacccgcctcctgcctaccctgccgccaagggtggcttccaggttcccatgatccccgactacctgtttccacagcagcagggggatctgggcctgggcaccccagaccagaagcccttccagggcctggagagccgcacccagcagccttcgctaacccctctgtctactattaaggcctttgccactcagtcgggctcccaggacctgaaggccctcaataccagctaccagtcccagctcatcaaacccagccgcatgcgcaagtaccccaaccggcccagcaagacgcccccccacgaacgcccttacgcttgcccagtggagtcctgtgatcgccgcttctcccgctccgacgagctcacccgccacatccgcatccacacaggccagaagcccttccagtgccgcatctgcatgcgcaacttcagccgcagcgaccacctcaccacccacatccgcacccacacaggcgaaaagcccttcgcctgcgacatctgtggaagaaagtttgccaggagcgatgaacgcaagaggcataccaagatccacttgcggcagaaggacaagaaagcagacaaaagtgttgtggcctcttcggccacctcctctctctcttcctacccgtccccggttgctacctcttacccgtccccggttactacctcttatccatccccggccaccacctcatacccatcccctgtgcccacctccttctcctctcccggctcctcgacctacccatcccctgtgcacagtggcttcccctccccgtcggtggccaccacgtactcctctgttccccctgctttcccggcccaggtcagcagcttcccttcctcagctgtcaccaactccttcagcgcctccacagggctttcggacatgacagcaaccttttctcccaggacaattgaaatttgctaaagggaaaggggaaagaaagggaaaagggagaaaaagaaacacaagagacttaaaggacaggaggaggagatggccataggagaggagggttcctcttaggtcagatggaggttctcagagccaagtcctccctctctactggagtggaaggtctattggccaacaatcctttctgcccacttccccttccccaattactattccctttgacttcagctgcctgaaacagccatgtccaagttcttcacctctatccaaagaacttgatttgcatggattttggataaatcatttcagtatcatctccatcatatgcctgaccccttgctcccttcaatgctagaaaatcgagttggcaaaatggggtttgggcccctcagagccctgccctgcacccttgtacagtgtctgtgccatggatttcgtttttcttggggtactcttgatgtgaagataatttgcatattctattgtattatttggagttaggtcctcacttgggggaaaaaaaaaaaagaaaagccaagcaaaccaatggtgatcctctattttgtgatgatgctgtgacaataagtttgaacctttttttttgaaacagcagtcccagtattctcagagcatgtgtcagagtgttgttccgttaacctttttgtaaatactgcttgaccgtactctcacatgtggcaaaatatggtttggtttttctttttttttttttttgaaagtgttttttcttcgtccttttggtttaaaaagtttcacgtcttggtgccttttgtgtgatgcgccttgctgatggcttgacatgtgcaattgtgagggacatgctcacctctagccttaaggggggcagggagtgatgatttgggggaggctttgggagcaaaataaggaagagggctgagctgagcttcggttctccagaatgtaagaaaacaaaatctaaaacaaaatctgaactctcaaaagtctatttttttaactgaaaatgtaaatttataaatatattcaggagttggaatgttgtagttacctactgagtaggcggcgatttttgtatgttatgaacatgcagttcattattttgtggttctattttactttgtacttgtgtttgcttaaacaaagtgactgtttggcttataaacacattgaatgcgctttattgcccatgggatatgtggtgtatatccttccaaaaaattaaaacgaaaataaagtagctgcgattggg

SEQ ID NO: 9196 - DNA, 1005 bp, Homo sapiens
  source 1..1005: mol_type = unassigned DNA
agagatcccagcgcgcagaacttggggagccgccgccgccatccgccgccgcagccagcttccgccgccgcaggaccggcccctgccccagcctccgcagccgcggcgcgtccacgcccgcccgcgcccagggcgagtcggggtcgccgcctgcacgcttctcagtgttccccgcgccccgcatgtaacccggccaggcccccgcaactgtgtcccctgcagctccagccccgggctgcacccccccgccccgacaccagctctccagcctgctcgtccaggatggccgcggccaaggccgagatgcagctgatgtccccgctgcagatctctgacccgttcggatcctttcctcactcgcccaccatggacaactaccctaagctggaggagatgatgctgctgagcaacggggctccccagttcctcggcgccgccggggccccagagggcagcggcagcaacagcagcagcagcagcagcgggggcggtggaggcggcgggggcggcagcaacagcagcagcagcagcagcaccttcaaccctcaggcggacacgggcgagcagccctacgagcacctgaccgcagagtcttttcctgacatctctctgaacaacgagaaggtgctggtggagaccagttaccccagccaaaccactcgactgccccccatcacctatactggccgcttttccctggagcctgcacccaacagtggcttcccctccccgtcggtggccaccacgtactcctctgttccccctgctttcccggcccaggtcagcagcttcccttcctcagctgtcaccaactccttcagcgcctccacagggctttcggacatgacagcaaccttttctcccaggacaattgaaatttgctaaagggaaaggggaaagaaagggaaaagggagaaaaagaaacacaagagacttaaaggacaggaggaggagatggccataggagaggagggttcctcttaggtcagatggaggttctcagag

SEQ ID NO: 9197 - DNA, 1406 bp, Homo sapiens
  source 1..1406: mol_type = unassigned DNA
agagatcccagcgcgcagaacttggggagccgccgccgccatccgccgccgcagccagcttccgccgccgcaggaccggcccctgccccagcctccgcagccgcggcgcgtccacgcccgcccgcgcccagggcgagtcggggtcgccgcctgcacgcttctcagtgttccccgcgccccgcatgtaacccggccaggcccccgcaactgtgtcccctgcagctccagccccgggctgcacccccccgccccgacaccagctctccagcctgctcgtccaggatggccgcggccaaggccgagatgcagctgatgtccccgctgcagatctctgacccgttcggatcctttcctcactcgcccaccatggacaactaccctaagctggaggagatgatgctgctgagcaacggggctccccagttcctcggcgccgccggggccccagagggcagcggcagcaacagcagcagcagcagcagcgggggcggtggaggcggcgggggcggcagcaacagcagcagcagcagcagcaccttcaaccctcaggcggacacgggcgagcagccctacgagcacctgaccgcagagtcttttcctgacatctctctgaacaacgagaaggtgctggtggagaccagttaccccagccaaaccactcgactgccccccatcacctatactggccgcttttccctggagcctgcacccaacagtggcaacaccttgtggcccgagcccctcttcagcttggtcagtggcctagtgagcatgaccaacccaccggcctcctcgtcctcagcaccatctccagcggcctcctccgcctccgcctcccagagcccacccctgagctgcgcagtgccatccaacgacagcagtcccatttactcagcggcacccaccttccccacgccgaacactgacattttccctgaaacagccatgtccaagttcttcacctctatccaaagaacttgatttgcatggattttggataaatcatttcagtatcatctccatcatatgcctgaccccttgctcccttcaatgctagaaaatcgagttggcaaaatggggtttgggcccctcagagccctgccctgcacccttgtacagtgtctgtgccatggatttcgtttttcttggggtactcttgatgtgaagataatttgcatattctattgtattatttggagttaggtcctcacttgggggaaaaaaaaaaaagaaaagccaagcaaaccaatggtgatcctctattttgtgatgatgctgtgacaataagtttgaacctttttttttgaaacagcagtcccagtattctcagagcatgtgtcagagtgttgttccgttaacctttttgtaaatactgcttgaccgtactctcacatgtggcaaaatat

SEQ ID NO: 9198 - DNA, 2968 bp, Homo sapiens
  source 1..2968: mol_type = unassigned DNA
gagcaattgattaatagctcggcgaggggactcactgactgttataataacactacaccagcaactcctggcttcccagcagccggaacacagacaggagagagtcagtggcaaatagacatttttcttatttcttaaaaaacagcaacttgtttgctacttttatttctgttgatttttttttcttggtgtgtgtggtggttgtttttaagtgtggagggcaaaaggagataccatcccaggctcagtccaacccctctccaaaacggcttttctgacactccaggtagcgagggagttgggtctccaggttgtgcgaggagcaaatgatgaccgccaaggccgtagacaaaatcccagtaactctcagtggttttgtgcaccagctgtctgacaacatctacccggtggaggacctcgccgccacgtcggtgaccatctttcccaatgccgaactgggaggcccctttgaccagatgaacggagtggccggagatggcatgatcaacattgacatgactggagagaagaggtcgttggatctcccatatcccagcagctttgctcccgtctctgcacctagaaaccagaccttcacttacatgggcaagttctccattgaccctcagtaccctggtgccagctgctacccagaaggcataatcaatattgtgagtgcaggcatcttgcaaggggtcacttccccagcttcaaccacagcctcatccagcgtcacctctgcctcccccaacccactggccacaggacccctgggtgtgtgcaccatgtcccagacccagcctgacctggaccacctgtactctccgccaccgcctcctcctccttattctggctgtgcaggagacctctaccaggacccttctgcgttcctgtcagcagccaccacctccacctcttcctctctggcctacccaccacctccttcctatccgtcccccaagccagccacggacccaggtctcttcccaatgatcccagactatcctggattctttccatctcagtgccagagagacctacatggtacagctggcccagaccgtaagccctttccctgcccactggacaccctgcgggtgccccctccactcactccactctctacaatccgtaactttaccctggggggccccagtgctggggtgaccggaccaggggccagtggaggcagcgagggaccccggctgcctggtagcagctcagcagcagcagcagccgccgccgccgccgcctataacccacaccacctgccactgcggcccattctgaggcctcgcaagtaccccaacagacccagcaagacgccggtgcacgagaggccctacccgtgcccagcagaaggctgcgaccggcggttctcccgctctgacgagctgacacggcacatccgaatccacactgggcataagcccttccagtgtcggatctgcatgcgcaacttcagccgcagtgaccacctcaccacccatatccgcacccacaccggtgagaagcccttcgcctgtgactactgtggccgaaagtttgcccggagtgatgagaggaagcgccacaccaagatccacctgagacagaaagagcggaaaagcagtgccccctctgcatcggtgccagccccctctacagcctcctgctctgggggcgtgcagcctgggggtaccctgtgcagcagtaacagcagcagtcttggcggagggccgctcgccccttgctcctctcggacccggacaccttgagatgagactcaggctgatacaccagctcccaaaggtcccggaggccctttgtccactggagctgcacaacaaacactaccaccctttcctgtccctctctccctttgttgggcaaagggctttggtggagctagcactgccccctttccacctagaagcaggttcttcctaaaacttagcccattctagtctctcttaggtgagttgactatcaacccaaggcaaaggggaggctcagaaggaggtggtgtggggacccctggccaagagggctgaggtctgaccctgctttaaagggttgtttgactaggttttgctaccccacttccccttattttgacccatcacaggtttttgaccctggatgtcagagttgatctaagacgttttctacaataggttgggagatgctgatcccttcaagtggggacagcaaaaagacaagcaaaactgatgtgcactttatggcttgggactgatttgggggacattgtacagtgagtgaagtatagcctttatgccacactctgtggccctaaaatggtgaatcagagcatatctagttgtctcaacccttgaagcaatatgtattataaactcagagaacagaagtgcaatgtgatgggaggaacatagcaatatctgctccttttcgagttgtttgagaaatgtaggctattttttcagtgtatatccactcagattttgtgtatttttgatgtacactgttctctaaattctgaatctttgggaaaaaatgtaaagcatttatgatctcagaggttaacttatttaagggggatgtacatatattctctgaaactaggatgcatgcaattgtgttggaagtgtccttggtgccttgtgtgatgtagacaatgttacaaggtctgcatgtaaatgggttgccttattatggagaaaaaaaatcactccctgagtttagtatggctgtatatttctgcctattaatatttggaattttttttagaaagtatatttttgtatgctttgttttgtgacttaaaagtgttacctttgtagtcaaatttcagataagaatgtacataatgttaccggagctgatttgtttggtcattagctcttaatagttgtgaaaaaataaatctattctaacgcaaaaccactaactgaagttcagataatggatggtttgtgactatagtgtaaataaatacttttcaacaata

SEQ ID NO: 9199 - DNA, 2872 bp, Homo sapiens
  source 1..2872: mol_type = unassigned DNA
aactgagcgaggagcaattgattaatagctcggcgaggggactcactgactgttataataacactacaccagcaactcctggcttcccagcagccggaacacagacaggagagagtcagtggcaaatagacatttttcttatttcttaaaaaacagcaacttgtttgctacttttatttctgttgatttttttttcttggtgtgtgtggtggttgtttttaagtgtggagggcaaaaggagataccatcccaggctcagtccaacccctctccaaaacggcttttctgacactccagctgtctgacaacatctacccggtggaggacctcgccgccacgtcggtgaccatctttcccaatgccgaactgggaggcccctttgaccagatgaacggagtggccggagatggcatgatcaacattgacatgactggagagaagaggtcgttggatctcccatatcccagcagctttgctcccgtctctgcacctagaaaccagaccttcacttacatgggcaagttctccattgaccctcagtaccctggtgccagctgctacccagaaggcataatcaatattgtgagtgcaggcatcttgcaaggggtcacttccccagcttcaaccacagcctcatccagcgtcacctctgcctcccccaacccactggccacaggacccctgggtgtgtgcaccatgtcccagacccagcctgacctggaccacctgtactctccgccaccgcctcctcctccttattctggctgtgcaggagacctctaccaggacccttctgcgttcctgtcagcagccaccacctccacctcttcctctctggcctacccaccacctccttcctatccgtcccccaagccagccacggacccaggtctcttcccaatgatcccagactatcctggattctttccatctcagtgccagagagacctacatggtacagctggcccagaccgtaagccctttccctgcccactggacaccctgcgggtgccccctccactcactccactctctacaatccgtaactttaccctggggggccccagtgctggggtgaccggaccaggggccagtggaggcagcgagggaccccggctgcctggtagcagctcagcagcagcagcagccgccgccgccgccgcctataacccacaccacctgccactgcggcccattctgaggcctcgcaagtaccccaacagacccagcaagacgccggtgcacgagaggccctacccgtgcccagcagaaggctgcgaccggcggttctcccgctctgacgagctgacacggcacatccgaatccacactgggcataagcccttccagtgtcggatctgcatgcgcaacttcagccgcagtgaccacctcaccacccatatccgcacccacaccggtgagaagcccttcgcctgtgactactgtggccgaaagtttgcccggagtgatgagaggaagcgccacaccaagatccacctgagacagaaagagcggaaaagcagtgccccctctgcatcggtgccagccccctctacagcctcctgctctgggggcgtgcagcctgggggtaccctgtgcagcagtaacagcagcagtcttggcggagggccgctcgccccttgctcctctcggacccggacaccttgagatgagactcaggctgatacaccagctcccaaaggtcccggaggccctttgtccactggagctgcacaacaaacactaccaccctttcctgtccctctctccctttgttgggcaaagggctttggtggagctagcactgccccctttccacctagaagcaggttcttcctaaaacttagcccattctagtctctcttaggtgagttgactatcaacccaaggcaaaggggaggctcagaaggaggtggtgtggggacccctggccaagagggctgaggtctgaccctgctttaaagggttgtttgactaggttttgctaccccacttccccttattttgacccatcacaggtttttgaccctggatgtcagagttgatctaagacgttttctacaataggttgggagatgctgatcccttcaagtggggacagcaaaaagacaagcaaaactgatgtgcactttatggcttgggactgatttgggggacattgtacagtgagtgaagtatagcctttatgccacactctgtggccctaaaatggtgaatcagagcatatctagttgtctcaacccttgaagcaatatgtattataaactcagagaacagaagtgcaatgtgatgggaggaacatagcaatatctgctccttttcgagttgtttgagaaatgtaggctattttttcagtgtatatccactcagattttgtgtatttttgatgtacactgttctctaaattctgaatctttgggaaaaaatgtaaagcatttatgatctcagaggttaacttatttaagggggatgtacatatattctctgaaactaggatgcatgcaattgtgttggaagtgtccttggtgccttgtgtgatgtagacaatgttacaaggtctgcatgtaaatgggttgccttattatggagaaaaaaaatcactccctgagtttagtatggctgtatatttctgcctattaatatttggaattttttttagaaagtatatttttgtatgctttgttttgtgacttaaaagtgttacctttgtagtcaaatttcagataagaatgtacataatgttaccggagctgatttgtttggtcattagctcttaatagttgtgaaaaaataaatctattctaacgcaaaaccactaactgaagttcagataatggatggtttgtgactatagtgtaaataaatacttttc

SEQ ID NO: 9200 - DNA, 1190 bp, Homo sapiens
  source 1..1190: mol_type = unassigned DNA
tttcggactcagggcccgagatgcgagtcggactcccttccgaggcgtcgtcttgcccatggtcagcgcgggggccgcgggacccgccagagcgcaggcggagtgggctggcgcacgtgctgtctgacaacatctacccggtggaggacctcgccgccacgtcggtgaccatctttcccaatgccgaactgggaggcccctttgaccagatgaacggagtggccggagatggcatgatcaacattgacatgactggagagaagaggtcgttggatctcccatatcccagcagctttgctcccgtctctgcacctagaaaccagaccttcacttacatgggcaagttctccattgaccctcagtaccctggtgccagctgctacccagaaggcataatcaatattgtgagtgcaggcatcttgcaaggggtcacttccccagcttcaaccacagcctcatccagcgtcacctctgcctcccccaacccactggccacaggacccctgggtgtgtgcaccatgtcccagacccagcctgacctggaccacctgtactctccgccaccgcctcctcctccttattctggctgtgcaggagacctctaccaggacccttctgcgttcctgtcagcagccaccacctccacctcttcctctctggcctacccaccacctccttcctatccgtcccccaagccagtggaggcagcgagggaccccggctgcctggtagcagctcagcagcagcagcagccgccgccgccgccgcctataacccacaccacctgccactgcggcccattctgaggcctcgcaagtaccccaacagacccagcaagacgccggtgcacgagaggccctacccgtgcccagcagaaggctgcgaccggcggttctcccgctctgacgagctgacacggcacatccgaatccacactgggcataagcccttccagtgtcggatctgcatgcgcaacttcagccgcagtgaccacctcaccacccatatccgcacccacaccggtgagaagcccttcgcctgtgactactgtggccgaaagtttgcccggagtgatgagaggaagcgccacaccaagatccacctgagacagaaagagcggaaaagcagtgccccctctgcatcggtgccagccccctctacagcctcctgctctgggggcgtgcagcctg

SEQ ID NO: 9201 - DNA, 2844 bp, Homo sapiens
  source 1..2844: mol_type = unassigned DNA
gatgcagcgtagctcttagggggaggtgtgagtccttggaaagctcacaagaatttcagaggggcccgagatgcgagtcggactcccttccgaggcgtcgtcttgcccatggtcagcgcgggggccgcgggacccgccagagcgcaggcggagtgggctggcgcacgtggtagcgagggagttgggtctccaggttgtgcgaggagcaaatgatgaccgccaaggccgtagacaaaatcccagtaactctcagtggttttgtgcaccagctgtctgacaacatctacccggtggaggacctcgccgccacgtcggtgaccatctttcccaatgccgaactgggaggcccctttgaccagatgaacggagtggccggagatggcatgatcaacattgacatgactggagagaagaggtcgttggatctcccatatcccagcagctttgctcccgtctctgcacctagaaaccagaccttcacttacatgggcaagttctccattgaccctcagtaccctggtgccagctgctacccagaaggcataatcaatattgtgagtgcaggcatcttgcaaggggtcacttccccagcttcaaccacagcctcatccagcgtcacctctgcctcccccaacccactggccacaggacccctgggtgtgtgcaccatgtcccagacccagcctgacctggaccacctgtactctccgccaccgcctcctcctccttattctggctgtgcaggagacctctaccaggacccttctgcgttcctgtcagcagccaccacctccacctcttcctctctggcctacccaccacctccttcctatccgtcccccaagccagccacggacccaggtctcttcccaatgatcccagactatcctggattctttccatctcagtgccagagagacctacatggtacagctggcccagaccgtaagccctttccctgcccactggacaccctgcgggtgccccctccactcactccactctctacaatccgtaactttaccctggggggccccagtgctggggtgaccggaccaggggccagtggaggcagcgagggaccccggctgcctggtagcagctcagcagcagcagcagccgccgccgccgccgcctataacccacaccacctgccactgcggcccattctgaggcctcgcaagtaccccaacagacccagcaagacgccggtgcacgagaggccctacccgtgcccagcagaaggctgcgaccggcggttctcccgctctgacgagctgacacggcacatccgaatccacactgggcataagcccttccagtgtcggatctgcatgcgcaacttcagccgcagtgaccacctcaccacccatatccgcacccacaccggtgagaagcccttcgcctgtgactactgtggccgaaagtttgcccggagtgatgagaggaagcgccacaccaagatccacctgagacagaaagagcggaaaagcagtgccccctctgcatcggtgccagccccctctacagcctcctgctctgggggcgtgcagcctgggggtaccctgtgcagcagtaacagcagcagtcttggcggagggccgctcgccccttgctcctctcggacccggacaccttgagatgagactcaggctgatacaccagctcccaaaggtcccggaggccctttgtccactggagctgcacaacaaacactaccaccctttcctgtccctctctccctttgttgggcaaagggctttggtggagctagcactgccccctttccacctagaagcaggttcttcctaaaacttagcccattctagtctctcttaggtgagttgactatcaacccaaggcaaaggggaggctcagaaggaggtggtgtggggacccctggccaagagggctgaggtctgaccctgctttaaagggttgtttgactaggttttgctaccccacttccccttattttgacccatcacaggtttttgaccctggatgtcagagttgatctaagacgttttctacaataggttgggagatgctgatcccttcaagtggggacagcaaaaagacaagcaaaactgatgtgcactttatggcttgggactgatttgggggacattgtacagtgagtgaagtatagcctttatgccacactctgtggccctaaaatggtgaatcagagcatatctagttgtctcaacccttgaagcaatatgtattataaactcagagaacagaagtgcaatgtgatgggaggaacatagcaatatctgctccttttcgagttgtttgagaaatgtaggctattttttcagtgtatatccactcagattttgtgtatttttgatgtacactgttctctaaattctgaatctttgggaaaaaatgtaaagcatttatgatctcagaggttaacttatttaagggggatgtacatatattctctgaaactaggatgcatgcaattgtgttggaagtgtccttggtgccttgtgtgatgtagacaatgttacaaggtctgcatgtaaatgggttgccttattatggagaaaaaaaatcactccctgagtttagtatggctgtatatttctgcctattaatatttggaattttttttagaaagtatatttttgtatgctttgttttgtgacttaaaagtgttacctttgtagtcaaatttcagataagaatgtacataatgttaccggagctgatttgtttggtcattagctcttaatagttgtgaaaaaataaatctattctaacgcaaaaccactaactgaagttcagataatggatggtttgtgactatagtgtaaataaatacttttc

SEQ ID NO: 9202 - DNA, 2372 bp, Homo sapiens
  source 1..2372: mol_type = unassigned DNA
ttttcgggagtccccggcacacatcctgtgtccatgtttgggcatttacgtcacggcggcagggccggggcctcccaaaatggcagtggcccggggagtcggaagcccggagccagcgccgccgcagctatataagtgggggggctgtgggctgggggagcccggcagcgctttggagaggcgaggagccgccgcccgaggccggtgcgggcgagcgagggcgccgcggctccccgactcctttcccagaggtgagtgcccgaagccaggagcccgggcgcctaggtctgtgcgctgcggggaacccctaccgccagcctccccgccacccgcgcgcccccaagcccagcgggcgaggccccgggcgccccacagccggcgccgcgccatgctccaccttagcgagttttccgaacccgacgcgctcctcgtcaagtccactgaaggctgttgcgccgaacccagcgctgaattgccccggctgcctgccagggacgctcccgcggccaccggctaccctggagcaggcgacttcttgagctgggctttgaacagctgcggcgcaagtggggacttagccgactcctgcttcctggaggggcctgcgcccacaccccctcccggcctcagctacagcggtagcttcttcattcaggcagtgcccgaacacccgcacgacccggaggcactcttcaacctcatgtcgggcatcttaggcctggcacccttccccggtccagaggcagcagcgtccagatccccgctggatgccccttttcctgcggggtccgatgccttgctgccgggtccgccggacctttactccccggatctgggcgctgcccctttcccagaggcgttctgggaggcctcgccttgcgcgggtgccccctcgcagtgcctgtatgagcctcagctctccccgcccgacgtcaagcccggcctccgggcgcctcccgcctcgccagcgctggacgctgtctctgccttcaagggtccctacgcgccctgggagctgctttctgtgggggccccagggaactgtgggtcacagggagactaccaggccgccccggaggctcgttttcccgtaatagggaccaagattgaggacttgctgtccatcagctgccctgcggaactgccggccgtcccagccaacagactctatcccagcggggcctatgacgctttcccgctggccccgggtgacttaggggagggggctgagggcctccctgggctcctgacccctcctagtggggagggagggagtagcggcgacggcggagagtttctggccagtacgcagcctcagctttccccgctgggccttcgcagcgccgccgcggcggacttccctaaacctctggtggcggacatccctggaagcagtggcgtggctgcaccacccgtgccgccgccgccgcccacccctttcccccaggccaaggcgcgacgcaaggggcgccgcggcggcaaatgcagcacgcgctgcttctgcccgcggccgcacgccaaggccttcgcttgcccggtggagagttgtgtgcggagctttgcgcgctccgacgagctcaatcgccacctgcgcatccacacgggccacaaacccttccagtgccgcatctgcctccgcaacttcagccgcagcgaccacctcaccacgcacgtgcgcacccacaccggcgagaagccttttgcttgcgacgtgtgcggccgccgcttcgcgcgcagcgatgagaagaaacggcacagcaaggtgcacctcaagcagaaggcgcgcgccgaggagcggctcaagggcctcggcttttactcgctgggcctctccttcgcttctctctgagcaagagatgggtttatgggttggggcgccgccgttcggcgcgcacgagttccgggccgttcccctccccgctcttcttccaactcctcctcgcacgcccgagggccggcctccggtcccgcttccagtttccttgaagcgcccgccgcacacgccctattcagcaccagctccgcggacagttcccgcggtccaggcgctgtcacccttgtcagccgcgctttgggggaagtcttctgagaccacccagtgaataggcactaccctgggattcaagacagtcttttgtaactggcacacgccccacgccttcctctataacccccagagacaggctggggcagcgccaaggcggtctcgcgcgggactttgtacagcagtgtcttatccagcagccattggatgtaacgttttgctttgggttttttttccttttgttgttgttaatttttgtaaagcagacgctactctcaagcagttgacaaaactgtttatttttgcaattaaaattattgtgctaaaa

SEQ ID NO: 9203 - DNA, 2372 bp, Homo sapiens
  source 1..2372: mol_type = unassigned DNA
cgggagtccccggcacacatcctgtgtccatgtttgggcatttacgtcacggcggcagggccggggcctcccaaaatggcagtggcccggggagtcggaagcccggagccagcgccgccgcagctatataagtgggggggctgtgggctgggggagcccggcagcgctttggagaggcgaggagccgccgcccgaggccggtgcgggcgagcgagggcgccgcggctccccgactcctttcccagaggtgagtgcccgaagccaggagcccgggcgcctaggtctgtgcgctgcggggaacccctaccgccagcctccccgccacccgcgcgcccccaagcccagcgggcgaggccccgggcgccccacagccggcgccgcgccatgctccaccttagcgagttttccgaacccgacgcgctcctcgtcaagtccactgaaggctgttgcgccgaacccagcgctgaattgccccggctgcctgccagggacgctcccgcggccaccggctaccctggagcaggcgacttcttgagctgggctttgaacagctgcggcgcaagtggggacttagccgactcctgcttcctggaggggcctgcgcccacaccccctcccggcctcagctacagcggtagcttcttcattcaggcagtgcccgaacacccgcacgacccggaggcactcttcaacctcatgtcgggcatcttaggcctggcacccttccccggtccagaggcagcagcgtccagatccccgctggatgccccttttcctgcggggtccgatgccttgctgccgggtccgccggacctttactccccggatctgggcgctgcccctttcccagaggcgttctgggaggcctcgccttgcgcgggtgccccctcgcagtgcctgtatgagcctcagctctccccgcccgacgtcaagcccggcctccgggcgcctcccgcctcgccagcgctggacgctgtctctgccttcaagggtccctacgcgccctgggagctgctttctgtgggggccccagggaactgtgggtcacagggagactaccaggccgccccggaggctcgttttcccgtaatagggaccaagattgaggacttgctgtccatcagctgccctgcggaactgccggccgtcccagccaacagactctatcccagcggggcctatgacgctttcccgctggccccgggtgacttaggggagggggctgagggcctccctgggctcctgacccctcctagtggggagggagggagtagcggcgacggcggagagtttctggccagtacgcagcctcagctttccccgctgggccttcgcagcgccgccgcggcggacttccctaaacctctggtggcggacatccctggaagcagtggcgtggctgcaccacccgtgccgccgccgccgcccacccctttcccccaggccaaggcgcgacgcaaggggcgccgcggcggcaaatgcagcacgcgctgcttctgcccgcggccgcacgccaaggccttcgcttgcccggtggagagttgtgtgcggagctttgcgcgctccgacgagctcaatcgccacctgcgcatccacacgggccacaaacccttccagtgccgcatctgcctccgcaacttcagccgcagcgaccacctcaccacgcacgtgcgcacccacaccggcgagaagccttttgcttgcgacgtgtgcggccgccgcttcgcgcgcagcgatgagaagaaacggcacagcaaggtgcacctcaagcagaaggcgcgcgccgaggagcggctcaagggcctcggcttttactcgctgggcctctccttcgcttctctctgagcaagagatgggtttatgggttggggcgccgccgttcggcgcgcacgagttccgggccgttcccctccccgctcttcttccaactcctcctcgcacgcccgagggccggcctccggtcccgcttccagtttccttgaagcgcccgccgcacacgccctattcagcaccagctccgcggacagttcccgcggtccaggcgctgtcacccttgtcagccgcgctttgggggaagtcttctgagaccacccagtgaataggcactaccctgggattcaagacagtcttttgtaactggcacacgccccacgccttcctctataacccccagagacaggctggggcagcgccaaggcggtctcgcgcgggactttgtacagcagtgtcttatccagcagccattggatgtaacgttttgctttgggttttttttccttttgttgttgttaatttttgtaaagcagacgctactctcaagcagttgacaaaactgtttatttttgcaattaaaattattgtgctaaaagctt

SEQ ID NO: 9204 - DNA, 1322 bp, Homo sapiens
  source 1..1322: mol_type = unassigned DNA
gcgattcggtggcacgtggagccacggcgtgggagtagggggctgaaggcaggcagcagcggccagggccgccctctgctagccgcttgggtctcgggataccccgtttcttcctgtaggtgtgggacgtgcgtgcggcgagatggacactcccccgctctcggattcggagtcggaatccgatgaatcccttgtcacagacagagagttgcaggatgcgttttcccgagggcttctgaagccaggcctcaatgtcgtgctagaggggccgaagaaggccgtgaacgacgtgaatggcctgaagcaatgtttggcagaattcaagcgggatctggaatgggttgaaaggctcgatgtgacactgggtccggtaccggagatcggtggatctgaggcgccagcacctcagaacaaggaccagaaagctgttgatccagaagacgacttccagcgagagatgagtttctatcgccaagcccaggccgcagtgcttgcagtcttaccccgcctccatcagctcaaagtccctacgaagcgacccactgattattttgcggaaatggccaaatctgatctgcagatgcagaagattcgacagaagctgcagactaaacaggctgccatggagaggtctgaaaaagctaagcaactgcgagcacttaggaaatacgggaagaaggtgcaaacggaggttcttcagaagaggcagcaggagaaagcccatatgatgaatgctattaagaaatatcagaaaggcttctctgataaactggatttccttgagggagatcagaaacctctggcacagcgcaagaaggcaggagccaaaggccagcagatgaggaaggggcccagtgctaaacgacggtataaaaaccagaagtttggttttggtggaaagaagaaaggctcaaagtggaacactcgggagagctatgatgatgtatctagcttccgggccaagacagctcatggcagaggcctcaagaggcctggcaagaaagggtcaaataagagacctggaaaacgaacaagagagaagatgaagaacagaacacactaaatagcatctttgaatacaaagaaccaagaaaaaggaatgaagactcgcaatttcacgacacactttgatcccttctgttggtgtcatgttgtaaacatttctttcaataaactaaagaaaaattattaaaggaacacatacctttggttaaatagtctagactaaaagattgagaagttactttccattgctatctattgataatttagacattgagttcaaattgccttcattttatgataaataatgatttaactga

SEQ ID NO: 9205 - DNA, 1503 bp, Homo sapiens
  source 1..1503: mol_type = unassigned DNA
cctcccccggggtcctcctccgcgccaccccacccccgcggctcctttttctgccttttcctttgtaccctcactgctaccagctccttctggcgacccccaggtaccccctcccacctttcgtttctctctgggtcagcagaccacgcatgtatccagaggcgctacctgtagggatcctaagcaacccggacactttcaaacgccgtagcggttcctatagcaacgacaaaccggaagtatggtttgccgccggaagcggaagtcccaatcaaaagttgagcagtagctgtgtgggacgtgcgtgcggcgagatggacactcccccgctctcggattcggagtcggaatccgatgaatcccttgtcacagacagagagttgcaggatgcgttttcccgagggcttctgaagccaggcctcaatgtcgtgctagaggggccgaagaaggccgtgaacgacgtgaatggcctgaagcaatgtttggcagaattcaagcgggatctggaatgggttgaaaggctcgatgtgacactgggtccggtaccggagatcggtggatctgaggcgccagcacctcagaacaaggaccagaaagctgttgatccagaagacgacttccagcgagagatgagtttctatcgccaagcccaggccgcagtgcttgcagtcttaccccgcctccatcagctcaaagtccctacgaagcgacccactgattattttgcggaaatggccaaatctgatctgcagatgcagaagattcgacagaagctgcagactaaacaggctgccatggagaggtctgaaaaagctaagcaactgcgagcacttaggaaatacgggaagaaggtgcaaacggaggttcttcagaagaggcagcaggagaaagcccatatgatgaatgctattaagaaatatcagaaaggcttctctgataaactggatttccttgagggagatcagaaacctctggcacagcgcaagaaggcaggagccaaaggccagcagatgaggaaggggcccagtgctaaacgacggtataaaaaccagaagtttggttttggtggaaagaagaaaggctcaaagtggaacactcgggagagctatgatgatgtatctagcttccgggccaagacagctcatggcagaggcctcaagaggcctggcaagaaagggtcaaataagagacctggaaaacgaacaagagagaagatgaagaacagaacacactaaatagcatctttgaatacaaagaaccaagaaaaaggaatgaagactcgcaatttcacgacacactttgatcccttctgttggtgtcatgttgtaaacatttctttcaataaactaaagaaaaattattaaaggaacacatacctttggttaaatagtctagactaaaagattgagaagttactttccattgctatctattgataatttagacattgagttcaaattgccttcattttatgataaataatgatttaactgacaccttctc

SEQ ID NO: 9206 - DNA, 4535 bp, Homo sapiens
  source 1..4535: mol_type = unassigned DNA
atggtaaccggcagcagcagccgccacagcagggccggccccagcgccagcgccggtcgcggtcgggctcagctcagtgtgtggtgagcggcggcggcgcggccgggccggggagcgggcgcggcccggcggcctcagcatggaggacggcttctccagctacagcagcctgtacgacacgtcctcgctgctccagttctgcaacgatgacagcgcttctgctgcaagtagcatggaggtgacagaccgcattgcttcactggagcagagagtccagatgcaagaagacgacatccagctgctcaaatcagctctagctgatgtggttcggcggctgaacattactgaggaacagcaggccgtgcttaacaggaaaggacctaccaaagcaagaccactgatgcagaccctgcctttaagaaccacggtcaacaatggcactgtgttaccaaagaaacctactggctctctaccatccccctccggggtcaggaaagaaactgctgtgccagcaaccaaaagtaacatcaagaggaccagctcttctgaacgagtgtctcctgggggtcgaagggaaagcaatggggattccagaggaaaccggaatcgcacaggctccaccagcagctcttccagtggcaaaaagaacagtgaaagcaaacccaaggagcctgtattcagtgcagaagaaggctatgtaaaaatgtttcttcgtggacgccctgttaccatgtacatgcccaaagatcaagtggattcttacagcttggaagcaaaagtagaacttccaaccaagagactcaagctggaatgggtctatgggtacaggggtcgagactgccgtaacaacctgtacttgcttccgacgggagagaccgtctacttcatcgcatccgtggtggtgttatacaacgtggaggagcaactgcagaggcattacgctggccacaacgatgacgtgaagtgcctagcagttcatcctgatcggatcacgatagcaacaggacaagttgcgggcacatcgaaggatggaaaacaattgcccccacatgtgcgcatctgggattctgtgacattgaatactctccacgtcattggaataggtttttttgaccgagcagtcacctgtattgcattctcaaaatctaatggaggaaccaatctctgtgctgtggatgactccaacgaccatgtgctctctgtatgggactggcagaaagaagaaaaactagcagatgtgaagtgctctaatgaagctgtgtttgctgcggatttccaccccacggacaccaacatcatagttacttgtggaaaatcacatctctacttttggacactagaaggaagctcccttaataagaagcaaggattattcgagaaacaagaaaagccaaagtttgtcctctgtgtgactttctctgaaaacggtgacaccattactggagattcaagtggcaacatcttagtatggggaaaaggtacaaatcgaataagctatgcagttcagggggcccatgagggtggcatttttgcactttgtatgttaagagatggcacactggtgtcgggaggtgggaaagaccgaaagctcatttcttggagcggaaactatcaaaaacttcgtaaaacggagattccagaacagtttggtccaatacggacagtggccgaggggaaaggcgatgtgatcttgattggcacaactcgaaactttgtcctgcagggcactctgtcaggggacttcacacccattactcagggtcacactgatgagctctggggactggccatccatgcctcaaaatctcagttcttgacctgtgggcatgacaagcatgccactctctgggacgctgtgggtcaccgtcccgtctgggacaaaataatagaggatccagctcagtcttctggttttcatccttcagggtctgtggttgcagtcggaacactcactgggaggtggtttgtgtttgacacagaaacaaaagacttggtcaccgttcacacagatggaaacgaacagctctctgtaatgcgatactcaccagatgggaatttcttagccataggctcacatgacaactgcatctatatatatggcgttagtgacaacgggaggaagtacacgcgagtgggcaagtgctcgggtcattccagcttcattactcacctggactggtctgtaaactcacagttcctcgtgtcaaattccggagactacgaaatcctctactgggttccctctgcctgtaagcaagtcgtaagtgtggaaactacaagagacattgaatgggctacctatacctgcactttgggattccatgtttttggagtgtggccagaaggctcggacggaaccgacatcaatgccgtctgtcgggcccatgagaagaaactcctgtcaacaggcgacgactttggcaaagtgcacctcttctcatacccctgctcgcagttcagggctccaagccacatctacggcgggcacagcagccatgtcaccaatgtcgatttcctctgtgaagacagccacctcatctccacgggcgggaaagacacaagcatcatgcagtggcgcgtcatttagtacccaccgagagctgtggggagcagcatgggcaaggaagacacagactcgcattacccttggtcactgtgatttctgttttgtttaaaaaattcttacaaacctcaggaaaactgtgccctccgccggctaccttagcttagcgtgtcagcgggcgccacagcggatcagcggttccgtgttcacttttgttgtacaatatatgacacagtgcacattgaataccaacaaggttgcaacgtttacattatagccacatcaacagaagtaactggtatattcttagtaacttttctatgaactcttcaaaaatggtcacagaatgccttttaaaacattgtatataatcttcactgtttcaccatctagcttgctaagtcaaatatttatgatgataatgaggtactgaaccacgatggctgttgaggaattggtcctaaaaggacagatcacttcagaagagtgaataactgatttgcacagctgaatcaggagacacaaagatgagactgtgtttggttacattttccaaagtttcattgcattctcccttggggaggctgtgagagagggcttgtatccctcttgtgctaagcagactctactcctaactgacttcaatatttcagcagggtacacaggcgtttccaagtttcagtgacaccgtcctgcctaaccagatgcggtcagcctcttcacacccacctggcttgcatcccccatcccttgttcacacgccctgattcacggtgagacattttgccaccttcttgtgtatattacttggcatgagatgatattgtacttgtataggattctagcaattcataataaatatgtaagactaggctttactgtcttatgcttatggacattgtatatttgtattttatgaccaagtagaccaagtcagaaagatctctctcgagcgtaccataaacctgcagagagaagtctcgaaaggctccaccaggtaccaagggcagctgcttttcctgtcttttgtgcatgggcgacccattacagtatgagataagattgagttctgatgcgttaaacggaggtggcagaaatttgtcaagaaggccttatccatttcgattgtgtgacagattgaaatttattgtttacattggggaatgtatctcaaatttttaaatagaagagtaataaacagactttaaagcaaatattaagatttttactcattcaaggcaagtaaatgaatggaattatctgagctctatggcactggttgtttagagtgactgatgaagtgcaactttcaaaaacatttttgatgacatcaccagcctactgcagaagtgcagggcaccagtaaacaccatgtattattgaagatgaatctgtttgtatgtatccttgtcaaatatattctataatgaaataaaatctgaaaagtggatttcttattgacctatattcatgaaagcatataaattaaaatatttaaaattagatatgattcacactatattctgtttcatatgcagattttattctcacctgggccatttgcagatgagactgtagtttgcagatgagactgtagtttgcagatggcgtggaagcattcatcaggggagataaccataaaggatttggcctaattaccatactcaattgtcagtttacgtggttttgtgaatactggcaaaagcaattgtttttaaattaacaatggagagaatgataagatgagggaaggaaaaggcattcattattgacttacatgtcagtaaggtctgcttttatttctatgtactcctgtttgccaagctcaataatggacaaaggatacaaacacacacacatctactattttagataaatgtactgttatatatatatgtaaactactattgctctctttataatgattaatcactttattatgaatgaatgaatgaatttgatggatttaaaa

SEQ ID NO: 9207 - DNA, 4064 bp, Homo sapiens
  source 1..4064: mol_type = unassigned DNA
aaccggcagcagcagccgccacagcagggccggccccagcgccagcgccggtcgcggtcgggctcagctcagtgtgtggtgagcggcggcggcgcggccgggccggggagcgggcgcggcccggcggcctcagcatggaggacggcttctccagctacagcagcctgtacgacacgtcctcgctgctccagttctgcaacgatgacagcgcttctgctgcaagtagcatggaggtgacagaccgcattgcttcactggagcagagagtccagatgcaagaagacgacatccagctgctcaaatcagctctagctgatgtggttcggcggctgaacattactgaggaacagcaggccgtgcttaacaggaaaggacctaccaaagcaagaccactgatgcagaccctgcctttaagaaccacggtcaacaatggcactgtgttaccaaagaaacctactggctctctaccatccccctccggggtcaggaaagaaactgctgtgccagcaaccaaaagattaaacagatctgtgagtcttctcaatgcttgcaaactgaatagatcgacaccaagtaacatcaagaggaccagctcttctgaacgagtgtctcctgggggtcgaagggaaagcaatggggattccagaggaaaccggaatcgcacaggctccaccagcagctcttccagtggcaaaaagaacagtgaaagcaaacccaaggagcctgtattcagtgcagaagaaggctatgtaaaaatgtttcttcgtggacgccctgttaccatgtacatgcccaaagatcaagtggattcttacagcttggaagcaaaagtagaacttccaaccaagagactcaagctggaatgggtctatgggtacaggggtcgagactgccgtaacaacctgtacttgcttccgacgggagagaccgtctacttcatcgcatccgtggtggtgttatacaacgtggaggagcaactgcagaggcattacgctggccacaacgatgacgtgaagtgcctagcagttcatcctgatcggatcacgatagcaacaggacaagttgcgggcacatcgaaggatggaaaacaattgcccccacatgtgcgcatctgggattctgtgacattgaatactctccacgtcattggaataggtttttttgaccgagcagtcacctgtattgcattctcaaaatctaatggaggaaccaatctctgtgctgtggatgactccaacgaccatgtgctctctgtatgggactggcagaaagaagaaaaactagcagatgtgaagtgctctaatgaagctgtgtttgctgcggatttccaccccacggacaccaacatcatagttacttgtggaaaatcacatctctacttttggacactagaaggaagctcccttaataagaagcaaggattattcgagaaacaagaaaagccaaagtttgtcctctgtgtgactttctctgaaaacggtgacaccattactggagattcaagtggcaacatcttagtatggggaaaaggtacaaatcgaataagctatgcagttcagggggcccatgagggtggcatttttgcactttgtatgttaagagatggcacactggtgtcgggaggtgggaaagaccgaaagctcatttcttggagcggaaactatcaaaaacttcgtaaaacggagattccagaacagtttggtccaatacggacagtggccgaggggaaaggcgatgtgatcttgattggcacaactcgaaactttgtcctgcagggcactctgtcaggggacttcacacccattactcagggtcacactgatgagctctggggactggccatccatgcctcaaaatctcagttcttgacctgtgggcatgacaagcatgccactctctgggacgctgtgggtcaccgtcccgtctgggacaaaataatagaggatccagctcagtcttctggttttcatccttcagggtctgtggttgcagtcggaacactcactgggaggtggtttgtgtttgacacagaaacaaaagacttggtcaccgttcacacagatggaaacgaacagctctctgtaatgcgatactcaccagatgggaatttcttagccataggctcacatgacaactgcatctatatatatggcgttagtgacaacgggaggaagtacacgcgagtgggcaagtgctcgggtcattccagcttcattactcacctggactggtctgtaaactcacagttcctcgtgtcaaattccggagactacgaaatcctctactgggttccctctgcctgtaagcaagtcgtaagtgtggaaactacaagagacattgaatgggctacctatacctgcactttgggattccatgtttttggagtgtggccagaaggctcggacggaaccgacatcaatgccgtctgtcgggcccatgagaagaaactcctgtcaacaggcgacgactttggcaaagtgcacctcttctcatacccctgctcgcagttcagggctccaagccacatctacggcgggcacagcagccatgtcaccaatgtcgatttcctctgtgaagacagccacctcatctccacgggcgggaaagacacaagcatcatgcagtggcgcgtcatttagtacccaccgagagctgtggggagcagcatgggcaaggaagacacagactcgcattacccttggtcactgtgatttctgttttgtttaaaaaattcttacaaacctcaggaaaactgtgccctccgccggctaccttagcttagcgtgtcagcgggcgccacagcggatcagcggttccgtgttcacttttgttgtacaatatatgacacagtgcacattgaataccaacaaggttgcaacgtttacattatagccacatcaacagaagtaactggtatattcttagtaacttttctatgaactcttcaaaaatggtcacagaatgccttttaaaacattgtatataatcttcactgtttcaccatctagcttgctaagtcaaatatttatgatgataatgaggtactgaaccacgatggctgttgaggaattggtcctaaaaggacagatcacttcagaagagtgaataactgatttgcacagctgaatcaggagacacaaagatgagactgtgtttggttacattttccaaagtttcattgcattctcccttggggaggctgtgagagagggcttgtatccctcttgtgctaagcagactctactcctaactgacttcaatatttcagcagggtacacaggcgtttccaagtttcagtgacaccgtcctgcctaaccagatgcggtcagcctcttcacacccacctggcttgcatcccccatcccttgttcacacgccctgattcacggtgagacattttgccaccttcttgtgtatattacttggcatgagatgatattgtacttgtataggattctagcaattcataataaatatgtaagactaggctttactgtcttatgcttatggacattgtatatttgtattttatgaccaagtagaccaagtcagaaagatctctctcgagcgtaccataaacctgcagagagaagtctcgaaaggctccaccaggtaccaagggcagctgcttttcctgtcttttgtgcatgggcgacccattacagtatgagataagattgagttctgatgcgttaaacggaggtggcagaaatttgtcaagaaggccttatccatttcgattgtgtgacagattgaaatttattgtttacattggggaatgtatctcaaatttttaaatagaagagtaataaacagactttaaagcaaatattaagatttttactcattcaaggcaagtaaatgaatggaattatctgagctctatggcactggttgtttagagtgactgatgaagtgcaactttcaaaaacatttttgatgacatcaccagcctactgcagaagtgcagggcaccagtaaacaccatgtattattgaagatgaatctgtttgtatgtatccttgtcaaatatattctataatgaaataaaatctgaaaagtgg

SEQ ID NO: 9208 - DNA, 3955 bp, Homo sapiens
  source 1..3955: mol_type = unassigned DNA
agcgccggtcgcggtcgggctcagcatggaggacggcttctccagctacagcagcctgtacgacacgtcctcgctgctccagttctgcaacgatgacagcgcttctgctgcaagtagcatggaggtgacagaccgcattgcttcactggagcagagagtccagatgcaagaagacgacatccagctgctcaaatcagctctagctgatgtggttcggcggctgaacattactgaggaacagcaggccgtgcttaacaggaaaggacctaccaaagcaagaccactgatgcagaccctgcctttaagaaccacggtcaacaatggcactgtgttaccaaagaaacctactggctctctaccatccccctccggggtcaggaaagaaactgctgtgccagcaaccaaaagattaaacagatctgtgagtcttctcaatgcttgcaaactgaatagatcgacaccaagtaacatcaagaggaccagctcttctgaacgagtgtctcctgggggtcgaagggaaagcaatggggattccagaggaaaccggaatcgcacaggctccaccagcagctcttccagtggcaaaaagaacagtgaaagcaaacccaaggagcctgtattcagtgcagaagaaggctatgtaaaaatgtttcttcgtggacgccctgttaccatgtacatgcccaaagatcaagtggattcttacagcttggaagcaaaagtagaacttccaaccaagagactcaagctggaatgggtctatgggtacaggggtcgagactgccgtaacaacctgtacttgcttccgacgggagagaccgtctacttcatcgcatccgtggtggtgttatacaacgtggaggagcaactgcagaggcattacgctggccacaacgatgacgtgaagtgcctagcagttcatcctgatcggatcacgatagcaacaggacaagttgcgggcacatcgaaggatggaaaacaattgcccccacatgtgcgcatctgggattctgtgacattgaatactctccacgtcattggaataggtttttttgaccgagcagtcacctgtattgcattctcaaaatctaatggaggaaccaatctctgtgctgtggatgactccaacgaccatgtgctctctgtatgggactggcagaaagaagaaaaactagcagatgtgaagtgctctaatgaagctgtgtttgctgcggatttccaccccacggacaccaacatcatagttacttgtggaaaatcacatctctacttttggacactagaaggaagctcccttaataagaagcaaggattattcgagaaacaagaaaagccaaagtttgtcctctgtgtgactttctctgaaaacggtgacaccattactggagattcaagtggcaacatcttagtatggggaaaaggtacaaatcgaataagctatgcagttcagggggcccatgagggtggcatttttgcactttgtatgttaagagatggcacactggtgtcgggaggtgggaaagaccgaaagctcatttcttggagcggaaactatcaaaaacttcgtaaaacggagattccagaacagtttggtccaatacggacagtggccgaggggaaaggcgatgtgatcttgattggcacaactcgaaactttgtcctgcagggcactctgtcaggggacttcacacccattactcagggtcacactgatgagctctggggactggccatccatgcctcaaaatctcagttcttgacctgtgggcatgacaagcatgccactctctgggacgctgtgggtcaccgtcccgtctgggacaaaataatagaggatccagctcagtcttctggttttcatccttcagggtctgtggttgcagtcggaacactcactgggaggtggtttgtgtttgacacagaaacaaaagacttggtcaccgttcacacagatggaaacgaacagctctctgtaatgcgatactcaccagatgggaatttcttagccataggctcacatgacaactgcatctatatatatggcgttagtgacaacgggaggaagtacacgcgagtgggcaagtgctcgggtcattccagcttcattactcacctggactggtctgtaaactcacagttcctcgtgtcaaattccggagactacgaaatcctctactgggttccctctgcctgtaagcaagtcgtaagtgtggaaactacaagagacattgaatgggctacctatacctgcactttgggattccatgtttttggagtgtggccagaaggctcggacggaaccgacatcaatgccgtctgtcgggcccatgagaagaaactcctgtcaacaggcgacgactttggcaaagtgcacctcttctcatacccctgctcgcagttcagggctccaagccacatctacggcgggcacagcagccatgtcaccaatgtcgatttcctctgtgaagacagccacctcatctccacgggcgggaaagacacaagcatcatgcagtggcgcgtcatttagtacccaccgagagctgtggggagcagcatgggcaaggaagacacagactcgcattacccttggtcactgtgatttctgttttgtttaaaaaattcttacaaacctcaggaaaactgtgccctccgccggctaccttagcttagcgtgtcagcgggcgccacagcggatcagcggttccgtgttcacttttgttgtacaatatatgacacagtgcacattgaataccaacaaggttgcaacgtttacattatagccacatcaacagaagtaactggtatattcttagtaacttttctatgaactcttcaaaaatggtcacagaatgccttttaaaacattgtatataatcttcactgtttcaccatctagcttgctaagtcaaatatttatgatgataatgaggtactgaaccacgatggctgttgaggaattggtcctaaaaggacagatcacttcagaagagtgaataactgatttgcacagctgaatcaggagacacaaagatgagactgtgtttggttacattttccaaagtttcattgcattctcccttggggaggctgtgagagagggcttgtatccctcttgtgctaagcagactctactcctaactgacttcaatatttcagcagggtacacaggcgtttccaagtttcagtgacaccgtcctgcctaaccagatgcggtcagcctcttcacacccacctggcttgcatcccccatcccttgttcacacgccctgattcacggtgagacattttgccaccttcttgtgtatattacttggcatgagatgatattgtacttgtataggattctagcaattcataataaatatgtaagactaggctttactgtcttatgcttatggacattgtatatttgtattttatgaccaagtagaccaagtcagaaagatctctctcgagcgtaccataaacctgcagagagaagtctcgaaaggctccaccaggtaccaagggcagctgcttttcctgtcttttgtgcatgggcgacccattacagtatgagataagattgagttctgatgcgttaaacggaggtggcagaaatttgtcaagaaggccttatccatttcgattgtgtgacagattgaaatttattgtttacattggggaatgtatctcaaatttttaaatagaagagtaataaacagactttaaagcaaatattaagatttttactcattcaaggcaagtaaatgaatggaattatctgagctctatggcactggttgtttagagtgactgatgaagtgcaactttcaaaaacatttttgatgacatcaccagcctactgcagaagtgcagggcaccagtaaacaccatgtattattgaagatgaatctgtttgtatgtatccttgtcaaatatattctataatgaaataaaatctgaaaagtgg

SEQ ID NO: 9209 - DNA, 5549 bp, Homo sapiens
  source 1..5549: mol_type = unassigned DNA
ggcgcggcgctcgcggctgctgcctgggagggaggccgggcaggcggctgagcggcgcggctctcaacgtgacggggaagtggttcgggcggccgcggcttactaccccagggcgaacggacggacgacggaggcgggagccggtagccgagccgggcgacctagagaacgagcgggtcaggctcagcgtcggccactctgtcggtccgctgaatgaagtgcccgcccctctaagcccggagcccggcgctttccccgcaagatggacggtttcgccggcagtctcgatgatagtatttctgctgcaagtacttctgatgttcaagatcgcctgtcagctcttgagtcacgagttcagcaacaagaagatgaaatcactgtgctaaaggcggctttggctgatgttttgaggcgtcttgcaatctctgaagatcatgtggcctcagtgaaaaaatcagtctcaagtaaaggccaaccaagccctcgagcagttattcccatgtcctgtataaccaatggaagtggtgcaaacagaaaaccaagtcataccagtgctgtctcaattgcaggaaaagaaactctttcatctgctgctaaaagtggtacagaaaaaaagaaagaaaaaccacaaggacagagagaaaaaaaagaggaatctcattctaatgatcaaagtccacaaattcgagcatcaccttctccccagccctcttcacaacctctccaaatacacagacaaactccagaaagcaagaatgctactcccaccaaaagcataaaacgaccatcaccagctgaaaagtcacataattcttgggaaaattcagatgatagccgtaataaattgtcgaaaataccttcaacacccaaattaataccaaaagttaccaaaactgcagacaagcataaagatgtcatcatcaaccaagaaggagaatatattaaaatgtttatgcgcggtcggccaattaccatgttcattccttccgatgttgacaactatgatgacatcagaacggaactgcctcctgagaagctcaaactggagtgggcatatggttatcgaggaaaggactgtagagctaatgtttaccttcttccgaccgggaaaatagtttatttcattgcatcagtagtagtactatttaattatgaggagagaactcagcgacactacctgggccatacagactgtgtgaaatgccttgctatacatcctgacaaaattaggattgcaactggacagatagctggcgtggataaagatggaaggcctctacaaccccacgtcagagtgtgggattctgttactctatccacactgcagattattggacttggcacttttgagcgtggagtaggatgcctggatttttcaaaagcagattcaggtgttcatttatgtattattgatgactccaatgagcatatgcttactgtatgggactggcagaagaaagcaaaaggagcagaaataaagacaacaaatgaagttgttttggctgtggagtttcacccaacagatgcaaataccataattacatgcggtaaatctcatattttcttctggacctggagcggcaattcactaacaagaaaacagggaatttttgggaaatatgaaaagccaaaatttgtgcagtgtttagcattcttggggaatggagatgttcttactggagactcaggtggagtcatgcttatatggagcaaaactactgtagagcccacacctgggaaaggacctaaaggtgtatatcaaatcagcaaacaaatcaaagctcatgatggcagtgtgttcacactttgtcagatgagaaatgggatgttattaactggaggagggaaagacagaaaaataattctgtgggatcatgatctgaatcctgaaagagaaatagaggttcctgatcagtatggcacaatcagagctgtagcagaaggaaaggcagatcaatttttagtaggcacatcacgaaactttattttacgaggaacatttaatgatggcttccaaatagaagtacagggtcatacagatgagctttggggtcttgccacacatcccttcaaagatttgctcttgacatgtgctcaggacaggcaggtgtgcctgtggaactcaatggaacacaggctggaatggaccaggctggtagatgaaccaggacactgtgcagattttcatccaagtggcacagtggtggccataggaacgcactcaggcaggtggtttgttctggatgcagaaaccagagatctagtttctatccacacagacgggaatgaacagctctctgtgatgcgctactcaatagatggtaccttcctggctgtaggatctcatgacaactttatttacctctatgtagtctctgaaaatggaagaaaatatagcagatatggaaggtgcactggacattccagctacatcacacaccttgactggtccccagacaacaagtatataatgtctaactcgggagactatgaaatattgtactgggacattccaaatggctgcaaactaatcaggaatcgatcggattgtaaggacattgattggacgacatatacctgtgtgctaggatttcaagtatttggtgtctggccagaaggatctgatgggacagatatcaatgcactggtgcgatcccacaatagaaaggtgatagctgttgccgatgacttttgtaaagtccatctgtttcagtatccctgctccaaagcaaaggctcccagtcacaagtacagtgcccacagcagccatgtcaccaatgtcagttttactcacaatgacagtcacctgatatcaactggtggaaaagacatgagcatcattcagtggaaacttgtggaaaagttatctttgcctcagaatgagactgtagcggatactactctaaccaaagcccccgtctcttccactgaaagtgtcatccaatctaatactcccacaccgcctccttctcagcccttaaatgagacagctgaagaggaaagtagaataagcagttctcccacacttctggagaacagcctggaacaaactgtggagccaagtgaagaccacagcgaggaggagagtgaagagggcagcggagaccttggtgagcctctttatgaagagccatgcaacgagataagcaaggagcaggccaaagccacccttctggaggaccagcaagacccttcgccctcgtcctaacaccctggcttcagtgcaactcttttccttcagctgcatgtgattttgtgataaagttcaggtaacaggatgggcagtgatggagaatcactgttgattgagattttggtttccatgtgatttgttttcttcaatagtcttattttcagtctctcaaatacagccaacttaaagttttagtttggtgtttattgaaaattaaccaaacttaatactaggagaagactgaatcattaatgatgtctcacaaattactgtgtacctaagtggtgtgatgtaaatactggaaacaaaaacagcagttgcattgattttgaaaacaaacccccttgttatctgaacatgttttcttcaggaacaaccagaggtatcacaaacactgttactcatctactggctcagactgtactacttttttttttttttttcctgaaaaagaaaccagaaaaaaatgtactcttactgagataccctctcaccccaaatgtgtaatggaaaatttttaattaagaaaaacttcagttttgccaagtgcaatggtgttgccttctttaaaaaatgccgttttcttacactaccagtggatgtccagacatgctcttagtctactagagaggtgctgccttttctaagtcataatgaggaacagtcccttaatttcttgtgtgcaactctgttttatcctagaactaagagagcattggtttgttaaagagctttcaatgtatattaaaaccttcaatactcagaaatgatggattcctccaaggagtcctttactagcctaaacattctcaaatgtttgagattcaagtgaatggaaggaaaaccacatgcctttaaaactaaactgtaataattacctggctaatttcagctaagccttcatcataatttgttccctcagtaataggagaaatataaatacagtaagtttagattattgaattggtgcttgaaatttattggttttgttgtaattttatacagattatatgagggataagatactcatcaaattgcaaattcttttttttacagaagtgtgggtaacagtcacagcagttttttttaccaacagcatacttaacagacttgctgtgtagcagtttttttctggtggagttgctgtaagtcttgtaagtctaatgtggctatcctactcttttgggcaatgcatgtattatgcattggaaaggtattttttttaagttctgttggctagctatggttttcagtacatttcctactttaagagtaattactgacaaatatgtatttcctatatgtttatactttgattataaaaaagtattttgttttgattttttaacttgctgcattgttttgatactttctatttttttggtcaaatcatgtttagaaactttggatgagttaagaagtcttaagtatgcaggcgtttacgtgattgtgccattccaaagtgcatcagaactgtcattcccttctaatatcttctcaggagtaatacaaatcaggtatttcatcatcatttggtaatatgaaaactccagtgaactcccaaggacatttacaacatttatattcacacgctgtatggaagggtgtgggtgtgtgtgaaggggcgagtggagacactgtgtgtatctctagataagaagatatgcaccacgttgaaaatactcagtgtagatctctatgtgtataggtatctgtatatctttccttttgtttacaactgttaaaaaacctcaaaatagttctcttcaaaagaagagagattccaagcaacccatctttcttcagtatgtatgttctgtacatacttatcggagcgcgccagtaagtatcaggcatatatatctgtctgttagcaatgattattacatcatcagatcagcatgtgctatactccctgcaagaaatatactgacatgaacaggcagttcttggagaagaaagagcatttctttaagtacctggggaatacagctctcagtgatcagcagggagtttatttgaggacatcagtcacctttggggttgccatgtacaatgagatttataatcatgatactcttcggtggtagtttcaaaagacactactaatacgcaggaagcgttccagctatttaatgctggcaactactgtttaatggtcagttaaatctgtgataatggttggaagtgggtggggttatgaaattgtagatgtttttagaaaaacttgtgaatgaaaatgaatccaagtgtttcatgtgaagatgttgagccattgctatcatgcattcctgtctcatggcagaaaattttgaagattaaaaaataaaataatcaaaatgtttcctctttctaa

SEQ ID NO: 9210 - DNA, 1455 bp, Homo sapiens
  source 1..1455: mol_type = unassigned DNA
tcagcaaacaaatcaaagctcatgatggcagtgtgttcacactttgtcagatgagaaatgggatgttattaactggaggagggaaagacagaaaaataattctgtgggatcatgatctgaatcctgaaagagaaatagaggttcctgatcagtatggcacaatcagagctgtagcagaaggaaaggcagatcaatttttagtaggcacatcacgaaactttattttacgaggaacatttaatgatggcttccaaatagaagtacagggtcatacagatgagctttggggtcttgccacacatcccttcaaagatttgctcttgacatgtgctcaggacaggcaggtgtgcctgtggaactcaatggaacacaggctggaatggaccaggctggtagatgaaccaggacactgtgcagattttcatccaagtggcacagtggtggccataggaacgcactcaggcagggacattccagctacatcacacaccttgactggtccccagacaacaagtatataatgtctaactcgggagactatgaaatattgtactgggacattccaaatggctgcaaactaatcaggaatcgatcggattgtaaggacattgattggacgacatatacctgtgtgctaggatttcaagtatttggtgtctggccagaaggatctgatgggacagatatcaatgcactggtgcgatcccacaatagaaaggtgatagctgttgccgatgacttttgtaaagtccatctgtttcagtatccctgctccaaagcaaaggctcccagtcacaagtacagtgcccacagcagccatgtcaccaatgtcagttttactcacaatgacagtcacctgatatcaactggtggaaaagacatgagcatcattcagtggaaacttgtggaaaagttatctttgcctcagaatgagactgtagcggatactactctaaccaaagcccccgtctcttccactgaaagtgtcatccaatctaatactcccacaccgcctccttctcagcccttaaatgagacagctgaagaggaaagtagaataagcagttctcccacacttctggagaacagcctggaacaaactgtggagccaagtgaagaccacagcgaggaggagagtgaagagggcagcggagaccttggtgagcctctttatgaagagccatgcaacgagataagcaaggagcaggccaaagccacccttctggaggaccagcaagacccttcgccctcgtcctaacaccctggcttcagtgcaactcttttccttcagctgcatgtgattttgtgataaagttcaggtaacaggatgggcagtgatggagaatcactgttgattgagattttggtttccatgtgatttgttttcttcaatagtcttattttcagtctctcaaatacagccaacttaaagttttagtttggtgtttattgaaa

SEQ ID NO: 9211 - DNA, 3568 bp, Homo sapiens
  source 1..3568: mol_type = unassigned DNA
gcggcgctcgcggctgctgcctgggagggaggccgggcaggcggctgagcggcgcggctctcaacgtgacggggaagtggttcgggcggccgcggcttactaccccagggcgaacggacggacgacggaggcgggagccggtagccgagccgggcgacctagagaacgagcgggtcaggctcagcgtcggccactctgtcggtccgctgaatgaagtgcccgcccctctaagcccggagcccggcgctttccccgcaagatggacggtttcgccggcagtctcgatgatagtatttctgctgcaagtacttctgatgttcaagatcgcctgtcagctcttgagtcacgagttcagcaacaagaagatgaaatcactgtgctaaaggcggctttggctgatgttttgaggcgtcttgcaatctctgaagatcatgtggcctcagtgaaaaaatcagtctcaagtaaaggccaaccaagccctcgagcagttattcccatgtcctgtataaccaatggaagtggtgcaaacagaaaaccaagtcataccagtgctgtctcaattgcaggaaaagaaactctttcatctgctgctaaaagcataaaacgaccatcaccagctgaaaagtcacataattcttgggaaaattcagatgatagccgtaataaattgtcgaaaataccttcaacacccaaattaataccaaaagttaccaaaactgcagacaagcataaagatgtcatcatcaaccaagaaggagaatatattaaaatgtttatgcgcggtcggccaattaccatgttcattccttccgatgttgacaactatgatgacatcagaacggaactgcctcctgagaagctcaaactggagtgggcatatggttatcgaggaaaggactgtagagctaatgtttaccttcttccgaccgggaaaatagtttatttcattgcatcagtagtagtactatttaattatgaggagagaactcagcgacactacctgggccatacagactgtgtgaaatgccttgctatacatcctgacaaaattaggattgcaactggacagatagctggcgtggataaagatggaaggcctctacaaccccacgtcagagtgtgggattctgttactctatccacactgcagattattggacttggcacttttgagcgtggagtaggatgcctggatttttcaaaagcagattcaggtgttcatttatgtattattgatgactccaatgagcatatgcttactgtatgggactggcagaagaaagcaaaaggagcagaaataaagacaacaaatgaagttgttttggctgtggagtttcacccaacagatgcaaataccataattacatgcggtaaatctcatattttcttctggacctggagcggcaattcactaacaagaaaacagggaatttttgggaaatatgaaaagccaaaatttgtgcagtgtttagcattcttggggaatggagatgttcttactggagactcaggtggagtcatgcttatatggagcaaaactactgtagagcccacacctgggaaaggacctaaaggtgtatatcaaatcagcaaacaaatcaaagctcatgatggcagtgtgttcacactttgtcagatgagaaatgggatgttattaactggaggagggaaagacagaaaaataattctgtgggatcatgatctgaatcctgaaagagaaatagaggttcctgatcagtatggcacaatcagagctgtagcagaaggaaaggcagatcaatttttagtaggcacatcacgaaactttattttacgaggaacatttaatgatggcttccaaatagaagtacagggtcatacagatgagctttggggtcttgccacacatcccttcaaagatttgctcttgacatgtgctcaggacaggcaggtgtgcctgtggaactcaatggaacacaggctggaatggaccaggctggtagatgaaccaggacactgtgcagattttcatccaagtggcacagtggtggccataggaacgcactcaggcaggtggtttgttctggatgcagaaaccagagatctagtttctatccacacagacgggaatgaacagctctctgtgatgcgctactcaatagatggtaccttcctggctgtaggatctcatgacaactttatttacctctatgtagtctctgaaaatggaagaaaatatagcagatatggaaggtgcactggacattccagctacatcacacaccttgactggtccccagacaacaagtatataatgtctaactcgggagactatgaaatattgtactgggacattccaaatggctgcaaactaatcaggaatcgatcggattgtaaggacattgattggacgacatatacctgtgtgctaggatttcaagtatttggtgtctggccagaaggatctgatgggacagatatcaatgcactggtgcgatcccacaatagaaaggtgatagctgttgccgatgacttttgtaaagtccatctgtttcagtatccctgctccaaagcaaaggctcccagtcacaagtacagtgcccacagcagccatgtcaccaatgtcagttttactcacaatgacagtcacctgatatcaactggtggaaaagacatgagcatcattcagtggaaacttgtggaaaagttatctttgcctcagaatgagactgtagcggatactactctaaccaaagcccccgtctcttccactgaaagtgtcatccaatctaatactcccacaccgcctccttctcagcccttaaatgagacagctgaagaggaaagtagaataagcagttctcccacacttctggagaacagcctggaacaaactgtggagccaagtgaagaccacagcgaggaggagagtgaagagggcagcggagaccttggtgagcctctttatgaagagccatgcaacgagataagcaaggagcaggccaaagccacccttctggaggaccagcaagacccttcgccctcgtcctaacaccctggcttcagtgcaactcttttccttcagctgcatgtgattttgtgataaagttcaggtaacaggatgggcagtgatggagaatcactgttgattgagattttggtttccatgtgatttgttttcttcaatagtcttattttcagtctctcaaatacagccaacttaaagttttagtttggtgtttattgaaaattaaccaaacttaatactaggagaagactgaatcattaatgatgtctcacaaattactgtgtacctaagtggtgtgatgtaaatactggaaacaaaaacagcagttgcattgattttgaaaacaaacccccttgttatctgaacatgttttcttcaggaacaaccagaggtatcacaaacactgttactcatctactggctcagactgtactacttttttttttttttttcctgaaaaagaaaccagaaaaaaatgtactcttactgagataccctctcaccccaaatgtgtaatggaaaatttttaattaagaaaaacttcagttttgccaagtgcaa

SEQ ID NO: 9212 - DNA, 1860 bp, Homo sapiens
  source 1..1860: mol_type = unassigned DNA
agagaagttggagctttttcgttgtttttttttttttccctcctgtgacatgtgctttagttgcagtggaaaggaaatgtgtcatctgtggtttggttttaaaagtggaaaactagctgcacatatccttttttactgcagatttactttaaggctcatattctccaagtctattctgctttaaaaagaagacaagaaaagaagtggtttatcaaaatcacgttataatcagattttgaccaagcattttgtaagtatacaaatgtcagccaatgacatataacaaccatttcttataaaaccttgatgttcaaaagcctgactagcagtggcatccatgttgcttaggagttggtttggaaacaaagactttcaggccctacctatactagctagattgccaagcatgcccacggacatggaacacacaggacattacctacatcttgcctttctgatgacaacagttttttctttgtctcctggaacaaaagcaaactatacccgtctgtgggctaacagtacttcttcctgggattcagttattcaaaacaagacaggcagaaaccaaaatgaaaacattaacacaaaccctataactcctgaagtagattataaaggtaattctacaaacatgcctgaaacatctcacatcgtagctttaacttctaaatctgaacaggagctttatataccttctgtcgtcagcaacagtccttcaacagtacagagcattgaaaacacaagcaaaagtcatggtgaaattttcaaaaaggatgtctgtgcggaaaacaacaacaacatggctatgctaatttgcttaattataattgcagtgctttttcttatctgtacctttctatttctatcaactgtggttttggcaaacaaagtctcttctctcagacgatcaaaacaagtaggcaagcgtcagcctagaagcaatggcgattttctggcaagcggtctatggcccgctgaatcagacacttggaaaagaacaaaacagctcacaggacccaacctagtgatgcaatctactggagtgctcacagctacaagggaaagaaaagatgaagaaggaactgaaaaacttactaacaaacagataggttagtgaagaaaaatgcaaagtagcaatgagaaggcttatggagtaaaaatgaagtcagttggtatttaatcccaaagtgttgttctgattatctaaaatttgacatggtagaccttgcaatttagaatcaagcaggtgagacagggagaagtatgcctgcttaattatttaaactgtgtacttttgttttgacactgaatattttaaaaagcaaataataaaataactaagcatttgaggaaaattttaaggataaattgaggaaactgattaatagagatagcaagggataattaaataaatattccctatgtagcaacagtggttagatgatctttgtctgaatgtaattaaactttgaatagttttagtgtgtccttaaagccaagtatatgctttaacatcaaatggaagtcaaattcctaatgcatagatagagagagctaaactgtgtaatttaatggtatcttccttgctggatgtggcagaatccacaccagcttatcaaccaacacagctaattttagaatagatcctttatctttccatatggcacacgtaagaaagtgtttttctactattaatattaaattaaaacctttacttttgtataataaattaaaactcagaataaacctgtgaccacgtatatttgcattcactttattactttagagaacacattgtaaagatcaataagaaatagagcacaactaaaataaataagatttatagccacaccaata

SEQ ID NO: 9213 - DNA, 2869 bp, Homo sapiens
  source 1..2869: mol_type = unassigned DNA
agagaagttggagctttttcgttgtttttttttttttccctcctgtgacatgtgctttagttgcagtggaaaggaaatgtgtcatctgtggtttggttttaaaagtggaaaactagctgcacatatccttttttactgcagatttactttaaggctcatattctccaagtctattctgctttaaaaagaagacaagaaaagaagtggtttatcaaaatcacgttataatcagattttgaccaagcattttgtaagattgccaagcatgcccacggacatggaacacacaggacattacctacatcttgcctttctgatgacaacagttttttctttgtctcctggaacaaaagcaaactatacccgtctgtgggctaacagtacttcttcctgggattcagttattcaaaacaagacaggcagaaaccaaaatgaaaacattaacacaaaccctataactcctgaagtagattataaaggtaattctacaaacatgcctgaaacatctcacatcgtagctttaacttctaaatctgaacaggagctttatataccttctgtcgtcagcaacagtccttcaacagtacagagcattgaaaacacaagcaaaagtcatggtgaaattttcaaaaaggatgtctgtgcggaaaacaacaacaacatggctatgctaatttgcttaattataattgcagtgctttttcttatctgtacctttctatttctatcaactgtggttttggcaaacaaagtctcttctctcagacgatcaaaacaagtaggcaagcgtcagcctagaagcaatggcgattttctggcaagcggtctatggcccgctgaatcagacacttggaaaagaacaaaacagctcacaggacccaacctagtgatgcaatctactggagtgctcacagctacaagggaaagaaaagatgaagaaggaactgaaaaacttactaacaaacagataggttagtgaagaaaaatgcaaagtagcaatgagaaggcttatggagtaaaaatgaagtcagttggtatttaatcccaaagtgttgttctgattatctaaaatttgacatggtagaccttgcaatttagaatcaagcaggtgagacagggagaagtatgcctgcttaattatttaaactgtgtacttttgttttgacactgaatattttaaaaagcaaataataaaataactaagcatttgaggaaaattttaaggataaattgaggaaactgattaatagagatagcaagggataattaaataaatattccctatgtagcaacagtggttagatgatctttgtctgaatgtaattaaactttgaatagttttagtgtgtccttaaagccaagtatatgctttaacatcaaatggaagtcaaattcctaatgcatagatagagagagctaaactgtgtaatttaatggtatcttccttgctggatgtggcagaatccacaccagcttatcaaccaacacagctaattttagaatagatcctttatctttccatatggcacacgtaagaaagtgtttttctactattaatattaaattaaaacctttacttttgtataataaattaaaactcagaataaacctgtgaccacgtatatttgcattcactttattactttagagaacacattgtaaagatcaataagaaatagagcacaactaaaataaataagatttatagccacaccaataggctaagtgtaaacgcaaagtatgtttcactgtttatgattaataatattcatcttttctataaatactacttactggaacattaacaacaagtaccaaaggttgattaatttttggacttcaaggatgccaagtagcctaatgatttattaggggtgtgtgtgtgtgtgtgtgtgtgtgtgtgtgtgtgttcaaatctggaaaactgcatacttcaggttataatttaacctttaaagaaactggcttcaagtaaaataatgacttacatttaagttgagaacccccccatcttcaattaaatatattacaaaaattggtttgagagactttccaaatatctactgaaattaacacagggctaagatcaggccacatttcaaaaatctcatcccttactgggcatttatttcgggcaatatagtaaccattttaaaaatattttttatatgttttttcccaagtatgactacaatcttactctcccttctaagctagtgattcttaccctggctgcatgtcagaatcacctgaagagtttttaaaaaacaccaatgcctaattcccatgtcttccttctgatgcaactggaatggggtgaactctaagcattggtaatttttacgtaactctcaaggtgataactgctcttggtcatcaaattcaaacgtctagctattattaaaatgagaggaaaaaaataaagcatcatttttattatcaatttattagcaatttgtaaaaaacaaatctattctctaaacgagaaatcataacaatattattccagataaagttaagtgttaacaaagtaaaaaggaaagcatgagaatattcatgccagtcatggtgactgaaatcaggttatcttttgaggggaaaaataacccagattagaaatgaaactgggcagacttcccattctgtgcaaaaattgaaaatttgagattgtgcaccagtacatccaggagtaacacaaagcactccttgaatcaagggtcataaataaacacgtgtcagagaaaattaaaagaaattaatatcatcataaaaataggaaattactttcatattcaacatactggtcaaacattttctcaccagagagcttctaccacaaggatatttaaaagaatatttaaaattcacc

SEQ ID NO: 9214 - DNA, 1540 bp, Homo sapiens
  source 1..1540: mol_type = unassigned DNA
atacagtttgtttatttgggcactgcagtacatctggctgaagacaatcaacagcaggcctattatctgttccgtgattgccaagcatgcccacggacatggaacacacaggacattacctacatcttgcctttctgatgacaacagttttttctttgtctcctggaacaaaagcaaactatacccgtctgtgggctaacagtacttcttcctgggattcagttattcaaaacaagacaggcagaaaccaaaatgaaaacattaacacaaaccctataactcctgaagtagattataaaggtaattctacaaacatgcctgaaacatctcacatcgtagctttaacttctaaatctgaacaggagctttatataccttctgtcgtcagcaacagtccttcaacagtacagagcattgaaaacacaagcaaaagtcatggtgaaattttcaaaaaggatgtctgtgcggaaaacaacaacaacatggctatgctaatttgcttaattataattgcagtgctttttcttatctgtacctttctatttctatcaactgtggttttggcaaacaaagtctcttctctcagacgatcaaaacaagtaggcaagcgtcagcctagaagcaatggcgattttctggcaagcggtctatggcccgctgaatcagacacttggaaaagaacaaaacagctcacaggacccaacctagtgatgcaatctactggagtgctcacagctacaagggaaagaaaagatgaagaaggaactgaaaaacttactaacaaacagataggttagtgaagaaaaatgcaaagtagcaatgagaaggcttatggagtaaaaatgaagtcagttggtatttaatcccaaagtgttgttctgattatctaaaatttgacatggtagaccttgcaatttagaatcaagcaggtgagacagggagaagtatgcctgcttaattatttaaactgtgtacttttgttttgacactgaatattttaaaaagcaaataataaaataactaagcatttgaggaaaattttaaggataaattgaggaaactgattaatagagatagcaagggataattaaataaatattccctatgtagcaacagtggttagatgatctttgtctgaatgtaattaaactttgaatagttttagtgtgtccttaaagccaagtatatgctttaacatcaaatggaagtcaaattcctaatgcatagatagagagagctaaactgtgtaatttaatggtatcttccttgctggatgtggcagaatccacaccagcttatcaaccaacacagctaattttagaatagatcctttatctttccatatggcacacgtaagaaagtgtttttctactattaatattaaattaaaacctttacttttgtataataaattaaaactcagaataaacctgtgaccacgtatatttgcattcactttattactttagagaacacattgtaaagatcaataagaaatagagcacaactaaaataaataagatttatagccacaccaata

SEQ ID NO: 9215 - DNA, 1719 bp, Homo sapiens
  source 1..1719: mol_type = unassigned DNA
agagaagttggagctttttcgttgtttttttttttttccctcctgtgacatgtgctttagttgcagtggaaaggaaatgtgtcatctgtggtttggttttaaaagtggaaaactagctgcacatatccttttttactgcagatttactttaaggctcatattctccaagtctattctgctttaaaaagaagacaagaaaagaagtggtttatcaaaatcacgttataatcagattttgaccaagcattttgtaagattgccaagcatgcccacggacatggaacacacaggacattacctacatcttgcctttctgatgacaacagttttttctttgtctcctggaacaaaagcaaactatacccgtctgtgggctaacagtacttcttcctgggattcagttattcaaaacaagacaggcagaaaccaaaatgaaaacattaacacaaaccctataactcctgaagtagattataaaggtaattctacaaacatgcctgaaacatctcacatcgtagctttaacttctaaatctgaacaggagctttatataccttctgtcgtcagcaacagtccttcaacagtacagagcattgaaaacacaagcaaaagtcatggtgaaattttcaaaaaggatgtctgtgcggaaaacaacaacaacatggctatgctaatttgcttaattataattgcagtgctttttcttatctgtacctttctatttctatcaactgtggttttggcaaacaaagtctcttctctcagacgatcaaaacaagtaggcaagcgtcagcctagaagcaatggcgattttctggcaagcggtctatggcccgctgaatcagacacttggaaaagaacaaaacagctcacaggacccaacctagtgatgcaatctactggagtgctcacagctacaagggaaagaaaagatgaagaaggaactgaaaaacttactaacaaacagataggttagtgaagaaaaatgcaaagtagcaatgagaaggcttatggagtaaaaatgaagtcagttggtatttaatcccaaagtgttgttctgattatctaaaatttgacatggtagaccttgcaatttagaatcaagcaggtgagacagggagaagtatgcctgcttaattatttaaactgtgtacttttgttttgacactgaatattttaaaaagcaaataataaaataactaagcatttgaggaaaattttaaggataaattgaggaaactgattaatagagatagcaagggataattaaataaatattccctatgtagcaacagtggttagatgatctttgtctgaatgtaattaaactttgaatagttttagtgtgtccttaaagccaagtatatgctttaacatcaaatggaagtcaaattcctaatgcatagatagagagagctaaactgtgtaatttaatggtatcttccttgctggatgtggcagaatccacaccagcttatcaaccaacacagctaattttagaatagatcctttatctttccatatggcacacgtaagaaagtgtttttctactattaatattaaattaaaacctttacttttgtataataaattaaaactcagaataaacctgtgaccacgtatatttgcattcactttattactttagagaacacattgtaaagatcaataagaaatagagcacaactaaaataaataagatttatagccacaccaata

SEQ ID NO: 9216 - DNA, 1986 bp, Homo sapiens
  source 1..1986: mol_type = unassigned DNA
atttcagtttgctagaggaacattttaaatctgaattgaaccacccattttcctttcttagccaaatcaccaaaatgtccagttagaacaagaatttagcattctgcaaaagaagttaacagctgagataacgaggaaatattctgaaatggatcccaaatatttcatcttaattttgttttgtggacacctgaacaatacatttttttcaaagacagagacaattacaacagagaagcagtcacagcctaccttattcacatcatcaatgtcacaggtattggctaattctcaaaacacaacagggaatcctttgggtcaaccaacacaattcagcgacactttttctggacaatcaatatcacctgccaaagtcactgctggacaaccaacaccagctgtctatacctcttctgaaaaaccagaagcacatacttctgctggacaaccacttgcctacaacaccaaacaaccaacaccaatagccaacacctcctcccagcaagccgtgttcacctctgccagacaactaccatctgcccgtacttctaccacacaaccaccaaagtcatttgtctatacttttactcaacaatcatcatctgtccagatcccttctagaaaacaaataactgttcataatccatccacacaaccaacatcaactgtcaaaaattcacctaggagtacaccaggatttatcttagatactaccagtaacaaacaaaccccacaaaaaaacaattataattcaatagctgccatactaattggtgtacttctgacttctatgttggtagctataatcatcattgtactttggaaatgcttaaggaaaccagttttaaatgatcaaaattgggcaggtagatctccatttgctgatggagaaacccctgacatttgtatggataacatcagagaaaatgaaatatccacaaaacgtacatcaatcatttcacttacaccctggaaaccaagcaaaagcacacttttagcagatgacttagaaattaagttgtttgaatcaagtgaaaacattgaagactccaacaaccccaaaacagagaaaataaaagatcaagtaaatggtacatcagaagatagtgctgatggttcaacagttggaactgctgtttcttcttcagatgatgcagatctgcctccaccacctccccttctggatttggaaggacaggaaagtaaccaatctgacaaacccacaatgacaattgtatctcctcttccaaatgattctactagtctccctccatctctggactgtctcaatcaagactgtggagatcataaatctgagataatacaatcatttccaccgcttgactcacttaacttgcccctgccaccagtagattttatgaaaaaccaagaagattccaaccttgagatccagtgtcaggagttctctattcctcccaactctgatcaagatcttaatgaatccctgccacctccacctgcagaactgttataaatattacaacttgctttttagctgatcttccatcctcaaatgactcttttttctttatatgttaacatatataaaatggcaactgatagtcaattttgatttttattcaggaactatctgaaatctgctcagagcctatgtgcatagatgaaacttttttttaaaaaaagttatttaacagtaatctatttactaattatagtacctatctttaaagtatagtacattttacatatgtaaatggtatgtttcaataatttaagaactctgaaacaatctacatatacttattacccagtacagttttttttcccctgaaaagctgtgtataaaattatggtgaataaacttttatgtttccatttcaaagaccagggtggagaggaataagagactaagtatatgcttcaagttttaaattaatacctcaagtattaaataaatattccaagtttgtgggaatgggagattaaaatgcatgtttgagaata

SEQ ID NO: 9217 - DNA, 1576 bp, Homo sapiens
  source 1..1576: mol_type = unassigned DNA
attttaaatctgaattgaaccacccattttcctttcttagccaaatcaccaaaatgtccagttagaacaagaatttagcattctgcaaaagaagttaacagctgagggccatttatcatcactgtgtaccaagtggtagaggagtaagcaatgatatgctgtttagatatgctgaaaagataacgaggaaatattctgaaatggatcccaaatatttcatcttaattttgttttgtggacacctgaacaatacatttttttcaaagacagagacaattacaacagagaagcagtcacagcctaccttattcacatcatcaatgtcacaggtattggctaattctcaaaacacaacagggaatcctttgggtcaaccaacacaattcagcgacactttttctggacaatcaatatcacctgccaaagtcactgctggacaaccaacaccagctgtctatacctcttctgaaaaaccagaagcacatacttctgctggacaaccacttgcctacaacaccaaacaaccaacaccaatagccaacacctcctcccagcaagccgtgttcacctctgccagacaactaccatctgcccgtacttctaccacacaaccaccaaagtcatttgtctatacttttactcaacaatcatcatctgtccagatcccttctagaaaacaaataactgttcataatccatccacacaaccaacatcaactgtcaaaaattcacctaggagtacaccaggatttatcttagatactaccagtaacaaacaaaccccacaaaaaaacaattataattcaatagctgccatactaattggtgtacttctgacttctatgttggtagctataatcatcattgtactttggaaatgcttaaggaaaccagttttaaatgatcaaaattgggcaggtagatctccatttgctgatggagaaacccctgacatttgtatggataacatcagagaaaatgaaatatccacaaaacgtacatcaatcatttcacttacaccctggaaaccaagcaaaagcacacttttagcagatgacttagaaattaagttgtttgaatcaagtgaaaacattgaagactccaacaaccccaaaacagagaaaataaaagatcaagtaaatggtacatcagaagatagtgctgatggttcaacagttggaactgctgtttcttcttcagatgatgcagatctgcctccaccacctccccttctggatttggaaggacaggaaagtaaccaatctgacaaacccacaatgacaattgtatctcctcttccaaatgattctactagtctccctccatctctggactgtctcaatcaagactgtggagatcataaatctgagataatacaatcatttccaccgcttgactcacttaacttgcccctgccaccagtagattttatgaaaaaccaagaagattccaaccttgagatccagtgtcaggagttctctattcctcccaactctgatcaagatcttaatgaatccctgccacctccacctgcagaactgttataaatattacaacttgctttttagctgatctt

SEQ ID NO: 9218 - DNA, 2007 bp, Homo sapiens
  source 1..2007: mol_type = unassigned DNA
atggttaccaacaaaatgactgctgcctttagaaaccctagtgggaaacaggtggcgacagacaaagttgcagaaaagctgagctctactctctcatgggtgaagaacacagtatcgcatacagtcagtcagatggccagtcaggtggcaagtccatctacttcattacataccacatcctcatctaccacactatcaacaccagccctttcaccatcttccccatcacagttgagtccagacgacttagaactcctggctaaactggaagaacagaatagattgttagaaacggatagtaagtctttaagatctgtaaatgggtcaagaagaaacagtggctcttctcttgtgtcgagttcatcagcctctagcaacctcagtcaccttgaagaagattcttggattctttggggaagaattgttaatgaatgggaagatgtacgcaaaaagaaggaaaagcaagttaaggaacttgttcataaagggataccccatcactttagagcaatagtttggcaacttttatgcagtgcacaaagtatgccaattaaggatcagtattcagaactcctgaaaatgacctcgccttgtgaaaaattgatccgaagggacattgctagaacttaccctgaacacaacttttttaaggaaaaagatagccttggacaggaggttttatttaatgtaatgaaggcttactctttagtagatcgtgaggttggttactgtcaaggaagtgcttttatagttggattgttgcttatgcagatgccagaagaagaagctttctgtgtatttgttaaattaatgcaagattatagacttcgtgaactttttaaaccaagtatggcagaattgggcctttgtatgtaccagtttgaatgtatgatacaggagcatcttccagagctctttgtacattttcaatctcagagttttcatacctcaatgtatgcatcatcctggtttctgactatctttcttacaacttttccactaccaattgcaacaaggatatttgatatctttatgtctgagggtttagaaatagtgtttcgtgtaggattagcacttcttcagatgaatcaggcagaactgatgcaacttgacatggaagggatgttacagcactttcaaaaggtcattccacatcagtttgatggtgtcccagacaagctaatccaagcagcttaccaagtcaaatacaattcaaaaaaaatgaaaaagcttgaaaaggaatacactacaataaaaacgaaagaaatggaagagcaagttgaaattaaaaggttacgcacagaaaatagacttttaaaacagcgcatcgagacattagaaaaagaaagtgcttccttggcagatagattgatacagggacaagtgacaagagcccaggaggctgaggaaaactacctcataaaacgggagttggccaccatcaaacagcagagtgatgaggccagtgctaagctggagcaagctgaaaataccatcaggaagctccagcaccaacaacaatggcataaatgcagttccaactacaacgaagattttgtgctacagctagagaaggaattggtccaagcccgactgagtgaagctgagtctcagtgtgcattaaaagagatgcaggataaagtcttggatatagagaagaggaataactcccttcctgatgagaataatattgcaaggcttcaggaagaactcattgctgtgaaacttagagaagcagaagccattatgggtttgaaagaacttagacagcaagtcaaggatttagaggaacactggcagcgccacttagctcgtactactgggagatggaaagacccacccaagaaaaatgctatgaatgagttacaagatgaactgatgaccattcgacttagagaagctgaaacacaagcagaaataagagaaataaaacaaaggatgatggaaatggaaacacagtctggaacctgtggaccccttcttaaaataatattttttaatgcgtaa

SEQ ID NO: 9219 - DNA, 7403 bp, Homo sapiens
  source 1..7403: mol_type = unassigned DNA
tctgcttatcatggttaccaacaaaatgactgctgcctttagaaaccctagtgggaaacaggtggcgacagacaaagttgcagaaaagctgagctctactctctcatgggtgaagaacacagtatcgcatacagtcagtcagatggccagtcaggtggcaagtccatctacttcattacataccacatcctcatctaccacactatcaacaccagccctttcaccatcttccccatcacagttgagtccagacgacttagaactcctggctaaactggaagaacagaatagattgttagaaacggatagtaagtctttaagatctgtaaatgggtcaagaagaaacagtggctcttctcttgtgtcgagttcatcagcctctagcaacctcagtcaccttgaagaagattcttggattctttggggaagaattgttaatgaatgggaagatgtacgcaaaaagaaggaaaagcaagttaaggaacttgttcataaagggataccccatcactttagagcaatagtttggcaacttttatgcagtgcacaaagtatgccaattaaggatcagtattcagaactcctgaaaatgacctcgccttgtgaaaaattgatccgaagggacattgctagaacttaccctgaacacaacttttttaaggaaaaagatagccttggacaggaggttttatttaatgtaatgaaggcttactctttagtagatcgtgaggttggttactgtcaaggaagtgcttttatagttggattgttgcttatgcagatgccagaagaagaagctttctgtgtatttgttaaattaatgcaagattatagacttcgtgaactttttaaaccaagtatggcagaattgggcctttgtatgtaccagtttgaatgtatgatacaggagcatcttccagagctctttgtacattttcaatctcagagttttcatacctcaatgtatgcatcatcctggtttctgactatctttcttacaacttttccactaccaattgcaacaaggatatttgatatctttatgtctgagggtttagaaatagtgtttcgtgtaggattagcacttcttcagatgaatcaggcagaactgatgcaacttgacatggaagggatgttacagcactttcaaaaggtcattccacatcagtttgatggtgtcccagacaagctaatccaagcagcttaccaagtcaaatacaattcaaaaaaaatgaaaaagcttgaaaaggaatacactacaataaaaacgaaagaaatggaagagcaagttgaaattaaaaggttacgcacagaaaatagacttttaaaacagcgcatcgagacattagaaaaacataaatgcagttccaactacaacgaagattttgtgctacagctagagaaggaattggtccaagcccgactgagtgaagctgagtctcagtgtgcattaaaagagatgcaggataaagtcttggatatagagaagaggaataactcccttcctgatgagaataatattgcaaggcttcaggaagaactcattgctgtgaaacttagagaagcagaagccattatgggtttgaaagaacttagacagcaagtcaaggatttagaggaacactggcagcgccacttagctcgtactactgggagatggaaagacccacccaagaaaaatgctatgaatgagttacaagatgaactgatgaccattcgacttagagaagctgaaacacaagcagaaataagagaaataaaacaaaggatgatggaaatggaaacacagaaccagatcaatagtaaccatcttcgaagagcagaacaagaggtgattagcctacaggagaaagtgcagtatctttctgcacagaacaaaggactccttactcaattaagtgaagcaaagcgtaaacaagcagagattgaatgcaagaataaggaagaagtgatggctgtgaggcttcgggaagcagatagcatagctgctgtggctgaactacgacaacacattgctgagcttgaaatccagaaagaagaaggaaagcttcaaggacagcttaacaagtctgattctaaccagtatattggggaactgaaagatcagatagcagagctgaatcatgagctcaggtgcctaaaaggccagaggggcttctcaggccaacctccttttgatggaatccacattgtcaaccatttaataggagatgatgaatcattccattcctccgatgaagattttatagataattccttacaggaaactggtgttggttttcctttgcacggaaaatctggttcgatgtctttggaccccgcagtggcagatggtagtgagagcgaaacagaagacagtgtgctggagaccagagagagcaaccaagtggttcaaaaggagcggcccccgagaagaagagagtcgtattcaaccactgtctgaccatcactgtgacctagactatggatttatttaagggatcagttatcatatgattagggctttttggaaataatttgtttcatatgtacatatatatatatatatatatatatatatatatatatatatatatatatatatatattttacagtcttatctgcctttttatctttgccaaatctttaccactgatttaccattgccataaagtagactggtatatggttaatgtgtaaaacaaggttctaacagtattactgaatattaatgtttcttgtttagaaaatgcaactatatctatatgtgggaaccattctgaagttcaaaactatggaaaattgaattttcttcagacaaaactgctcttgtgcaatattttatgctcagtgagcaaattgtgtatttatgtttatcaatttgttctcaaggtggctgtctacagacatttgaccaagacatacatctgatttaccttgtgtttttttttttattgttgtttttttttttaagacagagattcagtctgtcacccaggctggagtgctgtggtgtgatcttagctcactgcaacctccgcctcccaggttcaagcaattttcctgcctcagcctcccgagtacctgggactatatgtgcgcaccaccacgcctggctaattttttgtatttttagtagagatggggtttcaccatgttggctgggctggtctcgaactcctaacctcaagtgatccacccgcctcagcctcccaaagtgctgggattacaggtgtgagccactgcacccagcctaccttgtctgtttgtgtctgggaggttttttttttctatttttattttttcatgaaaattattggtgggccactgaaagtccccacacacaaagcctttattctatataattttataaacacaaattcatgattatctgttttgagagttttaagttttgttttaatgtttaacttttatgtgcatatgatgcttccatgtgttggttactagagtagtaggttaactacagacatactgttttgtttgtacatatttataaatctgtaccacctaacattgaacatcattttatatgaagaacatacatgttgcaaaatgactgctttcagcatctaacaggacttctgtaaataataggttaaaagttaaaaataaaacactaatgttttaagagctttagtattttgcttagcattcaatactagcagattcataactgatgcctgttcaaaaacactgttggtggaatcttttatttcatgtgtatgtaactactaaatttttcatgactgaagaggttatagcacatattagttagtgctaatattctactgaatataatttaagcaatgggctaaggtccaagaaacatagcaattatatctacaaataatctattaacatgatcttcagaatctctagtttttgttctatagataaagccataagaatcctttcctaccagtttttcctatatcatttagatattatttcctagaaaacaggatgcctgtcactgataagttagagaaaacacccaaattatacttgcactatggaaagacgacatgaatatgttgactgggtactttctactctcatttttgttagcctatgaaaaaaaaaacattttgttaacctatggaaaaagccttggaagagaaaagtagaattcagtatgtatggaggcacagttttgcacagtatgttgcatgcggcaaaaaaaaaaatatgaaatagagtagaagagataaaagtagttttctgtcaaaaactaggagttaagccttcaggtacgttgtggactaggctttccagcaaggtttttgtagctatttgcttgcctgagaaatgaaattgaaaacatacccctgcgtgtctgtccttaacaccaggctaaattctggtggttaaataacttatctgtggttacaagctagtaagtagcagagccaagattttttttaatatagagacaggtgtctcactgtgttgtccaggctggtcttgaactcctggcctcaagtggtcctcctgcctcagcctcccaaagtgtggggattacaggtgcgagctactgctcccagcaagagccaagattttaacctagatctccctaacaccaaagcttttgaaagggttcagctgaagaatttctcaattctctgttttgttttgtttttatttttgttttttgagatgaagtctcactgcactcaggctggagtgcagtggtacgatcttggctcactgcaacctccacctcccgggttcaagcgattctcctgcctcagctcccaagtagctgggactacaggtgcacgccaccacaactggctaatttttgtatttttagtagagatggggtttcgctatgttggccaggctgatctcaaacttctgacctcaggtgatccacccactttgacctcccaaagtgctgggattactagacgtaagccaccacacctggcaattccctgcttttttgacaacataatttaaatgaatttgatttaaatgtttcctgaatatatatacagatagatagatgagtatcaacacttacaagctctacacagtctgtgagtgtagatactacttactcgtaggattgtcttgtgctttggggatttttgttcggagttctatactatcagcccagaaagctatcaatgtccaagtgaagtgagatgatgcatggccacattattgctttgaccctcacatcaagaaatctgaatgatctggaccaggggtcagcaaagtgcagcctacaagctattgcagtcagctgccagtttttacttttttaaatagttgggaaaaaaattccaaagactgatattttgtgtcacatgaaaattatatgaaattcaaattgcagtgtccataagtaaagttttattggggcacacccatgctcacccttttaaatattgtgtatggccgctttgtgctacagtagcagagttgagtcattgcaagggagaccatatggcccaggtagcctaaaatatttatctgatcctttacagaaaaagtttgctaacccttgataacagatactctaaaatgcaggtttttcttcttcaatttagctcagtggtaggtcaaattgtttgcttttgctattaagcttatgatttggaaacgtaaaatttcatggtggatattataatcagaactattcaaaagggaaaacatgccagccattttatatgatgaagtctcttattccatagaaaactgtagaaagatatctgtatctttggagaaggagaaagaaaggaaagaactccagaatcccatcactgttctttaaagcatgcatcacagacctttaagagtatgctttattgagtaaaggttatagtttgactttaagataagaaattttctagaatcatgtttgaattctaaacgttgatattcttaagtaccatttctgattaggaattaggtgttaaaagaatcatggtaaggaaaccttaatccgttgaaactcttgtaatttggacaacaaaaaactagaaataacactcttttctttgaagatctgattcaaatacaccttagaagagtttaaaatctcccaggcctttaggatgcaataggatattatgccttggtttgactccttttcattcaaattaatgtaagtatgttgttcaagactttgaagcattgaacaatgttctcgatgaattttatttaattactgacattttgtgatatttgaatgttattaagttaaacacttagagttgagtatattcaggggagaaaagtgaatgaaatgactcataataagaaagcttgctcccttgggacagttaccttcctggtgtcattgccatcctgggttgacaagctgagagtagaggatacaagtgatgtgaataaaatggaaattgcattgagttaatgaaacagacacttttagatcaagaaaacacttcaacagcctttttagaaattggcacactcctatagtcccacctactcaagaggctgaggcaggaggatcactagagtacaggagtttggggctgtagtgtgtaatgatcacacctgtgaaagaataaccactgcactccaacctgggcaacatggcaagaccctgtctctttaaaaaaaaaaaaaatcctgggaaaagaagtcaaagatgtaattttacacaatttctgcccccaccgtcttttttgtttgtttgtttgtttgtttgttttttggctagatactaggtattcagtgtttgctgagatgacaggtttctactaatcagccagttatttgggaaggagaaaaactttttctcaattctgaacatgatgcagcttgttaactctccagatagtgcctttgattgaaaataaggtctacacctttttaagtatattatttctgacatcgtaagaaataatttagttccttattctcatttatcttttatataatgtactgtaatattcaggtttaaagtaaaataagtatatgaattatattttggtaaaactgtttcatgaccagcttgattaatgtatattaacataccagacattgacagcgaacatttcatgaaatcagttatttacttaccaaaacaatgagttttagcttgaaagttactgctgctctattattaacaaaactaagttttaaaaattaattttaattctactgaagtttaatttctggttaaaggtatagtggatgctatttatgatccaagtttttacatcacatccattgatctgcctatcccttctttttactccaaagaggagatgatagaataatacattcagtatactaccaagaagcaaagttataatgtgtttcattttgctattggaattttttattgtaacattgtatgataacctgaaatgtttacttgtgccttttctttaaacaattaaagttttccattttataagaa

SEQ ID NO: 9220 - DNA, 7362 bp, Homo sapiens
  source 1..7362: mol_type = unassigned DNA
tctgcttatcatggttaccaacaaaatgactgctgcctttagaaaccctagtgggaaacaggtggcgacagacaaagttgcagaaaagctgagctctactctctcatgggtgaagaacacagtatcgcatacagtcagtcagatggccagtcaggtggcaagtccatctacttcattacataccacatcctcatctaccacactatcaacaccagccctttcaccatcttccccatcacagttgagtccagacgacttagaactcctggctaaactggaagaacagaatagattgttagaaacggatagtaagtctttaagatctgtaaatgggtcaagaagaaacagtggctcttctcttgtgtcgagttcatcagcctctagcaacctcagtcaccttgaagaagattcttggattctttggggaagaattgttaatgaatgggaagatgtacgcaaaaagaaggaaaagcaagttaaggaacttgttcataaagggataccccatcactttagagcaatagtttggcaacttttatgcagtgcacaaagtatgccaattaaggatcagtattcagaactcctgaaaatgacctcgccttgtgaaaaattgatccgaagggacattgctagaacttaccctgaacacaacttttttaaggaaaaagatagccttggacaggaggttttatttaatgtaatgaaggcttactctttagtagatcgtgaggttggttactgtcaaggaagtgcttttatagttggattgttgcttatgcagatgccagaagaagaagctttctgtgtatttgttaaattaatgcaagattatagacttcgtgaactttttaaaccaagtatggcagaattgggcctttgtatgtaccagtttgaatgtatgatacaggagcatcttccagagctctttgtacattttcaatctcagagttttcatacctcaatgtatgcatcatcctggtttctgactatctttcttacaacttttccactaccaattgcaacaaggatatttgatatctttatgtctgagggtttagaaatagtgtttcgtgtaggattagcacttcttcagatgaatcaggcagaactgatgcaacttgacatggaagggatgttacagcactttcaaaaggtcattccacatcagtttgatggtgtcccagacaagctaatccaagcagcttaccaagtcaaatacaattcaaaaaaaatgaaaaagcttgaaaaggaatacactacaataaaaacgaaagaaatggaagagcaagttgaaattaaaaggttacgcacagaaaatagacttttaaaacagcgcatcgagacattagaaaaacataaatgcagttccaactacaacgaagattttgtgctacagctagagaaggaattggtccaagcccgactgagtgaagctgagtctcagtgtgcattaaaagagatgcaggataaagtcttggatatagagaagaggaataactcccttcctgatgagaataatattgcaaggcttcaggaagaactcattgctgtgaaacttagagaagcagaagccattatgggtttgaaagaacttagacagcaagtcaaggatttagaggaacactggcagcgccacttagctcgtactactgggagatggaaagacccacccaagaaaaatgctatgaatgagttacaagatgaactgatgaccattcgacttagagaagctgaaacacaagcagaaataagagaaataaaacaaaggatgatggaaatggaaacacagaaccagatcaatagtaaccatcttcgaagagcagaacaagaggtgattagcctacaggagaaagtgcagtatctttctgcacagaacaaaggactccttactcaattaagtgaagcaaagcgtaaacaagcagagattgaatgcaagaataaggaagaagtgatggctgtgaggcttcgggaagcagatagcatagctgctgtggctgaactacgacaacacattgctgagcttgaaatccagaaagaagaaggaaagcttcaaggacagcttaacaagtctgattctaaccagtatattggggaactgaaagatcagatagcagagctgaatcatgagctcaggtgcctaaaaggccagaggggcttctcaggccaacctccttttgatggaatccacattgtcaaccatttaataggagatgatgaatcattccattcctccgatgaagattttatagataattccttacaggaaactggtgttggttttcctttgcacggaaaatctggttcgatgtctttggaccccgcagtggcagatggtagtgagagcgaaacagaagacagtgtgctggagaccagagagagcaaccaagtggttcaaaaggagcggcccccgagaagaagagagtcgtattcaaccactgtctgaccatcactgtgacctagactatggatttatttaagggatcagttatcatatgattagggctttttggaaataatttgtttcatatatatatatatatatatatatatatattttacagtcttatctgcctttttatctttgccaaatctttaccactgatttaccattgccataaagtagactggtatatggttaatgtgtaaaacaaggttctaacagtattactgaatattaatgtttcttgtttagaaaatgcaactatatctatatgtgggaaccattctgaagttcaaaactatggaaaattgaattttcttcagacaaaactgctcttgtgcaatattttatgctcagtgagcaaattgtgtatttatgtttatcaatttgttctcaaggtggctgtctacagacatttgaccaagacatacatctgatttaccttgtgtttttttttttattgttgtttttttttttaagacagagattcagtctgtcacccaggctggagtgctgtggtgtgatcttagctcactgcaacctccgcctcccaggttcaagcaattttcctgcctcagcctcccgagtacctgggactatatgtgcgcaccaccacgcctggctaattttttgtatttttagtagagatggggtttcaccatgttggctgggctggtctcgaactcctaacctcaagtgatccacccgcctcagcctcccaaagtgctgggattacaggtgtgagccactgcacccagcctaccttgtctgtttgtgtctgggaggttttttttttctatttttattttttcatgaaaattattggtgggccactgaaagtccccacacacaaagcctttattctatataattttataaacacaaattcatgattatctgttttgagagttttaagttttgttttaatgtttaacttttatgtgcatatgatgcttccatgtgttggttactagagtagtaggttaactacagacatactgttttgtttgtacatatttataaatctgtaccacctaacattgaacatcattttatatgaagaacatacatgttgcaaaatgactgctttcagcatctaacaggacttctgtaaataataggttaaaagttaaaaataaaacactaatgttttaagagctttagtattttgcttagcattcaatactagcagattcataactgatgcctgttcaaaaacactgttggtggaatcttttatttcatgtgtatgtaactactaaatttttcatgactgaagaggttatagcacatattagttagtgctaatattctactgaatataatttaagcaatgggctaaggtccaagaaacatagcaattatatctacaaataatctattaacatgatcttcagaatctctagtttttgttctatagataaagccataagaatcctttcctaccagtttttcctatatcatttagatattatttcctagaaaacaggatgcctgtcactgataagttagagaaaacacccaaattatacttgcactatggaaagacgacatgaatatgttgactgggtactttctactctcatttttgttagcctatgaaaaaaaaaacattttgttaacctatggaaaaagccttggaagagaaaagtagaattcagtatgtatggaggcacagttttgcacagtatgttgcatgcggcaaaaaaaaaaatatgaaatagagtagaagagataaaagtagttttctgtcaaaaactaggagttaagccttcaggtacgttgtggactaggctttccagcaaggtttttgtagctatttgcttgcctgagaaatgaaattgaaaacatacccctgcgtgtctgtccttaacaccaggctaaattctggtggttaaataacttatctgtggttacaagctagtaagtagcagagccaagattttttttaatatagagacaggtgtctcactgtgttgtccaggctggtcttgaactcctggcctcaagtggtcctcctgcctcagcctcccaaagtgtggggattacaggtgcgagctactgctcccagcaagagccaagattttaacctagatctccctaacaccaaagcttttgaaagggttcagctgaagaatttctcaattctctgttttgttttgtttttatttttgttttttgagatgaagtctcactgcactcaggctggagtgcagtggtacgatcttggctcactgcaacctccacctcccgggttcaagcgattctcctgcctcagctcccaagtagctgggactacaggtgcacgccaccacaactggctaatttttgtatttttagtagagatggggtttcgctatgttggccaggctgatctcaaacttctgacctcaggtgatccacccactttgacctcccaaagtgctgggattactagacgtaagccaccacacctggcaattccctgcttttttgacaacataatttaaatgaatttgatttaaatgtttcctgaatatatatacagatagatagatgagtatcaacacttacaagctctacacagtctgtgagtgtagatactacttactcgtaggattgtcttgtgctttggggatttttgttcggagttctatactatcagcccagaaagctatcaatgtccaagtgaagtgagatgatgcatggccacattattgctttgaccctcacatcaagaaatctgaatgatctggaccaggggtcagcaaagtgcagcctacaagctattgcagtcagctgccagtttttacttttttaaatagttgggaaaaaaattccaaagactgatattttgtgtcacatgaaaattatatgaaattcaaattgcagtgtccataagtaaagttttattggggcacacccatgctcacccttttaaatattgtgtatggccgctttgtgctacagtagcagagttgagtcattgcaagggagaccatatggcccaggtagcctaaaatatttatctgatcctttacagaaaaagtttgctaacccttgataacagatactctaaaatgcaggtttttcttcttcaatttagctcagtggtaggtcaaattgtttgcttttgctattaagcttatgatttggaaacgtaaaatttcatggtggatattataatcagaactattcaaaagggaaaacatgccagccattttatatgatgaagtctcttattccatagaaaactgtagaaagatatctgtatctttggagaaggagaaagaaaggaaagaactccagaatcccatcactgttctttaaagcatgcatcacagacctttaagagtatgctttattgagtaaaggttatagtttgactttaagataagaaattttctagaatcatgtttgaattctaaacgttgatattcttaagtaccatttctgattaggaattaggtgttaaaagaatcatggtaaggaaaccttaatccgttgaaactcttgtaatttggacaacaaaaaactagaaataacactcttttctttgaagatctgattcaaatacaccttagaagagtttaaaatctcccaggcctttaggatgcaataggatattatgccttggtttgactccttttcattcaaattaatgtaagtatgttgttcaagactttgaagcattgaacaatgttctcgatgaattttatttaattactgacattttgtgatatttgaatgttattaagttaaacacttagagttgagtatattcaggggagaaaagtgaatgaaatgactcataataagaaagcttgctcccttgggacagttaccttcctggtgtcattgccatcctgggttgacaagctgagagtagaggatacaagtgatgtgaataaaatggaaattgcattgagttaatgaaacagacacttttagatcaagaaaacacttcaacagcctttttagaaattggcacactcctatagtcccacctactcaagaggctgaggcaggaggatcactagagtacaggagtttggggctgtagtgtgtaatgatcacacctgtgaaagaataaccactgcactccaacctgggcaacatggcaagaccctgtctctttaaaaaaaaaaaaaatcctgggaaaagaagtcaaagatgtaattttacacaatttctgcccccaccgtcttttttgtttgtttgtttgtttgtttgttttttggctagatactaggtattcagtgtttgctgagatgacaggtttctactaatcagccagttatttgggaaggagaaaaactttttctcaattctgaacatgatgcagcttgttaactctccagatagtgcctttgattgaaaataaggtctacacctttttaagtatattatttctgacatcgtaagaaataatttagttccttattctcatttatcttttatataatgtactgtaatattcaggtttaaagtaaaataagtatatgaattatattttggtaaaactgtttcatgaccagcttgattaatgtatattaacataccagacattgacagcgaacatttcatgaaatcagttatttacttaccaaaacaatgagttttagcttgaaagttactgctgctctattattaacaaaactaagttttaaaaattaattttaattctactgaagtttaatttctggttaaaggtatagtggatgctatttatgatccaagtttttacatcacatccattgatctgcctatcccttctttttactccaaagaggagatgatagaataatacattcagtatactaccaagaagcaaagttataatgtgtttcattttgctattggaattttttattgtaacattgtatgataacctgaaatgtttacttgtgccttttctttaaacaattaaagttttccatttt

SEQ ID NO: 9221 - DNA, 2466 bp, Homo sapiens
  source 1..2466: mol_type = unassigned DNA
atggttaccaacaaaatgactgctgcctttagaaaccctagtgggaaacaggtggcgacagacaaagttgcagaaaagctgagctctactctctcatgggtgaagaacacagtatcgcatacagtcagtcagatggccagtcaggtggcaagtccatctacttcattacataccacatcctcatctaccacactatcaacaccagccctttcaccatcttccccatcacagttgagtccagacgacttagaactcctggctaaactggaagaacagaatagattgttagaaacggatagtaagtctttaagatctgtaaatgggtcaagaagaaacagtggctcttctcttgtgtcgagttcatcagcctctagcaacctcagtcaccttgaagaagattcttggattctttggggaagaattgttaatgaatgggaagatgtacgcaaaaagaaggaaaagcaagttaaggaacttgttcataaagggataccccatcactttagagcaatagtttggcaacttttatgcagtgcacaaagtatgccaattaaggatcagtattcagaactcctgaaaatgacctcgccttgtgaaaaattgatccgaagggacattgctagaacttaccctgaacacaacttttttaaggaaaaagatagccttggacaggaggttttatttaatgtaatgaaggcttactctttagtagatcgtgaggttggttactgtcaaggaagtgcttttatagttggattgttgcttatgcagatgccagaagaagaagctttctgtgtatttgttaaattaatgcaagattatagacttcgtgaactttttaaaccaagtatggcagaattgggcctttgtatgtaccagtttgaatgtatgatacaggagcatcttccagagctctttgtacattttcaatctcagagttttcatacctcaatgtatgcatcatcctggtttctgactatctttcttacaacttttccactaccaattgcaacaaggatatttgatatctttatgtctgagggtttagaaatagtgtttcgtgtaggattagcacttcttcagatgaatcaggcagaactgatgcaacttgacatggaagggatgttacagcactttcaaaaggtcattccacatcagtttgatggtgtcccagacaagctaatccaagcagcttaccaagtcaaatacaattcaaaaaaaatgaaaaagcttgaaaaggaatacactacaataaaaacgaaagaaatggaagagcaagttgaaattaaaaggttacgcacagaaaatagacttttaaaacagcgcatcgagacattagaaaaagaaagtgcttccttggcagatagattgatacagcataaatgcagttccaactacaacgaagattttgtgctacagctagagaaggaattggtccaagcccgactgagtgaagctgagtctcagtgtgcattaaaagagatgcaggataaagtcttggatatagagaagaggaataactcccttcctgatgagaataatattgcaaggcttcaggaagaactcattgctgtgaaacttagagaagcagaagccattatgggtttgaaagaacttagacagcaagtcaaggatttagaggaacactggcagcgccacttagctcgtactactgggagatggaaagacccacccaagaaaaatgctatgaatgagttacaagatgaactgatgaccattcgacttagagaagctgaaacacaagcagaaataagagaaataaaacaaaggatgatggaaatggaaacacagaaccagatcaatagtaaccatcttcgaagagcagaacaagaggtgattagcctacaggagaaagtgcagtatctttctgcacagaacaaaggactccttactcaattaagtgaagcaaagcgtaaacaagcagagattgaatgcaagaataaggaagaagtgatggctgtgaggcttcgggaagcagatagcatagctgctgtggctgaactacgacaacacattgctgagcttgaaatccagaaagaagaaggaaagcttcaaggacagcttaacaagtctgattctaaccagtatattggggaactgaaagatcagatagcagagctgaatcatgagctcaggtgcctaaaaggccagaggggcttctcaggccaacctccttttgatggaatccacattgtcaaccatttaataggagatgatgaatcattccattcctccgatgaagattttatagataattccttacaggaaactggtgttggttttcctttgcacggaaaatctggttcgatgtctttggaccccgcagtggcagatggtagtgagagcgaaacagaagacagtgtgctggagaccagagagagcaaccaagtggttcaaaaggagcggcccccgagaagaagagagtcgtattcaaccactgtctga

SEQ ID NO: 9222 - DNA, 1535 bp, Homo sapiens
  source 1..1535: mol_type = unassigned DNA
gatttgctacctccctggagctccctgacccggacgctctctgggccaatatggcagcgcccagcaacaagacagagctggcctggagtccgcggctggccgcgtgagtaggtgattgtctgacaagcagaggcatgagctgggtccaggccaccctactggcccgaggcctctgtagggcctggggaggcacctgcggggccgccctcacaggaacctccatctctcaggtccctcgccggctccctcggggcctccactgcagcgcagctgcccatagctctgaacagtccctggttcccagcccaccggaaccccggcagaggcccaccaaggctctggtgccctttgaggacctgtttgggcaggcgcctggtggggaacgggacaaggcgagcttcctgcagacggtgcagaaatttgcggagcacagcgtgcgtaagcggggccacattgacttcatctacctggccctgcgcaagatgcgggagtatggtgtcgagcgggacctggctgtgtacaaccagctgctcaacatcttccccaaggaggtcttccggcctcgcaacatcatccagcgcatcttcgtccactaccctcggcagcaggagtgtgggattgctgtcctggagcagatggagaaccacggtgtgatgcccaacaaggagacggagttcctgctgattcagatctttggacgcaaaagctaccccatgctcaagttggtgcgcctgaagctgtggttccctcgattcatgaacgtcaaccccttcccagtgccccgggacctgccccaggaccctgtggagctggccatgtttggcctgcggcacatggagcctgaccttagtgccagggtcaccatctaccaggttcctttgcccaaagactcaacaggtgcagcagatcccccccagccccacatcgtaggaagtggaagagacgccggaggagtggaacctctactacccgatgcagctggacctggagtatgtgaggagtggctgggacaactacgagtttgacatcaatgaagtggaggaaggccctgtcttcgccatgtgcatggcgggtgctcatgaccaggcgacgatggctaagtggatccagggcctgcaggagaccaacccaaccctggcccagatccccgtggtcttccgcctcgccgggtccacccgggagctccagacatcctctgcagggctggaggagccgcccctgcccgaggaccaccaggaagaagacgacaacctgcagcgacagcagcagggccagagctagtctgagccggcgcgagggcacgggctgtggcccgaggaggcggtggactgaaggcatgagatgccctttgagtgtacagcaaatcaatgttttcctgcttggggctctcttccctcatctctagcagtatggcatcccctccccaggatctcgggctgccagcgatgggcaggcgagacccctccagaatctgcaggcgcctctggttctccgaattcaaataaaaaggggcgggagcgctgttggttgtgcgc

SEQ ID NO: 9223 - DNA, 1684 bp, Homo sapiens
  source 1..1684: mol_type = unassigned DNA
gatttgctacctccctggagctccctgacccggacgctctctgggccaatatggcagcgcccagcaacaagacagagctggcctggagtccgcggctggccgcgtgagtaggtgattgtctgacaagcagaggcatgagctgggtccaggccaccctactggcccgaggcctctgtagggcctggggaggcacctgcggggccgccctcacaggaacctccatctctcaggtccctcgccggctccctcggggcctccactgcagcgcagctgcccatagctctgaacagtccctggttcccagcccaccggaaccccggcagaggcccaccaaggctctggtgccctttgaggacctgtttgggcaggcgcctggtggggaacgggacaaggcgagcttcctgcagacggtgcagaaatttgcggagcacagcgtgcgtaagcggggccacattgacttcatctacctggccctgcgcaagatgcgggagtatggtgtcgagcgggacctggctgtgtacaaccagctgctcaacatcttccccaaggaggtcttccggcctcgcaacatcatccagcgcatcttcgtccactaccctcggcagcaggagtgtgggattgctgtcctggagcagatggagaaccacggtgtgatgcccaacaaggagacggagttcctgctgattcagatctttggacgcaaaagctaccccatgctcaagttggtgcgcctgaagctgtggttccctcgattcatgaacgtcaaccccttcccagtgccccgggacctgccccaggaccctgtggagctggccatgtttggcctgcggcacatggagcctgaccttagtgccagggtcaccatctaccaggttcctttgcccaaagactcaacaggtgcagcagatcccccccagccccacatcgtaggaatccagagtcccgatcagcaggccgccctggcccgccacaatccagcccggcctgtctttgttgagggccccttctccctgtggctccgcaacaagtgtgtgtattaccacatcctcagagctgacttgctgcccccggaggagagggaagtggaagagacgccggaggagtggaacctctactacccgatgcagctggacctggagtatgtgaggagtggctgggacaactacgagtttgacatcaatgaagtggaggaaggccctgtcttcgccatgtgcatggcgggtgctcatgaccaggcgacgatggctaagtggatccagggcctgcaggagaccaacccaaccctggcccagatccccgtggtcttccgcctcgccgggtccacccgggagctccagacatcctctgcagggctggaggagccgcccctgcccgaggaccaccaggaagaagacgacaacctgcagcgacagcagcagggccagagctagtctgagccggcgcgagggcacgggctgtggcccgaggaggcggtggactgaaggcatgagatgccctttgagtgtacagcaaatcaatgttttcctgcttggggctctcttccctcatctctagcagtatggcatcccctccccaggatctcgggctgccagcgatgggcaggcgagacccctccagaatctgcaggcgcctctggttctccgaattcaaataaaaaggggcgggagcgctgttggttgtgcgc

SEQ ID NO: 9224 - DNA, 1042 bp, Homo sapiens
  source 1..1042: mol_type = unassigned DNA
gatttgctacctccctggagctccctgacccggacgctctctgggccaatatggcagcgcccagcaacaagacagagctggcctggagtccgcggctggccgcgtgagtaggtgattgtctgacaagcagaggcatgagctgggtccaggccaccctactggcccgaggcctctgtagggcctggggaggcacctgcggggccgccctcacaggaacctccatctctcaggttcctttgcccaaagactcaacaggtgcagcagatcccccccagccccacatcgtaggaatccagagtcccgatcagcaggccgccctggcccgccacaatccagcccggcctgtctttgttgagggccccttctccctgtggctccgcaacaagtgtgtgtattaccacatcctcagagctgacttgctgcccccggaggagagggaagtggaagagacgccggaggagtggaacctctactacccgatgcagctggacctggagtatgtgaggagtggctgggacaactacgagtttgacatcaatgaagtggaggaaggccctgtcttcgccatgtgcatggcgggtgctcatgaccaggcgacgatggctaagtggatccagggcctgcaggagaccaacccaaccctggcccagatccccgtggtcttccgcctcgccgggtccacccgggagctccagacatcctctgcagggctggaggagccgcccctgcccgaggaccaccaggaagaagacgacaacctgcagcgacagcagcagggccagagctagtctgagccggcgcgagggcacgggctgtggcccgaggaggcggtggactgaaggcatgagatgccctttgagtgtacagcaaatcaatgttttcctgcttggggctctcttccctcatctctagcagtatggcatcccctccccaggatctcgggctgccagcgatgggcaggcgagacccctccagaatctgcaggcgcctctggttctccgaattcaaataaaaaggggcgggagcgctgttggttgtgcgc

SEQ ID NO: 9225 - DNA, 1319 bp, Homo sapiens
  source 1..1319: mol_type = unassigned DNA
ttttgcagatgacctcgcgagaggtcacgccgcaagtcggcaaccgggcaggatttggaatccgcgtctgcctttttcccccaagagacccagaatcctggcagccggtttcaaagctgttgtgattgtctgacaagcagaggcatgagctgggtccaggccaccctactggcccgaggcctctgtagggcctggggaggcacctgcggggccgccctcacaggaacctccatctctcaggtccctcgccggctccctcggggcctccactgcagcgcagctgcccatagctctgaacagtccctggttcccagcccaccggaaccccggcagaggcccaccaaggctctggtgccctttgaggacctgtttgggcaggcgcctggtggggaacgggacaaggcgagcttcctgcagacggtgcagaaatttgcggagcacagcgtgcgtaagcggggccacattgacttcatctacctggccctgcgcaagatgcgggagtatggtgtcgagcgggacctggctgtgtacaaccagctgctcaacatcttccccaaggaggtcttccggcctcgcaacatcatccagcgcatcttcgtccactaccctcggcagcaggagtgtgggattgctgtcctggagcagatggagaaccacggtgtgatgcccaacaaggagacggagttcctgctgattcagatctttggacgcaaaagctaccccatgctcaagttggtgcgcctgaagctgtggttccctcgattcatgaacgtcaaccccttcccagtgccccgggacctgccccaggaccctgtggagctggccatgtttggcctgcggcacatggagcctgaccttagtgccagggtcaccatctaccaggttcctttgcccaaagactcaacaggtgcagcagatcccccccagccccacatcgtagagctgacttgctgcccccggaggagagggaagtggaagagacgccggaggagtggaacctctactacccgatgcagctggacctggagtatgtgaggagtggctgggacaactacgagtttgacatcaatgaagtggaggaaggccctgtcttcgccatgtgcatggcgggtgctcatgaccaggcgacgatggctaagtggatccagggcctgcaggagaccaacccaaccctggcccagatccccgtggtcttccgcctcgccgggtccacccgggagctccagacatcctctgcagggctggaggagccgcccctgcccgaggaccaccaggaagaagacgacaacctgcagcgacagcagcagggccagagctag

SEQ ID NO: 9226 - DNA, 5517 bp, Homo sapiens
  source 1..5517: mol_type = unassigned DNA
agagtccagccgggggtgccgcacccactggggagtggggagggaggacacataggaaatgcctggggctggagtctctttggctctctgccagcaagaaacttaaacgtcctggcttgctcaacccgagtgtccctaaactgtccagacttttgcccgtccattgccactatctctccccactctgggtgtcctacccaaggcgctgtctatgcgtgcccagggcctgtcctgcggatacccagctcgccccttgcagccctttttagagcatctcgcgggctctggcatcaccaagcgcacagccccgggctgcgctcccctaaggtgggtccctcagatccggggctgtccattaaccaggctggcccaaagaggcgcagacactcgaacccgggaaaacttattttattctcggttcccggggttgcagctgccagcggctgagacagtgcgtccgctttgtctctctgcactccccgcagcccccctctcccgcttcctctcccgattaactcccccgacacgctcttctctagctcctctcctcctcccactccttctcctcctcttcctcctcctacaccacaggccgcgctaatgcgcttcctccctcccccggtgtcggtctctttgcatacgcgccccctcccctccccgccgcgccacttatagcggggcgcacggcggcggggcgcagactgctctggcagccggagaggaggcggtgcggcggtggcgctgcggagacccggtccagacgcctggcggccgccggcacacaaggcgctttctagctccctcccccgagcgcacagcccgcctccttccgcggcgcctgcagtggcaggcttgctctgccctaccgtgacgcgctccggagacgctctgcgggtcctggacaccgggtccgcggcgtggggacgacagacggaggcgaacgccatcggtagccggtccgcgagccatcgttcggggcgcagtcctctccccggctggccctcctttctccggggcattcgccaccgcttccctgggctgagacgaccggttcgtcgcctccttgcccgtgaccgtcgctagaactcagttgtgcgttgcggccagtcgccactgctgagtggaaacaaaatgtcagtcagtgtgcatgagaaccgcaagtccagggccagcagcggctccattaacatctatctgtttcacaagtcctcctacgctgacagcgtcctcactcacctgaatcttttacgccagcagcgtctcttcactgacgtccttctccatgccggaaataggaccttcccttgccaccgggcagtgctggctgcatgcagtcgctactttgaggccatgttcagtggtggcctgaaagagagccaggacagtgaggtcaactttgacaattccatccacccagaagtcttggagctgctgcttgactatgcgtactcctcccgggtcatcatcaatgaagaaaatgcagaatcgctcctggaagctggtgacatgctggagtttcaagacatccgggatgcatgtgcagagttcctggaaaagaacctgcatcccaccaactgcctgggcatgctgctgctgtctgatgcacaccagtgcaccaagctgtacgaactatcttggagaatgtgtctcagcaacttccaaaccatcaggaagaatgaagatttcctccagctgccccaggacatggtagtgcaactcttgtccagtgaagagctggagacagaggatgaaaggcttgtgtacgagtctgcaattaactggatcagctatgacctgaagaagcgctattgctacctcccagaactgttgcagacagtaaggctggcacttctgccagccatctatctcatggagaatgtggccatggaggaactcatcaccaagcagagaaagagtaaggaaattgtggaagaggccatcaggtgcaaactgaaaatcctgcagaatgacggtgtggtaaccagcctctgtgcccgacctcggaaaactggccatgccctcttccttctgggaggacagactttcatgtgtgacaagttgtatctggtagaccagaaggccaaagaaatcattcccaaggctgacattcccagcccaagaaaagagtttagtgcatgtgcgattggctgcaaagtgtacattactggggggcgggggtctgaaaatggggtctcaaaagatgtctgggtttatgataccctgcacgaggagtggtccaaggctgcccccatgctggtggccaggtttggccatggctctgctgaactgaagcactgcctgtatgtggttggggggcacacggccgcaactggctgcctcccggcctccccctcagtctctctaaagcaggtagaacattatgaccccacaatcaacaaatggaccatggtggccccactccgagaaggcgttagcaacgccgcagtagtgagtgccaaacttaagttatttgctttcggaggtaccagtgtcagtcatgacaagctccccaaagttcagtgttacgatcagtgtgaaaacaggtggactgtaccggccacctgtccccagccctggcgttacacagcagcagctgtgctggggaaccagatttttattatggggggtgatacagaattctctgcctgctctgcttataaattcaacagtgagacttaccagtggaccaaggtgggagatgtgacagcaaagcgcatgagctgccatgctgtggcctctggaaacaaactctacgtggttggaggatactttggcattcagcgatgcaagactttggactgctacgatccaacattagacgtgtggaacagcatcaccactgtcccgtactcgctgattcctactgcatttgtcagcacctggaaacatctgccttcttaaatgcagtacattctaaagagagtgagcatgagctcactccatcactcgatgagataatatgagatttctacttcggagaggccaagtctaatgaagagaaaaaaaggaaaagaagttgcaagactcgaataaaatctgctgcaccttgtaaatgctctaactggacatgaaggaaaggggcgagggaggggggtgggatttttggtgcaagtagcacatggtttaaatatgaatgaacaaacctgtgatctagtccttgtcttgtaattgtggattaatgtcaatgttaatcagcccctcaaagggagagaaaagctggaccttttcccttgctgtaccatattcagcatttgatttccatgggccccaccatttatgtgtagaatttgaaatggttgtcacctctctctgaggacagagcttgaagcctccacaccagctgctgctggagattcaaagcccaactgtgggtccgagagggaagctggctgggctggctgaagaatgaagaccactggactctccgttaatctctaaggggtctgctccccaggaacgtttctgaacaatggggactttgttggtagccatttggtagatgttcttttctatttataagtgactttaaactttcccttggctgttaagaagtttgttatagatttagctatttattgttcgatgcctgcatgctgaaacaatgcctacagctgtcttcacatgtatggacgtgtgtgaatggttgtacgttttgcacattttgtggctgttgagatgtgctttgctgcacaaacatgaaaatttttgagttacaatttggagcataactggagggtgggttggggaggggtggatttttaaaatgtcaagacagggaaggatgacaaaatggaaatttaaatgacatcctagaggtagagaaaccgtggagatcgcttttctcagactcaccaacttttaatgggatttcatggggtttggttgtgctgatagggtaaggggaggctgctttctgcccttctccccactcccatctgatttacttaattcagtctcagctgctgaaatttggaaaggaccaaattgctttacagtttttttctttgtgtagtatcttgaaatcctggaaaattctatggaatagttctgtatatagggcacaagtaaaggcattgtccaaagtttatttatttatttattaccctaagaatgctttgccataaccacatttaatgggaaaaacggcagtatcacagatgtaaattaactcaccagatttactgggcctgaactcattctcttcttgctatatgatttagcaagttctagaaggtctccaagacaataattacattggcacaatgtatacttcagtgctcacccgtaggcaaatctctttttaaaaaactctttggtgcacaagtaacacatttggccacaaaacaccaaagaattgtaggcagtggcccctattgagaagttttccggtagagttggaaatcagttgtgaatacattctttgctagttggagtgcttgtttactaagcatgtgccgtcgtaggtattagtgctagtctcagataggtgcttcccctgaggtgcaggggaagaccaaagtttgcaactcgaactgctttcgtccatgtttctcacattgctgtattttagaaaataggggttaagactgataacaaccttttacattgtgactgtgtttgcattgtctaatgacagataaatccttaacatttctctccaccttagtactttagactaattgtgtttgtccgtccatgccatgaatgagtgggctgtagttgggcctaaataaatgagctgttggaagaaaagaatcacagtactttccagcagtcagtccctggttcctagatgtgttctaagcaatgcaaatgtctaattgtcccccagtgggcatagtcagtgtcgtttatattgtagcagttacagctctgtagtttatgatgcaaatctgccaagagagatgtatgtgtcactgcatggcttctgaaagcaggatgaattttctgcagctgtttcaaagttggggtctgttcttgaatcctctattaattactgtgtgtgagccagagggagctgtggtaagggttgggcccccagcctgtagggaactttctggactcccactctttgaatcgatataggcatttggtctcactacttgaccattctcaccctgtgaaacgtcccacactttgaagcaaatacaattcacagcacagtacacacaaaaaccttggcataagacagagaaggttcttcttattttgtgggctggttgctgtagaaacacataacaaagggcagccctccacttctggtataattgtgtagccccttttctttgggcttgacacctgtcttgaataagagtgattagagctgcataatgtccctctcttggctattgaccatgtggttcacgtacaaaactctgtataagttgaaggaaaatgttcatgttcatatgtacttgtttgctatgactacattttgaggttttgtaaaactgttatttttttttttttcacaatgtgaaactgaaggtcaataaattattagagattttctcttca

SEQ ID NO: 9227 - DNA, 1405 bp, Homo sapiens
  source 1..1405: mol_type = unassigned DNA
agagtccagccgggggtgccgcacccactggggagtggggagggaggacacataggaaatgcctggggctggagtctctttggctctctgccagcaagaaacttaaacgtcctggcttgctcaacccgagtgtccctaaactgtccagacttttgcccgtccattgccactatctctccccactctgggtgtcctacccaaggcgctgtctatgcgtgcccagggcctgtcctgcggatacccagctcgccccttgcagccctttttagagcatctcgcgggctctggcatcaccaagcgcacagccccgggctgcgctcccctaaggtgggtccctcagatccggggctgtccattaaccaggctggcccaaagaggcgcagacactcgaacccgggaaaacttattttattctcggttcccggggttgcagctgccagcggctgagacagtgcgtccgctttgtctctctgcactccccgcagcccccctctcccgcttcctctcccgattaactcccccgacacgctcttctctagctcctctcctcctcccactccttctcctcctcttcctcctcctacaccacaggccgcgctaatgcgcttcctccctcccccggtgtcggtctctttgcatacgcgccccctcccctccccgccgcgccacttatagcggggcgcacggcggcggggcgcagactgctctggcagccggagaggaggcggtgcggcggtggcgctgcggagacccggtccagacgcctggcggccgccggcacacaaggcgctttctagctccctcccccgagcgcacagcccgcctccttccgcggcgcctgcagtggcaggcttgctctgccctaccgtgacgcgctccggagacgctctgcgggtcctggacaccgggtccgcggcgtggggacgacagacggaggcgaacgccatcggtagccggtccgcgagccatcgttcggggcgcagtcctctccccggctggccctcctttctccggggcattcgccaccgcttccctgggctgagacgaccggttcgtcgcctccttgcccgtgaccgtcgctagaactcagttgtgcgttgcggccagtcgccactgctctggttttccaagaattgatataaagcgggaagaacagaaaacagcagtcataagtatgctactcaaaatattcttctttttatgtgccaaatcctcacattggaagctgtcccgagcaagacaggagtggaaacaaaatgtcagtcagtgtgcatgagaaccgcaagtccagggccagcagcggctccattaacatctatctgtttcacaagtcctcctacgctgacagcgtcctcactcacctgaatcttttacgccagcagcgtctcttcactgacgtccttct

SEQ ID NO: 9228 - DNA, 1280 bp, Homo sapiens
  source 1..1280: mol_type = unassigned DNA
agagtccagccgggggtgccgcacccactggggagtggggagggaggacacataggaaatgcctggggctggagtctctttggctctctgccagcaagaaacttaaacgtcctggcttgctcaacccgagtgtccctaaactgtccagacttttgcccgtccattgccactatctctccccactctgggtgtcctacccaaggcgctgtctatgcgtgcccagggcctgtcctgcggatacccagctcgccccttgcagccctttttagagcatctcgcgggctctggcatcaccaagcgcacagccccgggctgcgctcccctaaggtgggtccctcagatccggggctgtccattaaccaggctggcccaaagaggcgcagacactcgaacccgggaaaacttattttattctcggttcccggggttgcagctgccagcggctgagacagtgcgtccgctttgtctctctgcactccccgcagcccccctctcccgcttcctctcccgattaactcccccgacacgctcttctctagctcctctcctcctcccactccttctcctcctcttcctcctcctacaccacaggccgcgctaatgcgcttcctccctcccccggtgtcggtctctttgcatacgcgccccctcccctccccgccgcgccacttatagcggggcgcacggcggcggggcgcagactgctctggcagccggagaggaggcggtgcggcggtggcgctgcggagacccggtccagacgcctggcggccgccggcacacaaggcgctttctagctccctcccccgagcgcacagcccgcctccttccgcggcgcctgcagtggcaggcttgctctgccctaccgtgacgcgctccggagacgctctgcgggtcctggacaccgggtccgcggcgtggggacgacagacggaggcgaacgccatcggtagccggtccgcgagccatcgttcggggcgcagtcctctccccggctggccctcctttctccggggcattcgccaccgcttccctgggctgagacgaccggttcgtcgcctccttgcccgtgaccgtcgctagaactcagttgtgcgttgcggccagtcgccactgctgtgtcagcatttgcaggtatacaggaacagtcctagtgatgcactatttaatcaaaagacggatggatcttttgttcttgcagctggttttccaagaattgatataaagcgggaagaacagaaaacagcagtcataagagtggaaacaaaatgtcagtcagt

SEQ ID NO: 9229 - DNA, 2024 bp, Homo sapiens
  source 1..2024: mol_type = unassigned DNA
cggcacacaaggcgctttctagctggccctcctttctccggggcattcgccaccgcttccctgggctgagacgaccggttcgtcgcctccttgcccgtgaccgtcgctagaactcagttgtgcgttgcggccagtcgccactgctgagtggaaacaaaatgtcagtcagtgtgcatgagaaccgcaagtccagggccagcagcggctccattaacatctatctgtttcacaagtcctcctacgctgacagcgtcctcactcacctgaatcttttacgccagcagcgtctcttcactgacgtccttctccatgccggaaataggaccttcccttgccaccgggcagtgctggctgcatgcagtcgctactttgaggccatgttcagtggtggcctgaaagagagccaggacagtgaggtcaactttgacaattccatccacccagaagtcttggagctgctgcttgactatgcgtactcctcccgggtcatcatcaatgaagaaaatgcagaatcgctcctggaagctggtgacatgctggagtttcaagacatccgggatgcatgtgcagagttcctggaaaagaacctgcatcccaccaactgcctgggcatgctgctgctgtctgatgcacaccagtgcaccaagctgtacgaactatcttggagaatgtgtctcagcaacttccaaaccatcaggaagaatgaagatttcctccagctgccccaggacatggtagtgcaactcttgtccagtgaagagctggagacagaggatgaaaggcttgtgtacgagtctgcaattaactggatcagctatgacctgaagaagcgctattgctacctcccagaactgttgcagacagtaaggctggcacttctgccagccatctatctcatggagaatgtggccatggaggaactcatcaccaagcagagaaagagtaaggaaattgtggaagaggccatcaggtgcaaactgaaaatcctgcagaatgacggtgtggtaaccagcctctgtgcccgacctcggaaaactggccatgccctcttccttctgggaggacagactttcatgtgtgacaagttgtatctggtagaccagaaggccaaagaaatcattcccaaggctgacattcccagcccaagaaaagagtttagtgcatgtgcgattggctgcaaagtgtacattactggggggcgggggtctgaaaatggggtctcaaaagatgtctgggtttatgataccctgcacgaggagtggtccaaggctgcccccatgctggtggccaggtttggccatggctctgctgaactgaagcactgcctgtatgtggttggggggcacacggccgcaactggctgcctcccggcctccccctcagtctctctaaagcaggtagaacattatgaccccacaatcaacaaatggaccatggtggccccactccgagaaggcgttagcaacgccgcagtagtgagtgccaaacttaagttatttgctttcggaggtaccagtgtcagtcatgacaagctccccaaagttcagtgttacgatcagtgtgaaaacaggtggactgtaccggccacctgtccccagccctggcgttacacagcagcagctgtgctggggaaccagatttttattatggggggtgatacagaattctctgcctgctctgcttataaattcaacagtgagacttaccagtggaccaaggtgggagatgtgacagcaaagcgcatgagctgccatgctgtggcctctggaaacaaactctacgtggttggaggatactttggcattcagcgatgcaagactttggactgctacgatccaacattagacgtgtggaacagcatcaccactgtcccgtactcgctgattcctactgcatttgtcagcacctggaaacatctgccttcttaaatgcagtacattctaaagagagtgagcatgagctcactccatcactcgatgagataatatgagatttctacttcggagaggccaagtctaatgaag

SEQ ID NO: 9230 - DNA, 5381 bp, Homo sapiens
  source 1..5381: mol_type = unassigned DNA
agagtccagccgggggtgccgcacccactggggagtggggagggaggacacataggaaatgcctggggctggagtctctttggctctctgccagcaagaaacttaaacgtcctggcttgctcaacccgagtgtccctaaactgtccagacttttgcccgtccattgccactatctctccccactctgggtgtcctacccaaggcgctgtctatgcgtgcccagggcctgtcctgcggatacccagctcgccccttgcagccctttttagagcatctcgcgggctctggcatcaccaagcgcacagccccgggctgcgctcccctaaggtgggtccctcagatccggggctgtccattaaccaggctggcccaaagaggcgcagacactcgaacccgggaaaacttattttattctcggttcccggggttgcagctgccagcggctgagacagtgcgtccgctttgtctctctgcactccccgcagcccccctctcccgcttcctctcccgattaactcccccgacacgctcttctctagctcctctcctcctcccactccttctcctcctcttcctcctcctacaccacaggccgcgctaatgcgcttcctccctcccccggtgtcggtctctttgcatacgcgccccctcccctccccgccgcgccacttatagcggggcgcacggcggcggggcgcagactgctctggcagccggagaggaggcggtgcggcggtggcgctgcggagacccggtccagacgcctggcggccgccggcacacaaggcgctttctagctccctcccccgagcgcacagcccgcctccttccgcggcgcctgcagtggcaggcttgctctgccctaccgtgacgcgctccggagacgctctgcgggtcctggacaccgggtccgcggcgtggggacgacagacggaggcgaacgccatcggtagccggtccgcgagccatcgttcggggcgcagtcctctccccggctggccctcctttctccggggcattcgccaccgcttccctgggctgagacgaccggttcgtcgcctccttgcccgtgaccgtcgctagaactcagttgtgcgttgcggccagtcgccactgctcagcgtctcttcactgacgtccttctccatgccggaaataggaccttcccttgccaccgggcagtgctggctgcatgcagtcgctactttgaggccatgttcagtggtggcctgaaagagagccaggacagtgaggtcaactttgacaattccatccacccagaagtcttggagctgctgcttgactatgcgtactcctcccgggtcatcatcaatgaagaaaatgcagaatcgctcctggaagctggtgacatgctggagtttcaagacatccgggatgcatgtgcagagttcctggaaaagaacctgcatcccaccaactgcctgggcatgctgctgctgtctgatgcacaccagtgcaccaagctgtacgaactatcttggagaatgtgtctcagcaacttccaaaccatcaggaagaatgaagatttcctccagctgccccaggacatggtagtgcaactcttgtccagtgaagagctggagacagaggatgaaaggcttgtgtacgagtctgcaattaactggatcagctatgacctgaagaagcgctattgctacctcccagaactgttgcagacagtaaggctggcacttctgccagccatctatctcatggagaatgtggccatggaggaactcatcaccaagcagagaaagagtaaggaaattgtggaagaggccatcaggtgcaaactgaaaatcctgcagaatgacggtgtggtaaccagcctctgtgcccgacctcggaaaactggccatgccctcttccttctgggaggacagactttcatgtgtgacaagttgtatctggtagaccagaaggccaaagaaatcattcccaaggctgacattcccagcccaagaaaagagtttagtgcatgtgcgattggctgcaaagtgtacattactggggggcgggggtctgaaaatggggtctcaaaagatgtctgggtttatgataccctgcacgaggagtggtccaaggctgcccccatgctggtggccaggtttggccatggctctgctgaactgaagcactgcctgtatgtggttggggggcacacggccgcaactggctgcctcccggcctccccctcagtctctctaaagcaggtagaacattatgaccccacaatcaacaaatggaccatggtggccccactccgagaaggcgttagcaacgccgcagtagtgagtgccaaacttaagttatttgctttcggaggtaccagtgtcagtcatgacaagctccccaaagttcagtgttacgatcagtgtgaaaacaggtggactgtaccggccacctgtccccagccctggcgttacacagcagcagctgtgctggggaaccagatttttattatggggggtgatacagaattctctgcctgctctgcttataaattcaacagtgagacttaccagtggaccaaggtgggagatgtgacagcaaagcgcatgagctgccatgctgtggcctctggaaacaaactctacgtggttggaggatactttggcattcagcgatgcaagactttggactgctacgatccaacattagacgtgtggaacagcatcaccactgtcccgtactcgctgattcctactgcatttgtcagcacctggaaacatctgccttcttaaatgcagtacattctaaagagagtgagcatgagctcactccatcactcgatgagataatatgagatttctacttcggagaggccaagtctaatgaagagaaaaaaaggaaaagaagttgcaagactcgaataaaatctgctgcaccttgtaaatgctctaactggacatgaaggaaaggggcgagggaggggggtgggatttttggtgcaagtagcacatggtttaaatatgaatgaacaaacctgtgatctagtccttgtcttgtaattgtggattaatgtcaatgttaatcagcccctcaaagggagagaaaagctggaccttttcccttgctgtaccatattcagcatttgatttccatgggccccaccatttatgtgtagaatttgaaatggttgtcacctctctctgaggacagagcttgaagcctccacaccagctgctgctggagattcaaagcccaactgtgggtccgagagggaagctggctgggctggctgaagaatgaagaccactggactctccgttaatctctaaggggtctgctccccaggaacgtttctgaacaatggggactttgttggtagccatttggtagatgttcttttctatttataagtgactttaaactttcccttggctgttaagaagtttgttatagatttagctatttattgttcgatgcctgcatgctgaaacaatgcctacagctgtcttcacatgtatggacgtgtgtgaatggttgtacgttttgcacattttgtggctgttgagatgtgctttgctgcacaaacatgaaaatttttgagttacaatttggagcataactggagggtgggttggggaggggtggatttttaaaatgtcaagacagggaaggatgacaaaatggaaatttaaatgacatcctagaggtagagaaaccgtggagatcgcttttctcagactcaccaacttttaatgggatttcatggggtttggttgtgctgatagggtaaggggaggctgctttctgcccttctccccactcccatctgatttacttaattcagtctcagctgctgaaatttggaaaggaccaaattgctttacagtttttttctttgtgtagtatcttgaaatcctggaaaattctatggaatagttctgtatatagggcacaagtaaaggcattgtccaaagtttatttatttatttattaccctaagaatgctttgccataaccacatttaatgggaaaaacggcagtatcacagatgtaaattaactcaccagatttactgggcctgaactcattctcttcttgctatatgatttagcaagttctagaaggtctccaagacaataattacattggcacaatgtatacttcagtgctcacccgtaggcaaatctctttttaaaaaactctttggtgcacaagtaacacatttggccacaaaacaccaaagaattgtaggcagtggcccctattgagaagttttccggtagagttggaaatcagttgtgaatacattctttgctagttggagtgcttgtttactaagcatgtgccgtcgtaggtattagtgctagtctcagataggtgcttcccctgaggtgcaggggaagaccaaagtttgcaactcgaactgctttcgtccatgtttctcacattgctgtattttagaaaataggggttaagactgataacaaccttttacattgtgactgtgtttgcattgtctaatgacagataaatccttaacatttctctccaccttagtactttagactaattgtgtttgtccgtccatgccatgaatgagtgggctgtagttgggcctaaataaatgagctgttggaagaaaagaatcacagtactttccagcagtcagtccctggttcctagatgtgttctaagcaatgcaaatgtctaattgtcccccagtgggcatagtcagtgtcgtttatattgtagcagttacagctctgtagtttatgatgcaaatctgccaagagagatgtatgtgtcactgcatggcttctgaaagcaggatgaattttctgcagctgtttcaaagttggggtctgttcttgaatcctctattaattactgtgtgtgagccagagggagctgtggtaagggttgggcccccagcctgtagggaactttctggactcccactctttgaatcgatataggcatttggtctcactacttgaccattctcaccctgtgaaacgtcccacactttgaagcaaatacaattcacagcacagtacacacaaaaaccttggcataagacagagaaggttcttcttattttgtgggctggttgctgtagaaacacataacaaagggcagccctccacttctggtataattgtgtagccccttttctttgggcttgacacctgtcttgaataagagtgattagagctgcataatgtccctctcttggctattgaccatgtggttcacgtacaaaactctgtataagttgaaggaaaatgttcatgttcatatgtacttgtttgctatgactacattttgaggttttgtaaaactgttatttttttttttttcacaatgtgaaactgaaggtcaataaattattagagattttctcttca

SEQ ID NO: 9231 - DNA, 2982 bp, Homo sapiens
  source 1..2982: mol_type = unassigned DNA
gcagatccccgctctcccgggcgccgctactcacacaggcttccagccgccacggggcgtcctctgtctgctgcagcggcggcggcagcagagggaacggcgactgcagcccggccgcgtctcccagctccgtgcccgggacagagtccgggagaagcaaaggaggaggaggacgccgaggctaggaggagccgcgccgcgcccggcgccccactccgcgcagcgggttgcctccgctccccatacggcggccccaggtcctttgctgccagcatgatgtcgtatttataatatgtggaggagagagagctcaccatgctcaggtaaagggatggtatgtgcaccacaaataacaagcagaagcctctgatatgtcagaaccatgctgtcttccatgagacttcctttgtgaagagcatccatttaaaagacttttatgaatacatggtttcaatcaagtccccagagaacacatttgtcttctgagctgctggcagttttgagaatctgatgacctccgaggggaccctgcactcagccatcaaagtgttcctgcccctctggacactcataattcaatggtagatgcaggtggagttgagaacatcacccagcttccccaggagcttcctcagatgatggctgcagcagccgatggtttggggagtatagcgatagacacgacccagctcaacatgtccgtgacagatcccacagcctgggctacagccatgaataacctgggcatggttcccgtagggttgcctggacagcagctcgtgtctgactcaatctgtgtcccaggctttgatccaagcctcaacatgatgactggaatcacccccattaacccaatgataccaggccttggactggtacctcccccaccaccaacagaagtggctgttgtcaaagaaataatccactgcaaaagctgtactctttttcctcaaaatccaaatcttccacctccttccacaagagaacgacctcctgggtgtaagaccgtgtttgtcggaggattaccagaaaatgctactgaggaaattattcaagaagtctttgaacagtgcggtgatattacagcaattcggaaaagcaagaagaatttttgtcacattcgctttgcagaggaattcatggttgataaagccatttacctttctggttataggatgcgattagggtctagcaccgacaaaaaggattcaggccgccttcatgtggactttgcccaggccagggatgacttctatgagtgggaatgcaagcagaggatgcgtgcccgggaggagcggcaccggcgcaagctggaggaggaccggctcaggcccccatccccgcctgccataatgcactactcggagcacgaagccgctctgctggctgaaaagctgaaagatgatagcaagttttcagaggctatcacagtgctgctttcctggattgaacgaggggaagtgaatcggcgctctgcaaaccagttctattccatggtgcagtcggccaacagccacgtccgccggctaatgaatgaaaaagccacccatgagcaagagatggaggaagccaaggagaattttaaaaatgccttaactgggattctcactcaatttgagcagattgtggccgttttcaacgcttctaccagacaaaaagcttgggaccatttctcgaaagcccagcgcaagaacatagacatttggcgaaagcattctgaggagctccggaatgctcaaagtgagcagctcatgggcatccgccgcgaagaagaaatggaaatgtctgatgatgagaactgtgacagccctacaaagaaaatgagagtcgatgaatcagccctggctgcccaggcctacgctctgaaagaggagaatgacagtctccgctggcagctggatgcctacaggaatgaggtggagctgctgaaacaagaaaaagaacagcttttccgaacagaagaaaacctcaccaaggaccagcaactgcagtttctgcagcaaaccatgcaaggcatgcagcagcaattgctaaccatccaggaggagttaaacaacaaaaagtcagaattggaacaagcaaaggaagagcagtcccatacacaagcgttactaaaagtcctgcaggaacaattaaaaggtaccaaggaattggtcgagaccaatggccacagccatgaggattcaaatgaaatcaatgtgttgacagttgcattagtcaaccaagaccgagagaacaatattgagaaaagaagccaaggcttaaaatcagagaaagaagctctgctaataggtatcatatcaacgtttcttcacgtccatccttttggagccaacatagaatatctttggtcatacatgcagcagctggactccaagatatctgcaaatgaaatagaaatgcttttgatgaggctgccacgcatgttcaaacaggaattcacgggtgtgggagccacgctggaaaaaagatggaagctgtgtgcctttgaaggaattaaaactacctaactgcgaagagcaaagcatctctggaaatgaaaccatgtgaacctggccagggcggtgcgacggggaagcaggaggtgtggggttggtccagcacgcaacctttgtggagccatcgaagcctgcctttagttatatctgtggcgttctcttgtaagtggaaatgtaattgtgtaccagtttcttaaaataaacaaagcttcatactgtgacagatctgtttcctatgaaaaccaaacaatgattccacagtcataatgatggcaaaatcttaaaatgtgctacatttgagaatagctcaccaagcaaaatatttaaagttaatgatggtgtagcaatgattgttgctaggctacagagttgtatatgtaatgtatagctgaaatcattaaatgacattttcctgaaagtctttctgttttagtaaaaaaaaaaaaaaaaaaaaaaagaaaaagaaaaagaaaaaaagaaaaaa

SEQ ID NO: 9232 - DNA, 2610 bp, Homo sapiens
  source 1..2610: mol_type = unassigned DNA
gatggacagaagatggaaaaatttcttacatgaatgaaaagcctctgatatgtcagaaccatgctgtcttccatgagacttcctttgtgaagagcatccatttaaaagacttttatgaatacatggtttcaatcaagtccccagagaacacatttgtcttctgagctgctggcagttttgagaatctgatgacctccgaggggaccctgcactcagccatcaaagtgttcctgcccctctggacactcataattcaatggtagatgcaggtggagttgagaacatcacccagcttccccaggagcttcctcagatgatggctgcagcagccgatggtttggggagtatagcgatagacacgacccagctcaacatgtccgtgacagatcccacagcctgggctacagccatgaataacctgggcatggttcccgtagggttgcctggacagcagctcgtgtctgactcaatctgtgtcccaggctttgatccaagcctcaacatgatgactggaatcacccccattaacccaatgataccaggccttggactggtacctcccccaccaccaacagaagtggctgttgtcaaagaaataatccactgcaaaagctgtactctttttcctcaaaatccaaatcttccacctccttccacaagagaacgacctcctgggtgtaagaccgtgtttgtcggaggattaccagaaaatgctactgaggaaattattcaagaagtctttgaacagtgcggtgatattacagcaattcggaaaagcaagaagaatttttgtcacattcgctttgcagaggaattcatggttgataaagccatttacctttctggttataggatgcgattagggtctagcaccgacaaaaaggattcaggccgccttcatgtggactttgcccaggccagggatgacttctatgagtgggaatgcaagcagaggatgcgtgcccgggaggagcggcaccggcgcaagctggaggaggaccggctcaggcccccatccccgcctgccataatgcactactcggagcacgaagccgctctgctggctgaaaagctgaaagatgatagcaagttttcagaggctatcacagtgctgctttcctggattgaacgaggggaagtgaatcggcgctctgcaaaccagttctattccatggtgcagtcggccaacagccacgtccgccggctaatgaatgaaaaagccacccatgagcaagagatggaggaagccaaggagaattttaaaaatgccttaactgggattctcactcaatttgagcagattgtggccgttttcaacgcttctaccagacaaaaagcttgggaccatttctcgaaagcccagcgcaagaacatagacatttggcgaaagcattctgaggagctccggaatgctcaaagtgagcagctcatgggcatccgccgcgaagaagaaatggaaatgtctgatgatgagaactgtgacagccctacaaagaaaatgagagtcgatgaatcagccctggctgcccaggcctacgctctgaaagaggagaatgacagtctccgctggcagctggatgcctacaggaatgaggtggagctgctgaaacaagaaaaagaacagcttttccgaacagaagaaaacctcaccaaggaccagcaactgcagtttctgcagcaaaccatgcaaggcatgcagcagcaattgctaaccatccaggaggagttaaacaacaaaaagtcagaattggaacaagcaaaggaagagcagtcccatacacaagcgttactaaaagtcctgcaggaacaattaaaaggtaccaaggaattggtcgagaccaatggccacagccatgaggattcaaatgaaatcaatgtgttgacagttgcattagtcaaccaagaccgagagaacaatattgagaaaagaagccaaggcttaaaatcagagaaagaagctctgctaataggtatcatatcaacgtttcttcacgtccatccttttggagccaacatagaatatctttggtcatacatgcagcagctggactccaagatatctgcaaatgaaatagaaatgcttttgatgaggctgccacgcatgttcaaacaggaattcacgggtgtgggagccacgctggaaaaaagatggaagctgtgtgcctttgaaggaattaaaactacctaactgcgaagagcaaagcatctctggaaatgaaaccatgtgaacctggccagggcggtgcgacggggaagcaggaggtgtggggttggtccagcacgcaacctttgtggagccatcgaagcctgcctttagttatatctgtggcgttctcttgtaagtggaaatgtaattgtgtaccagtttcttaaaataaacaaagcttcatactgtgacagatctgtttcctatgaaaaccaaacaatgattccacagtcataatgatggcaaaatcttaaaatgtgctacatttgagaatagctcaccaagcaaaatatttaaagttaatgatggtgtagcaatgattgttgctaggctacagagttgtatatgtaatgtatagctgaaatcattaaatgacattttcctgaaagtctttctgttttagt

SEQ ID NO: 9233 - DNA, 1258 bp, Homo sapiens
  source 1..1258: mol_type = unassigned DNA
actataaagccagtatgtgggatttagggatgtgtatccagcgttaagactttttgcatgcagtgaagcctagtgtttgccggagaacacagtgtgaaatatgtgagcatttccatccatcttcacaaatatcttccacctccttccacaagagaacgacctcctgggtgtaagaccgtgtttgtcggaggattaccagaaaatgctactgaggaaattattcaagaagtctttgaacagtgcggtgatattacagcaattcggaaaagcaagaagaatttttgtcacattcgctttgcagaggaattcatggttgataaagccatttacctttctggttataggatgcgattagggtctagcaccgacaaaaaggattcaggccgccttcatgtggactttgcccaggccagggatgacttctatgagtgggaatgcaagcagaggatgcgtgcccgggaggagcggcaccggcgcaagctggaggaggaccggctcaggcccccatccccgcctgccataatgcactactcggagcacgaagccgctctgctggctgaaaagctgaaagatgatagcaagttttcagaggctatcacagtgctgctttcctggattgaacgaggggaagtgaatcggcgctctgcaaaccagttctattccatggtgcagtcggccaacagccacgtccgccggctaatgaatgaaaaagccacccatgagcaagagatggaggaagccaaggagaattttaaaaatgccttaactgggattctcactcaatttgagcagattgtggccgttttcaacgcttctaccagacaaaaagcttgggaccatttctcgaaagcccagcgcaagaacatagacatttggcgaaagcattctgaggagctccggaatgctcaaagtgagcagctcatgggcatccgccgcgaagaagaaatggaaatgtctgatgatgagaactgtgacagccctacaaagaaaatgagagtcgatgaatcaggtgcttaacatacaagtaggcaccatgccactattttctgaagccatatatcccttgtctgaaaaatgaacccagcacttatgtgtcaatgatgtatgtctcctgctaagcccagatcagattcctcaggactgctttactcttgggtttgtttatttgaggagaccaccttcctcacaggatttctattctacaaaccttcacatagcaaaagaagggggcaaggatttgtgtgaatttcttaagttc

SEQ ID NO: 9234 - DNA, 4184 bp, Homo sapiens
  source 1..4184: mol_type = unassigned DNA
gtgtgtgagagtccagccttgggccagagtgccgggtctaggcctggaagcgcgaggcgggcatttcggaagagagtggcgcggcgtggggcgccgcgagggcactacgagcccaggaactgccgcgccggcccgattttccgcggctgtataaggactagcgcttcggtagccggggagctggagggaacctgatttgagatcaattcttggagaacacaaagaagtgtgatggattgaaccagctgccctttgaccctgctaacaacaacgagcccctgcagtttggtagtgccagtggccctctggtcacagaaggcctcattgagaatggaggggaatcaagcaagaaaagaaagagaacaaatactccttcagaaatgatgacagagctaagttcacagttgaggaccacacaatgcaaagagattttagatggctgtgggtctacgaaataggctatgcagccgataacagtagaactctgaacgtggattccactgcaatgacactacctatgtctgatccaactgcatgggccacagcaatgaataatcttggaatggcaccgctgggaattgccggacaaccaattttacctgactttgatcctgctcttggaatgatgactggaattccaccaataactccaatgatgcctggtttgggaatagtacctccaccaattcctccagatatgccagtagtaaaagagatcatacactgtaaaagctgcacgctcttccctccaaatccaaatctcccacctcctgcaacccgagaaagaccaccaggatgcaaaacagtatttgtgggtggtctgcctgaaaatgggacagagcaaatcattgtggaagttttcgagcagtgtggagagatcattgccattcgcaagagcaagaagaacttctgccacattcgctttgctgaggagtacatggtggacaaagccctgtatctgtctggttaccgcattcgcctgggctctagtactgacaagaaggacacaggcagactccacgttgatttcgcacaggctcgagatgacctgtatgagtgggagtgtaaacagcgtatgctagccagagaggagcgccatcgtagaagaatggaagaagaaagattgcgtccaccatctccacccccagtggtccactattcagatcatgaatgcagcattgttgctgaaaaattaaaagatgattccaaattctcagaagctgtacagaccttgcttacctggatagagcgaggagaggtcaaccgtcgtagcgccaataacttctactccatgatccagtcggccaacagccatgtccgccgcctggtgaacgagaaagctgcccatgagaaagatatggaagaagcaaaggagaagttcaagcaggccctttctggaattctcattcaatttgagcagatagtggctgtgtaccattccgcctccaagcagaaggcatgggaccacttcacaaaagcccagcggaagaacatcagcgtgtggtgcaaacaagctgaggaaattcgcaacattcataatgatgaattaatgggaatcaggcgagaagaagaaatggaaatgtctgatgatgaaatagaagaaatgacagaaacaaaagaaactgaggaatcagccttagtatcacaggcagaagctctgaaggaagaaaatgacagcctccgttggcagctcgatgcctaccggaatgaagtagaactgctcaagcaagaacaaggcaaagtccacagagaagatgaccctaacaaagaacagcagctgaaactcctgcaacaagccctgcaaggaatgcaacagcatctactcaaagtccaagaggaatacaaaaagaaagaagctgaacttgaaaaactcaaagatgacaagttacaggtggaaaaaatgttggaaaatcttaaagaaaaggaaagctgtgcttctaggctgtgtgcctcaaaccaggatagcgaataccctcttgagaagaccatgaacagcagtcctatcaaatctgaacgtgaagcactgctagtggggattatctccacattccttcatgttcacccatttggagcaagcattgaatacatctgttcctacttgcaccgtcttgataataagatctgcaccagcgatgtggagtgtctcatgggtagactccagcataccttcaagcaggaaatgactggagttggagccagcctggaaaagagatggaaattctgtggcttcgagggcttgaagctgacctaaatctctttgcctaacaacttgggatcctgaagataaatatgtgttggacaagcatagaaagtgatttatatttttaatggttttcaagtggaagttcctttgaatttgtcagttcattcctggaaaatcttttgagttaaaataaggatcctaggacagcacctcgaactacaggccctaaagagaaattgcctcaaaccacaagtgctgtaacttcctcccctttctgtcaattggttgtctttaaatattgcaaaagtcctgatgctaaacagtatttggagtgttttcagtgtctgtactactgttgtagaccttggtatttttttaaacactgttaactgaaatgttttgatgatttgtatgtgatttgtgtttctaaacttctctttacattaatgttgttactggtgaaaggcatgagagcagcactaagtcctctgtgtaactgccattgtctttccaatccccagtagaccagtaaataaataacacatcagtgtcttctagaaggtgcctgaccaggttcaccttttaaacgacaaagcatggtttgtggctttttgcaaaattactatgaaccaaaagttgacaaatgttccaaagttattttctctaacatatcacattaaagatctgtttcagaattgtaaaaagtacatctagatgtgtttacagaaagcaagtatccagtatgactggcatgtgttcatgctattcagaatcacttgtaaatagtctgcttttaaaggagggcatgttcagttttctgtgaattaaaatatgctcatgtgtgggcacacacgcacaaacacacacacgcacgcacacagtggcagaagggatttatattaatattctttcccctctggccttcttacagtctgttggtccctttgcttctgttgtcagtgtgttgaattgcaaaccgagtactgctgtaaatactatgtttacttcatgctgaatgtttgcaaagacttgatataagtattaatagtaatgaatcaatgaataaataatgagctagggtttgtgaggctttctacaaataggtcagctccacctggagtgcgaattgccagagacaccttggtagtgcccatcggcaaatcgcaatggcagcatgtgagtggaccattcagaaacttctgcttggtggaaagtaaacagagaggatggaggtttggggcgaatgtcctgaggcagagatggtctttattgtgtgtggtggtggttgtggtatttataataatgcaagcataccctcccttgagtctcaattgaagataaaagaatgtactgagcaagcaaagccaatggagagtatttcacaaaaatactttgtaaatgagatgccagtagtgttcaaagttgtatttttaaaagataaatattcctttttatacctcagttttgtgtcctgtttttaatgacttacgctctaagtaatccattagtagttatctcagttccttcctttgggttactagaatgttggaaaaagatgccaagtctgtcttgacaactggaaacagggttccacagcagcccattcgtgctgaaaactggcttccccctgaagcaccctgctgtggcaccagcaggaagctcaggttaattttacactagcttgctcactgatgcatctctcatcaatgctacggaaggctttgattcatcagtctcgggctcttggaatacctaattttaataatatctatgaaatcaagggaaactttccatttacagttatttcttgtttaaataaactaaattaatttttaggggagagcagtaggaaaaagagctaatgcatgcggggtttaatacctaggtgatgggttgaggtgcagcaaaaccaccatggcacacgttcacctatgtaacaaacctgcacatcctgcacatgtaccccggaacttacttaaaa

SEQ ID NO: 9235 - DNA, 4095 bp, Homo sapiens
  source 1..4095: mol_type = unassigned DNA
gtgtgtgagagtccagccttgggccagagtgccgggtctaggcctggaagcgcgaggcgggcatttcggaagagagtggcgcggcgtggggcgccgcgagggcactacgagcccaggaactgccgcgccggcccgattttccgcggctgtataaggactagcgcttcggtagccggggagctggagggaacctgatttgagatcaattcttggagaacacaaagaagtgtgatggattgaaccagctgccctttgaccctgctaacaacaacgagcccctgcagtttggtagtgccagtggccctctggtcacagaaggcctcattgagaatggaggggaatcaagcaagaaaagaaagagaacaaatactccttcagccgataacagtagaactctgaacgtggattccactgcaatgacactacctatgtctgatccaactgcatgggccacagcaatgaataatcttggaatggcaccgctgggaattgccggacaaccaattttacctgactttgatcctgctcttggaatgatgactggaattccaccaataactccaatgatgcctggtttgggaatagtacctccaccaattcctccagatatgccagtagtaaaagagatcatacactgtaaaagctgcacgctcttccctccaaatccaaatctcccacctcctgcaacccgagaaagaccaccaggatgcaaaacagtatttgtgggtggtctgcctgaaaatgggacagagcaaatcattgtggaagttttcgagcagtgtggagagatcattgccattcgcaagagcaagaagaacttctgccacattcgctttgctgaggagtacatggtggacaaagccctgtatctgtctggttaccgcattcgcctgggctctagtactgacaagaaggacacaggcagactccacgttgatttcgcacaggctcgagatgacctgtatgagtgggagtgtaaacagcgtatgctagccagagaggagcgccatcgtagaagaatggaagaagaaagattgcgtccaccatctccacccccagtggtccactattcagatcatgaatgcagcattgttgctgaaaaattaaaagatgattccaaattctcagaagctgtacagaccttgcttacctggatagagcgaggagaggtcaaccgtcgtagcgccaataacttctactccatgatccagtcggccaacagccatgtccgccgcctggtgaacgagaaagctgcccatgagaaagatatggaagaagcaaaggagaagttcaagcaggccctttctggaattctcattcaatttgagcagatagtggctgtgtaccattccgcctccaagcagaaggcatgggaccacttcacaaaagcccagcggaagaacatcagcgtgtggtgcaaacaagctgaggaaattcgcaacattcataatgatgaattaatgggaatcaggcgagaagaagaaatggaaatgtctgatgatgaaatagaagaaatgacagaaacaaaagaaactgaggaatcagccttagtatcacaggcagaagctctgaaggaagaaaatgacagcctccgttggcagctcgatgcctaccggaatgaagtagaactgctcaagcaagaacaaggcaaagtccacagagaagatgaccctaacaaagaacagcagctgaaactcctgcaacaagccctgcaaggaatgcaacagcatctactcaaagtccaagaggaatacaaaaagaaagaagctgaacttgaaaaactcaaagatgacaagttacaggtggaaaaaatgttggaaaatcttaaagaaaaggaaagctgtgcttctaggctgtgtgcctcaaaccaggatagcgaataccctcttgagaagaccatgaacagcagtcctatcaaatctgaacgtgaagcactgctagtggggattatctccacattccttcatgttcacccatttggagcaagcattgaatacatctgttcctacttgcaccgtcttgataataagatctgcaccagcgatgtggagtgtctcatgggtagactccagcataccttcaagcaggaaatgactggagttggagccagcctggaaaagagatggaaattctgtggcttcgagggcttgaagctgacctaaatctctttgcctaacaacttgggatcctgaagataaatatgtgttggacaagcatagaaagtgatttatatttttaatggttttcaagtggaagttcctttgaatttgtcagttcattcctggaaaatcttttgagttaaaataaggatcctaggacagcacctcgaactacaggccctaaagagaaattgcctcaaaccacaagtgctgtaacttcctcccctttctgtcaattggttgtctttaaatattgcaaaagtcctgatgctaaacagtatttggagtgttttcagtgtctgtactactgttgtagaccttggtatttttttaaacactgttaactgaaatgttttgatgatttgtatgtgatttgtgtttctaaacttctctttacattaatgttgttactggtgaaaggcatgagagcagcactaagtcctctgtgtaactgccattgtctttccaatccccagtagaccagtaaataaataacacatcagtgtcttctagaaggtgcctgaccaggttcaccttttaaacgacaaagcatggtttgtggctttttgcaaaattactatgaaccaaaagttgacaaatgttccaaagttattttctctaacatatcacattaaagatctgtttcagaattgtaaaaagtacatctagatgtgtttacagaaagcaagtatccagtatgactggcatgtgttcatgctattcagaatcacttgtaaatagtctgcttttaaaggagggcatgttcagttttctgtgaattaaaatatgctcatgtgtgggcacacacgcacaaacacacacacgcacgcacacagtggcagaagggatttatattaatattctttcccctctggccttcttacagtctgttggtccctttgcttctgttgtcagtgtgttgaattgcaaaccgagtactgctgtaaatactatgtttacttcatgctgaatgtttgcaaagacttgatataagtattaatagtaatgaatcaatgaataaataatgagctagggtttgtgaggctttctacaaataggtcagctccacctggagtgcgaattgccagagacaccttggtagtgcccatcggcaaatcgcaatggcagcatgtgagtggaccattcagaaacttctgcttggtggaaagtaaacagagaggatggaggtttggggcgaatgtcctgaggcagagatggtctttattgtgtgtggtggtggttgtggtatttataataatgcaagcataccctcccttgagtctcaattgaagataaaagaatgtactgagcaagcaaagccaatggagagtatttcacaaaaatactttgtaaatgagatgccagtagtgttcaaagttgtatttttaaaagataaatattcctttttatacctcagttttgtgtcctgtttttaatgacttacgctctaagtaatccattagtagttatctcagttccttcctttgggttactagaatgttggaaaaagatgccaagtctgtcttgacaactggaaacagggttccacagcagcccattcgtgctgaaaactggcttccccctgaagcaccctgctgtggcaccagcaggaagctcaggttaattttacactagcttgctcactgatgcatctctcatcaatgctacggaaggctttgattcatcagtctcgggctcttggaatacctaattttaataatatctatgaaatcaagggaaactttccatttacagttatttcttgtttaaataaactaaattaatttttaggggagagcagtaggaaaaagagctaatgcatgcggggtttaatacctaggtgatgggttgaggtgcagcaaaaccaccatggcacacgttcacctatgtaacaaacctgcacatcctgcacatgtaccccggaacttacttaaaa

SEQ ID NO: 9236 - DNA, 3788 bp, Homo sapiens
  source 1..3788: mol_type = unassigned DNA
gttcacagttgaggaccacacaatgcaaagagattttagatggctgtgggtctacgaaataggctatgcagccgataacagtagaactctgaacgtggattccactgcaatgacactacctatgtctgatccaactgcatgggccacagcaatgaataatcttggaatggcaccgctgggaattgccggacaaccaattttacctgactttgatcctgctcttggaatgatgactggaattccaccaataactccaatgatgcctggtttgggaatagtacctccaccaattcctccagatatgccagtagtaaaagagatcatacactgtaaaagctgcacgctcttccctccaaatccaaatctcccacctcctgcaacccgagaaagaccaccaggatgcaaaacagtatttgtgggtggtctgcctgaaaatgggacagagcaaatcattgtggaagttttcgagcagtgtggagagatcattgccattcgcaagagcaagaagaacttctgccacattcgctttgctgaggagtacatggtggacaaagccctgtatctgtctggttaccgcattcgcctgggctctagtactgacaagaaggacacaggcagactccacgttgatttcgcacaggctcgagatgacctgtatgagtgggagtgtaaacagcgtatgctagccagagaggagcgccatcgtagaagaatggaagaagaaagattgcgtccaccatctccacccccagtggtccactattcagatcatgaatgcagcattgttgctgaaaaattaaaagatgattccaaattctcagaagctgtacagaccttgcttacctggatagagcgaggagaggtcaaccgtcgtagcgccaataacttctactccatgatccagtcggccaacagccatgtccgccgcctggtgaacgagaaagctgcccatgagaaagatatggaagaagcaaaggagaagttcaagcaggccctttctggaattctcattcaatttgagcagatagtggctgtgtaccattccgcctccaagcagaaggcatgggaccacttcacaaaagcccagcggaagaacatcagcgtgtggtgcaaacaagctgaggaaattcgcaacattcataatgatgaattaatgggaatcaggcgagaagaagaaatggaaatgtctgatgatgaaatagaagaaatgacagaaacaaaagaaactgaggaatcagccttagtatcacaggcagaagctctgaaggaagaaaatgacagcctccgttggcagctcgatgcctaccggaatgaagtagaactgctcaagcaagaacaaggcaaagtccacagagaagatgaccctaacaaagaacagcagctgaaactcctgcaacaagccctgcaaggaatgcaacagcatctactcaaagtccaagaggaatacaaaaagaaagaagctgaacttgaaaaactcaaagatgacaagttacaggtggaaaaaatgttggaaaatcttaaagaaaaggaaagctgtgcttctaggctgtgtgcctcaaaccaggatagcgaataccctcttgagaagaccatgaacagcagtcctatcaaatctgaacgtgaagcactgctagtggggattatctccacattccttcatgttcacccatttggagcaagcattgaatacatctgttcctacttgcaccgtcttgataataagatctgcaccagcgatgtggagtgtctcatgggtagactccagcataccttcaagcaggaaatgactggagttggagccagcctggaaaagagatggaaattctgtggcttcgagggcttgaagctgacctaaatctctttgcctaacaacttgggatcctgaagataaatatgtgttggacaagcatagaaagtgatttatatttttaatggttttcaagtggaagttcctttgaatttgtcagttcattcctggaaaatcttttgagttaaaataaggatcctaggacagcacctcgaactacaggccctaaagagaaattgcctcaaaccacaagtgctgtaacttcctcccctttctgtcaattggttgtctttaaatattgcaaaagtcctgatgctaaacagtatttggagtgttttcagtgtctgtactactgttgtagaccttggtatttttttaaacactgttaactgaaatgttttgatgatttgtatgtgatttgtgtttctaaacttctctttacattaatgttgttactggtgaaaggcatgagagcagcactaagtcctctgtgtaactgccattgtctttccaatccccagtagaccagtaaataaataacacatcagtgtcttctagaaggtgcctgaccaggttcaccttttaaacgacaaagcatggtttgtggctttttgcaaaattactatgaaccaaaagttgacaaatgttccaaagttattttctctaacatatcacattaaagatctgtttcagaattgtaaaaagtacatctagatgtgtttacagaaagcaagtatccagtatgactggcatgtgttcatgctattcagaatcacttgtaaatagtctgcttttaaaggagggcatgttcagttttctgtgaattaaaatatgctcatgtgtgggcacacacgcacaaacacacacacgcacgcacacagtggcagaagggatttatattaatattctttcccctctggccttcttacagtctgttggtccctttgcttctgttgtcagtgtgttgaattgcaaaccgagtactgctgtaaatactatgtttacttcatgctgaatgtttgcaaagacttgatataagtattaatagtaatgaatcaatgaataaataatgagctagggtttgtgaggctttctacaaataggtcagctccacctggagtgcgaattgccagagacaccttggtagtgcccatcggcaaatcgcaatggcagcatgtgagtggaccattcagaaacttctgcttggtggaaagtaaacagagaggatggaggtttggggcgaatgtcctgaggcagagatggtctttattgtgtgtggtggtggttgtggtatttataataatgcaagcataccctcccttgagtctcaattgaagataaaagaatgtactgagcaagcaaagccaatggagagtatttcacaaaaatactttgtaaatgagatgccagtagtgttcaaagttgtatttttaaaagataaatattcctttttatacctcagttttgtgtcctgtttttaatgacttacgctctaagtaatccattagtagttatctcagttccttcctttgggttactagaatgttggaaaaagatgccaagtctgtcttgacaactggaaacagggttccacagcagcccattcgtgctgaaaactggcttccccctgaagcaccctgctgtggcaccagcaggaagctcaggttaattttacactagcttgctcactgatgcatctctcatcaatgctacggaaggctttgattcatcagtctcgggctcttggaatacctaattttaataatatctatgaaatcaagggaaactttccatttacagttatttcttgtttaaataaactaaattaatttttaggggagagcagtaggaaaaagagctaatgcatgcggggtttaatacctaggtgatgggttgaggtgcagcaaaaccaccatggcacacgttcacctatgtaacaaacctgcacatcctgcacatgtaccccggaacttacttaaaa

SEQ ID NO: 9237 - DNA, 3956 bp, Homo sapiens
  source 1..3956: mol_type = unassigned DNA
gtgtgtgagagtccagccttgggccagagtgccgggtctaggcctggaagcgcgaggcgggcatttcggaagagagtggcgcggcgtggggcgccgcgagggcactacgagcccaggaactgccgcgccggcccgattttccgcggctgtataaggactagcgcttcggtagccggggagctggagggaacctgatttgagatcaattcttggagaacacaaagaagtgtgatgccgataacagtagaactctgaacgtggattccactgcaatgacactacctatgtctgatccaactgcatgggccacagcaatgaataatcttggaatggcaccgctgggaattgccggacaaccaattttacctgactttgatcctgctcttggaatgatgactggaattccaccaataactccaatgatgcctggtttgggaatagtacctccaccaattcctccagatatgccagtagtaaaagagatcatacactgtaaaagctgcacgctcttccctccaaatccaaatctcccacctcctgcaacccgagaaagaccaccaggatgcaaaacagtatttgtgggtggtctgcctgaaaatgggacagagcaaatcattgtggaagttttcgagcagtgtggagagatcattgccattcgcaagagcaagaagaacttctgccacattcgctttgctgaggagtacatggtggacaaagccctgtatctgtctggttaccgcattcgcctgggctctagtactgacaagaaggacacaggcagactccacgttgatttcgcacaggctcgagatgacctgtatgagtgggagtgtaaacagcgtatgctagccagagaggagcgccatcgtagaagaatggaagaagaaagattgcgtccaccatctccacccccagtggtccactattcagatcatgaatgcagcattgttgctgaaaaattaaaagatgattccaaattctcagaagctgtacagaccttgcttacctggatagagcgaggagaggtcaaccgtcgtagcgccaataacttctactccatgatccagtcggccaacagccatgtccgccgcctggtgaacgagaaagctgcccatgagaaagatatggaagaagcaaaggagaagttcaagcaggccctttctggaattctcattcaatttgagcagatagtggctgtgtaccattccgcctccaagcagaaggcatgggaccacttcacaaaagcccagcggaagaacatcagcgtgtggtgcaaacaagctgaggaaattcgcaacattcataatgatgaattaatgggaatcaggcgagaagaagaaatggaaatgtctgatgatgaaatagaagaaatgacagaaacaaaagaaactgaggaatcagccttagtatcacaggcagaagctctgaaggaagaaaatgacagcctccgttggcagctcgatgcctaccggaatgaagtagaactgctcaagcaagaacaaggcaaagtccacagagaagatgaccctaacaaagaacagcagctgaaactcctgcaacaagccctgcaaggaatgcaacagcatctactcaaagtccaagaggaatacaaaaagaaagaagctgaacttgaaaaactcaaagatgacaagttacaggtggaaaaaatgttggaaaatcttaaagaaaaggaaagctgtgcttctaggctgtgtgcctcaaaccaggatagcgaataccctcttgagaagaccatgaacagcagtcctatcaaatctgaacgtgaagcactgctagtggggattatctccacattccttcatgttcacccatttggagcaagcattgaatacatctgttcctacttgcaccgtcttgataataagatctgcaccagcgatgtggagtgtctcatgggtagactccagcataccttcaagcaggaaatgactggagttggagccagcctggaaaagagatggaaattctgtggcttcgagggcttgaagctgacctaaatctctttgcctaacaacttgggatcctgaagataaatatgtgttggacaagcatagaaagtgatttatatttttaatggttttcaagtggaagttcctttgaatttgtcagttcattcctggaaaatcttttgagttaaaataaggatcctaggacagcacctcgaactacaggccctaaagagaaattgcctcaaaccacaagtgctgtaacttcctcccctttctgtcaattggttgtctttaaatattgcaaaagtcctgatgctaaacagtatttggagtgttttcagtgtctgtactactgttgtagaccttggtatttttttaaacactgttaactgaaatgttttgatgatttgtatgtgatttgtgtttctaaacttctctttacattaatgttgttactggtgaaaggcatgagagcagcactaagtcctctgtgtaactgccattgtctttccaatccccagtagaccagtaaataaataacacatcagtgtcttctagaaggtgcctgaccaggttcaccttttaaacgacaaagcatggtttgtggctttttgcaaaattactatgaaccaaaagttgacaaatgttccaaagttattttctctaacatatcacattaaagatctgtttcagaattgtaaaaagtacatctagatgtgtttacagaaagcaagtatccagtatgactggcatgtgttcatgctattcagaatcacttgtaaatagtctgcttttaaaggagggcatgttcagttttctgtgaattaaaatatgctcatgtgtgggcacacacgcacaaacacacacacgcacgcacacagtggcagaagggatttatattaatattctttcccctctggccttcttacagtctgttggtccctttgcttctgttgtcagtgtgttgaattgcaaaccgagtactgctgtaaatactatgtttacttcatgctgaatgtttgcaaagacttgatataagtattaatagtaatgaatcaatgaataaataatgagctagggtttgtgaggctttctacaaataggtcagctccacctggagtgcgaattgccagagacaccttggtagtgcccatcggcaaatcgcaatggcagcatgtgagtggaccattcagaaacttctgcttggtggaaagtaaacagagaggatggaggtttggggcgaatgtcctgaggcagagatggtctttattgtgtgtggtggtggttgtggtatttataataatgcaagcataccctcccttgagtctcaattgaagataaaagaatgtactgagcaagcaaagccaatggagagtatttcacaaaaatactttgtaaatgagatgccagtagtgttcaaagttgtatttttaaaagataaatattcctttttatacctcagttttgtgtcctgtttttaatgacttacgctctaagtaatccattagtagttatctcagttccttcctttgggttactagaatgttggaaaaagatgccaagtctgtcttgacaactggaaacagggttccacagcagcccattcgtgctgaaaactggcttccccctgaagcaccctgctgtggcaccagcaggaagctcaggttaattttacactagcttgctcactgatgcatctctcatcaatgctacggaaggctttgattcatcagtctcgggctcttggaatacctaattttaataatatctatgaaatcaagggaaactttccatttacagttatttcttgtttaaataaactaaattaatttttaggggagagcagtaggaaaaagagctaatgcatgcggggtttaatacctaggtgatgggttgaggtgcagcaaaaccaccatggcacacgttcacctatgtaacaaacctgcacatcctgcacatgtaccccggaacttacttaaaaaataa

SEQ ID NO: 9238 - DNA, 4095 bp, Homo sapiens; identical to SEQ ID NO: 9235
  source 1..4095: mol_type = unassigned DNA

SEQ ID NO: 9239 - DNA, 1515 bp, Homo sapiens
  source 1..1515: mol_type = unassigned DNA
gccgggtctaggcctggaagcgcgaggcgggcatttcggaagagagtggcgcggcgtggggcgccgcgagggcactacgagcccaggaactgccgcgccggcccgattttccgcggctgtataaggactagcgcttcggtagccggggagctggagggaacctgatttgagatcaattcttggagaacacaaagaagtgtgatggattgaaccagctgccctttgaccctgctaacaacaacgagcccctgcagtttggtagtgccagtggccctctggtcacagaaggcctcattgagaatggaggggaatcaagcaagaaaagaaagagaacaaatactccttcagccgataacagtagaactctgaacgtggattccactgcaatgacactacctatgtctgatccaactgcatgggccacagcaatgaataatcttggaatggcaccgctgggaattgccggacaaccaattttacctgactttgatcctgctcttggaatgatgactggaattccaccaataactccaatgatgcctggtttgggaatagtacctccaccaattcctccagatatgccagtagtaaaagagatcatacactgtaaaagctgcacgctcttccctccaaatccaaatctcccacctcctgcaacccgagaaagaccaccaggatgcaaaacagtatttgtgggtggtctgcctgaaaatgggacagagcaaatcattgtggaagttttcgagcagtgtggagagatcattgccattcgcaagagcaagaagaacttctgccacattcgctttgctgaggagtacatggtggacaaagccctgtatctgtctggttaccgcattcgcctgggctctagtactgacaagaaggacacaggcagactccacgttgatttcgcacaggctcgagatgacctgtatgagtgggagtgtaaacagcgtatgctagccagagaggagcgccatcgtagaagaatggaagaagaaagattgcgtccaccatctccacccccagtggtccactattcagatcatgaatgcagcattgttgctgaaaaattaaaagatgattccaaattctcagaagctgtacagaccttgcttacctggatagagcgaggagaggtcaaccgtcgtagcgccaataacttctactccatgatccagtcggccaacagccatgtccgccgcctggtgaacgagaaagctgcccatgagaaagatatggaagaagcaaaggagaagttcaagcaggccctttctggaattctcattcaatttgagcagatagtggctgtgtaccattccgcctccaagcagaaggcatgggaccacttcacaaaagcccagcggaagaacatcagcgtgtggtgcaaacaagctgaggaaattcgcaacattcataatgatgaattaatgggaatcaggcgagaagaagaaatggaaatgtctgatgatgaaatagaagaaatgacagaaacaaaagaaactgaggaatcag

SEQ ID NO: 9240 - DNA, 1912 bp, Homo sapiens
  source 1..1912: mol_type = unassigned DNA
gtgtgtgagagtccagccttgggccagagtgccgggtctaggcctggaagcgcgaggcgggcatttcggaagagagtggcgcggcgtggggcgccgcgagggcactacgagcccaggaactgccgcgccggcccgattttccgcggctgtataaggactagcgcttcggtagccggggagctggagggaacctgatttgagatcaattcttggagaacacaaagaagtgtgatggattgaaccagctgccctttgaccctgctaacaacaacgagcccctgcagtttggtagtgccagtggccctctggtcacagaaggcctcattgagaatggaggggaatcaagcaagaaaagaaagagaacaaatactccttcagaaatgatgacagagctaagttcacagttgaggaccacacaatgcaaagagattttagatggctgtgggtctacgaaataggctatgcagccgataacagtagaactctgaacgtggattccactgcaatgacactacctatgtctgatccaactgcatgggccacagcaatgaataatcttggaatggcaccgctgggaattgccggacaaccaattttacctgactttgatcctgctcttggaatgatgactggaattccaccaataactccaatgatgcctggtttgggaatagtacctccaccaattcctccagatatgccagtagtaaaagagatcatacactgtaaaagctgcacgctcttccctccaaatccaaatctcccacctcctgcaacccgagaaagaccaccaggatgcaaaacagtatttgtgggtggtctgcctgaaaatgggacagagcaaatcattgtggaagttttcgagcagtgtggagagatcattgccattcgcaagagcaagaagaacttctgccacattcgctttgctgaggagtacatggtggacaaagccctgtatctgtctggttaccgcattcgcctgggctctagtactgacaagaaggacacaggcagactccacgttgatttcgcacaggctcgagatgacctgtatgagtgggagtgtaaacagcgtatgctagccagagaggagcgccatcgtagaagaatggaagaagaaagattgcgtccaccatctccacccccagtggtccactattcagatcatgaatgcagcattgttgctgaaaaattaaaagatgattccaaattctcagaagctgtacagaccttgcttacctggatagagcgaggagaggtcaaccgtcgtagcgccaataacttctactccatgatccagtcggccaacagccatgtccgccgcctggtgaacgagaaagctgcccatgagaaagatatggaagaagcaaaggagaagttcaagcaggccctttctggaattctcattcaatttgagcagatagtggctgtgtaccattccgcctccaagcagaaggcatgggaccacttcacaaaagcccagcggaagaacatcagcgtgtggtgcaaacaagctgaggaaattcgcaacattcataatgatgaattaatgggaatcaggcgagaagaagaaatggaaatgtctgatgatgaaatagaagaaatgacagaaacaaaagaaactgaggaatcagccttagtatcacaggcagaagctctgaaggaagaaaatgacagcctccgttggcagctcgatgcctaccggaatgaagtagaactgctcaagcaagaacaaggcaaagtccacagagaagatgaccctaacaaagaacagcagctgaaactcctgcaacaagccctgcaaggaatgcaacagcatctactcaaagtccaagaggaatacaaaaagaaagaagctgaacttgaaaaactcaaagatgacaagttacaggtggaaaaaatgaaaaaatga

SEQ ID NO: 9241 - DNA, 12589 bp, Homo sapiens
  source 1..12589: mol_type = unassigned DNA
agggaagaagggagaaagagagagagatttgaatatacattgcttcaaggatgcaaaaaattacaacctggaaaaggcttcgagtaactttaggaaaatgagctgctggactcctcagtcaatctgtcctttctagtcaatgaaaaagacagggtttgaggttccttccgaaacggggccggctaatttagcccctcccacgagcccaagggtctgttatatctctgtttccttgaggacctctctcacggagacggaccacagcaagcagaggctgggggggggaaagacgaggaaagaggaggaaaacaaaagctgctacttatggaagatacaaaggagtctaacgtgaagacattttgctccaagaatatcctagccatccttggcttctcctctatcatagctgtgatagctttgcttgctgtggggttgacccagaacaaagcattgccagaaaacgttaagtatgggattgtgctggatgcgggttcttctcacacaagtttatacatctataagtggccagcagaaaaggagaatgacacaggcgtggtgcatcaagtagaagaatgcagggttaaaggatggaaagtgaagagttggcagacagggttctggatgtggtggagaggagcctcagcaactacccctttgacttccagggtgccaggatcattactggccaagaggaaggtgcctatggctggattactatcaactatctgctgggcaaattcagtcagaaaacaaggtggttcagcatagtcccatatgaaaccaataatcaggaaacctttggagctttggaccttgggggagcctctacacaagtcacttttgtaccccaaaaccagactatcgagtccccagataatgctctgcaatttcgcctctatggcaaggactacaatgtctacacacatagcttcttgtgctatgggaaggatcaggcactctggcagaaactggccaaggacattcaggttgcaagtaatgaaattctcagggacccatgctttcatcctggatataagaaggtagtgaacgtaagtgacctttacaagaccccctgcaccaagagatttgagatgactcttccattccagcagtttgaaatccagggtattggaaactatcaacaatgccatcaaagcatcctggagctcttcaacaccagttactgcccttactcccagtgtgccttcaatgggattttcttgccaccactccagggggattttggggcattttcagctttttactttgtgatgaagtttttaaacttgacatcagagaaagtctctcaggaaaaggtgactgagatgatgaaaaagttctgtgctcagccttgggaggagataaaaacatcttacgctggagtaaaggagaagtacctgagtgaatactgcttttctggtacctacattctctccctccttctgcaaggctatcatttcacagctgattcctgggagcacatccatttcattggcaagatccagggcagcgacgccggctggactttgggctacatgctgaacctgaccaacatgatcccagctgagcaaccattgtccacacctctctcccactccacctatgtcttcctcatggttctattctccctggtccttttcacagtggccatcataggcttgcttatctttcacaagccttcatatttctggaaagatatggtatagcaaaagcagctgaaatatgctggctggagtgaggaaaaaaatcgtccagggagcattttcctccatcgcagtgttcaaggccatccttccctgtctgccagggccagtcttgacgagtgtgaagcttccttggcttttactgaagcctttcttttggaggtattcaatatcctttgcctcaaggacttcggcagatactgtctctttcatgagtttttcccagctacacctttctcctttgtactttgtgcttgtataggttttaaagacctgacacctttcataatctttgctttataaaagaacaatattgactttgtctagaagaactgagagtcttgagtcctgtgataggaggctgagctggctgaaagaagaatctcaggaactggttcagttgtactctttaagaacccctttctctctcctgtttgccatccattaagaaagccatatgatgcctttggagaaggcagacacacattccattcccagcctgctctgtgggtaggagaattttctacagtaggcaaatatgtgctaaagccaaagagttttataaggaaatatatgtgctcatgcagtcaatacagttctcaatcccacccaaagcaggtatgtcaataaatcacatattcctaggtgatacccaaatgctacagagtggaacactcagacctgagatttgcaaaaagcagatgtaaatatatgcattcaaacatcagggcttactatgaggtaggtggtatatacatgtcacaaataaaaatacagttacaactcagggtcacaaaaaatgcatcttccaatgcatatttttattatggtaaaatatacataaatataattcaccattttaacatttaattcatattaaatacgtacaaatcagtgacatttagtacattcacagtgttgtgccaccatcaccactatttagttccagaacatttgcatcatcaatacattgtctagagacaagactatcctgggtaggcagaaaccatagatcttttgtgtttacagctatggaaaccaactgtaccataaagatagttcactgagttttaaagccaagccacatcttatttttccaaggtttaatttagtgagagggcagcattagtgtggagtggcatgcttttgccctatcgtggaatttacacatcagaatgtgcaggatccaagtctgaaagtgttgccacccgtcacacaacatgggctttgtttgcttattccatgaagcagcagctatagaccttaccatggaaacatgaagagaccctgcacccctttccttaaggattgctgcaagagttacctgttgagcaggattgactggtgatgtttcattctgaccttgtcccaagctctccatctctagatctggggactgactgttgagctgatggggaaagaaaagctctcacacaaaccggaagccaaatgtcccctatctcttgaatgatcaagtcacttttgacaacatccaggtgaatataaaaacttaataaagctgtggaaaggaactcttaatcttcttttctgctacttaggttaaattcactagatcttgattaggaatcaaaattcgaattgggacatgttcaaattctttcttgtggtagttgcctatactgtcatcgctgctgttggttgagcatttgtggtgtaccacgctgtgtgctcaagggtattacattcatcttctcatttaatcctcacaacaatctgaagaaggtaggtattacaattcccacttcatagaaacagaaactgaggttcagagaggttaagtcatttgcccaaatggctgagccaaagcctaccatgtacctaacctttattttctttcccgaacataccaggctgtctcctcataacttccaagcatgcacttaaaactccacatgaatacaaggttcatgggacttggtattcatagaaagggaggcagaaagctggtctgttcctgataggcttgtaatttaatatcattctgttcatgtgctttggatggaagcacatctggcatatgatgctaatcagtggttcccatacccctggcttcctaattttaatgtttgctcacagcatagtagattgacatcaaatagtggccgatgatgatgaaaataaaggtcaaataagttgagccaataacagccgcttttttccttctgtctgcgtatacaaagcactgtcatgcacacaatctattctgaccctcacaacaacccataagggtgtaaatagtatttccattttacaaatgaggatcacacaaactactacatggcagagcagatactccaactcatgtcttctggttgaagcctattgctttttcttttctaaacactttccctcagcaagttggaattagacttcacaagtctccttcagagaacacaaatcttttcttattccattcctgtttggttgcctacgtccaatctccccctccccagagatgccaaaaaaaaaatcctttaaggtatttgggagccaaactcaacttgttaaaatctcaaattatggagacaatcagcagacacaacctaaccccaattattttggcaggaaggttggtttagaggcagatccagcaatctgctttgggccactctgggtggggtaggtgaaataagattggtcactgttaactaattttaatattggattggccattggttatcactgattaccattctcccctggattttcacccaggactcaaaacttggttctgctaaccctgttcctttatgaggaaccttttaaagattcctttataaggtgggagttttttttctatgaacctataggggagaaaaaagatcagcagaagtcattacttttttttttttttttttttttttttgagagagagtctcactccattgcccaggctggagtgcagtggtgctatctcggctcactgcaacctccgcctcctgggttcaagcaattctcctgcctcagcctcccgagtagctgggattgcaggtgcccaccaccacacccggctaatttttgtatttttagtaaagacagggtttcaccatgttggccaggctggtctccaactcccaatctcaggtgatcctattgcctcgggctcccaaagtgctgggattacaggagtgagccaccatgcctggccagaagtggttacttctgtagacaaaagaataatgctacttaatcaggctttctgtgtgacaagaaagagaaagaaaataaagaagtttcaattcatccaattcttaataagaaatatgtaaataaaattttttaaaattacacttcattttaatgttgtatcagtcaaggtccctgcaagagatggatggtatggtacactcaaactgggtaacacaggagagttttcagaaagcaactaaatccaaaatactatcaaggaatcaatataaaaattgttaatatttttctcatactaaattttcaaaatattttgtgtctattacatttacagcacatcttaattaggactagctgtgtgttcacctcacatgtggcttgtagctaccatactggacagcacatgtccaaaaaaatacacgtaaagttaaagtttaaaagacacaggaactaagccctcattgtctttcccttgggaggtagtttaaagagctatagatgctgtaacattcttgctattatttattatatatgacattattcctaaaaaagcttttgagatcctaggttgtattcctcaggttttgttgccttcccatgaagatgtgaaggcagggatgcctgttattcagtccaagatgcatgacaagagaccttgggaaagtttcatctggatttaaagattaattcttgatgcttacattccatactcaaaatgtaaatttgaatattaaaataaagatgattttttttttggagctagtcttgctctgttgcccaggctggaatgcagtggcatgatcatggctcactgcagcctcgacctcccaagctcaagcaaggctacaggtgtgcacctaagtagctaggactacaggtgtgcaccaccatgtctagctatttttttttctgtagagacagggttttcctatgttgtccaggctggtctcgaactcctgccctcaagcaatcctcctgccttggcctcccaaagtgttgagattacaggcgtaagccactgcacctggccaagatgaatattttaatagctcacagaacaaagtttgccacataatgataaaattactatgaaaatatattccctttattgtcagtttaaaagatgaactgagtttcacccaaactggtctggcccctctctgattcaaataccaatagttgctctgattcaaattccaactgttagaacatgacagctgctcataactagctttgcttactaaccatgtttctttccatttgtattaggtcctttactttttataacagcctcaaagtttcatgaattgctgcagtaaacattgattttcatgtttgtgagtctgcaagccagctgggcagctctacttcaggtggtaagggtggatcagacctattccatatacctcttgttctccttgtccagtggtttctagggatatgttctcatgatgaaccccgcagaggctcgtgaaagtgagaggaaactaggatgcctcttaaggtcttggtcaggatggggtctcctgtcacttctgtcacaggctattgtaagtcatatgagcaagctcaataaaatataaacaagtcagataaacagtgggaggaatggcaaagtcatatggccaaggccatgagtgattaattttaacacaggaaaaaagtaaagcattaaatgcgattatttaatatacaatgtcttattaactgaaatataaaatgtgtttactgtaaaatataatctgtttatctcaccaaagaaatattatctttaaaaaatgtcattacttctaagacatcatcagtctgcaacttctttccatagccttaatcaggatgctgtggcagctcccacattagcctcgcattctaaactggtagatgtcctaggaaaccatacatctatgtatttttcttattttatacgtttaggacaatgtatagctaattacccaactttttatttgcatacaaatctaatacaactgaacacaatcagttttatcacaggtataatggatttttcaatagtgaggaggtgcctccatgagccttctctttagaaaagtggcattcaagactcttcatttgaagtgaagattgctatgtcttttgcattgctctattttacataaattaagttataaattgacactataatcaactgacaccatgatcagtgatgatgatcaccctcatcagcactagagttgacttgtttttataacccctttgcatgtatgttgaatagcaaagttcatcagagaacatgtattagtcaatggtaagtaagatactctcatctaagaaataacatcacctcttctaatgaagttctaagaagagagggaagaaaaagtcttgggagctagtcagggaatagtgtgtatttgcaattacctaaactgaactctaccattactcctaacccagttcctcctcctgtgttttacatgattaatgccacccctgcctcaatgaaccaagatcagctccatcactgggacctccccattctgcctgtgcaatatttttcttttttatttctccttctaatattactgttattgctccagtaaagagctgtaatatattttacctggactgataccaggaatggtggtgttgcttccaatctgttgctgctagattaatctttgcaaagcacaggcttaatttcattgctgctcaactaaaaccactggtggctttccattgcctacaaaataaagtcaacctccccatcagacattcaaggctttcaatgatccatggccgccagctctctccaggctcatatcccactccactcctctgatgtttcctacactacactacactatactacactacagccaggtagaatgactgttcacccaacaccactcaggttgtcttctcaacttggaatactcttgcaccttcaaagctcatttcaaatgccccttcatttgtgaagccttctccaaatttccaagtcagaatgtctcttccttgtgctaccacaaccctttaactgagcctccattagtgcactgagaccattctgttcagtgtctgggtgaagcttcctggtgaaaaatatgttacctatttctttctgaaaagttggattcagggatattatcacggacctaaggtaatagttctagccaacctccctgtccactgccaggccgactacaaacccttctgttgctggcgagctggtccgcaccactagttctgcttcactctatttatctcttgatgtaaccatcttctttctccaggttttaagaaccagcccaactcctggttccctgatgaagcttttattcccctagccacatggaacttttcctttttggaacatgcctttagtttctgtgtagtttgccatgcagcacttcattgtacacattattaaaacagaattttaaggattagaatgaaccttaaaagatcatgcatctcaaaatttaatgtacatacaaattacccagggattttgttgaaataaaaattatttaattttaattaatataaataattcagtaggtctggggtgaggcctgaggttttacatttccaacaagctgccaggtaaagccaatacatctgtccaggaatcacactttgcgtatcaaaggtctagatgacattatcattccaaagagtttcttttacaggctctcagatcagtgttcatccactacctgactactgtcattcacaggcattctgttccacagcaggccagctaacgtggtatttacaaagctcactcctcttatacaacaatccaagtgtttcttttgtcagttgtctgtgccccaggagatccctctctgccttgccttgccctctgcctttggagaccagcacctcatactcagtgaaggcctggagtgcttaagagggatttcttccagctctcttgccctggtcttcagtgtattagatgtattacctccatgctctcagtagaggcccataggaaagagtaggtaggttatgccagctcacacgcatcctttaaaaatggtttagaagtttagctggtttcttattactcctgtctatggatgtttccttctgtcactctactagggatgaaacagctaatcatgttcaatagttacatttagattggtttttaaaaactatgattgtattagttcgtttccatgctgctgataaagacatatctgagactggaaacaaaaagggtttaattggacttacagttccacatggctggggaggcctcaaaatcaggtgggaggcaaaaggtacttcttacgtggtggcatcaagagcaaaatgaggaagaagcaaaagcagaaactcttcataaacccaccagatcttgtgggacttattatcacgagaatagcacagaaaagactggcctccatgattcaattacctcccactgcgtccctcccacaacatgtgggaattctgggagatacaattcaagttgagatttgggtggggacacagccaaaccatatcattcctccctgggctcctccaaatttcataatcctcacatttcaaaaccaatcattccttcccaacagttccccaaagtcttaactcatttcagcattaacccaaaagtccacagtccaaagtctcatctgagacaaggcaagtcccttccacttacaagcctgtaaaagcaagctagttacctcctagatacaatggggggtacaggtattgggtaaatacagctgttccaaatgagagaaattggccaaaacaaaggggttacagggtccatgcaagtctgaaatccagtggggcagtcaaattttaaagctccataatgatctcctttgactccatgtctcacattcaggtcatgctgatgcaagagataggttcccatggtcttgtgcagctccgcccctgtggctttgcagagtacagcctccctcctggctgctttctcaggctgatgttgagtgtctgtagcttttccaggcacaagatgcaagttggtggttgatctaccattctggggtctaccattctggggtctaccgttctgggactgtggccttcttctcacagctccactaggcagtgccccaacagggactctgtgtgggggctctgccccacatttcccttccacactgccctaggagaggttccccatgagggctctgcccctgcagcaaacttttgcctggacatccaggtgtttccatatatattctgaaatctaggcagaggttcccaaatctcaattcttgacatctctgcacccacaggctcaacatcacatggaagctgccaatgcttggggcctctaccctctgaagccacagcccaagctctatgttggctcctttcagccatggctggagcagctgggacacagggcaccaagtccctaggctgcacacagcacagagaccctgggcccagcccacaaaaccactttttcctcctgggcctctgggcctgtgatgggaggggctgccatgaaggtctctgacatgacctggagacattttccccatggtcttggggattaacattaggctccttgctgcttatgcaaatttctgcagccagcttgaatttctccttaaaaaaaatgggtttttcttttctactgcatcatcaggctgcagattttccacatttatgctcttgtttcccttttaaaacagaatgtttttaacagcacccaagtcaccttttgaatgctttgctgcttagaaatttattccaccagataccctaagtcatctctctcaagctctaagttccacaaatctctagggcaagggtgaaatgctgccagtctccttgctaaaacataacaagggtcacctttacttcagttcccaacaaggtcttcatctccatctgagaccacctcagcctggaccttattgttcatatcactatcagtatttttgtcaatgccattcacagtctctaggaggttccaaactttcctacattttcctatcttcttctgagccctccagattatttcaacacccagttccaaagttgcttccacattttcgggtatcttttcagcaatgccccactctactggtactattagtccattttcatgctgctgataaagacatacctgagactgggaacaaaaagaggtttaattggacttatagttccacctggctggggaggcctcagaatcatggcaggaggtgaaaggcatttcttacacggcagcagcaagagaaaaatgaagaagcagcaaaagcagaaacccctgataaaaccatcagatctcgtgagacttattcactatcacaagaatagcatgggaaagaccagcccccttgattcaattacctccccctgggtcctgtgggaattctggaaggtacaattcaagttgagatttgggtggggacacagccaaaccatatcaatgattttgtactttaaccagctgaatggaagtacaatctcttgctatatgacacaataattatttgcaaaatgagtaaacatatcataaggaaattatttttacaaggtttgaaacctgaaatgcagtctattatcatacataactaaaaatagagcctcaataaacagattcccagttttgaaaatgcaacatttgtactccacattgtcagttttcttaggtatatttataaatactcctataaaaatgtaaagaaacacataatgtagattgctaattttataataacacaagttgattttgacatccaacttattaattatgaaatgacttttggcctagtaacaatgaaaatgggggcaaatacagataaatggtaattcttagaatgaactactcagcaccaattctaagtttttcttgatggtaaatcataatgttccctttctcctcggttctgcaatctataggcataccataattgtaatcaatagcttaaaaatatgtctctctgtcctattctgtatctgtatctcttggatttttacctttgcaatagtcaactgaaccatcttcttggagtactcatgaagatggaagtctacatggagaatacaggatgaatccactctgtctcctgcagtgaagtctgtttgaaggatgtatttggctgtcttctggacaggccattctaataacagaaacaaacaagttattttaaaacttattggaatattcaaatattaaccaaagtagaaaaatataatacacatccatgtgcccatcacagaacttcactgattatcatcatttagccagtcttgaagaagcaagtgctaattacaatcacaaatgaaacaagattcagacttcatgaagagcactgcgctataataaaagaagaaatgagcacatacattcttttactgacagtcaaatggtgaaggtgggcagaatcattatgtgatgcaacatggcaaaagtatacagacagtgcatccagaggaaggcaccttgctgaatgactagaatggaagtaggagacattttgcaggcccccttcatcctgcagggagaaccagaaccacagcagctctatttgcctattcctctttaaattacaaagttaaaatttgggagtagtagaaaatcaattggttatcttatagagtctcctagaatatttcattggcattgagaaggtggaaaatgcaaattatatactttaaaatgtaatttttgcttttcacatatgcttaaagcctaaaacctcttaataaacttcttctgaaatata

SEQ ID NO: 9242 - DNA, 2035 bp, Homo sapiens
  source 1..2035: mol_type = unassigned DNA
gcttcaaggatgcaaaaaattacaacctggaaaaggcttcgagtaactttaggaaaatgagctgctggactcctcagtcaatctgtcctttctagtcaatgaaaaagacagggtttgaggttccttccgaaacggggccggctaatttagcccctcccacgagcccaagggtctgttatatctctgtttccttgaggacctctctcacggagacggaccacagcaagcagaggctgggggggggaaagacgaggaaagaggaggaaaacaaaagctgctacttatggaagatacaaaggagtctaacgtgaagacattttgctccaagaatatcctagccatccttggcttctcctctatcatagctgtgatagctttgcttgctgtggggttgacccagaacaaagcattgccagaaaacgttaagtatgggattgtgctggatgcgggttcttctcacacaagtttatacatctataagtggccagcagaaaaggagaatgacacaggcgtggtgcatcaagtagaagaatgcagggttaaaggtcctggaatctcaaaatttgttcagaaagtaaatgaaataggcatttacctgactgattgcatggaaagagctagggaagtgattccaaggtcccagcaccaagagacacccgtttacctgggagccacggcaggcatgcggttgctcaggatggaaagtgaagagttggcagacagggttctggatgtggtggagaggagcctcagcaactacccctttgacttccagggtgccaggatcattactggccaagaggaaggtgcctatggctggattactatcaactatctgctgggcaaattcagtcagaaaacaaggtggttcagcatagtcccatatgaaaccaataatcaggaaacctttggagctttggaccttgggggagcctctacacaagtcacttttgtaccccaaaaccagactatcgagtccccagataatgctctgcaatttcgcctctatggcaaggactacaatgtctacacacatagcttcttgtgctatgggaaggatcaggcactctggcagaaactggccaaggacattcaggttgcaagtaatgaaattctcagggacccatgctttcatcctggatataagaaggtagtgaacgtaagtgacctttacaagaccccctgcaccaagagatttgagatgactcttccattccagcagtttgaaatccagggtattggaaactatcaacaatgccatcaaagcatcctggagctcttcaacaccagttactgcccttactcccagtgtgccttcaatgggattttcttgccaccactccagggggattttggggcattttcagctttttactttgtgatgaagtttttaaacttgacatcagagaaagtctctcaggaaaaggtgactgagatgatgaaaaagttctgtgctcagccttgggaggagataaaaacatcttacgctggagtaaaggagaagtacctgagtgaatactgcttttctggtacctacattctctccctccttctgcaaggctatcatttcacagctgattcctgggagcacatccatttcattggcaagatccagggcagcgacgccggctggactttgggctacatgctgaacctgaccaacatgatcccagctgagcaaccattgtccacacctctctcccactccacctatgtcttcctcatggttctattctccctggtccttttcacagtggccatcataggcttgcttatctttcacaagccttcatatttctggaaagatatggtatagcaaaagcagctgaaatatgctggctggagtgaggaaaaaaatcgtccagggagcattttcctccatcgcagtgttcaaggccatccttccctgtctgccagggccagtcttgacgagtgtgaagcttccttggcttttactgaagcctttcttttggaggtattcaatatcctttgcctcaaggacttcggcagatactgtctctttcatgagtttttc

SEQ ID NO: 9243 - DNA, 1452 bp, Homo sapiens
  source 1..1452: mol_type = unassigned DNA
gtgtacgtgtaaaattatgatcaaataaatttgtatgccttttctcctattaacctgccttttttgtcagcgattgtcagtgaaacttcagagggcaaaggggaagttttccttggcccctccagttttggtgctgtgaacaggataccaaagctgctctgttcttctggaagctgcaatgaagggaaccaaggacctgacaagccagcagaaggagtctaacgtgaagacattttgctccaagaatatcctagccatccttggcttctcctctatcatagctgtgatagctttgcttgctgtggggttgacccagaacaaagcattgccagaaaacgttaagtatgggattgtgctggatgcgggttcttctcacacaagtttatacatctataagtggccagcagaaaaggagaatgacacaggcgtggtgcatcaagtagaagaatgcagggttaaaggtcctggaatctcaaaatttgttcagaaagtaaatgaaataggcatttacctgactgattgcatggaaagagctagggaagtgattccaaggtcccagcaccaagagacacccgtttacctgggagccacggcaggcatgcggttgctcaggatggaaagtgaagagttggcagacagggttctggatgtggtggagaggagcctcagcaactacccctttgacttccagggtgccaggatcattactggccaagaggaaggtgcctatggctggattactatcaactatctgctgggcaaattcagtcagaaaacaaggtggttcagcatagtcccatatgaaaccaataatcaggaaacctttggagctttggaccttgggggagcctctacacaagtcacttttgtaccccaaaaccagactatcgagtccccagataatgctctgcaatttcgcctctatggcaaggactacaatgtctacacacatagcttcttgtgctatgggaaggatcaggcactctggcagaaactggccaaggacattcaggcaagtataactcaatccagacctgcccccttcacatctgcacctccagcccccacatcctgttgttttctgtttcaaattcagtagtttgtctgaacttggttattgtactttccaaacctttttaggcaggatattgaactacatctggttgacccctataaattgtttcagtcagacatcccctcccatgtttgtttactgcgttatctccacagacacaactgagatcttctctcaggaaataatttctccccctcgtggggttgataatgaaaattatgtggtagaatattgtttgttggagggggaattgcaatttataagctcttttagaccactttttaaagctccctttcctacaaactacaaaaaaacagagttgttagaaatgacctggagaggagaaggaaaaaaaaaaaaacacttcaggagaaaca

SEQ ID NO: 9244 - DNA, 12515 bp, Homo sapiens
  source 1..12515: mol_type = unassigned DNA
cctgttgctctttgctctaatgagccttgagaaaggattgctggtcatgggaccagaggctttatggggagggaagaactgttcttgactttcagtttttcgagcgggtttcaagagtctaacgtgaagacattttgctccaagaatatcctagccatccttggcttctcctctatcatagctgtgatagctttgcttgctgtggggttgacccagaacaaagcattgccagaaaacgttaagtatgggattgtgctggatgcgggttcttctcacacaagtttatacatctataagtggccagcagaaaaggagaatgacacaggcgtggtgcatcaagtagaagaatgcagggttaaaggtcctggaatctcaaaatttgttcagaaagtaaatgaaataggcatttacctgactgattgcatggaaagagctagggaagtgattccaaggtcccagcaccaagagacacccgtttacctgggagccacggcaggcatgcggttgctcaggatggaaagtgaagagttggcagacagggttctggatgtggtggagaggagcctcagcaactacccctttgacttccagggtgccaggatcattactggccaagaggaaggtgcctatggctggattactatcaactatctgctgggcaaattcagtcagaaaacaaggtggttcagcatagtcccatatgaaaccaataatcaggaaacctttggagctttggaccttgggggagcctctacacaagtcacttttgtaccccaaaaccagactatcgagtccccagataatgctctgcaatttcgcctctatggcaaggactacaatgtctacacacatagcttcttgtgctatgggaaggatcaggcactctggcagaaactggccaaggacattcaggttgcaagtaatgaaattctcagggacccatgctttcatcctggatataagaaggtagtgaacgtaagtgacctttacaagaccccctgcaccaagagatttgagatgactcttccattccagcagtttgaaatccagggtattggaaactatcaacaatgccatcaaagcatcctggagctcttcaacaccagttactgcccttactcccagtgtgccttcaatgggattttcttgccaccactccagggggattttggggcattttcagctttttactttgtgatgaagtttttaaacttgacatcagagaaagtctctcaggaaaaggtgactgagatgatgaaaaagttctgtgctcagccttgggaggagataaaaacatcttacgctggagtaaaggagaagtacctgagtgaatactgcttttctggtacctacattctctccctccttctgcaaggctatcatttcacagctgattcctgggagcacatccatttcattggcaagatccagggcagcgacgccggctggactttgggctacatgctgaacctgaccaacatgatcccagctgagcaaccattgtccacacctctctcccactccacctatgtcttcctcatggttctattctccctggtccttttcacagtggccatcataggcttgcttatctttcacaagccttcatatttctggaaagatatggtatagcaaaagcagctgaaatatgctggctggagtgaggaaaaaaatcgtccagggagcattttcctccatcgcagtgttcaaggccatccttccctgtctgccagggccagtcttgacgagtgtgaagcttccttggcttttactgaagcctttcttttggaggtattcaatatcctttgcctcaaggacttcggcagatactgtctctttcatgagtttttcccagctacacctttctcctttgtactttgtgcttgtataggttttaaagacctgacacctttcataatctttgctttataaaagaacaatattgactttgtctagaagaactgagagtcttgagtcctgtgataggaggctgagctggctgaaagaagaatctcaggaactggttcagttgtactctttaagaacccctttctctctcctgtttgccatccattaagaaagccatatgatgcctttggagaaggcagacacacattccattcccagcctgctctgtgggtaggagaattttctacagtaggcaaatatgtgctaaagccaaagagttttataaggaaatatatgtgctcatgcagtcaatacagttctcaatcccacccaaagcaggtatgtcaataaatcacatattcctaggtgatacccaaatgctacagagtggaacactcagacctgagatttgcaaaaagcagatgtaaatatatgcattcaaacatcagggcttactatgaggtaggtggtatatacatgtcacaaataaaaatacagttacaactcagggtcacaaaaaatgcatcttccaatgcatatttttattatggtaaaatatacataaatataattcaccattttaacatttaattcatattaaatacgtacaaatcagtgacatttagtacattcacagtgttgtgccaccatcaccactatttagttccagaacatttgcatcatcaatacattgtctagagacaagactatcctgggtaggcagaaaccatagatcttttgtgtttacagctatggaaaccaactgtaccataaagatagttcactgagttttaaagccaagccacatcttatttttccaaggtttaatttagtgagagggcagcattagtgtggagtggcatgcttttgccctatcgtggaatttacacatcagaatgtgcaggatccaagtctgaaagtgttgccacccgtcacacaacatgggctttgtttgcttattccatgaagcagcagctatagaccttaccatggaaacatgaagagaccctgcacccctttccttaaggattgctgcaagagttacctgttgagcaggattgactggtgatgtttcattctgaccttgtcccaagctctccatctctagatctggggactgactgttgagctgatggggaaagaaaagctctcacacaaaccggaagccaaatgtcccctatctcttgaatgatcaagtcacttttgacaacatccaggtgaatataaaaacttaataaagctgtggaaaggaactcttaatcttcttttctgctacttaggttaaattcactagatcttgattaggaatcaaaattcgaattgggacatgttcaaattctttcttgtggtagttgcctatactgtcatcgctgctgttggttgagcatttgtggtgtaccacgctgtgtgctcaagggtattacattcatcttctcatttaatcctcacaacaatctgaagaaggtaggtattacaattcccacttcatagaaacagaaactgaggttcagagaggttaagtcatttgcccaaatggctgagccaaagcctaccatgtacctaacctttattttctttcccgaacataccaggctgtctcctcataacttccaagcatgcacttaaaactccacatgaatacaaggttcatgggacttggtattcatagaaagggaggcagaaagctggtctgttcctgataggcttgtaatttaatatcattctgttcatgtgctttggatggaagcacatctggcatatgatgctaatcagtggttcccatacccctggcttcctaattttaatgtttgctcacagcatagtagattgacatcaaatagtggccgatgatgatgaaaataaaggtcaaataagttgagccaataacagccgcttttttccttctgtctgcgtatacaaagcactgtcatgcacacaatctattctgaccctcacaacaacccataagggtgtaaatagtatttccattttacaaatgaggatcacacaaactactacatggcagagcagatactccaactcatgtcttctggttgaagcctattgctttttcttttctaaacactttccctcagcaagttggaattagacttcacaagtctccttcagagaacacaaatcttttcttattccattcctgtttggttgcctacgtccaatctccccctccccagagatgccaaaaaaaaaatcctttaaggtatttgggagccaaactcaacttgttaaaatctcaaattatggagacaatcagcagacacaacctaaccccaattattttggcaggaaggttggtttagaggcagatccagcaatctgctttgggccactctgggtggggtaggtgaaataagattggtcactgttaactaattttaatattggattggccattggttatcactgattaccattctcccctggattttcacccaggactcaaaacttggttctgctaaccctgttcctttatgaggaaccttttaaagattcctttataaggtgggagttttttttctatgaacctataggggagaaaaaagatcagcagaagtcattacttttttttttttttttttttttttttgagagagagtctcactccattgcccaggctggagtgcagtggtgctatctcggctcactgcaacctccgcctcctgggttcaagcaattctcctgcctcagcctcccgagtagctgggattgcaggtgcccaccaccacacccggctaatttttgtatttttagtaaagacagggtttcaccatgttggccaggctggtctccaactcccaatctcaggtgatcctattgcctcgggctcccaaagtgctgggattacaggagtgagccaccatgcctggccagaagtggttacttctgtagacaaaagaataatgctacttaatcaggctttctgtgtgacaagaaagagaaagaaaataaagaagtttcaattcatccaattcttaataagaaatatgtaaataaaattttttaaaattacacttcattttaatgttgtatcagtcaaggtccctgcaagagatggatggtatggtacactcaaactgggtaacacaggagagttttcagaaagcaactaaatccaaaatactatcaaggaatcaatataaaaattgttaatatttttctcatactaaattttcaaaatattttgtgtctattacatttacagcacatcttaattaggactagctgtgtgttcacctcacatgtggcttgtagctaccatactggacagcacatgtccaaaaaaatacacgtaaagttaaagtttaaaagacacaggaactaagccctcattgtctttcccttgggaggtagtttaaagagctatagatgctgtaacattcttgctattatttattatatatgacattattcctaaaaaagcttttgagatcctaggttgtattcctcaggttttgttgccttcccatgaagatgtgaaggcagggatgcctgttattcagtccaagatgcatgacaagagaccttgggaaagtttcatctggatttaaagattaattcttgatgcttacattccatactcaaaatgtaaatttgaatattaaaataaagatgattttttttttggagctagtcttgctctgttgcccaggctggaatgcagtggcatgatcatggctcactgcagcctcgacctcccaagctcaagcaaggctacaggtgtgcacctaagtagctaggactacaggtgtgcaccaccatgtctagctatttttttttctgtagagacagggttttcctatgttgtccaggctggtctcgaactcctgccctcaagcaatcctcctgccttggcctcccaaagtgttgagattacaggcgtaagccactgcacctggccaagatgaatattttaatagctcacagaacaaagtttgccacataatgataaaattactatgaaaatatattccctttattgtcagtttaaaagatgaactgagtttcacccaaactggtctggcccctctctgattcaaataccaatagttgctctgattcaaattccaactgttagaacatgacagctgctcataactagctttgcttactaaccatgtttctttccatttgtattaggtcctttactttttataacagcctcaaagtttcatgaattgctgcagtaaacattgattttcatgtttgtgagtctgcaagccagctgggcagctctacttcaggtggtaagggtggatcagacctattccatatacctcttgttctccttgtccagtggtttctagggatatgttctcatgatgaaccccgcagaggctcgtgaaagtgagaggaaactaggatgcctcttaaggtcttggtcaggatggggtctcctgtcacttctgtcacaggctattgtaagtcatatgagcaagctcaataaaatataaacaagtcagataaacagtgggaggaatggcaaagtcatatggccaaggccatgagtgattaattttaacacaggaaaaaagtaaagcattaaatgcgattatttaatatacaatgtcttattaactgaaatataaaatgtgtttactgtaaaatataatctgtttatctcaccaaagaaatattatctttaaaaaatgtcattacttctaagacatcatcagtctgcaacttctttccatagccttaatcaggatgctgtggcagctcccacattagcctcgcattctaaactggtagatgtcctaggaaaccatacatctatgtatttttcttattttatacgtttaggacaatgtatagctaattacccaactttttatttgcatacaaatctaatacaactgaacacaatcagttttatcacaggtataatggatttttcaatagtgaggaggtgcctccatgagccttctctttagaaaagtggcattcaagactcttcatttgaagtgaagattgctatgtcttttgcattgctctattttacataaattaagttataaattgacactataatcaactgacaccatgatcagtgatgatgatcaccctcatcagcactagagttgacttgtttttataacccctttgcatgtatgttgaatagcaaagttcatcagagaacatgtattagtcaatggtaagtaagatactctcatctaagaaataacatcacctcttctaatgaagttctaagaagagagggaagaaaaagtcttgggagctagtcagggaatagtgtgtatttgcaattacctaaactgaactctaccattactcctaacccagttcctcctcctgtgttttacatgattaatgccacccctgcctcaatgaaccaagatcagctccatcactgggacctccccattctgcctgtgcaatatttttcttttttatttctccttctaatattactgttattgctccagtaaagagctgtaatatattttacctggactgataccaggaatggtggtgttgcttccaatctgttgctgctagattaatctttgcaaagcacaggcttaatttcattgctgctcaactaaaaccactggtggctttccattgcctacaaaataaagtcaacctccccatcagacattcaaggctttcaatgatccatggccgccagctctctccaggctcatatcccactccactcctctgatgtttcctacactacactacactatactacactacagccaggtagaatgactgttcacccaacaccactcaggttgtcttctcaacttggaatactcttgcaccttcaaagctcatttcaaatgccccttcatttgtgaagccttctccaaatttccaagtcagaatgtctcttccttgtgctaccacaaccctttaactgagcctccattagtgcactgagaccattctgttcagtgtctgggtgaagcttcctggtgaaaaatatgttacctatttctttctgaaaagttggattcagggatattatcacggacctaaggtaatagttctagccaacctccctgtccactgccaggccgactacaaacccttctgttgctggcgagctggtccgcaccactagttctgcttcactctatttatctcttgatgtaaccatcttctttctccaggttttaagaaccagcccaactcctggttccctgatgaagcttttattcccctagccacatggaacttttcctttttggaacatgcctttagtttctgtgtagtttgccatgcagcacttcattgtacacattattaaaacagaattttaaggattagaatgaaccttaaaagatcatgcatctcaaaatttaatgtacatacaaattacccagggattttgttgaaataaaaattatttaattttaattaatataaataattcagtaggtctggggtgaggcctgaggttttacatttccaacaagctgccaggtaaagccaatacatctgtccaggaatcacactttgcgtatcaaaggtctagatgacattatcattccaaagagtttcttttacaggctctcagatcagtgttcatccactacctgactactgtcattcacaggcattctgttccacagcaggccagctaacgtggtatttacaaagctcactcctcttatacaacaatccaagtgtttcttttgtcagttgtctgtgccccaggagatccctctctgccttgccttgccctctgcctttggagaccagcacctcatactcagtgaaggcctggagtgcttaagagggatttcttccagctctcttgccctggtcttcagtgtattagatgtattacctccatgctctcagtagaggcccataggaaagagtaggtaggttatgccagctcacacgcatcctttaaaaatggtttagaagtttagctggtttcttattactcctgtctatggatgtttccttctgtcactctactagggatgaaacagctaatcatgttcaatagttacatttagattggtttttaaaaactatgattgtattagttcgtttccatgctgctgataaagacatatctgagactggaaacaaaaagggtttaattggacttacagttccacatggctggggaggcctcaaaatcaggtgggaggcaaaaggtacttcttacgtggtggcatcaagagcaaaatgaggaagaagcaaaagcagaaactcttcataaacccaccagatcttgtgggacttattatcacgagaatagcacagaaaagactggcctccatgattcaattacctcccactgcgtccctcccacaacatgtgggaattctgggagatacaattcaagttgagatttgggtggggacacagccaaaccatatcattcctccctgggctcctccaaatttcataatcctcacatttcaaaaccaatcattccttcccaacagttccccaaagtcttaactcatttcagcattaacccaaaagtccacagtccaaagtctcatctgagacaaggcaagtcccttccacttacaagcctgtaaaagcaagctagttacctcctagatacaatggggggtacaggtattgggtaaatacagctgttccaaatgagagaaattggccaaaacaaaggggttacagggtccatgcaagtctgaaatccagtggggcagtcaaattttaaagctccataatgatctcctttgactccatgtctcacattcaggtcatgctgatgcaagagataggttcccatggtcttgtgcagctccgcccctgtggctttgcagagtacagcctccctcctggctgctttctcaggctgatgttgagtgtctgtagcttttccaggcacaagatgcaagttggtggttgatctaccattctggggtctaccattctggggtctaccgttctgggactgtggccttcttctcacagctccactaggcagtgccccaacagggactctgtgtgggggctctgccccacatttcccttccacactgccctaggagaggttccccatgagggctctgcccctgcagcaaacttttgcctggacatccaggtgtttccatatatattctgaaatctaggcagaggttcccaaatctcaattcttgacatctctgcacccacaggctcaacatcacatggaagctgccaatgcttggggcctctaccctctgaagccacagcccaagctctatgttggctcctttcagccatggctggagcagctgggacacagggcaccaagtccctaggctgcacacagcacagagaccctgggcccagcccacaaaaccactttttcctcctgggcctctgggcctgtgatgggaggggctgccatgaaggtctctgacatgacctggagacattttccccatggtcttggggattaacattaggctccttgctgcttatgcaaatttctgcagccagcttgaatttctccttaaaaaaaatgggtttttcttttctactgcatcatcaggctgcagattttccacatttatgctcttgtttcccttttaaaacagaatgtttttaacagcacccaagtcaccttttgaatgctttgctgcttagaaatttattccaccagataccctaagtcatctctctcaagctctaagttccacaaatctctagggcaagggtgaaatgctgccagtctccttgctaaaacataacaagggtcacctttacttcagttcccaacaaggtcttcatctccatctgagaccacctcagcctggaccttattgttcatatcactatcagtatttttgtcaatgccattcacagtctctaggaggttccaaactttcctacattttcctatcttcttctgagccctccagattatttcaacacccagttccaaagttgcttccacattttcgggtatcttttcagcaatgccccactctactggtactattagtccattttcatgctgctgataaagacatacctgagactgggaacaaaaagaggtttaattggacttatagttccacctggctggggaggcctcagaatcatggcaggaggtgaaaggcatttcttacacggcagcagcaagagaaaaatgaagaagcagcaaaagcagaaacccctgataaaaccatcagatctcgtgagacttattcactatcacaagaatagcatgggaaagaccagcccccttgattcaattacctccccctgggtcctgtgggaattctggaaggtacaattcaagttgagatttgggtggggacacagccaaaccatatcaatgattttgtactttaaccagctgaatggaagtacaatctcttgctatatgacacaataattatttgcaaaatgagtaaacatatcataaggaaattatttttacaaggtttgaaacctgaaatgcagtctattatcatacataactaaaaatagagcctcaataaacagattcccagttttgaaaatgcaacatttgtactccacattgtcagttttcttaggtatatttataaatactcctataaaaatgtaaagaaacacataatgtagattgctaattttataataacacaagttgattttgacatccaacttattaattatgaaatgacttttggcctagtaacaatgaaaatgggggcaaatacagataaatggtaattcttagaatgaactactcagcaccaattctaagtttttcttgatggtaaatcataatgttccctttctcctcggttctgcaatctataggcataccataattgtaatcaatagcttaaaaatatgtctctctgtcctattctgtatctgtatctcttggatttttacctttgcaatagtcaactgaaccatcttcttggagtactcatgaagatggaagtctacatggagaatacaggatgaatccactctgtctcctgcagtgaagtctgtttgaaggatgtatttggctgtcttctggacaggccattctaataacagaaacaaacaagttattttaaaacttattggaatattcaaatattaaccaaagtagaaaaatataatacacatccatgtgcccatcacagaacttcactgattatcatcatttagccagtcttgaagaagcaagtgctaattacaatcacaaatgaaacaagattcagacttcatgaagagcactgcgctataataaaagaagaaatgagcacatacattcttttactgacagtcaaatggtgaaggtgggcagaatcattatgtgatgcaacatggcaaaagtatacagacagtgcatccagaggaaggcaccttgctgaatgactagaatggaagtaggagacattttgcaggcccccttcatcctgcagggagaaccagaaccacagcagctctatttgcctattcctctttaaattacaaagttaaaatttgggagtagtagaaaatcaattggttatcttatagagtctcctagaatatttcattggcattgagaaggtggaaaatgcaaattatatactttaaaatgtaatttttgcttttcacatatgcttaaagcctaaaacctcttaataaacttcttctgaaatata

SEQ ID NO: 9245 - DNA, 5044 bp, Homo sapiens
  source 1..5044: mol_type = unassigned DNA
gtgtacgtgtaaaattatgatcaaataaatttgtatgccttttctcctattaacctgccttttttgtcagcgattgtcagtgaaacttcagagggcaaaggggaagttttccttggcccctccagttttggtgctgtgaacaggataccaaagctgctctgttcttctggaagctgcaatgaagggaaccaaggacctgacaagccagcagaaggagtctaacgtgaagacattttgctccaagaatatcctagccatccttggcttctcctctatcatagctgtgatagctttgcttgctgtggggttgacccagaacaaagcattgccagaaaacgttaagtatgggattgtgctggatgcgggttcttctcacacaagtttatacatctataagtggccagcagaaaaggagaatgacacaggcgtggtgcatcaagtagaagaatgcagggttaaaggtcctggaatctcaaaatttgttcagaaagtaaatgaaataggcatttacctgactgattgcatggaaagagctagggaagtgattccaaggtcccagcaccaagagacacccgtttacctgggagccacggcaggcatgcggttgctcaggatggaaagtgaagagttggcagacagggttctggatgtggtggagaggagcctcagcaactacccctttgacttccagggtgccaggatcattactggccaagaggaaggtgcctatggctggattactatcaactatctgctgggcaaattcagtcagaaaacaaggtggttcagcatagtcccatatgaaaccaataatcaggaaacctttggagctttggaccttgggggagcctctacacaagtcacttttgtaccccaaaaccagactatcgagtccccagataatgctctgcaatttcgcctctatggcaaggactacaatgtctacacacatagcttcttgtgctatgggaaggatcaggcactctggcagaaactggccaaggacattcaggttgcaagtaatgaaattctcagggacccatgctttcatcctggatataagaaggtagtgaacgtaagtgacctttacaagaccccctgcaccaagagatttgagatgactcttccattccagcagtttgaaatccagggtattggaaactatcaacaatgccatcaaagcatcctggagctcttcaacaccagttactgcccttactcccagtgtgccttcaatgggattttcttgccaccactccagggggattttggggcattttcagctttttactttgtgatgaagtttttaaacttgacatcagagaaagtctctcaggaaaaggtgactgagatgatgaaaaagttctgtgctcagccttgggaggagataaaaacatcttacgctggagtaaaggagaagtacctgagtgaatactgcttttctggtacctacattctctccctccttctgcaaggctatcatttcacagctgattcctgggagcacatccatttcattggcaagatccagggcagcgacgccggctggactttgggctacatgctgaacctgaccaacatgatcccagctgagcaaccattgtccacacctctctcccactccacctatgtcttcctcatggttctattctccctggtccttttcacagtggccatcataggcttgcttatctttcacaagccttcatatttctggaaagatatggtatagcaaaagcagctgaaatatgctggctggagtgaggaaaaaaatcgtccagggagcattttcctccatcgcagtgttcaaggccatccttccctgtctgccagggccagtcttgacgagtgtgaagcttccttggcttttactgaagcctttcttttggaggtattcaatatcctttgcctcaaggacttcggcagatactgtctctttcatgagtttttcccagctacacctttctcctttgtactttgtgcttgtataggttttaaagacctgacacctttcataatctttgctttataaaagaacaatattgactttgtctagaagaactgagagtcttgagtcctgtgataggaggctgagctggctgaaagaagaatctcaggaactggttcagttgtactctttaagaacccctttctctctcctgtttgccatccattaagaaagccatatgatgcctttggagaaggcagacacacattccattcccagcctgctctgtgggtaggagaattttctacagtaggcaaatatgtgctaaagccaaagagttttataaggaaatatatgtgctcatgcagtcaatacagttctcaatcccacccaaagcaggtatgtcaataaatcacatattcctaggtgatacccaaatgctacagagtggaacactcagacctgagatttgcaaaaagcagatgtaaatatatgcattcaaacatcagggcttactatgaggtaggtggtatatacatgtcacaaataaaaatacagttacaactcagggtcacaaaaaatgcatcttccaatgcatatttttattatggtaaaatatacataaatataattcaccattttaacatttaattcatattaaatacgtacaaatcagtgacatttagtacattcacagtgttgtgccaccatcaccactatttagttccagaacatttgcatcatcaatacattgtctagagacaagactatcctgggtaggcagaaaccatagatcttttgtgtttacagctatggaaaccaactgtaccataaagatagttcactgagttttaaagccaagccacatcttatttttccaaggtttaatttagtgagagggcagcattagtgtggagtggcatgcttttgccctatcgtggaatttacacatcagaatgtgcaggatccaagtctgaaagtgttgccacccgtcacacaacatgggctttgtttgcttattccatgaagcagcagctatagaccttaccatggaaacatgaagagaccctgcacccctttccttaaggattgctgcaagagttacctgttgagcaggattgactggtgatgtttcattctgaccttgtcccaagctctccatctctagatctggggactgactgttgagctgatggggaaagaaaagctctcacacaaaccggaagccaaatgtcccctatctcttgaatgatcaagtcacttttgacaacatccaggtgaatataaaaacttaataaagctgtggaaaggaactcttaatcttcttttctgctacttaggttaaattcactagatcttgattaggaatcaaaattcgaattgggacatgttcaaattctttcttgtggtagttgcctatactgtcatcgctgctgttggttgagcatttgtggtgtaccacgctgtgtgctcaagggtattacattcatcttctcatttaatcctcacaacaatctgaagaaggtaggtattacaattcccacttcatagaaacagaaactgaggttcagagaggttaagtcatttgcccaaatggctgagccaaagcctaccatgtacctaacctttattttctttcccgaacataccaggctgtctcctcataacttccaagcatgcacttaaaactccacatgaatacaaggttcatgggacttggtattcatagaaagggaggcagaaagctggtctgttcctgataggcttgtaatttaatatcattctgttcatgtgctttggatggaagcacatctggcatatgatgctaatcagtggttcccatacccctggcttcctaattttaatgtttgctcacagcatagtagattgacatcaaatagtggccgatgatgatgaaaataaaggtcaaataagttgagccaataacagccgcttttttccttctgtctgcgtatacaaagcactgtcatgcacacaatctattctgaccctcacaacaacccataagggtgtaaatagtatttccattttacaaatgaggatcacacaaactactacatggcagagcagatactccaactcatgtcttctggttgaagcctattgctttttcttttctaaacactttccctcagcaagttggaattagacttcacaagtctccttcagagaacacaaatcttttcttattccattcctgtttggttgcctacgtccaatctccccctccccagagatgccaaaaaaaaaatcctttaaggtatttgggagccaaactcaacttgttaaaatctcaaattatggagacaatcagcagacacaacctaaccccaattattttggcaggaaggttggtttagaggcagatccagcaatctgctttgggccactctgggtggggtaggtgaaataagattggtcactgttaactaattttaatattggattggccattggttatcactgattaccattctcccctggattttcacccaggactcaaaacttggttctgctaaccctgttcctttatgaggaaccttttaaagattcctttataaggtgggagttttttttctatgaacctataggggagaaaaaagatcagcagaagtcattacttttttttttttttttttttttttttgagagagagtctcactccattgcccaggctggagtgcagtggtgctatctcggctcactgcaacctccgcctcctgggttcaagcaattctcctgcctcagcctcccgagtagctgggattgcaggtgcccaccaccacacccggctaatttttgtatttttagtaaagacagggtttcaccatgttggccaggctggtctccaactcccaatctcaggtgatcctattgcctcgggctcccaaagtgctgggattacaggagtgagccaccatgcctggccagaagtggttacttctgtagacaaaagaataatgctacttaatcaggctttctgtgtgacaagaaagagaaagaaaataaagaagtttcaattcatccaattcttaataagaaatatgtaaataaaattttttaaaattacacttc

SEQ ID NO: 9246 - DNA, 12471 bp, Homo sapiens
  source 1..12471: mol_type = unassigned DNA
agggaagaagggagaaagagagagagatttgaatatacattgcttcaaggatgcaaaaaattacaacctggaaaaggcttcgagtaactttaggaaaatgagctgctggactcctcagtcaatctgtcctttctagtcaatgaaaaagacagggtttgaggttccttccgaaacggggccggctaatttagcccctcccacgagcccaagggtctgttatatctctgtttccttgaggacctctctcacggagacggaccacagcaagcagaggctgggggggggaaagacgaggaaagaggaggaaaacaaaagctgctacttatggaagatacaaaggagtctaacgtgaagacattttgctccaagaatatcctagccatccttggcttctcctctatcatagctgtgatagctttgcttgctgtggggttgacccagaacaaagcattgccagaaaacgttaaggatggaaagtgaagagttggcagacagggttctggatgtggtggagaggagcctcagcaactacccctttgacttccagggtgccaggatcattactggccaagaggaaggtgcctatggctggattactatcaactatctgctgggcaaattcagtcagaaaacaaggtggttcagcatagtcccatatgaaaccaataatcaggaaacctttggagctttggaccttgggggagcctctacacaagtcacttttgtaccccaaaaccagactatcgagtccccagataatgctctgcaatttcgcctctatggcaaggactacaatgtctacacacatagcttcttgtgctatgggaaggatcaggcactctggcagaaactggccaaggacattcaggttgcaagtaatgaaattctcagggacccatgctttcatcctggatataagaaggtagtgaacgtaagtgacctttacaagaccccctgcaccaagagatttgagatgactcttccattccagcagtttgaaatccagggtattggaaactatcaacaatgccatcaaagcatcctggagctcttcaacaccagttactgcccttactcccagtgtgccttcaatgggattttcttgccaccactccagggggattttggggcattttcagctttttactttgtgatgaagtttttaaacttgacatcagagaaagtctctcaggaaaaggtgactgagatgatgaaaaagttctgtgctcagccttgggaggagataaaaacatcttacgctggagtaaaggagaagtacctgagtgaatactgcttttctggtacctacattctctccctccttctgcaaggctatcatttcacagctgattcctgggagcacatccatttcattggcaagatccagggcagcgacgccggctggactttgggctacatgctgaacctgaccaacatgatcccagctgagcaaccattgtccacacctctctcccactccacctatgtcttcctcatggttctattctccctggtccttttcacagtggccatcataggcttgcttatctttcacaagccttcatatttctggaaagatatggtatagcaaaagcagctgaaatatgctggctggagtgaggaaaaaaatcgtccagggagcattttcctccatcgcagtgttcaaggccatccttccctgtctgccagggccagtcttgacgagtgtgaagcttccttggcttttactgaagcctttcttttggaggtattcaatatcctttgcctcaaggacttcggcagatactgtctctttcatgagtttttcccagctacacctttctcctttgtactttgtgcttgtataggttttaaagacctgacacctttcataatctttgctttataaaagaacaatattgactttgtctagaagaactgagagtcttgagtcctgtgataggaggctgagctggctgaaagaagaatctcaggaactggttcagttgtactctttaagaacccctttctctctcctgtttgccatccattaagaaagccatatgatgcctttggagaaggcagacacacattccattcccagcctgctctgtgggtaggagaattttctacagtaggcaaatatgtgctaaagccaaagagttttataaggaaatatatgtgctcatgcagtcaatacagttctcaatcccacccaaagcaggtatgtcaataaatcacatattcctaggtgatacccaaatgctacagagtggaacactcagacctgagatttgcaaaaagcagatgtaaatatatgcattcaaacatcagggcttactatgaggtaggtggtatatacatgtcacaaataaaaatacagttacaactcagggtcacaaaaaatgcatcttccaatgcatatttttattatggtaaaatatacataaatataattcaccattttaacatttaattcatattaaatacgtacaaatcagtgacatttagtacattcacagtgttgtgccaccatcaccactatttagttccagaacatttgcatcatcaatacattgtctagagacaagactatcctgggtaggcagaaaccatagatcttttgtgtttacagctatggaaaccaactgtaccataaagatagttcactgagttttaaagccaagccacatcttatttttccaaggtttaatttagtgagagggcagcattagtgtggagtggcatgcttttgccctatcgtggaatttacacatcagaatgtgcaggatccaagtctgaaagtgttgccacccgtcacacaacatgggctttgtttgcttattccatgaagcagcagctatagaccttaccatggaaacatgaagagaccctgcacccctttccttaaggattgctgcaagagttacctgttgagcaggattgactggtgatgtttcattctgaccttgtcccaagctctccatctctagatctggggactgactgttgagctgatggggaaagaaaagctctcacacaaaccggaagccaaatgtcccctatctcttgaatgatcaagtcacttttgacaacatccaggtgaatataaaaacttaataaagctgtggaaaggaactcttaatcttcttttctgctacttaggttaaattcactagatcttgattaggaatcaaaattcgaattgggacatgttcaaattctttcttgtggtagttgcctatactgtcatcgctgctgttggttgagcatttgtggtgtaccacgctgtgtgctcaagggtattacattcatcttctcatttaatcctcacaacaatctgaagaaggtaggtattacaattcccacttcatagaaacagaaactgaggttcagagaggttaagtcatttgcccaaatggctgagccaaagcctaccatgtacctaacctttattttctttcccgaacataccaggctgtctcctcataacttccaagcatgcacttaaaactccacatgaatacaaggttcatgggacttggtattcatagaaagggaggcagaaagctggtctgttcctgataggcttgtaatttaatatcattctgttcatgtgctttggatggaagcacatctggcatatgatgctaatcagtggttcccatacccctggcttcctaattttaatgtttgctcacagcatagtagattgacatcaaatagtggccgatgatgatgaaaataaaggtcaaataagttgagccaataacagccgcttttttccttctgtctgcgtatacaaagcactgtcatgcacacaatctattctgaccctcacaacaacccataagggtgtaaatagtatttccattttacaaatgaggatcacacaaactactacatggcagagcagatactccaactcatgtcttctggttgaagcctattgctttttcttttctaaacactttccctcagcaagttggaattagacttcacaagtctccttcagagaacacaaatcttttcttattccattcctgtttggttgcctacgtccaatctccccctccccagagatgccaaaaaaaaaatcctttaaggtatttgggagccaaactcaacttgttaaaatctcaaattatggagacaatcagcagacacaacctaaccccaattattttggcaggaaggttggtttagaggcagatccagcaatctgctttgggccactctgggtggggtaggtgaaataagattggtcactgttaactaattttaatattggattggccattggttatcactgattaccattctcccctggattttcacccaggactcaaaacttggttctgctaaccctgttcctttatgaggaaccttttaaagattcctttataaggtgggagttttttttctatgaacctataggggagaaaaaagatcagcagaagtcattacttttttttttttttttttttttttttgagagagagtctcactccattgcccaggctggagtgcagtggtgctatctcggctcactgcaacctccgcctcctgggttcaagcaattctcctgcctcagcctcccgagtagctgggattgcaggtgcccaccaccacacccggctaatttttgtatttttagtaaagacagggtttcaccatgttggccaggctggtctccaactcccaatctcaggtgatcctattgcctcgggctcccaaagtgctgggattacaggagtgagccaccatgcctggccagaagtggttacttctgtagacaaaagaataatgctacttaatcaggctttctgtgtgacaagaaagagaaagaaaataaagaagtttcaattcatccaattcttaataagaaatatgtaaataaaattttttaaaattacacttcattttaatgttgtatcagtcaaggtccctgcaagagatggatggtatggtacactcaaactgggtaacacaggagagttttcagaaagcaactaaatccaaaatactatcaaggaatcaatataaaaattgttaatatttttctcatactaaattttcaaaatattttgtgtctattacatttacagcacatcttaattaggactagctgtgtgttcacctcacatgtggcttgtagctaccatactggacagcacatgtccaaaaaaatacacgtaaagttaaagtttaaaagacacaggaactaagccctcattgtctttcccttgggaggtagtttaaagagctatagatgctgtaacattcttgctattatttattatatatgacattattcctaaaaaagcttttgagatcctaggttgtattcctcaggttttgttgccttcccatgaagatgtgaaggcagggatgcctgttattcagtccaagatgcatgacaagagaccttgggaaagtttcatctggatttaaagattaattcttgatgcttacattccatactcaaaatgtaaatttgaatattaaaataaagatgattttttttttggagctagtcttgctctgttgcccaggctggaatgcagtggcatgatcatggctcactgcagcctcgacctcccaagctcaagcaaggctacaggtgtgcacctaagtagctaggactacaggtgtgcaccaccatgtctagctatttttttttctgtagagacagggttttcctatgttgtccaggctggtctcgaactcctgccctcaagcaatcctcctgccttggcctcccaaagtgttgagattacaggcgtaagccactgcacctggccaagatgaatattttaatagctcacagaacaaagtttgccacataatgataaaattactatgaaaatatattccctttattgtcagtttaaaagatgaactgagtttcacccaaactggtctggcccctctctgattcaaataccaatagttgctctgattcaaattccaactgttagaacatgacagctgctcataactagctttgcttactaaccatgtttctttccatttgtattaggtcctttactttttataacagcctcaaagtttcatgaattgctgcagtaaacattgattttcatgtttgtgagtctgcaagccagctgggcagctctacttcaggtggtaagggtggatcagacctattccatatacctcttgttctccttgtccagtggtttctagggatatgttctcatgatgaaccccgcagaggctcgtgaaagtgagaggaaactaggatgcctcttaaggtcttggtcaggatggggtctcctgtcacttctgtcacaggctattgtaagtcatatgagcaagctcaataaaatataaacaagtcagataaacagtgggaggaatggcaaagtcatatggccaaggccatgagtgattaattttaacacaggaaaaaagtaaagcattaaatgcgattatttaatatacaatgtcttattaactgaaatataaaatgtgtttactgtaaaatataatctgtttatctcaccaaagaaatattatctttaaaaaatgtcattacttctaagacatcatcagtctgcaacttctttccatagccttaatcaggatgctgtggcagctcccacattagcctcgcattctaaactggtagatgtcctaggaaaccatacatctatgtatttttcttattttatacgtttaggacaatgtatagctaattacccaactttttatttgcatacaaatctaatacaactgaacacaatcagttttatcacaggtataatggatttttcaatagtgaggaggtgcctccatgagccttctctttagaaaagtggcattcaagactcttcatttgaagtgaagattgctatgtcttttgcattgctctattttacataaattaagttataaattgacactataatcaactgacaccatgatcagtgatgatgatcaccctcatcagcactagagttgacttgtttttataacccctttgcatgtatgttgaatagcaaagttcatcagagaacatgtattagtcaatggtaagtaagatactctcatctaagaaataacatcacctcttctaatgaagttctaagaagagagggaagaaaaagtcttgggagctagtcagggaatagtgtgtatttgcaattacctaaactgaactctaccattactcctaacccagttcctcctcctgtgttttacatgattaatgccacccctgcctcaatgaaccaagatcagctccatcactgggacctccccattctgcctgtgcaatatttttcttttttatttctccttctaatattactgttattgctccagtaaagagctgtaatatattttacctggactgataccaggaatggtggtgttgcttccaatctgttgctgctagattaatctttgcaaagcacaggcttaatttcattgctgctcaactaaaaccactggtggctttccattgcctacaaaataaagtcaacctccccatcagacattcaaggctttcaatgatccatggccgccagctctctccaggctcatatcccactccactcctctgatgtttcctacactacactacactatactacactacagccaggtagaatgactgttcacccaacaccactcaggttgtcttctcaacttggaatactcttgcaccttcaaagctcatttcaaatgccccttcatttgtgaagccttctccaaatttccaagtcagaatgtctcttccttgtgctaccacaaccctttaactgagcctccattagtgcactgagaccattctgttcagtgtctgggtgaagcttcctggtgaaaaatatgttacctatttctttctgaaaagttggattcagggatattatcacggacctaaggtaatagttctagccaacctccctgtccactgccaggccgactacaaacccttctgttgctggcgagctggtccgcaccactagttctgcttcactctatttatctcttgatgtaaccatcttctttctccaggttttaagaaccagcccaactcctggttccctgatgaagcttttattcccctagccacatggaacttttcctttttggaacatgcctttagtttctgtgtagtttgccatgcagcacttcattgtacacattattaaaacagaattttaaggattagaatgaaccttaaaagatcatgcatctcaaaatttaatgtacatacaaattacccagggattttgttgaaataaaaattatttaattttaattaatataaataattcagtaggtctggggtgaggcctgaggttttacatttccaacaagctgccaggtaaagccaatacatctgtccaggaatcacactttgcgtatcaaaggtctagatgacattatcattccaaagagtttcttttacaggctctcagatcagtgttcatccactacctgactactgtcattcacaggcattctgttccacagcaggccagctaacgtggtatttacaaagctcactcctcttatacaacaatccaagtgtttcttttgtcagttgtctgtgccccaggagatccctctctgccttgccttgccctctgcctttggagaccagcacctcatactcagtgaaggcctggagtgcttaagagggatttcttccagctctcttgccctggtcttcagtgtattagatgtattacctccatgctctcagtagaggcccataggaaagagtaggtaggttatgccagctcacacgcatcctttaaaaatggtttagaagtttagctggtttcttattactcctgtctatggatgtttccttctgtcactctactagggatgaaacagctaatcatgttcaatagttacatttagattggtttttaaaaactatgattgtattagttcgtttccatgctgctgataaagacatatctgagactggaaacaaaaagggtttaattggacttacagttccacatggctggggaggcctcaaaatcaggtgggaggcaaaaggtacttcttacgtggtggcatcaagagcaaaatgaggaagaagcaaaagcagaaactcttcataaacccaccagatcttgtgggacttattatcacgagaatagcacagaaaagactggcctccatgattcaattacctcccactgcgtccctcccacaacatgtgggaattctgggagatacaattcaagttgagatttgggtggggacacagccaaaccatatcattcctccctgggctcctccaaatttcataatcctcacatttcaaaaccaatcattccttcccaacagttccccaaagtcttaactcatttcagcattaacccaaaagtccacagtccaaagtctcatctgagacaaggcaagtcccttccacttacaagcctgtaaaagcaagctagttacctcctagatacaatggggggtacaggtattgggtaaatacagctgttccaaatgagagaaattggccaaaacaaaggggttacagggtccatgcaagtctgaaatccagtggggcagtcaaattttaaagctccataatgatctcctttgactccatgtctcacattcaggtcatgctgatgcaagagataggttcccatggtcttgtgcagctccgcccctgtggctttgcagagtacagcctccctcctggctgctttctcaggctgatgttgagtgtctgtagcttttccaggcacaagatgcaagttggtggttgatctaccattctggggtctaccattctggggtctaccgttctgggactgtggccttcttctcacagctccactaggcagtgccccaacagggactctgtgtgggggctctgccccacatttcccttccacactgccctaggagaggttccccatgagggctctgcccctgcagcaaacttttgcctggacatccaggtgtttccatatatattctgaaatctaggcagaggttcccaaatctcaattcttgacatctctgcacccacaggctcaacatcacatggaagctgccaatgcttggggcctctaccctctgaagccacagcccaagctctatgttggctcctttcagccatggctggagcagctgggacacagggcaccaagtccctaggctgcacacagcacagagaccctgggcccagcccacaaaaccactttttcctcctgggcctctgggcctgtgatgggaggggctgccatgaaggtctctgacatgacctggagacattttccccatggtcttggggattaacattaggctccttgctgcttatgcaaatttctgcagccagcttgaatttctccttaaaaaaaatgggtttttcttttctactgcatcatcaggctgcagattttccacatttatgctcttgtttcccttttaaaacagaatgtttttaacagcacccaagtcaccttttgaatgctttgctgcttagaaatttattccaccagataccctaagtcatctctctcaagctctaagttccacaaatctctagggcaagggtgaaatgctgccagtctccttgctaaaacataacaagggtcacctttacttcagttcccaacaaggtcttcatctccatctgagaccacctcagcctggaccttattgttcatatcactatcagtatttttgtcaatgccattcacagtctctaggaggttccaaactttcctacattttcctatcttcttctgagccctccagattatttcaacacccagttccaaagttgcttccacattttcgggtatcttttcagcaatgccccactctactggtactattagtccattttcatgctgctgataaagacatacctgagactgggaacaaaaagaggtttaattggacttatagttccacctggctggggaggcctcagaatcatggcaggaggtgaaaggcatttcttacacggcagcagcaagagaaaaatgaagaagcagcaaaagcagaaacccctgataaaaccatcagatctcgtgagacttattcactatcacaagaatagcatgggaaagaccagcccccttgattcaattacctccccctgggtcctgtgggaattctggaaggtacaattcaagttgagatttgggtggggacacagccaaaccatatcaatgattttgtactttaaccagctgaatggaagtacaatctcttgctatatgacacaataattatttgcaaaatgagtaaacatatcataaggaaattatttttacaaggtttgaaacctgaaatgcagtctattatcatacataactaaaaatagagcctcaataaacagattcccagttttgaaaatgcaacatttgtactccacattgtcagttttcttaggtatatttataaatactcctataaaaatgtaaagaaacacataatgtagattgctaattttataataacacaagttgattttgacatccaacttattaattatgaaatgacttttggcctagtaacaatgaaaatgggggcaaatacagataaatggtaattcttagaatgaactactcagcaccaattctaagtttttcttgatggtaaatcataatgttccctttctcctcggttctgcaatctataggcataccataattgtaatcaatagcttaaaaatatgtctctctgtcctattctgtatctgtatctcttggatttttacctttgcaatagtcaactgaaccatcttcttggagtactcatgaagatggaagtctacatggagaatacaggatgaatccactctgtctcctgcagtgaagtctgtttgaaggatgtatttggctgtcttctggacaggccattctaataacagaaacaaacaagttattttaaaacttattggaatattcaaatattaaccaaagtagaaaaatataatacacatccatgtgcccatcacagaacttcactgattatcatcatttagccagtcttgaagaagcaagtgctaattacaatcacaaatgaaacaagattcagacttcatgaagagcactgcgctataataaaagaagaaatgagcacatacattcttttactgacagtcaaatggtgaaggtgggcagaatcattatgtgatgcaacatggcaaaagtatacagacagtgcatccagaggaaggcaccttgctgaatgactagaatggaagtaggagacattttgcaggcccccttcatcctgcagggagaaccagaaccacagcagctctatttgcctattcctctttaaattacaaagttaaaatttgggagtagtagaaaatcaattggttatcttatagagtctcctagaatatttcattggcattgagaaggtggaaaatgcaaattatatactttaaaatgtaatttttgcttttcacatatgcttaaagcctaaaacctcttaataaacttcttctgaaatata

SEQ ID NO: 9247 - DNA, 12387 bp, Homo sapiens
  source 1..12387: mol_type = unassigned DNA
cctgttgctctttgctctaatgagccttgagaaaggattgctggtcatgggaccagaggctttatggggagggaagaactgttcttgactttcagtttttcgagcgggtttcaagtatgggattgtgctggatgcgggttcttctcacacaagtttatacatctataagtggccagcagaaaaggagaatgacacaggcgtggtgcatcaagtagaagaatgcagggttaaaggtcctggaatctcaaaatttgttcagaaagtaaatgaaataggcatttacctgactgattgcatggaaagagctagggaagtgattccaaggtcccagcaccaagagacacccgtttacctgggagccacggcaggcatgcggttgctcaggatggaaagtgaagagttggcagacagggttctggatgtggtggagaggagcctcagcaactacccctttgacttccagggtgccaggatcattactggccaagaggaaggtgcctatggctggattactatcaactatctgctgggcaaattcagtcagaaaacaaggtggttcagcatagtcccatatgaaaccaataatcaggaaacctttggagctttggaccttgggggagcctctacacaagtcacttttgtaccccaaaaccagactatcgagtccccagataatgctctgcaatttcgcctctatggcaaggactacaatgtctacacacatagcttcttgtgctatgggaaggatcaggcactctggcagaaactggccaaggacattcaggttgcaagtaatgaaattctcagggacccatgctttcatcctggatataagaaggtagtgaacgtaagtgacctttacaagaccccctgcaccaagagatttgagatgactcttccattccagcagtttgaaatccagggtattggaaactatcaacaatgccatcaaagcatcctggagctcttcaacaccagttactgcccttactcccagtgtgccttcaatgggattttcttgccaccactccagggggattttggggcattttcagctttttactttgtgatgaagtttttaaacttgacatcagagaaagtctctcaggaaaaggtgactgagatgatgaaaaagttctgtgctcagccttgggaggagataaaaacatcttacgctggagtaaaggagaagtacctgagtgaatactgcttttctggtacctacattctctccctccttctgcaaggctatcatttcacagctgattcctgggagcacatccatttcattggcaagatccagggcagcgacgccggctggactttgggctacatgctgaacctgaccaacatgatcccagctgagcaaccattgtccacacctctctcccactccacctatgtcttcctcatggttctattctccctggtccttttcacagtggccatcataggcttgcttatctttcacaagccttcatatttctggaaagatatggtatagcaaaagcagctgaaatatgctggctggagtgaggaaaaaaatcgtccagggagcattttcctccatcgcagtgttcaaggccatccttccctgtctgccagggccagtcttgacgagtgtgaagcttccttggcttttactgaagcctttcttttggaggtattcaatatcctttgcctcaaggacttcggcagatactgtctctttcatgagtttttcccagctacacctttctcctttgtactttgtgcttgtataggttttaaagacctgacacctttcataatctttgctttataaaagaacaatattgactttgtctagaagaactgagagtcttgagtcctgtgataggaggctgagctggctgaaagaagaatctcaggaactggttcagttgtactctttaagaacccctttctctctcctgtttgccatccattaagaaagccatatgatgcctttggagaaggcagacacacattccattcccagcctgctctgtgggtaggagaattttctacagtaggcaaatatgtgctaaagccaaagagttttataaggaaatatatgtgctcatgcagtcaatacagttctcaatcccacccaaagcaggtatgtcaataaatcacatattcctaggtgatacccaaatgctacagagtggaacactcagacctgagatttgcaaaaagcagatgtaaatatatgcattcaaacatcagggcttactatgaggtaggtggtatatacatgtcacaaataaaaatacagttacaactcagggtcacaaaaaatgcatcttccaatgcatatttttattatggtaaaatatacataaatataattcaccattttaacatttaattcatattaaatacgtacaaatcagtgacatttagtacattcacagtgttgtgccaccatcaccactatttagttccagaacatttgcatcatcaatacattgtctagagacaagactatcctgggtaggcagaaaccatagatcttttgtgtttacagctatggaaaccaactgtaccataaagatagttcactgagttttaaagccaagccacatcttatttttccaaggtttaatttagtgagagggcagcattagtgtggagtggcatgcttttgccctatcgtggaatttacacatcagaatgtgcaggatccaagtctgaaagtgttgccacccgtcacacaacatgggctttgtttgcttattccatgaagcagcagctatagaccttaccatggaaacatgaagagaccctgcacccctttccttaaggattgctgcaagagttacctgttgagcaggattgactggtgatgtttcattctgaccttgtcccaagctctccatctctagatctggggactgactgttgagctgatggggaaagaaaagctctcacacaaaccggaagccaaatgtcccctatctcttgaatgatcaagtcacttttgacaacatccaggtgaatataaaaacttaataaagctgtggaaaggaactcttaatcttcttttctgctacttaggttaaattcactagatcttgattaggaatcaaaattcgaattgggacatgttcaaattctttcttgtggtagttgcctatactgtcatcgctgctgttggttgagcatttgtggtgtaccacgctgtgtgctcaagggtattacattcatcttctcatttaatcctcacaacaatctgaagaaggtaggtattacaattcccacttcatagaaacagaaactgaggttcagagaggttaagtcatttgcccaaatggctgagccaaagcctaccatgtacctaacctttattttctttcccgaacataccaggctgtctcctcataacttccaagcatgcacttaaaactccacatgaatacaaggttcatgggacttggtattcatagaaagggaggcagaaagctggtctgttcctgataggcttgtaatttaatatcattctgttcatgtgctttggatggaagcacatctggcatatgatgctaatcagtggttcccatacccctggcttcctaattttaatgtttgctcacagcatagtagattgacatcaaatagtggccgatgatgatgaaaataaaggtcaaataagttgagccaataacagccgcttttttccttctgtctgcgtatacaaagcactgtcatgcacacaatctattctgaccctcacaacaacccataagggtgtaaatagtatttccattttacaaatgaggatcacacaaactactacatggcagagcagatactccaactcatgtcttctggttgaagcctattgctttttcttttctaaacactttccctcagcaagttggaattagacttcacaagtctccttcagagaacacaaatcttttcttattccattcctgtttggttgcctacgtccaatctccccctccccagagatgccaaaaaaaaaatcctttaaggtatttgggagccaaactcaacttgttaaaatctcaaattatggagacaatcagcagacacaacctaaccccaattattttggcaggaaggttggtttagaggcagatccagcaatctgctttgggccactctgggtggggtaggtgaaataagattggtcactgttaactaattttaatattggattggccattggttatcactgattaccattctcccctggattttcacccaggactcaaaacttggttctgctaaccctgttcctttatgaggaaccttttaaagattcctttataaggtgggagttttttttctatgaacctataggggagaaaaaagatcagcagaagtcattacttttttttttttttttttttttttttgagagagagtctcactccattgcccaggctggagtgcagtggtgctatctcggctcactgcaacctccgcctcctgggttcaagcaattctcctgcctcagcctcccgagtagctgggattgcaggtgcccaccaccacacccggctaatttttgtatttttagtaaagacagggtttcaccatgttggccaggctggtctccaactcccaatctcaggtgatcctattgcctcgggctcccaaagtgctgggattacaggagtgagccaccatgcctggccagaagtggttacttctgtagacaaaagaataatgctacttaatcaggctttctgtgtgacaagaaagagaaagaaaataaagaagtttcaattcatccaattcttaataagaaatatgtaaataaaattttttaaaattacacttcattttaatgttgtatcagtcaaggtccctgcaagagatggatggtatggtacactcaaactgggtaacacaggagagttttcagaaagcaactaaatccaaaatactatcaaggaatcaatataaaaattgttaatatttttctcatactaaattttcaaaatattttgtgtctattacatttacagcacatcttaattaggactagctgtgtgttcacctcacatgtggcttgtagctaccatactggacagcacatgtccaaaaaaatacacgtaaagttaaagtttaaaagacacaggaactaagccctcattgtctttcccttgggaggtagtttaaagagctatagatgctgtaacattcttgctattatttattatatatgacattattcctaaaaaagcttttgagatcctaggttgtattcctcaggttttgttgccttcccatgaagatgtgaaggcagggatgcctgttattcagtccaagatgcatgacaagagaccttgggaaagtttcatctggatttaaagattaattcttgatgcttacattccatactcaaaatgtaaatttgaatattaaaataaagatgattttttttttggagctagtcttgctctgttgcccaggctggaatgcagtggcatgatcatggctcactgcagcctcgacctcccaagctcaagcaaggctacaggtgtgcacctaagtagctaggactacaggtgtgcaccaccatgtctagctatttttttttctgtagagacagggttttcctatgttgtccaggctggtctcgaactcctgccctcaagcaatcctcctgccttggcctcccaaagtgttgagattacaggcgtaagccactgcacctggccaagatgaatattttaatagctcacagaacaaagtttgccacataatgataaaattactatgaaaatatattccctttattgtcagtttaaaagatgaactgagtttcacccaaactggtctggcccctctctgattcaaataccaatagttgctctgattcaaattccaactgttagaacatgacagctgctcataactagctttgcttactaaccatgtttctttccatttgtattaggtcctttactttttataacagcctcaaagtttcatgaattgctgcagtaaacattgattttcatgtttgtgagtctgcaagccagctgggcagctctacttcaggtggtaagggtggatcagacctattccatatacctcttgttctccttgtccagtggtttctagggatatgttctcatgatgaaccccgcagaggctcgtgaaagtgagaggaaactaggatgcctcttaaggtcttggtcaggatggggtctcctgtcacttctgtcacaggctattgtaagtcatatgagcaagctcaataaaatataaacaagtcagataaacagtgggaggaatggcaaagtcatatggccaaggccatgagtgattaattttaacacaggaaaaaagtaaagcattaaatgcgattatttaatatacaatgtcttattaactgaaatataaaatgtgtttactgtaaaatataatctgtttatctcaccaaagaaatattatctttaaaaaatgtcattacttctaagacatcatcagtctgcaacttctttccatagccttaatcaggatgctgtggcagctcccacattagcctcgcattctaaactggtagatgtcctaggaaaccatacatctatgtatttttcttattttatacgtttaggacaatgtatagctaattacccaactttttatttgcatacaaatctaatacaactgaacacaatcagttttatcacaggtataatggatttttcaatagtgaggaggtgcctccatgagccttctctttagaaaagtggcattcaagactcttcatttgaagtgaagattgctatgtcttttgcattgctctattttacataaattaagttataaattgacactataatcaactgacaccatgatcagtgatgatgatcaccctcatcagcactagagttgacttgtttttataacccctttgcatgtatgttgaatagcaaagttcatcagagaacatgtattagtcaatggtaagtaagatactctcatctaagaaataacatcacctcttctaatgaagttctaagaagagagggaagaaaaagtcttgggagctagtcagggaatagtgtgtatttgcaattacctaaactgaactctaccattactcctaacccagttcctcctcctgtgttttacatgattaatgccacccctgcctcaatgaaccaagatcagctccatcactgggacctccccattctgcctgtgcaatatttttcttttttatttctccttctaatattactgttattgctccagtaaagagctgtaatatattttacctggactgataccaggaatggtggtgttgcttccaatctgttgctgctagattaatctttgcaaagcacaggcttaatttcattgctgctcaactaaaaccactggtggctttccattgcctacaaaataaagtcaacctccccatcagacattcaaggctttcaatgatccatggccgccagctctctccaggctcatatcccactccactcctctgatgtttcctacactacactacactatactacactacagccaggtagaatgactgttcacccaacaccactcaggttgtcttctcaacttggaatactcttgcaccttcaaagctcatttcaaatgccccttcatttgtgaagccttctccaaatttccaagtcagaatgtctcttccttgtgctaccacaaccctttaactgagcctccattagtgcactgagaccattctgttcagtgtctgggtgaagcttcctggtgaaaaatatgttacctatttctttctgaaaagttggattcagggatattatcacggacctaaggtaatagttctagccaacctccctgtccactgccaggccgactacaaacccttctgttgctggcgagctggtccgcaccactagttctgcttcactctatttatctcttgatgtaaccatcttctttctccaggttttaagaaccagcccaactcctggttccctgatgaagcttttattcccctagccacatggaacttttcctttttggaacatgcctttagtttctgtgtagtttgccatgcagcacttcattgtacacattattaaaacagaattttaaggattagaatgaaccttaaaagatcatgcatctcaaaatttaatgtacatacaaattacccagggattttgttgaaataaaaattatttaattttaattaatataaataattcagtaggtctggggtgaggcctgaggttttacatttccaacaagctgccaggtaaagccaatacatctgtccaggaatcacactttgcgtatcaaaggtctagatgacattatcattccaaagagtttcttttacaggctctcagatcagtgttcatccactacctgactactgtcattcacaggcattctgttccacagcaggccagctaacgtggtatttacaaagctcactcctcttatacaacaatccaagtgtttcttttgtcagttgtctgtgccccaggagatccctctctgccttgccttgccctctgcctttggagaccagcacctcatactcagtgaaggcctggagtgcttaagagggatttcttccagctctcttgccctggtcttcagtgtattagatgtattacctccatgctctcagtagaggcccataggaaagagtaggtaggttatgccagctcacacgcatcctttaaaaatggtttagaagtttagctggtttcttattactcctgtctatggatgtttccttctgtcactctactagggatgaaacagctaatcatgttcaatagttacatttagattggtttttaaaaactatgattgtattagttcgtttccatgctgctgataaagacatatctgagactggaaacaaaaagggtttaattggacttacagttccacatggctggggaggcctcaaaatcaggtgggaggcaaaaggtacttcttacgtggtggcatcaagagcaaaatgaggaagaagcaaaagcagaaactcttcataaacccaccagatcttgtgggacttattatcacgagaatagcacagaaaagactggcctccatgattcaattacctcccactgcgtccctcccacaacatgtgggaattctgggagatacaattcaagttgagatttgggtggggacacagccaaaccatatcattcctccctgggctcctccaaatttcataatcctcacatttcaaaaccaatcattccttcccaacagttccccaaagtcttaactcatttcagcattaacccaaaagtccacagtccaaagtctcatctgagacaaggcaagtcccttccacttacaagcctgtaaaagcaagctagttacctcctagatacaatggggggtacaggtattgggtaaatacagctgttccaaatgagagaaattggccaaaacaaaggggttacagggtccatgcaagtctgaaatccagtggggcagtcaaattttaaagctccataatgatctcctttgactccatgtctcacattcaggtcatgctgatgcaagagataggttcccatggtcttgtgcagctccgcccctgtggctttgcagagtacagcctccctcctggctgctttctcaggctgatgttgagtgtctgtagcttttccaggcacaagatgcaagttggtggttgatctaccattctggggtctaccattctggggtctaccgttctgggactgtggccttcttctcacagctccactaggcagtgccccaacagggactctgtgtgggggctctgccccacatttcccttccacactgccctaggagaggttccccatgagggctctgcccctgcagcaaacttttgcctggacatccaggtgtttccatatatattctgaaatctaggcagaggttcccaaatctcaattcttgacatctctgcacccacaggctcaacatcacatggaagctgccaatgcttggggcctctaccctctgaagccacagcccaagctctatgttggctcctttcagccatggctggagcagctgggacacagggcaccaagtccctaggctgcacacagcacagagaccctgggcccagcccacaaaaccactttttcctcctgggcctctgggcctgtgatgggaggggctgccatgaaggtctctgacatgacctggagacattttccccatggtcttggggattaacattaggctccttgctgcttatgcaaatttctgcagccagcttgaatttctccttaaaaaaaatgggtttttcttttctactgcatcatcaggctgcagattttccacatttatgctcttgtttcccttttaaaacagaatgtttttaacagcacccaagtcaccttttgaatgctttgctgcttagaaatttattccaccagataccctaagtcatctctctcaagctctaagttccacaaatctctagggcaagggtgaaatgctgccagtctccttgctaaaacataacaagggtcacctttacttcagttcccaacaaggtcttcatctccatctgagaccacctcagcctggaccttattgttcatatcactatcagtatttttgtcaatgccattcacagtctctaggaggttccaaactttcctacattttcctatcttcttctgagccctccagattatttcaacacccagttccaaagttgcttccacattttcgggtatcttttcagcaatgccccactctactggtactattagtccattttcatgctgctgataaagacatacctgagactgggaacaaaaagaggtttaattggacttatagttccacctggctggggaggcctcagaatcatggcaggaggtgaaaggcatttcttacacggcagcagcaagagaaaaatgaagaagcagcaaaagcagaaacccctgataaaaccatcagatctcgtgagacttattcactatcacaagaatagcatgggaaagaccagcccccttgattcaattacctccccctgggtcctgtgggaattctggaaggtacaattcaagttgagatttgggtggggacacagccaaaccatatcaatgattttgtactttaaccagctgaatggaagtacaatctcttgctatatgacacaataattatttgcaaaatgagtaaacatatcataaggaaattatttttacaaggtttgaaacctgaaatgcagtctattatcatacataactaaaaatagagcctcaataaacagattcccagttttgaaaatgcaacatttgtactccacattgtcagttttcttaggtatatttataaatactcctataaaaatgtaaagaaacacataatgtagattgctaattttataataacacaagttgattttgacatccaacttattaattatgaaatgacttttggcctagtaacaatgaaaatgggggcaaatacagataaatggtaattcttagaatgaactactcagcaccaattctaagtttttcttgatggtaaatcataatgttccctttctcctcggttctgcaatctataggcataccataattgtaatcaatagcttaaaaatatgtctctctgtcctattctgtatctgtatctcttggatttttacctttgcaatagtcaactgaaccatcttcttggagtactcatgaagatggaagtctacatggagaatacaggatgaatccactctgtctcctgcagtgaagtctgtttgaaggatgtatttggctgtcttctggacaggccattctaataacagaaacaaacaagttattttaaaacttattggaatattcaaatattaaccaaagtagaaaaatataatacacatccatgtgcccatcacagaacttcactgattatcatcatttagccagtcttgaagaagcaagtgctaattacaatcacaaatgaaacaagattcagacttcatgaagagcactgcgctataataaaagaagaaatgagcacatacattcttttactgacagtcaaatggtgaaggtgggcagaatcattatgtgatgcaacatggcaaaagtatacagacagtgcatccagaggaaggcaccttgctgaatgactagaatggaagtaggagacattttgcaggcccccttcatcctgcagggagaaccagaaccacagcagctctatttgcctattcctctttaaattacaaagttaaaatttgggagtagtagaaaatcaattggttatcttatagagtctcctagaatatttcattggcattgagaaggtggaaaatgcaaattatatactttaaaatgtaatttttgcttttcacatatgcttaaagcctaaaacctcttaataaacttcttctgaaatata

SEQ ID NO: 9248 - DNA, 1500 bp, Homo sapiens
  source 1..1500: mol_type = unassigned DNA
ctcccgcgcgcccgcccgcccatggccgggaaggtgcggtcactgctgccgccgctgctgctggccgccgcgggcctcgccggcctcctactgctgtgcgtccccacccgcgacgtccgggagccgcccgccctcaagtatggcatcgtcctggacgctggttcttcacacacgtccatgtttatctacaagtggccggcagacaaggagaacgacacaggcattgtgggccagcacagctcctgtgatgttccaggtgggggcatctccagctatgcagacaacccttctggggccagccagagtcttgttggatgcctcgaacaggcgcttcaggatgtgcccaaagagagacacgcgggcacacccctctacctgggagccacagcgggtatgcgcctgctcaacctgaccaatccagaggcctcgaccagtgtgctcatggcagtgactcacacactgacccagtacccctttgacttccggggtgcacgcatcctctcgggccaggaagagggggtgtttggctgggtgactgccaactacctgctggagaacttcatcaagtacggctgggtgggccggtggttccggccacggaaggggacactgggggccatggacctggggggtgcctctacccagatcacttttgagacaaccagtccagctgaggacagagccagcgaggtccagctgcatctctacggccagcactaccgagtctacacccacagcttcctctgctatggccgtgaccaggtcctccagaggctgctggccagcgccctccagacccacggcttccacccctgctggccgaggggcttttccacccaagtgctgctcggggatgtgtaccagtcaccatgcaccatggcccagcggccccagaacttcaacagcagtgccagggtcagcctgtcagggagcagtgacccccacctctgccgagatctggtttctgggctcttcagcttctcctcctgccccttctcccgatgctctttcaatggggtcttccagcccccagtggctgggaactttgtggccttctctgccttcttctacactgtggactttttgcggacttcgatggggctgcccgtggccaccctgcagcagctggaggcagccgcagtgaatgtctgcaaccagacctgggctcagcagctgctgagtcgcggctacggcttcgacgagcgcgccttcggcggcgtgatcttccagaagaaggccgcggacactgcagtgggctgggcgctcggctacatgctgaacctgaccaacctgatccccgccgacccgccggggctgcgcaagggcacagacttcagctcctgggtcgtcctcctgctgctcttcgcctccgcgctcctggctgcgcttgtcctgctgctgcgtcaggtgcactccgccaagctgccaagcaccatttaggggccgacgggggcagctgccccatccctcccccaacccctgtatccccaccccgtactc

SEQ ID NO: 9249 - DNA, 2095 bp, Homo sapiens
  source 1..2095: mol_type = unassigned DNA
ccgcactctccgggtccacgcatcgtcctcccgcgcgcccgcccgcccatggccgggaaggtgcggtcactgctgccgccgctgctgctggccgccgcgggcctcgccggcctcctactgctgtgcgtccccacccgcgacgtccgggagccgcccgccctcaagtatggcatcgtcctggacgctggttcttcacacacgtccatgtttatctacaagtggccggcagacaaggagaacgacacaggcattgtgggccagcacagctcctgtgatgttccaggtgggggcatctccagctatgcagacaacccttctggggccagccagagtcttgttggatgcctcgaacaggcgcttcaggatgtgcccaaagagagacacgcgggcacacccctctacctgggagccacagcgggtatgcgcctgctcaacctgaccaatccagaggcctcgaccagtgtgctcatggcagtgactcacacactgacccagtacccctttgacttccggggtgcacgcatcctctcgggccaggaagagggggtgtttggctgggtgactgccaactacctgctggagaacttcatcaagtacggctgggtgggccggtggttccggccacggaaggggacactgggggccatggacctggggggtgcctctacccagatcacttttgagacaaccagtccagctgaggacagagccagcgaggtccagctgcatctctacggccagcactaccgagtctacacccacagcttcctctgctatggccgtgaccaggtcctccagaggctgctggccagcgccctccagacccacggcttccacccctgctggccgaggggcttttccacccaagtgctgctcggggatgtgtaccagtcaccatgcaccatggcccagcggccccagaacttcaacagcagtgccagggtcagcctgtcagggagcagtgacccccacctctgccgagatctggtttctgggctcttcagcttctcctcctgccccttctcccgatgctctttcaatggggtcttccagcccccagtggctgggaactttgtggccttctctgccttcttctacactgtggactttttgcggacttcgatggggctgcccgtggccaccctgcagcagctggaggcagccgcagtgaatgtctgcaaccagacctgggctcagctgcaagctcgggtgccagggcaacgggcccgcctggccgactactgcgccggggccatgttcgtgcagcagctgctgagtcgcggctacggcttcgacgagcgcgccttcggcggcgtgatcttccagaagaaggccgcggacactgcagtgggctgggcgctcggctacatgctgaacctgaccaacctgatccccgccgacccgccggggctgcgcaagggcacagacttcagctcctgggtcgtcctcctgctgctcttcgcctccgcgctcctggctgcgcttgtcctgctgctgcgtcaggtgcactccgccaagctgccaagcaccatttaggggccgacgggggcagctgccccatccctcccccaacccctgtatccccaccccgtactcccacccctcccacaacccctgtacctcccacccctgtatccccacccctccacccacccctctcccaacctctctccccgcccctgtatcctgcattcctccacccaccctctatcccccaccgctccaccccaccactgtcttctccatccttccaccccaccctcagcgtctctgcccctaaggcagcccaggaaataggaactgagactctggtacccacaggagcctgggtgggcaaagagcgctcaatccagctccttgaacccctccagcccgcttcagcctgggcatcactgcaggccccgtgctcctcctcctcctcctcagggctgggtctccagagagtggggccttggtcctgagaatcagcccttagaggctccttctgtgtagtctgggtctgtactggggagggtcacagcccacgggctggcagccagcccagcacctacttgtaaaaattttgtaataaaaagtttttcctagagacgtgaaa

SEQ ID NO: 9250 - DNA, 2819 bp, Homo sapiens
  source 1..2819: mol_type = unassigned DNA
atacccggcgccgcctcccggcgtctgagctgacacctccttagcgctggccgcgggccgcctctgcggcagcgctagtcgccttctccgaatcggctccgcacagctaggagaaaagatgttcactgtgctgacccgccaaccatgtgagcaagcaggcctcaaggccctctaccgaactccaaccatcattgccttggtggtcttgcttgtgagtattgtggtacttgtgagtatcactgtcatccagatccacaagcaagaggtcctccctccaggactgaagtatggtattgtgctggatgccgggtcttcaagaaccacagtctacgtgtatcaatggccagcagaaaaagagaataataccggagtggtcagtcaaaccttcaaatgtagtgtgaaaggctctggaatctccagctatggaaataacccccaagatgtccccagagcctttgaggagtgtatgcaaaaagtcaaggggcaggttccatcccacctccacggatccacccccattcacctgggagccacggctgggatgcgcttgctgaggttgcaaaatgaaacagcagctaatgaagtccttgaaagcatccaaagctacttcaagtcccagccctttgactttaggggtgctcaaatcatttctgggcaagaagaaggggtatatggatggattacagccaactatttaatgggaaatttcctggagaagaacctgtggcacatgtgggtgcacccgcatggagtggaaaccacgggtgccctggacttaggtggtgcctccacccaaatatccttcgtggcaggagagaagatggatctgaacaccagcgacatcatgcaggtgtccctgtatggctacgtatacacgctctacacacacagcttccagtgctatggccggaatgaggctgagaagaagtttctggcaatgctcctgcagaattctcctaccaaaaaccatctcaccaatccctgttaccctcgggattatagcatcagcttcaccatgggccatgtatttgatagcctgtgcactgtggaccagaggccagaaagttataaccccaatgatgtcatcacttttgaaggaactggggacccatctctgtgtaaggagaaggtggcttccatatttgacttcaaagcttgccatgatcaagaaacctgttcttttgatggggtttatcagccaaagattaaagggccatttgtggcttttgcaggattctactacacagccagtgctttaaatctttcaggtagcttttccctggacaccttcaactccagcacctggaatttctgctcacagaattggagtcagctcccactgctgctccccaaatttgatgaggtatatgcccgctcttactgcttctcagccaactacatctaccacttgtttgtgaacggttacaaattcacagaggagacttggccccaaatacactttgaaaaagaagtggggaatagcagcatagcctggtctcttggctacatgctcagcctgaccaaccagatcccagctgaaagccctctgatccgtctgcccatagaaccacctgtctttgtgggcaccctcgctttcttcacagcggcagccttgctgtgtctggcatttcttgcatacctgtgttcagcaaccagaagaaagaggcactccgagcatgcctttgaccatgcagtggattctgactgagccttcaaagcagctcctggagtccaatggctgcttagagtcagcctgggtggcaccaggcaatgcaggtgaagtggctgccttcaggaaatacaactaactaaaatcaaacacctaggtcacgtgcctctcaaatactgatttctgccacagcacctcttgaggcatcccttggctattctgtgcatattgttcttcagagacctcactacccacatgctgatctattggggaacagagaagagacaggccacgaaggtcaggctctttatattaagttccccagaggaagagtaagttgagaaggtatcagtttaatgttgaagaattgacctcagggctcagtttccatttccctccctcagtattcttcctggcaagatacccattaagcatttcgccaatcagaatctcattttatagtttttcccattggtctttaactaagactttcttgtagcaatctcgtaagcagtgaaccccctcagatcagtagaatatagtatctgggggagaagacttacttccttcagggcagcagccacagccaggcttctgtcatacaggtagatcccgaagcacagagacataaaaaaggtctcccagaaaactatagaccattctccaagtggaattcccacttagggctctggtcactagattgcaacctgtgtgtttgtcatcatcctcatctcaccattgtattgctatgccctcccataaaaacacattgatccctagcaagattattgcattccagattttactgcctttgctaggcttttgcttagcaaagggctgactttccattgttatcatggtgtatatatttttgtcaccattcccacaagtatacttgatgttgtcatagaacgaacatcctactctatgatttactaaccaattactttcccagatcatagacctctctgcatagtagtcataggtcttgactttggggaaagaaaaggaagctgcaggaatatttatctccaaagtcgaatgagaaagaactccagcaaatccaatggctacaaactaaaaatcagcattatttcatattgctgtttcttagctgaatatggaataaagaactattattttattttga

SEQ ID NO: 9251 - DNA, 1749 bp, Homo sapiens
  source 1..1749: mol_type = unassigned DNA
gaatcggctccgcacaggtaagatcaggggacccggcgcctgagctgccgaggaaggagtcgggggtgctgcgtgagactgagagttgggaggcaaagaaacaaaatcggatttcctcagagggccagaggaagagactgaaacacgctaggagaaaagatgttcactgtgctgacccgccaaccatgtgagcaagcaggcctcaaggccctctaccgaactccaaccatcattgccttggtggtcttgcttgtgagtattgtggtacttgtgagtatcactgtcatccagatccacaagcaagaggtcctccctccaggactgaagtatggtattgtgctggatgccgggtcttcaagaaccacagtctacgtgtatcaatggccagcagaaaaagagaataataccggagtggtcagtcaaaccttcaaatgtagtgtgaaaggctctggaatctccagctatggaaataacccccaagatgtccccagagcctttgaggagtgtatgcaaaaagtcaaggggcaggttccatcccacctccacggatccacccccattcacctgggagccacggctgggatgcgcttgctgaggttgcaaaatgaaacagcagctaatgaagtccttgaaagcatccaaagctacttcaagtcccagccctttgactttaggggtgctcaaatcatttctgggcaagaagaaggggtatatggatggattacagccaactatttaatgggaaatttcctggagaagaacctgtggcacatgtgggtgcacccgcatggagtggaaaccacgggtgccctggacttaggtggtgcctccacccaaatatccttcgtggcaggagagaagatggatctgaacaccagcgacatcatgcaggtgtccctgtatggctacgtatacacgctctacacacacagcttccagtgctatggccggaatgaggctgagaagaagtttctggcaatgctcctgcagaattctcctaccaaaaaccatctcaccaatccctgttaccctcgggattatagcatcagcttcaccatgggccatgtatttgatagcctgtgcactgtggaccagaggccagaaagttataaccccaatgatgtcatcacttttgaaggaactggggacccatctctgtgtaaggagaaggtggcttccatatttgacttcaaagcttgccatgatcaagaaacctgttcttttgatggggtttatcagccaaagattaaagggccatttgtggcttttgcaggattctactacacagccagtgctttaaatctttcaggtagcttttccctggacaccttcaactccagcacctggaatttctgctcacagaattggagtcagctcccactgctgctccccaaatttgatgaggtatatgcccgctcttactgcttctcagccaactacatctaccacttgtttgtgaacggttacaaattcacagaggagacttggccccaaatacactttgaaaaagaagtggggaatagcagcatagcctggtctcttggctacatgctcagcctgaccaaccagatcccagctgaaagccctctgatccgtctgcccatagaaccacctgtctttgtgggcaccctcgctttcttcacagcggcagccttgctgtgtctggcatttcttgcatacctgtgttcagcaaccagaagaaagaggcactccgagcatgcctttgaccatgcagtggattctgactga

SEQ ID NO: 9252 - DNA, 5842 bp, Homo sapiens
  source 1..5842: mol_type = unassigned DNA
tagcccaggcgccgcggcgcgcggggtggggcggaggtcgcgccgagggcggcgggctgccgcgcaagggtggcgcgcgcgcgttttccttgttcctggtcaacaaagaaatgtggagtgtcttggctgaatcctcatacagacaagatcattatggtgctgttaggtaggacttgtatccagatgtaaggttgaaaaagtgatataataaaggaaccaaggagaaaattcagaaggaaagaaaaaattgcctctgcaggtgtgcgagcaggattgcttctgcaacaaaagcctccacccagccacatcttgggaaaagaatggccacttcttggggcacagtctttttcatgctggtggtatcctgtgtttgcagcgctgtctcccacaggaaccagcagacttggtttgagggtatcttcctgtcttccatgtgccccatcaatgtcagcgccagcaccttgtatggaattatgtttgatgcagggagcactggaactcgaattcatgtttacacctttgtgcagaaaatgccaggacagcttccaattctagaaggggaagtttttgattctgtgaagccaggactttctgcttttgtagatcaacctaagcagggtgctgagaccgttcaagggctcttagaggtggccaaagactcaatcccccgaagtcactggaaaaagaccccagtggtcctaaaggcaacagcaggactacgcttactgccagaacacaaagccaaggctctgctctttgaggtaaaggagatcttcaggaagtcacctttcctggtaccaaagggcagtgttagcatcatggatggatccgacgaaggcatattagcttgggttactgtgaattttctgacaggtcagctgcatggccacagacaggagactgtggggaccttggacctagggggagcctccacccaaatcacgttcctgccccagtttgagaaaactctggaacaaactcctaggggctacctcacttcctttgagatgtttaacagcacttataagctctatacacatagttacctgggatttggattgaaagctgcaagactagcaaccctgggagccctggagacagaagggactgatgggcacactttccggagtgcctgtttaccgagatggttggaagcagagtggatctttgggggtgtgaaataccagtatggtggcaaccaagaaggggaggtgggctttgagccctgctatgccgaagtgctgagggtggtacgaggaaaacttcaccagccagaggaggtccagagaggttccttctatgctttctcttactattatgaccgagctgttgacacagacatgattgattatgaaaaggggggtattttaaaagttgaagattttgaaagaaaagccagggaagtgtgtgataacttggaaaacttcacctcaggcagtcctttcctgtgcatggatctcagctacatcacagccctgttaaaggatggctttggctttgcagacagcacagtcttacagctcacaaagaaagtgaacaacatagagacgggctgggccttgggggccacctttcacctgttgcagtctctgggcatctcccattgaggccacgtacttccttggagacctgcatttgccaacacctttttaaggggaggagagagcacttagtttctgaactagtctggggacatcctggacttgagcctagagatttaggtttaattaattttacacatctaatgtgaactgctgcctaaccactcaagagtacacagctggcaccagagcatcacagagagccctgtgagccaaaaagtatagttttggaacttaaccttggagtgagagcccagggacaggtccctggaaaccaaagaaaaatcgcatttcaaccctttgagtgcctcattccactgaatatttaaattttcctcttaaatggtaaactgacttattgcaatcccaagacccatcaatatcagtatttttttcctccctatacagtgccctgcccacccttatctgcacccacctcccctgaaaaagagagaaaaaaaaaaacctggttttgctttccatgtataattcaacaacgcaaaatgggaccatgtcagaatctgtatgatcctattctgtgttagctccaatcagccagctgagagccatcctaaatattaataggatgagagagtaactcctaactgtgcataaattacagccttaagaaagaaggccacccggtctctggggacatgttttgggagggtgtggctgcctcatatagcctacctttgctttaatcagcattttatcagtcaactctgggattaatgaacatatccgactttatgggtatgtgtatattcagtgccagtaccacctcccaggctaatgtgttaacagtgttttctatgattctaaacttgttttctttgtatttctaagaaatacaactaggccctaacttttggtctgtggtcagaggtcagtgtctgtgctattccaggatctattatttcagtttgcccttttattctctccgtttgtaacagtaccttcctgtcctggtccctgatcactttagctaatatcctttgaattatttatctagttcagagtttccaataccgttcctgacaaaaccccacttggatttggttggctctctcagcccacatcagtacagtggaccaacatttccagggagaaccatatttaatgtccctcatgctctctttttgaatccaagtgctcagagctcttgactgtgaattatttaccccaaattcattatcttgcacttttttttgagatggagtcttgctctgttgctcaggctagagtggagtggcgcaatctcagctcactgcaacctccgcccccaggttcaagcgattcttgttctcagcctcctgaagagctgggattacaggtgcccaccaccattcctggctaatttttgtatttgtagtagagatggggtttcaccatgttggccaggctggtttccaactcctgatctcaattgatccacccgcttcccaaagtgctgggattacaggcatgagacaccgcgcctggccttatcttgcactttcaacataatcatccctgcttctcatctgccctgcagtgctcttggacctggaagatctccctgtggtctggcccctttgccttggttgttaacctccagcttctttgcaggagtgtatttccccaaaacttgtggctttcacagtagactccgtttccatcctctctctcacaaaggatgttaagtatgcctggccctcacacagtccatgggaaaccttatttttaacattactccattgagtcaataaatatttaccatctgctgtgtgcaagttactaggcaaatttctgtatccttgtccctaaaattcttgtctttaaattcattgtggaatttctttagacttcacactgacttttattactaaggtcacctttataccaactgccttcctcaaaatgcttataatgaaataacagaatcttgagttggaaacagcccaaagaaataatccaatgttgtactcagtgcagaattccctagaatttctaacaggttgtcattcagcttctgctaagccatgttcaaacagcttattccatttggaactgcactgatattaaaaaaaattccttatattgagctgaaatctacctatcttctaagtggtcttagttctgctctaatctctccttccaaaatctttggatcttttgaaaaaagttcctcccaagttcttttataagtgacatgacttttagaccccttcccatctttgtcaacaaaagtagggtgccagaccagtcacagaacactaaatgtcatccatgtttccttcagtagaaaccagcagttttaaaagaggtaagctgtgttcactaaagactgttccagcttgacaaatgcagagatataagtctctggtctttaatcactgtgggggccattttgtaaaacacacatactgtccagcagactcctttggtcatcccaaatacctctgaactccagggaagatgcattctaactccacgaacttacctattttgttaaccttgattagaccttctggagaagtaaccaatttgtccatcttaggagcaatttggaatgagagtttttatttttttctgtaacgcccatcctgcctgcagtagaccctttgggcttaagaggtcctacagattctaatagtttcctctttgtagatgtgttaacatatttaaaatacttaggacatggcctggtacgtgacagatggtgtttaacatcattgtcatatgaagaacactctctgtgggccaatggaggtgtgccttaaaattcttcatcttgcctgattttgtttgcataacttctggagagtctgtgtcctcctcatctaggccacctttccattttttgtgaaagatgaccttgtccctgcagtctccgccaggagtcacacagcttttcacagcagctgccatctttaattctttttcctgagattccagcaaggttgtgacattgtcacttttttgttctagactcttttaaattttctgcatttgcctgaaaagcacccctgtaagaatagatttctcatggctctaaaaattattcccaagaataccttacttggttcaaaagcagactgtttctcttcatttcatctcaaatcagacttctgggcaagatgttctttagagtaagcaaacctacaacctaaaaatctcttcaagaggcatctctggtcttgtgacgagacctcttcaaaaacccacagtaaaactcccctccctccagttggccaccagtctgccaccaaacatgaacaaattctgctgctaatcggtttcccttgtgatctggttcctgaggtcttcggatctgtgcaatgaattatttattgttttattaaaccgacagtggtgtcccagagaggaaccataaataaaatggaaatctggtgctgtgataaagtaataactagcattaatgagacctggttttcctttcagaaagtccagtatacctgtaacaaaggttaaagcaatttatatttaatttgcattctgatgttaacatttaaacagcaattctaacaaaaatgcatcgagtctaattcttacctctatcaaaaaacaactgtataaatttatgaccaacattaaaacaaaaacaaaatgtaaattttctctttagaaatgattaactggaaatgagtgagacagcaccttgtgggttttttagtaataaaaagctcttttcaaccaaattgtaagtcttccttcgaagttttttcctttggtctggctaatatacgctcctcacagcaaattatcattcattatttgggtgccacaggcccattaagcaaagaagaaaaagagaattttaatgtaaagtaagtttattaaattaaataagatcttgaaaatatgtatgatgggtcctgggcaggatgttctttttcatcaacgtaatctttctttaggagaggagtactcatttgcttgcaaaggccataatctgttcctggagaaaaaataaaagtgaatgaaactcttaacacagtaaggtgaagaaaataattattgtagataataatcacgtaggtattcttcccaagtgtccttgttttatttcagctaaaaaaagaaaaatatacatacatatacacacgttttagagacagggtctcactctgttgactgggctggagtgcagtggtgtgatcatagctcactgcagcctcaaactcctaggctcaagcaatcctccctccccagcctcctataaagtgctgggatta

SEQ ID NO: 9253 - DNA, 2708 bp, Homo sapiens
  source 1..2708: mol_type = unassigned DNA
gtgacgccacgtgcatggggcggagcccaggccctagggaatcgtggggtcgtatcccgcgggtggaggccggggtggcgccggccggggcgggggagcccaaaagaccggctgccgcctgctccccggaaaagggcactcgtctccgtgggtgtggcggagcgcgcggtgcatgcagccgcagcacggtccttggcaaacaaggatgagaaaaatatccaaccacgggagcctgcgggtggcgaaggtggcataccccctggggctgtgtgtgggcgtgttcatctatgttgcctacatcaagtggcaccgggccaccgccacccaggccttcttcagcatcaccagggcagccccgggggcccggtggggtcagcaggcccacagccccctggggacagctgcagacgggcacgaggtcttctacgggatcatgtttgatgcaggaagcactggcacccgagtacacgtcttccagttcacccggccccccagagaaactcccacgttaacccacgaaaccttcaaagcactgaagccaggtctttctgcctatgctgatgatgttgaaaagagcgctcagggaatccgggaactactggatgttgctaaacaggacattccgttcgacttctggaaggccacccctctggtcctcaaggccacagctggcttacgcctgttacctggagaaaaggcccagaagttactgcagaaggtgaaaaaagtatttaaagcatcgcctttccttgtaggggatgactgtgtttccatcatgaacggaacagatgaaggcgtttcggcgtggatcaccatcaacttcctgacaggcagcttgaaaactccaggagggagcagcgtgggcatgctggacttgggcggaggatccactcagatcgccttcctgccacgcgtggagggcaccctgcaggcctccccacccggctacctgacggcactgcggatgtttaacaggacctacaagctctattcctacagctacctcgggctcgggctgatgtcggcacgcctggcgatcctgggcggcgtggaggggcagcctgctaaggatggaaaggagttggtcagcccttgcttgtctcccagtttcaaaggagagtgggaacacgcagaagtcacgtacagggtttcagggcagaaagcagcggcaagcctgcacgagctgtgtgctgccagagtgtcagaggtccttcaaaacagagtgcacaggacggaggaagtgaagcatgtggacttctatgctttctcctactattacgaccttgcagctggtgtgggcctcatagatgcggagaagggaggcagcctggtggtgggggacttcgagatcgcagccaagtacgtgtgtcggaccctggagacacagccgcagagcagccccttctcatgcatggacctcacctacgtcagcctgctactccaggagttcggctttcccaggagcaaagtgctgaagctcactcggaaaattgacaatgttgagaccagctgggctctgggggccatttttcattacatcgactccctgaacagacagaagagtccagcctcatagtggccgagccatccctgtccccgtcagcagtgtctgtgtgtctgcataaaccctcctgtcctggacgtgacttcatcctgaggagccacagcacaggccgtgctggcactttctgcacactggctctgggacttgcagaaggcctggtgctgccctggcatcagcctcttccagtcacatctggccagagggctgtctggacctgggccctgctcaatgccacctgtctgcctgggctccaagtgggcaggaccaggacagaaccacaggcacacactgagggggcagtgtggctccctgcctgtcccatccccatgccccgtccgcggggctgtggctgctgctgtgcatgtccctgcgatgggagtcttgtctcccagcctgtcagtttcctccccagggcagagctccccttcctgcaagagtctgggaggcggtgcaggctgtcctggctgctctggggaagccgagggacagccataacacccccgggacagtaggtctgggcggcaccactgggaactctggacttgagtgtgtttgcctcttccttgggtatgaatgtgtgagttcacccagaggcctgctctcctcacacattgtgtggtttggggttaatgatggagggagacacctcctcatagacggcaggtgcccacctttcagggagtctcccagcatgggcggatgccgggcatgagctgctgtaaactatttgtggctgtgctgcttgagtgacgtctctgtcgtgtgggtgccaagtgcttgtgtagaaactgtgttctgagcccccttttctggacaccaactgtgtcctgtgaatgtatcgctactgtgagctgttcccgcctagccagggccatgtcttaggtgcagctgtgccacgggtcagctgagccacagtcccagaaccaagctctcggtgtctcgggccaccatccgcccacctcgggctgaccccacctcctccatggacagtgtgagccccgggccgtgcatcctgctcagtgtggcgtcagtgtcggggctgagccccttgagctgcttcagtgaatgtacagtgcccggcacgagctgaacctcatgtgttccactcccaataaaaggttgacaggggcttctccttctctgg

SEQ ID NO: 9254 - DNA, 2766 bp, Homo sapiens
  source 1..2766: mol_type = unassigned DNA
acgtgcatggggcggagcccaggccctagggaatcgtggggtcgtatcccgcgggtggaggccggggtggcgccggccggggcgggggagcccaaaagaccggctgccgcctgctccccggaaaagggcactcgtctccgtgggtgtggcggagcgcgcggtgcatggaatgggctatgtgaatgaaaaaaggtatccgttatgaaacttccagaaaaacgagctacatttttcagccgcagcacggtccttggcaaacaaggatgagaaaaatatccaaccacgggagcctgcgggtggcgaaggtggcataccccctggggctgtgtgtgggcgtgttcatctatgttgcctacatcaagtggcaccgggccaccgccacccaggccttcttcagcatcaccagggcagccccgggggcccggtggggtcagcaggcccacagccccctggggacagctgcagacgggcacgaggtcttctacgggatcatgtttgatgcaggaagcactggcacccgagtacacgtcttccagttcacccggccccccagagaaactcccacgttaacccacgaaaccttcaaagcactgaagccaggtctttctgcctatgctgatgatgttgaaaagagcgctcagggaatccgggaactactggatgttgctaaacaggacattccgttcgacttctggaaggccacccctctggtcctcaaggccacagctggcttacgcctgttacctggagaaaaggcccagaagttactgcagaaggtgaaaaaagtatttaaagcatcgcctttccttgtaggggatgactgtgtttccatcatgaacggaacagatgaaggcgtttcggcgtggatcaccatcaacttcctgacaggcagcttgaaaactccaggagggagcagcgtgggcatgctggacttgggcggaggatccactcagatcgccttcctgccacgcgtggagggcaccctgcaggcctccccacccggctacctgacggcactgcggatgtttaacaggacctacaagctctattcctacagctacctcgggctcgggctgatgtcggcacgcctggcgatcctgggcggcgtggaggggcagcctgctaaggatggaaaggagttggtcagcccttgcttgtctcccagtttcaaaggagagtgggaacacgcagaagtcacgtacagggtttcagggcagaaagcagcggcaagcctgcacgagctgtgtgctgccagagtgtcagaggtccttcaaaacagagtgcacaggacggaggaagtgaagcatgtggacttctatgctttctcctactattacgaccttgcagctggtgtgggcctcatagatgcggagaagggaggcagcctggtggtgggggacttcgagatcgcagccaagtacgtgtgtcggaccctggagacacagccgcagagcagccccttctcatgcatggacctcacctacgtcagcctgctactccaggagttcggctttcccaggagcaaagtgctgaagctcactcggaaaattgacaatgttgagaccagctgggctctgggggccatttttcattacatcgactccctgaacagacagaagagtccagcctcatagtggccgagccatccctgtccccgtcagcagtgtctgtgtgtctgcataaaccctcctgtcctggacgtgacttcatcctgaggagccacagcacaggccgtgctggcactttctgcacactggctctgggacttgcagaaggcctggtgctgccctggcatcagcctcttccagtcacatctggccagagggctgtctggacctgggccctgctcaatgccacctgtctgcctgggctccaagtgggcaggaccaggacagaaccacaggcacacactgagggggcagtgtggctccctgcctgtcccatccccatgccccgtccgcggggctgtggctgctgctgtgcatgtccctgcgatgggagtcttgtctcccagcctgtcagtttcctccccagggcagagctccccttcctgcaagagtctgggaggcggtgcaggctgtcctggctgctctggggaagccgagggacagccataacacccccgggacagtaggtctgggcggcaccactgggaactctggacttgagtgtgtttgcctcttccttgggtatgaatgtgtgagttcacccagaggcctgctctcctcacacattgtgtggtttggggttaatgatggagggagacacctcctcatagacggcaggtgcccacctttcagggagtctcccagcatgggcggatgccgggcatgagctgctgtaaactatttgtggctgtgctgcttgagtgacgtctctgtcgtgtgggtgccaagtgcttgtgtagaaactgtgttctgagcccccttttctggacaccaactgtgtcctgtgaatgtatcgctactgtgagctgttcccgcctagccagggccatgtcttaggtgcagctgtgccacgggtcagctgagccacagtcccagaaccaagctctcggtgtctcgggccaccatccgcccacctcgggctgaccccacctcctccatggacagtgtgagccccgggccgtgcatcctgctcagtgtggcgtcagtgtcggggctgagccccttgagctgcttcagtgaatgtacagtgcccggcacgagctgaacctcatgtgttccactcccaataaaaggttgacaggggcttctccttctctgg

SEQ ID NO: 9255 - DNA, 2805 bp, Homo sapiens
  source 1..2805: mol_type = unassigned DNA
gtgcatggggcggagcccaggccctagggaatcgtggggtcgtatcccgcgggtggaggccggggtggcgccggccggggcgggggagcccaaaagaccggctgccgcctgctccccggaaaagggcactcgtctccgtgggtgtggcggagcgcgcggtgcatggaatgggctatgtgaatgaaaaaaggtatccgttatgaaacttccagaaaaacgagctacatttttcagcagccgcagcacggtccttggcaaacaaggatgagaaaaatatccaaccacgggagcctgcgggtggcgaaggtggcataccccctggggctgtgtgtgggcgtgttcatctatgttgcctacatcaagtggcaccgggccaccgccacccaggccttcttcagcatcaccagggcagccccgggggcccggtggggtcagcaggcccacagccccctggggacagctgcagacgggcacgaggtcttctacgggatcatgtttgatgcaggaagcactggcacccgagtacacgtcttccagttcacccggccccccagagaaactcccacgttaacccacgaaaccttcaaagcactgaagccaggtctttctgcctatgctgatgatgttgaaaagagcgctcagggaatccgggaactactggatgttgctaaacaggacattccgttcgacttctggaaggccacccctctggtcctcaaggccacagctggcttacgcctgttacctggagaaaaggcccagaagttactgcagaaggtgaaaaaagtatttaaagcatcgcctttccttgtaggggatgactgtgtttccatcatgaacggaacagatgaaggcgtttcggcgtggatcaccatcaacttcctgacaggcagcttgaaaactccaggagggagcagcgtgggcatgctggacttgggcggaggatccactcagatcgccttcctgccacgcgtggagggcaccctgcaggcctccccacccggctacctgacggcactgcggatgtttaacaggacctacaagctctattcctacagctacctcgggctcgggctgatgtcggcacgcctggcgatcctgggcggcgtggaggggcagcctgctaaggatggaaaggagttggtcagcccttgcttgtctcccagtttcaaaggagagtgggaacacgcagaagtcacgtacagggtttcagggcagaaagcagcggcaagcctgcacgagctgtgtgctgccagagtgtcagaggtccttcaaaacagagtgcacaggacggaggaagtgaagcatgtggacttctatgctttctcctactattacgaccttgcagctggtgtgggcctcatagatgcggagaagggaggcagcctggtggtgggggacttcgagatcgcagccaagtacggtgggagtcacctggagcgtgaagggacgtgtctcatccccagtgtgtcggaccctggagacacagccgcagagcagccccttctcatgcatggacctcacctacgtcagcctgctactccaggagttcggctttcccaggagcaaagtgctgaagctcactcggaaaattgacaatgttgagaccagctgggctctgggggccatttttcattacatcgactccctgaacagacagaagagtccagcctcatagtggccgagccatccctgtccccgtcagcagtgtctgtgtgtctgcataaaccctcctgtcctggacgtgacttcatcctgaggagccacagcacaggccgtgctggcactttctgcacactggctctgggacttgcagaaggcctggtgctgccctggcatcagcctcttccagtcacatctggccagagggctgtctggacctgggccctgctcaatgccacctgtctgcctgggctccaagtgggcaggaccaggacagaaccacaggcacacactgagggggcagtgtggctccctgcctgtcccatccccatgccccgtccgcggggctgtggctgctgctgtgcatgtccctgcgatgggagtcttgtctcccagcctgtcagtttcctccccagggcagagctccccttcctgcaagagtctgggaggcggtgcaggctgtcctggctgctctggggaagccgagggacagccataacacccccgggacagtaggtctgggcggcaccactgggaactctggacttgagtgtgtttgcctcttccttgggtatgaatgtgtgagttcacccagaggcctgctctcctcacacattgtgtggtttggggttaatgatggagggagacacctcctcatagacggcaggtgcccacctttcagggagtctcccagcatgggcggatgccgggcatgagctgctgtaaactatttgtggctgtgctgcttgagtgacgtctctgtcgtgtgggtgccaagtgcttgtgtagaaactgtgttctgagcccccttttctggacaccaactgtgtcctgtgaatgtatcgctactgtgagctgttcccgcctagccagggccatgtcttaggtgcagctgtgccacgggtcagctgagccacagtcccagaaccaagctctcggtgtctcgggccaccatccgcccacctcgggctgaccccacctcctccatggacagtgtgagccccgggccgtgcatcctgctcagtgtggcgtcagtgtcggggctgagccccttgagctgcttcagtgaatgtacagtgcccggcacgagctgaacctcatgtgttccactcccaataaaaggttgacaggggcttctccttc

SEQ ID NO: 9256 - DNA, 2750 bp, Homo sapiens
  source 1..2750: mol_type = unassigned DNA
caggccctagggaatcgtggggtcgtatcccgcgggtggaggccggggtggcgccggccggggcgggggagcccaaaagaccggctgccgcctgctccccggaaaagggcactcgtctccgtgggtgtggcggagcgcgcggtgcatggaatgggctatgtgaatgaaaaaaggtatccgttatgaaacttccagaaaaacgagctacatttttcagcagccgcagcacggtccttggcaaacaaggatgagaaaaatatccaaccacgggagcctgcgggtggcgaaggtggcataccccctggggctgtgtgtgggcgtgttcatctatgttgcctacatcaagtggcaccgggccaccgccacccaggccttcttcagcatcaccagggcagccccgggggcccggtggggtcagcaggcccacagccccctggggacagctgcagacgggcacgaggtcttctacgggatcatgtttgatgcaggaagcactggcacccgagtacacgtcttccagttcacccggccccccagagaaactcccacgttaacccacgaaaccttcaaagcactgaagccaggtctttctgcctatgctgatgatgttgaaaagagcgctcagggaatccgggaactactggatgttgctaaacaggacattccgttcgacttctggaaggccacccctctggtcctcaaggccacagctggcttacgcctgttacctggagaaaaggcccagaagttactgcagaaggtgaaaaaagtatttaaagcatcgcctttccttgtaggggatgactgtgtttccatcatgaacggaacagatgaaggcgtttcggcgtggatcaccatcaacttcctgacaggcagcttgaaaactccaggagggagcagcgtgggcatgctggacttgggcggaggatccactcagatcgccttcctgccacgcgtggagggcaccctgcaggcctccccacccggctacctgacggcactgcggatgtttaacaggacctacaagctctattcctacagctacctcgggctcgggctgatgtcggcacgcctggcgatcctgggcggcgtggaggggcagcctgctaaggatggaaaggagttggtcagcccttgcttgtctcccagtttcaaaggagagtgggaacacgcagaagtcacgtacagggtttcagggcagaaagcagcggcaagcctgcacgagctgtgtgctgccagagtgtcagaggtccttcaaaacagagtgcacaggacggaggaagtgaagcatgtggacttctatgctttctcctactattacgaccttgcagctggtgtgggcctcatagatgcggagaagggaggcagcctggtggtgggggacttcgagatcgcagccaagtacgtgtgtcggaccctggagacacagccgcagagcagccccttctcatgcatggacctcacctacgtcagcctgctactccaggagttcggctttcccaggagcaaagtgctgaagctcactcggaaaattgacaatgttgagaccagctgggctctgggggccatttttcattacatcgactccctgaacagacagaagagtccagcctcatagtggccgagccatccctgtccccgtcagcagtgtctgtgtgtctgcataaaccctcctgtcctggacgtgacttcatcctgaggagccacagcacaggccgtgctggcactttctgcacactggctctgggacttgcagaaggcctggtgctgccctggcatcagcctcttccagtcacatctggccagagggctgtctggacctgggccctgctcaatgccacctgtctgcctgggctccaagtgggcaggaccaggacagaaccacaggcacacactgagggggcagtgtggctccctgcctgtcccatccccatgccccgtccgcggggctgtggctgctgctgtgcatgtccctgcgatgggagtcttgtctcccagcctgtcagtttcctccccagggcagagctccccttcctgcaagagtctgggaggcggtgcaggctgtcctggctgctctggggaagccgagggacagccataacacccccgggacagtaggtctgggcggcaccactgggaactctggacttgagtgtgtttgcctcttccttgggtatgaatgtgtgagttcacccagaggcctgctctcctcacacattgtgtggtttggggttaatgatggagggagacacctcctcatagacggcaggtgcccacctttcagggagtctcccagcatgggcggatgccgggcatgagctgctgtaaactatttgtggctgtgctgcttgagtgacgtctctgtcgtgtgggtgccaagtgcttgtgtagaaactgtgttctgagcccccttttctggacaccaactgtgtcctgtgaatgtatcgctactgtgagctgttcccgcctagccagggccatgtcttaggtgcagctgtgccacgggtcagctgagccacagtcccagaaccaagctctcggtgtctcgggccaccatccgcccacctcgggctgaccccacctcctccatggacagtgtgagccccgggccgtgcatcctgctcagtgtggcgtcagtgtcggggctgagccccttgagctgcttcagtgaatgtacagtgcccggcacgagctgaacctcatgtgttccactcccaataaaaggttgacaggggcttctccttctctgg

SEQ ID NO: 9257 - DNA, 2100 bp, Homo sapiens
  source 1..2100: mol_type = unassigned DNA
ggtcctcaaggccacagctggcttacgcctgttacctggagaaaaggcccagaagttactgcagaaggtgaaaaaagtatttaaagcatcgcctttccttgtaggggatgactgtgtttccatcatgaacggaacagatgaaggcgtttcggcgtggatcaccatcaacttcctgacaggcagcttgaaaactccaggagggagcagcgtgggcatgctggacttgggcggaggatccactcagatcgccttcctgccacgcgtggagggcaccctgcaggcctccccacccggctacctgacggcactgcggatgtttaacaggacctacaagctctattcctacagctacctcgggctcgggctgatgtcggcacgcctggcgatcctgggcggcgtggaggggcagcctgctaaggatggaaaggagttggtcagcccttgcttgtctcccagtttcaaaggagagtgggaacacgcagaagtcacgtacagggtttcagggcagaaagcagcggcaagcctgcacgagctgtgtgctgccagagtgtcagaggtccttcaaaacagagtgcacaggacggaggaagtgaagcatgtggacttctatgctttctcctactattacgaccttgcagctggtgtgggcctcatagatgcggagaagggaggcagcctggtggtgggggacttcgagatcgcagccaagtacggtgggagtcacctggagcgtgaagggacgtgtctcatccccagtgtgtcggaccctggagacacagccgcagagcagccccttctcatgcatggacctcacctacgtcagcctgctactccaggagttcggctttcccaggagcaaagtgctgaagctcactcggaaaattgacaatgttgagaccagctgggctctgggggccatttttcattacatcgactccctgaacagacagaagagtccagcctcatagtggccgagccatccctgtccccgtcagcagtgtctgtgtgtctgcataaaccctcctgtcctggacgtgacttcatcctgaggagccacagcacaggccgtgctggcactttctgcacactggctctgggacttgcagaaggcctggtgctgccctggcatcagcctcttccagtcacatctggccagagggctgtctggacctgggccctgctcaatgccacctgtctgcctgggctccaagtgggcaggaccaggacagaaccacaggcacacactgagggggcagtgtggctccctgcctgtcccatccccatgccccgtccgcggggctgtggctgctgctgtgcatgtccctgcgatgggagtcttgtctcccagcctgtcagtttcctccccagggcagagctccccttcctgcaagagtctgggaggcggtgcaggctgtcctggctgctctggggaagccgagggacagccataacacccccgggacagtaggtctgggcggcaccactgggaactctggacttgagtgtgtttgcctcttccttgggtatgaatgtgtgagttcacccagaggcctgctctcctcacacattgtgtggtttggggttaatgatggagggagacacctcctcatagacggcaggtgcccacctttcagggagtctcccagcatgggcggatgccgggcatgagctgctgtaaactatttgtggctgtgctgcttgagtgacgtctctgtcgtgtgggtgccaagtgcttgtgtagaaactgtgttctgagcccccttttctggacaccaactgtgtcctgtgaatgtatcgctactgtgagctgttcccgcctagccagggccatgtcttaggtgcagctgtgccacgggtcagctgagccacagtcccagaaccaagctctcggtgtctcgggccaccatccgcccacctcgggctgaccccacctcctccatggacagtgtgagccccgggccgtgcatcctgctcagtgtggcgtcagtgtcggggctgagccccttgagctgcttcagtgaatgtacagtgcccggcacgagctgaacctcatgtgttccactcccaataaaaggttgacaggggcttctccttctctgg

SEQ ID NO: 9258 - DNA, 809 bp, Homo sapiens
  source 1..809: mol_type = unassigned DNA
gtggggtcgtatcccgcgggtggaggccggggtggcgccggccggggcgggggagcccaaaagaccggctgccgcctgctccccggaaaagggcactcgtctccgtgggtgtggcggagcgcgcggtgcatgccgcagcacggtccttggcaaacaaggatgagaaaaatatccaaccacgggagcctgcgggtggcgaaggtggcataccccctggggctgtgtgtgggcgtgttcatctatgttgcctacatcaagtggcaccgggccaccgccacccaggccttcttcagcatcaccagggcagccccgggggcccggtggggtcagcaggcccacagccccctggggacagctgcagacgggcacgaggtcttctacgggatcatgtttgatgcaggaagcactggcacccgagtacacgtcttccagttcacccggccccccagagaaactcccacgttaacccacgaaaccttcaaagcactgaagccaggtctttctgcctatgctgatgatgttgaaaaggtgaaaaaagtatttaaagcatcgcctttccttgtaggggatgactgtgtttccatcatgaacggaacagatgaaggcgtttcggcgtggatcaccatcaacttcctgacaggcagcttgaaaactccaggagggagcagcgtgggcatgctggacttgggcggaggatccactcagatcgccttcctgccacgcgtggagggcaccctgcaggcctccccacccggctacctgacggcactgcggatgtttaacaggacctacaagctctattcctacag

SEQ ID NO: 9259 - DNA, 656 bp, Homo sapiens
  source 1..656: mol_type = unassigned DNA
caaaagaccggctgccgcctgctccccggaaaagggcactcgtctccgtgggtgtggcggagcgcgcggtgcatgcagccgcagcacggtccttggcaaacaaggatgagaaaaatatccaaccacgggagcctgcgggtggcgaaggtggcataccccctggggctgtgtgtgggcgtgttcatctatgttgcctacatcaagtggcaccgggccaccgccacccaggccttcttcagcatcaccagggcagccccgggggcccggtggggtcagcaggcccacagccccctggggacagctgcagacgggcacgaggtcttctacgggatcatgtttgatgcaggaagcactggcacccgagtacacgtcttccagttcacccggccccccagagaaactcccacgttaacccacgaaaccttcaaagcactgaagccaggtctttctgcctatgctgatgatgttgaaaaggtgaaaaaagtatttaaagcatcgcctttccttgtaggggatgactgtgtttccatcatgaacggaacagatgaaggcgtttcggcgtggatcaccatcaacttcctgacaggcagcttgaaaactccaggagggagcagcgtgggcatgctggacttgggcggaggatccactcagatcgc

SEQ ID NO: 9260 - DNA, 945 bp, Homo sapiens
  source 1..945: mol_type = unassigned DNA
cgtgggtgtggcggagcgcgcggtgcatggaatgggctatgtgaatgaaaaaaggtatccgttatgaaacttccagaaaaacgagctacatttttcagcagccgcagcacggtccttggcaaacaaggatgagaaaaatatccaaccacgggagcctgcgggtggcgaaggtggcataccccctggggctgtgtgtgggcgtgttcatctatgttgcctacatcaagtggcaccgggccaccgccacccaggccttcttcagcatcaccagggcagccccgggggcccggtggggtcagcaggcccacagccccctggggacagctgcagacgggcacgaggtcttctacgggatcatgtttgatgcaggaagcactggcacccgagtacacgtcttccagttcacccggccccccagagaaactcccacgttaacccacgaaaccttcaaagcactgaagccaggtctttctgcctatgctgatgatgttgaaaaggtgaaaaaagtatttaaagcatcgcctttccttgtaggggatgactgtgtttccatcatgaacggaacagatgaaggcgtttcggcgtggatcaccatcaacttcctgacaggcagcttgaaaactccaggagggagcagcgtgggcatgctggacttgggcggaggatccactcagatcgccttcctgccacgcgtggagggcaccctgcaggcctccccacccggctacctgacggcactgcggatgtttaacaggacctacaagctctattcctacagctacctcgggctcgggctgatgtcggcacgcctggcgatcctgggcggcgtggaggggcagcctgctaaggatggaaaggagttggtcagcccttgcttgtctcccagtttcaaaggagagtgggaacacgcagaagtcacgtacagggtttcagggcagaaagcag

SEQ ID NO: 9261 - DNA, 451 bp, Homo sapiens
  source 1..451: mol_type = unassigned DNA
ggccggggcgggggagcccaaaagaccggctgccgcctgctccccggaaaagggcactcgtctccgtgggtgtggcggagcgcgcggtgcatgaaactcccacgttaacccacgaaaccttcaaagcactgaagccaggtctttctgcctatgctgatgatgttgaaaaggtgaaaaaagtatttaaagcatcgcctttccttgtaggggatgactgtgtttccatcatgaacggaacagatgaaggcgtttcggcgtggatcaccatcaacttcctgacaggcagcttgaaaactccaggagggagcagcgtgggcatgctggacttgggcggaggatccactcagatcgccttcctgccacgcgtggagggcaccctgcaggcctccccacccggctacctgacggcactgcggatgtttaacaggacctacaagctctattcctacag

SEQ ID NO: 9262 - DNA, 2654 bp, Homo sapiens
  source 1..2654: mol_type = unassigned DNA
ggaggccggggtggcgccggccggggcgggggagcccaaaagaccggctgccgcctgctccccggaaaagggcactcgtctccgtgggtgtggcggagcgcgcggtgcatggaatgggctatgtgaatgaaaaaaggtatccgttatgaaacttccagaaaaacgagctacatttttcagcagccgcagcacggtccttggcaaacaaggatgagaaaaatatccaaccacgggagcctgcgggtggcgaaggtggcataccccctggggctgtgtgtgggcgtgttcatctatgttgcctacatcaagtggcaccgggccaccgccacccaggccttcttcagcatcaccagggcagccccgggggcccggtggggtcagcaggcccacagccccctggggacagctgcagacgggcacgaggtcttctacgggatcatgtttgatgcaggaagcactggcacccgagtacacgtcttccagttcacccggccccccagagaaactcccacgttaacccacgaaaccttcaaagcactgaagccaggtctttctgcctatgctgatgatgttgaaaagagcgctcagggaatccgggaactactggatgttgctaaacaggacattccgttcgacttctggaaggccacccctctggtcctcaaggccacagctggcttacgcctgttacctggagaaaaggcccagaagttactgcagaaggtgaaaaaagtatttaaagcatcgcctttccttgtaggggatgactgtgtttccatcatgaacggaacagatgaaggcgtttcggcgtggatcaccatcaacttcctgacaggcagcttgaaaactccaggagggagcagcgtgggcatgctggacttgggcggaggatccactcagatcgccttcctgccacgcgtggagggcaccctgcaggcctccccacccggctacctgacggcactgcggatgtttaacaggacctacaagctctattcctacagctacctcgggctcgggctgatgtcggcacgcctggcgatcctgggcggcgtggaggggcagcctgcggcaagcctgcacgagctgtgtgctgccagagtgtcagaggtccttcaaaacagagtgcacaggacggaggaagtgaagcatgtggacttctatgctttctcctactattacgaccttgcagctggtgtgggcctcatagatgcggagaagggaggcagcctggtggtgggggacttcgagatcgcagccaagtacggtgggagtcacctggagcgtgaagggacgtgtctcatccccagtgtgtcggaccctggagacacagccgcagagcagccccttctcatgcatggacctcacctacgtcagcctgctactccaggagttcggctttcccaggagcaaagtgctgaagctcactcggaaaattgacaatgttgagaccagctgggctctgggggccatttttcattacatcgactccctgaacagacagaagagtccagcctcatagtggccgagccatccctgtccccgtcagcagtgtctgtgtgtctgcataaaccctcctgtcctggacgtgacttcatcctgaggagccacagcacaggccgtgctggcactttctgcacactggctctgggacttgcagaaggcctggtgctgccctggcatcagcctcttccagtcacatctggccagagggctgtctggacctgggccctgctcaatgccacctgtctgcctgggctccaagtgggcaggaccaggacagaaccacaggcacacactgagggggcagtgtggctccctgcctgtcccatccccatgccccgtccgcggggctgtggctgctgctgtgcatgtccctgcgatgggagtcttgtctcccagcctgtcagtttcctccccagggcagagctccccttcctgcaagagtctgggaggcggtgcaggctgtcctggctgctctggggaagccgagggacagccataacacccccgggacagtaggtctgggcggcaccactgggaactctggacttgagtgtgtttgcctcttccttgggtatgaatgtgtgagttcacccagaggcctgctctcctcacacattgtgtggtttggggttaatgatggagggagacacctcctcatagacggcaggtgcccacctttcagggagtctcccagcatgggcggatgccgggcatgagctgctgtaaactatttgtggctgtgctgcttgagtgacgtctctgtcgtgtgggtgccaagtgcttgtgtagaaactgtgttctgagcccccttttctggacaccaactgtgtcctgtgaatgtatcgctactgtgagctgttcccgcctagccagggccatgtcttaggtgcagctgtgccacgggtcagctgagccacagtcccagaaccaagctctcggtgtctcgggccaccatccgcccacctcgggctgaccccacctcctccatggacagtgtgagccccgggccgtgcatcctgctcagtgtggcgtcagtgtcggggctgagccccttgagctgcttcagtgaatgtacagtgcccggcacgagctgaacctcatgtgttccactcccaataaaaggttgacaggggcttctccttctctgg

SEQ ID NO: 9263 - DNA, 940 bp, Homo sapiens
  source 1..940: mol_type = unassigned DNA
ggaatcgtggggtcgtatcccgcgggtggaggccggggtggcgccggccggggcgggggagcccaaaagaccggctgccgcctgctccccggaaaagggcactcgtctccgtgggtgtggcggagcgcgcggtgcatgaaactcccacgttaacccacgaaaccttcaaagcactgaagccaggtctttctgcctatgctgatgatgttgaaaagagcgctcagggaatccgggaactactggatgttgctaaacaggacattccgttcgacttctggaaggccacccctctggtcctcaaggccacagctggcttacgcctgttacctggagaaaaggcccagaagttactgcagaaggtgaaaaaagtatttaaagcatcgcctttccttgtaggggatgactgtgtttccatcatgaacggaacagatgaaggcgtttcggcgtggatcaccatcaacttcctgacaggcagcttgaaaactccaggagggagcagcgtgggcatgctggacttgggcggaggatccactcagatcgccttcctgccacgcgtggagggcaccctgcaggcctccccacccggctacctgacggcactgcggatgtttaacaggacctacaagctctattcctacagctacctcgggctcgggctgatgtcggcacgcctggcgatcctgggcggcgtggaggggcagcctgctaaggatggaaaggagttggtcagcccttgcttgtctcccagtttcaaaggagagtgggaacacgcagaagtcacgtacagggtttcagggcagaaagcagcggcaagcctgcacgagctgtgtgctgccagagtgtcagaggtccttcaaaacagagtgcacaggacggaggaagtgaagcatgtggacttctatgctttctcctactattacgaccttgcagctggtgtggg

SEQ ID NO: 9264 - DNA, 878 bp, Homo sapiens
  source 1..878: mol_type = unassigned DNA
ccaaaagaccggctgccgcctgctccccggaaaagggcactcgtctccgtgggtgtggcggagcgcgcggtgcatgcccgcttttgcggacccgcccccagtctgcgtcagggacagacccctccgccctggatgagcccggcggggaagcttcgcgtagcagtttctgggaaacagcgtgcatggcaggcatttgcattcatgacccttccgtgtacttgaactgaaaacctgaagaaactggccaacagattaggcagccatcaatccacatcagatggcccctgtatttccaagaggaatgggctatgtgaatgaaaaaaggtatccgttatgaaacttccagaaaaacgagctacatttttcagccgcagcacggtccttggcaaacaaggatgagaaaaatatccaaccacgggagcctgcgggtggcgaaggtggcataccccctggggctgtgtgtgggcgtgttcatctatgttgcctacatcaagtggcaccgggccaccgccacccaggccttcttcagcatcaccagggcagccccgggggcccggtggggtcagcaggcccacagccccctggggacagctgcagacgggcacgaggtcttctacgggatcatgtttgatgcaggaagcactggcacccgagtacacgtcttccagttcacccggccccccagagaaactcccacgttaacccacgaaaccttcaaagcactgaagccaggtctttctgcctatgctgatgatgttgaaaagagcgctcagggaatccgggaactactggatgttgctaaacaggacattccgttcgacttctggaaggccacccctctggtcctcaaggccacagctggcttacgcctgttacct

SEQ ID NO: 9265 - DNA, 1028 bp, Homo sapiens
  source 1..1028: mol_type = unassigned DNA
ctagggaatcgtggggtcgtatcccgcgggtggaggccggggtggcgccggccggggcgggggagcccaaaagaccggctgccgcctgctccccggaaaagggcactcgtctccgtgggtgtggcggagcgcgcggtgcatgccgcagcacggtccttggcaaacaaggatgagaaaaatatccaaccacgggagcctgcgggtggcgaaggtggcataccccctggggctgtgtgtgggcgtgttcatctatgttgcctacatcaagtggcaccgggccaccgccacccaggccttcttcagcatcaccagggcagccccgggggcccggtggggtcagcaggcccacagccccctggggacagctgcagacgggcacgaggtcttctacgggatcatgtttgatgcaggaagcactggcacccgagtacacgtcttccagttcacccggccccccagagaaactcccacgttaacccacgaaaccttcaaagcactgaagccaggtctttctgcctatgctgatgatgttgaaaagagcgctcagggaatccgggaactactggatgttgctaaacaggacattccgttcgacttctggaaggccacccctctggtcctcaaggccacagctggcttacgcctgttacctggagaaaaggcccagaagttactgcagaaggtgaaaaaagtatttaaagcatcgcctttccttgtaggggatgactgtgtttccatcatgaacggaacagatgaaggcgtttcggcgtggatcaccatcaacttcctgacaggcagcttgaaaactccaggagggagcagcgtgggcatgctggacttgggcggaggatccactcagatcgccttcctgccacgcgtggagggcaccctgcaggcctccccacccggctacctgacggcactgcggatgtttaacaggacctacaagctctattcctacagctacctcgggctcgggctgatgtcggcacgcctggcgatcctgggcggcgtggaggggcagcctg

SEQ ID NO: 9266 - DNA, 932 bp, Homo sapiens
  source 1..932: mol_type = unassigned DNA
caggaagcactggcacccgagtacacgtcttccagttcacccggccccccagagaaactcccacgttaacccacgaaaccttcaaagcactgaagccaggtctttctgcctatgctgatgatgttgaaaagagcgctcagggaatccgggaactactggatgttgctaaacaggacattccgttcgacttctggaaggccacccctctggtcctcaaggccacagctggcttacgcctgttacctggagaaaaggcccagaagttactgcagaaggtgaaaaaagtatttaaagcatcgcctttccttgtaggggatgactgtgtttccatcatgaacggaacagatgaaggcgtttcggcgtggatcaccatcaacttcctgacaggcagcttgaaaactccaggagggagcagcgtgggcatgctggacttgggcggaggatccactcagatcgccttcctgccacgcgtggagggcaccctgcaggcctccccacccggctacctgacggcactgcggatgtttaacaggacctacaagctctattcctacagctacctcgggctcgggctgatgtcggcacgcctggcgatcctgggcggcgtggaggggcagcctgcggcaagcctgcacgagctgtgtgctgccagagtgtcagaggtccttcaaaacagagtgcacaggacggaggaagtgaagcatgtggacttctatgctttctcctactattacgaccttgcagctggtgtgggcctcatagatgcggagaagggaggcagcctggtggtgggggacttcgagatcgcagccaagtacgtgtgtcggaccctggagacacagccgcagagcagccccttctcatgcatggacctcacctacgtcagcctgctactccaggagttcggctttcccaggagcaaagtgctgaag

SEQ ID NO: 9267 - DNA, 2371 bp, Homo sapiens
  source 1..2371: mol_type = unassigned DNA
gtgcatggggcggagcccaggccctagggaatcgtggggtcgtatcccgcgggtggaggccggggtggcgccggccggggcgggggagcccaaaagaccggctgccgcctgctccccggaaaagggcactcgtctccgtgggtgtggcggagcgcgcggtgcatgaaactcccacgttaacccacgaaaccttcaaagcactgaagccaggtctttctgcctatgctgatgatgttgaaaagagcgctcagggaatccgggaactactggatgttgctaaacaggacattccgttcgacttctggaaggccacccctctggtcctcaaggccacagctggcttacgcctgttacctggagaaaaggcccagaagttactgcagaaggtgaaaaaagtatttaaagcatcgcctttccttgtaggggatgactgtgtttccatcatgaacggaacagatgaaggcgtttcggcgtggatcaccatcaacttcctgacaggcagcttgaaaactccaggagggagcagcgtgggcatgctggacttgggcggaggatccactcagatcgccttcctgccacgcgtggagggcaccctgcaggcctccccacccggctacctgacggcactgcggatgtttaacaggacctacaagctctattcctacagctacctcgggctcgggctgatgtcggcacgcctggcgatcctgggcggcgtggaggggcagcctgctaaggatggaaaggagttggtcagcccttgcttgtctcccagtttcaaaggagagtgggaacacgcagaagtcacgtacagggtttcagggcagaaagcagcggcaagcctgcacgagctgtgtgctgccagagtgtcagaggtccttcaaaacagagtgcacaggacggaggaagtgaagcatgtggacttctatgctttctcctactattacgaccttgcagctggtgtgggcctcatagatgcggagaagggaggcagcctggtggtgggggacttcgagatcgcagccaagtacgtgtgtcggaccctggagacacagccgcagagcagccccttctcatgcatggacctcacctacgtcagcctgctactccaggagttcggctttcccaggagcaaagtgctgaagctcactcggaaaattgacaatgttgagaccagctgggctctgggggccatttttcattacatcgactccctgaacagacagaagagtccagcctcatagtggccgagccatccctgtccccgtcagcagtgtctgtgtgtctgcataaaccctcctgtcctggacgtgacttcatcctgaggagccacagcacaggccgtgctggcactttctgcacactggctctgggacttgcagaaggcctggtgctgccctggcatcagcctcttccagtcacatctggccagagggctgtctggacctgggccctgctcaatgccacctgtctgcctgggctccaagtgggcaggaccaggacagaaccacaggcacacactgagggggcagtgtggctccctgcctgtcccatccccatgccccgtccgcggggctgtggctgctgctgtgcatgtccctgcgatgggagtcttgtctcccagcctgtcagtttcctccccagggcagagctccccttcctgcaagagtctgggaggcggtgcaggctgtcctggctgctctggggaagccgagggacagccataacacccccgggacagtaggtctgggcggcaccactgggaactctggacttgagtgtgtttgcctcttccttgggtatgaatgtgtgagttcacccagaggcctgctctcctcacacattgtgtggtttggggttaatgatggagggagacacctcctcatagacggcaggtgcccacctttcagggagtctcccagcatgggcggatgccgggcatgagctgctgtaaactatttgtggctgtgctgcttgagtgacgtctctgtcgtgtgggtgccaagtgcttgtgtagaaactgtgttctgagcccccttttctggacaccaactgtgtcctgtgaatgtatcgctactgtgagctgttcccgcctagccagggccatgtcttaggtgcagctgtgccacgggtcagctgagccacagtcccagaaccaagctctcggtgtctcgggccaccatccgcccacctcgggctgaccccacctcctccatggacagtgtgagccccgggccgtgcatcctgctcagtgtggcgtcagtgtcggggctgagccccttgagctgcttcagtgaatgtacagtgcccggcacgagctgaacctcatgtgttccactcccaataaaaggttgacaggggcttctccttc

SEQ ID NO: 9268 - DNA, 7442 bp, Homo sapiens
  source 1..7442: mol_type = unassigned DNA
ccggagcggccggggccacgatggagcgcgacggctgcgcggggggcgggagccgcggcggcgagggcgggcgcgctccccgggagggcccggcggggaacggccgcgatcggggccgcagccacgctgccgaggcgcccggggacccgcaggcggccgcgtccttgctggcccctatggacgtgggggaggagccgctggagaaggcggcgcgcgcccgcactgccaaggaccccaacacctataaagtactctcgctggtattgtcagtatgtgtgttaacaacaatacttggttgtatatttgggttgaaaccaagctgtgccaaagaagttaaaagttgcaaaggtcgctgtttcgagagaacatttgggaactgtcgctgtgatgctgcctgtgttgagcttggaaactgctgtttagattaccaggagacgtgcatagaaccagaacatatatggacttgcaacaaattcaggtgtggtgagaaaaggttgaccagaagcctctgtgcctgttcagatgactgcaaggacaagggcgactgctgcatcaactacagttctgtgtgtcaaggtgagaaaagttgggtagaagaaccatgtgagagcattaatgagccacagtgcccagcagggtttgaaacgcctcctaccctcttattttctttggatggattcagggcagaatatttacacacttggggtggacttcttcctgttattagcaaactaaaaaaatgtggaacatatactaaaaacatgagaccggtatatccaacaaaaactttccccaatcactacagcattgtcaccggattgtatccagaatctcatggcataatcgacaataaaatgtatgatcccaaaatgaatgcttccttttcacttaaaagtaaagagaaatttaatcctgagtggtacaaaggagaaccaatttgggtcacagctaagtatcaaggcctcaagtctggcacatttttctggccaggatcagatgtggaaattaacggaattttcccagacatctataaaatgtataatggttcagtaccatttgaagaaaggattttagctgttcttcagtggctacagcttcctaaagatgaaagaccacacttttacactctgtatttagaagaaccagattcttcaggtcattcatatggaccagtcagcagtgaagtcatcaaagccttgcagagggttgatggtatggttggtatgctgatggatggtctgaaagagctgaacttgcacagatgcctgaacctcatccttatttcagatcatggcatggaacaaggcagttgtaagaaatacatatatctgaataaatatttgggggatgttaaaaatattaaagttatctatggacctgcagctcgattgagaccctctgatgtcccagataaatactattcatttaactatgaaggcattgcccgaaatctttcttgccgggaaccaaaccagcacttcaaaccttacctgaaacatttcttacctaagcgtttgcactttgctaagagtgatagaattgagcccttgacattctatttggaccctcagtggcaacttgcattgaatccctcagaaaggaaatattgtggaagtggatttcatggctctgacaatgtattttcaaatatgcaagccctctttgttggctatggacctggattcaagcatggcattgaggctgacacctttgaaaacattgaagtctataacttaatgtgtgatttactgaatttgacaccggctcctaataacggaactcatggaagtcttaaccaccttctaaagaatcctgtttatacgccaaagcatcccaaagaagtgcaccccctggtacagtgccccttcacaagaaaccccagagataaccttggctgctcatgtaacccttcgattttgccgattgaggattttcaaacacagttcaatctgactgtggcagaagagaagattattaagcatgaaactttaccctatggaagacctagagttctccagaaggaaaacaccatctgtcttctttcccagcaccagtttatgagtggatacagccaagacatcttaatgcccctttggacatcctataccgtggacagaaatgacagtttctctacggaagacttctccaactgtctgtaccaggactttagaattcctcttagtcctgtccataaatgttcattttataaaaataacaccaaagtgagttacgggttcctctccccaccacaactaaataaaaattcaagtggaatatattctgaagctttgcttactacaaatatagtgccaatgtaccagagttttcaagttatatggcgctactttcatgacaccctactgcgaaagtatgctgaagaaagaaatggtgtcaatgtcgtcagtggtcctgtgtttgactttgattatgatggacgttgtgattccttagagaatctgaggcaaaaaagaagagtcatccgtaaccaagaaattttgattccaactcacttctttattgtgctaacaagctgtaaagatacatctcagacgcctttgcactgtgaaaacctagacaccttagctttcattttgcctcacaggactgataacagcgagagctgtgtgcatgggaagcatgactcctcatgggttgaagaattgttaatgttacacagagcacggatcacagatgttgagcacatcactggactcagcttctatcaacaaagaaaagagccagtttcagacattttaaagttgaaaacacatttgccaacctttagccaagaagactgatatgttttttatccccaaacaccatgaatctttttgagagaaccttatattttatatagtcctctagctacactattgcattgttcagaaactgtcgaccagagttagaacggagccctcggtgatgcggacatctcagggaaacttgcgtactcagcacagcagtggagagtgttcctgttgaatcttgcacatatttgaatgtgtaagcattgtatacattgatcaagttcgggggaataaagacagaccacacctaaaactgcctttctgcttctcttaaaggagaagtagctgtgaacattgtctggataccagatatttgaatctttcttactattggtaataaaccttgatggcattgggcaaacagtagacttatagtagggttggggtagcccatgttatgtgactatctttatgagaattttaaagtggttctggatatcttttaacttggagtttcatttcttttcattgtaatcaaaaaaaaaattaacagaagccaaaatacttctgagaccttgtttcaatctttgctgtatatcccctcaaaatccaagttattaatcttatgtgttttctttttaattttttgattggatttctttagatttaatggttcaaatgagttcaactttgagggacgatctttgaatatacttacctattataaaatcttactttgtatttgtatttaaaaaagaaaaatattcctatcctgctcactggtaattaacataggtttaaaatggcttcaaatgtggccctatagacggttaaaattgtaccttatcttggcaaaacttcagagcaccagtcagtgcatgcaaggtgccattttttattgagatgcttagaatgtttctttctgtgcacaagacttaccctaccagcagcagagccattctctgttgagtggttcattttgaagttccacagattgaagagaacatgccaccaatcacctcacatcttcttggtggacatgataaatgacacaatgaacttgatttctttactaccttgactgtagctttttatccctacctgtgaaccttcaaagactgcattaacttttaggctacataggtccaattgaggtataatatcagtacaccaaagatttttatatgtccttcgtgtgaccattcttcaacggcctaagggccagctgcaaagacttttggaaaatacaatttacaactcaaaattatttaataatttaggaagttgctttttttttttttttttttcagtcctgcagtttcctgaagctctgtatatgatatttttttcagcctgcttctctctgttgttcagattaggtaattttattcttctgtctcgaagctcactgattctttattctgtctaatctgttctgctgttgagcccatttattcctgatttttatattttagttattgtatgttttatttctaaaatttccattcagtttttctttatatcttctatttgctgagaatttctgtctctttgctgagactttctacgttttcatttgtttcaagtgcatttatacttgcttgttgaagaatttttatgatggctgctgtaaaatccttatcagataattccaacatctgtcacctcattgtttgcatctactgatggtcttttttccattcggaaacattttcctgtttcttggtgtgtggaatgattttttattgaaacctggatatttttaggtattatgttatgagactatgggtcttatttaaaccttctgctttagccaactttctcagataccaccacagcaggggaattgggagcactgcttcattattaccaggtgtggctaggagtccaggttccccagtcagcctccctttatactgagtaacagggtcccctcattactactgggcaaggtgagaattcagtttcccattaggtctttattgattcttccctggctggaatgtgcagcggcaccttttggtgcaccctgggaatctccactaatgctatgggacagagtgaccaggaagagcttcattacaccaggtgggaatgaaattcccagtagcctacacagccttctccgacaccactctggagttgtattcttccagcacacaaacatacacaatttaactcaaagcatcttagcagagcttaattaaatggatagatgcctgttccctttgctggataccaagaatacaaaagtcagggagttggggcacctctttacagcttggtgagagtgtaagtctggactccccactcagcatttgctggtatgggtggggccatggtgtttttccatggtgtttggttggagtacagccttttttacccttgcttggctacccttttctggtcctttggcaggagagagcaggactctcttagggcttttttttcccctgcatttattgacatttccaggttgctgactttttcagctccaagttggaaatatatgagctgaaaagaaaatgtagggaactcatcacagtgttgttacttgggccccaatgttcctagcctattttctgtctactattcagagtcttgctgtgttttaatataatatccaggatttttatatgcatttagcagaaggatgtctactctgcctttgtagaagtgtctcactgatttttacatatttttccagcacacaaacatacacaatttaactcaaagcatcttagcagagcttaattaaatggatagatgtctgttccctttgctggacgccaagaatacaaaaaagaacaagtgacaattttctctgtcttagggagaagagacagcagaagtgtaaatgatccctaaagagtgatagatgttatcatgaagccacaggaggggtgccaggctgcacaaaagagacactggatgcttcttggtagtagaggcagtggcttcccagccttggggctaaggcttgtagggtgaattggaacttttcagatgagcaaggcaaagaagggaccttctaacattccttggatggaacatttttgacattttcccatttacagctacttatattttctacaagtgtcactgtgaccaacttatgtacacatactttttcttgcttagttataataatctgttcttaaagaaaatgtcagtctctacattctatgctgactgttaaggaaagagcacccacatctgctcctacttagctttttttctgtggttcttacacagtattcctttttttcttttcttgaaagagactcctcctttcttttcttttcttgaaagagttttaaacagataagatggcaaaagtgactgatctctactcccccagtttgaatggtaaatttgaatggtaaattcccatgaacatatatggaaatgtctttatcctactttctccaataaaggctgttcttagcttttcaaatgcaaagtgaaacctttatttatcttgatttcttttttttttttttttttttttttttttttgagatgctctgtcacccaggctggagtgcagtggcaagatcttggctcactgcaagctccgcctcccaggttcacgccattctcctggctcagcctcccgagtaactgggactacaggcacctgccgtcacgcctggctaattttttgtatttttagtagagaatggagtttcaccgtgttagccaggatggtctcgatctcctgaccttgtgatctgcccgcctcggcctcccaaagtgctgggattacaggctcgagccactgcctccagcctatcctgatttctactgtcatgcctcacatcagtccttttttttttttttgagacagagtctcgctctgtggcccaggctagactgcagtggcatgatctcggctcactgcaacctccacctccggggttctagcaattctcctgcctcagcctcctgagtagctgggattataggcgcatgccacacctggctttttgtattttagtggagatggggtttcactgtgttgctcaggctggtcttgatctcctgagctcagacaatccccccgccttggcctcccaaagtgctaggattataggcgagagctgctgtgtgcttcttaagtgaggtaagtaacttccatagaaaatttccatcagttcattcatgaaagaacaaagaacctggcaaaacttaaaaaaacgtttccaagaatcagataaaagaggacaaaccttagggagaagaaggcagctgctcatttccagcaggggaagtagctgcatagagtacaaggactggtaggcctgttggctgttcctgtttaaggagacaagatgggcatggaacagggaccaccccctcctctgggagaagctgttacccccttcacttttcctcctctgtcattacccacaatcactctccttctttgcgctatggtaggtgtttacccatcataggaatgggcatttgaactttgaaactgaatgtggtgattacacttcatgctgaagcttttcacatgagtgctttcataagcattaagtaaaattttataatgactgcagtccaaggacattttccctggtttttggccagtctaaatattgtaagagagagagaagaaaagtgtacggaatataattgtctctaagctaagaaatgtggatgttcaaataaaacatacgtacagaa

SEQ ID NO: 9269 - DNA, 2651 bp, Homo sapiens
  source 1..2651: mol_type = unassigned DNA
agtgcactccgtgaaggcaaagagaacacgctgcaaaaggctttccaagaatcctcgacatggcaaggaggagctcgttccagtcgtgtcagataatatccctgttcacttttgccgttggagtcaatatctgcttaggattcactgcacatcgaattaagagagcagaaggatgggaggaaggtcctcctacagtgctatcagactccccctggaccaacatctccggatcttgcaagggcaggtgctttgaacttcaagaggctggacctcctgattgtcgctgtgacaacttgtgtaagagctataccagttgctgccatgactttgatgagctgtgtttgaagacagcccgtggctgggagtgtactaaggacagatgtggagaagtcagaaatgaagaaaatgcctgtcactgctcagaggactgcttggccaggggagactgctgtaccaattaccaagtggtttgcaaaggagagtcgcattgggttgatgatgactgtgaggaaataaaggccgcagaatgccctgcagggtttgttcgccctccattaatcatcttctccgtggatggcttccgtgcatcatacatgaagaaaggcagcaaagtcatgcctaatattgaaaaactaaggtcttgtggcacacactctccctacatgaggccggtgtacccaactaaaacctttcctaacttatacactttggccactgggctatatccagaatcacatggaattgttggcaattcaatgtatgatcctgtatttgatgccacttttcatctgcgagggcgagagaaatttaatcatagatggtggggaggtcaaccgctatggattacagccaccaagcaaggggtgaaagctggaacattcttttggtctgttgtcatccctcacgagcggagaatattaaccatattgcagtggctcaccctgccagatcatgagaggccttcggtctatgccttctattctgagcaacctgatttctctggacacaaatatggccctttcggccctgagatgacaaatcctctgagggaaatcgacaaaattgtggggcaattaatggatggactgaaacaactaaaactgcatcggtgtgtcaacgtcatctttgtcggagaccatggaatggaagatgtcacatgtgatagaactgagttcttgagtaattacctaactaatgtggatgatattactttagtgcctggaactctaggaagaattcgatccaaatttagcaacaatgctaaatatgaccccaaagccattattgccaatctcacgtgtaaaaaaccagatcagcactttaagccttacttgaaacagcaccttcccaaacgtttgcactatgccaacaacagaagaattgaggatatccatttattggtggaacgcagatggcatgttgcaaggaaacctttggatgtttataagaaaccatcaggaaaatgctttttccagggagaccacggatttgataacaaggtcaacagcatgcagactgtttttgtaggttatggctcaacatttaagtacaagactaaagtgcctccatttgaaaacattgaactttacaatgttatgtgtgatctcctgggattgaagccagctcctaataatgggacccatggaagtttgaatcatctcctgcgcactaataccttcaggccaaccatgccagaggaagttaccagacccaattatccagggattatgtaccttcagtctgattttgacctgggctgcacttgtgatgataaggtagagccaaagaacaagttggatgaactcaacaaacggcttcatacaaaagggtctacagaagagagacacctcctctatgggcgacctgcagtgctttatcggactagatatgatatcttatatcacactgactttgaaagtggttatagtgaaatattcctaatgccactctggacatcatatactgtttccaaacaggctgaggtttccagcgttcctgaccatctgaccagttgcgtccggcctgatgtccgtgtttctccgagtttcagtcagaactgtttggcctacaaaaatgataagcagatgtcctacggattcctctttcctccttatctgagctcttcaccagaggctaaatatgatgcattccttgtaaccaatatggttccaatgtatcctgctttcaaacgggtctggaattatttccaaagggtattggtgaagaaatatgcttcggaaagaaatggagttaacgtgataagtggaccaatcttcgactatgactatgatggcttacatgacacagaagacaaaataaaacagtacgtggaaggcagttccattcctgttccaactcactactacagcatcatcaccagctgtctggatttcactcagcctgccgacaagtgtgacggccctctctctgtgtcctccttcatcctgcctcaccggcctgacaacgaggagagctgcaatagctcagaggacgaatcaaaatgggtagaagaactcatgaagatgcacacagctagggtgcgtgacattgaacatctcaccagcctggacttcttccgaaagaccagccgcagctacccagaaatcctgacactcaagacatacctgcatacatatgagagcgagatttaa

SEQ ID NO: 9270 - DNA, 3233 bp, Homo sapiens
  source 1..3233: mol_type = unassigned DNA
cgtgaaggcaaagagaacacgctgcaaaaggctttccaagaatcctcgacatggcaaggaggagctcgttccagtcgtgtcagataatatccctgttcacttttgccgttggagtcaatatctgcttaggattcactgcacatcgaattaagagagcagaaggatgggaggaaggtcctcctacagtgctatcagactccccctggaccaacatctccggatcttgcaagggcaggtgctttgaacttcaagaggctggacctcctgattgtcgctgtgacaacttgtgtaagagctataccagttgctgccatgactttgatgagctgtgtttgaagacagcccgtggctgggagtgtactaaggacagatgtggagaagtcagaaatgaagaaaatgcctgtcactgctcagaggactgcttggccaggggagactgctgtaccaattaccaagtggtttgcaaaggagagtcgcattgggttgatgatgactgtgaggaaataaaggccgcagaatgccctgcagggtttgttcgccctccattaatcatcttctccgtggatggcttccgtgcatcatacatgaagaaaggcagcaaagtcatgcctaatattgaaaaactaaggtcttgtggcacacactctccctacatgaggccggtgtacccaactaaaacctttcctaacttatacactttggccactgggctatatccagaatcacatggaattgttggcaattcaatgtatgatcctgtatttgatgccacttttcatctgcgagggcgagagaaatttaatcatagatggtggggaggtcaaccgctatggattacagccaccaagcaaggggtgaaagctggaacattcttttggtctgttgtcatccctcacgagcggagaatattaaccatattgcagtggctcaccctgccagatcatgagaggccttcggtctatgccttctattctgagcaacctgatttctctggacacaaatatggccctttcggccctgaggagagtagttatggctcaccttttactccggctaagagacctaagaggaaagttgcccctaagaggagacaggaaagaccagttgctcctccaaagaaaagaagaagaaaaatacataggatggatcattatgctgcggaaactcgtcaggacaaaatgacaaatcctctgagggaaatcgacaaaattgtggggcaattaatggatggactgaaacaactaaaactgcatcggtgtgtcaacgtcatctttgtcggagaccatggaatggaagatgtcacatgtgatagaactgagttcttgagtaattacctaactaatgtggatgatattactttagtgcctggaactctaggaagaattcgatccaaatttagcaacaatgctaaatatgaccccaaagccattattgccaatctcacgtgtaaaaaaccagatcagcactttaagccttacttgaaacagcaccttcccaaacgtttgcactatgccaacaacagaagaattgaggatatccatttattggtggaacgcagatggcatgttgcaaggaaacctttggatgtttataagaaaccatcaggaaaatgctttttccagggagaccacggatttgataacaaggtcaacagcatgcagactgtttttgtaggttatggctcaacatttaagtacaagactaaagtgcctccatttgaaaacattgaactttacaatgttatgtgtgatctcctgggattgaagccagctcctaataatgggacccatggaagtttgaatcatctcctgcgcactaataccttcaggccaaccatgccagaggaagttaccagacccaattatccagggattatgtaccttcagtctgattttgacctgggctgcacttgtgatgataaggtagagccaaagaacaagttggatgaactcaacaaacggcttcatacaaaagggtctacagaagagagacacctcctctatgggcgacctgcagtgctttatcggactagatatgatatcttatatcacactgactttgaaagtggttatagtgaaatattcctaatgccactctggacatcatatactgtttccaaacaggctgaggtttccagcgttcctgaccatctgaccagttgcgtccggcctgatgtccgtgtttctccgagtttcagtcagaactgtttggcctacaaaaatgataagcagatgtcctacggattcctctttcctccttatctgagctcttcaccagaggctaaatatgatgcattccttgtaaccaatatggttccaatgtatcctgctttcaaacgggtctggaattatttccaaagggtattggtgaagaaatatgcttcggaaagaaatggagttaacgtgataagtggaccaatcttcgactatgactatgatggcttacatgacacagaagacaaaataaaacagtacgtggaaggcagttccattcctgttccaactcactactacagcatcatcaccagctgtctggatttcactcagcctgccgacaagtgtgacggccctctctctgtgtcctccttcatcctgcctcaccggcctgacaacgaggagagctgcaatagctcagaggacgaatcaaaatgggtagaagaactcatgaagatgcacacagctagggtgcgtgacattgaacatctcaccagcctggacttcttccgaaagaccagccgcagctacccagaaatcctgacactcaagacatacctgcatacatatgagagcgagatttaactttctgagcatctgcagtacagtcttatcaactggttgtatatttttatattgtttttgtatttattaatttgaaaccaggacattaaaaatgttagtattttaatcctgtaccaaatctgacatattatgcctgaatgactccactgtttttctctaatgcttgatttaggtagccttgtgttctgagtagagcttgtaataaatactgcagcttgagtttttagtggaagcttctaaatggtgctgcagatttgatatttgcattgaggaaatattaattttccaatgcacagttgccacatttagtcctgtactgtatggaaacactgattttgtaaagttgcctttatttgctgttaactgttaactatgacagatatatttaagccttataaaccaatcttaaacataataaatcacacattcagtttt

SEQ ID NO: 9271 - DNA, 2667 bp, Homo sapiens
  source 1..2667: mol_type = unassigned DNA
atggcaaggaggagctcgttccagtcgtgtcagataatatccctgttcacttttgccgttggagtcaatatctgcttaggattcactgcacatcgaattaagagagcagaaggatgggaggaaggtcctcctacagtgctatcagactccccctggaccaacatctccggatcttgcaagggcaggtgctttgaacttcaagaggctggacctcctgattgtcgctgtgacaacttgtgtaagagctataccagttgctgccatgactttgatgagctgtgtttgaagacagcccgtggctgggagtgtactaaggacagatgtggagaagtcagaaatgaagaaaatgcctgtcactgctcagaggactgcttggccaggggagactgctgtaccaattaccaagtggtttgcaaaggagagtcgcattgggttgatgatgactgtgaggaaataaaggccgcagaatgccctgcagggtttgttcgccctccattaatcatcttctccgtggatggcttccgtgcatcatacatgaagaaaggcagcaaagtcatgcctaatattgaaaaactaaggtcttgtggcacacactctccctacatgaggccggtgtacccaactaaaacctttcctaacttatacactttggccactgggctatatccagaatcacatggaattgttggcaattcaatgtatgatcctgtatttgatgccacttttcatctgcgagggcgagagaaatttaatcatagatggtggggaggtcaaccgctatggattacagccaccaagcaaggggtgaaagctggaacattcttttggtctgttgtcatccctcacgagcggagaatattaaccatattgcagtggctcaccctgccagatcatgagaggccttcggtctatgccttctattctgagcaacctgatttctctggacacaaatatggccctttcggccctgagatgacaaatcctctgagggaaatcgacaaaattgtggggcaattaatggatggactgaaacaactaaaactgcatcggtgtgtcaacgtcatctttgtcggagaccatggaatggaagatgtcacatgtgatagaactgagttcttgagtaattacctaactaatgtggatgatattactttagtgcctggaactctaggaagaattcgatccaaatttagcaacaatgctaaatatgaccccaaagccattattgccaatctcacgtgtaaaaaaccagatcagcactttaagccttacttgaaacagcaccttcccaaacgtttgcactatgccaacaacagaagaattgaggatatccatttattggtggaacgcagatggcatgttgcaaggaaacctttggatgtttataagaaaccatcaggaaaatgctttttccagggagaccacggatttgataacaaggtcaacagcatgcagactgtttttgtaggttatggctcaacatttaagtacaagactaaagtgcctccatttgaaaacattgaactttacaatgttatgtgtgatctcctgggattgaagccagctcctaataatgggacccatggaagtttgaatcatctcctgcgcactaataccttcaggccaaccatgccagaggaagttaccagacccaattatccagggattatgtaccttcagtctgattttgacctgggctgcacttgtgatgataaggtagagccaaagaacaagttggatgaactcaacaaacggcttcatacaaaagggtctacagaagctgaaaccaggaaattcagaggcagcagaaatgaaaacaaggaaaacattaatggaaattttgaacctagaaaagagagacacctcctctatgggcgacctgcagtgctttatcggactagatatgatatcttatatcacactgactttgaaagtggttatagtgaaatattcctaatgccactctggacatcatatactgtttccaaacaggctgaggtttccagcgttcctgaccatctgaccagttgcgtccggcctgatgtccgtgtttctccgagtttcagtcagaactgtttggcctacaaaaatgataagcagatgtcctacggattcctctttcctccttatctgagctcttcaccagaggctaaatatgatgcattccttgtaaccaatatggttccaatgtatcctgctttcaaacgggtctggaattatttccaaagggtattggtgaagaaatatgcttcggaaagaaatggagttaacgtgataagtggaccaatcttcgactatgactatgatggcttacatgacacagaagacaaaataaaacagtacgtggaaggcagttccattcctgttccaactcactactacagcatcatcaccagctgtctggatttcactcagcctgccgacaagtgtgacggccctctctctgtgtcctccttcatcctgcctcaccggcctgacaacgaggagagctgcaatagctcagaggacgaatcaaaatgggtagaagaactcatgaagatgcacacagctagggtgcgtgacattgaacatctcaccagcctggacttcttccgaaagaccagccgcagctacccagaaatcctgacactcaagacatacctgcatacatatgagagcgagatttaa

SEQ ID NO: 9272 - DNA, 3154 bp, Homo sapiens
  source 1..3154: mol_type = unassigned DNA
atacagtttctctttgccagactagactaaagaaggagcactaatttattctgataaaacaggtctatgcagctaccaggacaatggaatctacgttgactttagcaacggaacaacctgttaagaagaacactcttaagaaatataaaatagcttgcattgttcttcttgctttgctggtgatcatgtcacttggattaggcctggggcttggactcaggaaactggaaaagcaaggcagctgcaggaagaagtgctttgatgcatcatttagaggactggagaactgccggtgtgatgtggcatgtaaagaccgaggtgattgctgctgggattttgaagacacctgtgtggaatcaactcgaatatggatgtgcaataaatttcgttgtggagagaccagattagaggccagcctttgctcttgttcagatgactgtttgcagaggaaagattgctgtgctgactataagagtgtttgccaaggagaaacctcatggctggaagaaaactgtgacacagcccagcagtctcagtgcccagaagggtttgacctgccaccagttatcttgttttctatggatggatttagagctgaatatttatacacatgggatactttaatgccaaatatcaataaactgaaaacatgtggaattcattcaaaatacatgagagctatgtatcctaccaaaaccttcccaaatcattacaccattgtcacgggcttgtatccagagtcacatggcatcattgacaataatatgtatgatgtaaatctcaacaagaatttttcactttcttcaaaggaacaaaataatccagcctggtggcatgggcaaccaatgtggctgacagcaatgtatcaaggtttaaaagccgctacctacttttggcccggatcagaagtggctataaatggctcctttccttccatatacatgccttacaacggaagtgtcccatttgaagagaggatttctacactgttaaaatggctggacctgcccaaagctgaaagacccaggttttataccatgtattttgaagaacctgattcctctggacatgcaggtggaccagtcagtgccagagtaattaaagccttacaggtagtagatcatgcttttgggatgttgatggaaggcctgaagcagcggaatttgcacaactgtgtcaatatcatccttctggctgaccatggaatggaccagacttattgtaacaagatggaatacatgactgattattttcccagaataaacttcttctacatgtacgaagggcctgccccccgcatccgagctcataatatacctcatgacttttttagttttaattctgaggaaattgttagaaacctcagttgccgaaaacctgatcagcatttcaagccctatttgactcctgatttgccaaagcgactgcactatgccaagaacgtcagaatcgacaaagttcatctctttgtggatcaacagtggctggctgttaggagtaaatcaaatacaaattgtggaggaggcaaccatggttataacaatgagtttaggagcatggaggctatctttctggcacatggacccagttttaaagagaagactgaagttgaaccatttgaaaatattgaagtctataacctaatgtgtgatcttctacgcattcaaccagcaccaaacaatggaacccatggtagtttaaaccatcttctgaaggtgcctttttatgagccatcccatgcagaggaggtgtcaaagttttctgtttgtggctttgctaatccattgcccacagagtctcttgactgtttctgccctcacctacaaaatagtactcagctggaacaagtgaatcagatgctaaatctcacccaagaagaaataacagcaacagtgaaagtaaatttgccatttgggaggcctagggtactgcagaagaacgtggaccactgtctcctttaccacagggaatatgtcagtggatttggaaaagctatgaggatgcccatgtggagttcatacacagtcccccagttgggagacacatcgcctctgcctcccactgtcccagactgtctgcgggctgatgtcagggttcctccttctgagagccaaaaatgttccttctatttagcagacaagaatatcacccacggcttcctctatcctcctgccagcaatagaacatcagatagccaatatgatgctttaattactagcaatttggtacctatgtatgaagaattcagaaaaatgtgggactacttccacagtgttcttcttataaaacatgccacagaaagaaatggagtaaatgtggttagtggaccaatatttgattataattatgatggccattttgatgctccagatgaaattaccaaacatttagccaacactgatgttcccatcccaacacactactttgtggtgctgaccagttgtaaaaacaagagccacacaccggaaaactgccctgggtggctggatgtcctaccctttatcatccctcaccgacctaccaacgtggagagctgtcctgaaggtaaaccagaagctctttgggttgaagaaagatttacagctcacattgcccgggtccgtgatgtagaacttctcactgggcttgacttctatcaggataaagtgcagcctgtctctgaaattttgcaactaaagacatatttaccaacatttgaaaccactatttaacttaataatgtctacttaatatataatttactgtataaagtaattttggcaaaatataagtgatttttttctggagaattgtaaaataaagttttctatttttccttaagtcccctaaaagccataatttttattattcctttttctcttttttcaattctatgaatatgtattattttaaagttatatttttcacacagagatgatgctatattacaccttcccttttttgttggtttcttaaactctaatctcatgacagattataccttccttattacttgttttatcttactcagaatctttgaatatatttttctgcccagaattatctaaacaaaagggagaacaaaagaagtatgtctcacttgggaactgaatcaactctaaatcagttttgtcacaaaactttttgtatttgactggcaatgctgattaaaatt

SEQ ID NO: 9273 - DNA, 2492 bp, Homo sapiens
  source 1..2492: mol_type = unassigned DNA
atggaatctacgttgactttagcaacggaacaacctgttaagaagaacactcttaagaaatataaaatagcttgcattgttcttcttgctttgctggtgatcatgtcacttggattaggcctggggcttggactcaggaaactggaaaagcaaggcagctgcaggaagaagtgctttgatgcatcatttagaggactggagaactgccggtgtgatgtggcatgtaaagaccgaggtgattgctgctgggattttgaagacacctgtgtggaatcaactcgaatatggatgtgcaataaatttcgttgtggagagaccagattagaggccagcctttgctcttgttcagatgactgtttgcagaggaaagattgctgtgctgactataagagtgtttgccaaggagaaacctcatggctggaagaaaactgtgacacagcccagcagtctcagtgcccagaagggtttgacctgccaccagttatcttgttttctatggatggatttagagctgaatatttatacacatgggatactttaatgccaaatatcaataaactgaaaacatgtggaattcattcaaaatacatgagagctatgtatcctaccaaaaccttcccaaatcattacaccattgtcacgggcttgtatccagagtcacatggcatcattgacaataatatgtatgatgtaaatctcaacaagaatttttcactttcttcaaaggaacaaaataatccagcctggtggcatgggcaaccaatgtggctgacagcaatgtatcaaggtttaaaagccgctacctacttttggcccggatcagaagtggctataaatggctcctttccttccatatacatgccttacaacggaagtgtcccatttgaagagaggatttctacactgttaaaatggctggacctgcccaaagctgaaagacccaggttttataccatgtattttgaagaacctgattcctctggacatgcaggtggaccagtcagtgccagagtaattaaagccttacaggtagtagatcatgcttttgggatgttgatggaaggcctgaagcagcggaatttgcacaactgtgtcaatatcatccttctggctgaccatggaatggaccagacttattgtaacaagatggaatacatgactgattattttcccagaataaacttcttctacatgtacgaagggcctgccccccgcatccgagctcataatatacctcatgacttttttagttttaattctgaggaaattgttagaaacctcagttgccgaaaacctgatcagcatttcaagccctatttgactcctgatttgccaaagcgactgcactatgccaagaacgtcagaatcgacaaagttcatctctttgtggatcaacagtggctggctgttaggagtaaatcaaatacaaattgtggaggaggcaaccatggttataacaatgagtttaggagcatggaggctatctttctggcacatggacccagttttaaagagaagactgaagttgaaccatttgaaaatattgaagtctataacctaatgtgtgatcttctacgcattcaaccagcaccaaacaatggaacccatggtagtttaaaccatcttctgaaggtgcctttttatgagccatcccatgcagaggaggtgtcaaagttttctgtttgtggctttgctaatccattgcccacagagtctcttgactgtttctgccctcacctacaaaatagtactcagctggaacaagtgaatcagatgctaaatctcacccaagaagaaataacagcaacagtgaaagtaaatttgccatttgggaggcctagggtactgcagaagaacgtggaccactgtctcctttaccacagggaatatgtcagtggatttggaaaagctatgaggatgcccatgtggagttcatacacagtcccccagttgccagcaatagaacatcagatagccaatatgatgctttaattactagcaatttggtacctatgtatgaagaattcagaaaaatgtgggactacttccacagtgttcttcttataaaacatgccacagaaagaaatggagtaaatgtggttagtggaccaatatttgattataattatgatggccattttgatgctccagatgaaattaccaaacatttagccaacactgatgttcccatcccaacacactactttgtggtgctgaccagttgtaaaaacaagagccacacaccggaaaactgccctgggtggctggatgtcctaccctttatcatccctcaccgacctaccaacgtggagagctgtcctgaaggtaaaccagaagctctttgggttgaagaaagatttacagctcacattgcccgggtccgtgatgtagaacttctcactgggcttgacttctatcaggataaagtgcagcctgtctctgaaattttgcaactaaagacatatttaccaacatttgaaaccactatttaa

SEQ ID NO: 9274 - DNA, 3413 bp, Homo sapiens
  source 1..3413: mol_type = unassigned DNA
gagaaatgaaaagtttggaacccagaagctgcagcctgcggaaaatgctggagccgcagccgacaccaagttgatgtctgtgagcagctgaccttctggacctccatcagcggcctgcagccaggagctgaagccacagagacggtgtcttctcagctatgataacctcagtgcaaatattgcccaatcactgaagagctgtgatcttcctaaacagttaaaagtcaggcacagctatgtaactcatacagtttctctttgccagactagactaaagaaggagcactaatttattctgataaaacaggtctatgcagctaccaggacaatggaatctacgttgactttagcaacggaacaacctgttaagaagaacactcttaagaaatataaaatagcttgcattgttcttcttgctttgctggtgatcatgtcacttggattaggcctggggcttggactcaggaaactggaaaagcaaggcagctgcaggaagaagtgctttgatgcatcatttagaggactggagaactgccggtgtgatgtggcatgtaaagaccgaggtgattgctgctgggattttgaagacacctgtgtggaatcaactcgaatatggatgtgcaataaatttcgttgtggagagaccagattagaggccagcctttgctcttgttcagatgactgtttgcagaggaaagattgctgtgctgactataagagtgtttgccaaggagaaacctcatggctggaagaaaactgtgacacagcccagcagtctcagtgcccagaagggtttgacctgccaccagttatcttgttttctatggatggatttagagctgaatatttatacacatgggatactttaatgccaaatatcaataaactgaaaacatgtggaattcattcaaaatacatgagagctatgtatcctaccaaaaccttcccaaatcattacaccattgtcacgggcttgtatccagagtcacatggcatcattgacaataatatgtatgatgtaaatctcaacaagaatttttcactttcttcaaaggaacaaaataatccagcctggtggcatgggcaaccaatgtggctgacagcaatgtatcaaggtttaaaagccgctacctacttttggcccggatcagaagtggctataaatggctcctttccttccatatacatgccttacaacggaagtgtcccatttgaagagaggatttctacactgttaaaatggctggacctgcccaaagctgaaagacccaggttttataccatgtattttgaagaacctgattcctctggacatgcaggtggaccagtcagtgccagagtaattaaagccttacaggtagtagatcatgcttttgggatgttgatggaaggcctgaagcagcggaatttgcacaactgtgtcaatatcatccttctggctgaccatggaatggaccagacttattgtaacaagatggaatacatgactgattattttcccagaataaacttcttctacatgtacgaagggcctgccccccgcatccgagctcataatatacctcatgacttttttagttttaattctgaggaaattgttagaaacctcagttgccgaaaacctgatcagcatttcaagccctatttgactcctgatttgccaaagcgactgcactatgccaagaacgtcagaatcgacaaagttcatctctttgtggatcaacagtggctggctgttaggagtaaatcaaatacaaattgtggaggaggcaaccatggttataacaatgagtttaggagcatggaggctatctttctggcacatggacccagttttaaagagaagactgaagttgaaccatttgaaaatattgaagtctataacctaatgtgtgatcttctacgcattcaaccagcaccaaacaatggaacccatggtagtttaaaccatcttctgaaggtgcctttttatgagccatcccatgcagaggaggtgtcaaagttttctgtttgtggctttgctaatccattgcccacagagtctcttgactgtttctgccctcacctacaaaatagtactcagctggaacaagtgaatcagatgctaaatctcacccaagaagaaataacagcaacagtgaaagtaaatttgccatttgggaggcctagggtactgcagaagaacgtggaccactgtctcctttaccacagggaatatgtcagtggatttggaaaagctatgaggatgcccatgtggagttcatacacagtcccccagttgggagacacatcgcctctgcctcccactgtcccagactgtctgcgggctgatgtcagggttcctccttctgagagccaaaaatgttccttctatttagcagacaagaatatcacccacggcttcctctatcctcctgccagcaatagaacatcagatagccaatatgatgctttaattactagcaatttggtacctatgtatgaagaattcagaaaaatgtgggactacttccacagtgttcttcttataaaacatgccacagaaagaaatggagtaaatgtggttagtggaccaatatttgattataattatgatggccattttgatgctccagatgaaattaccaaacatttagccaacactgatgttcccatcccaacacactactttgtggtgctgaccagttgtaaaaacaagagccacacaccggaaaactgccctgggtggctggatgtcctaccctttatcatccctcaccgacctaccaacgtggagagctgtcctgaaggtaaaccagaagctctttgggttgaagaaagatttacagctcacattgcccgggtccgtgatgtagaacttctcactgggcttgacttctatcaggataaagtgcagcctgtctctgaaattttgcaactaaagacatatttaccaacatttgaaaccactatttaacttaataatgtctacttaatatataatttactgtataaagtaattttggcaaaatataagtgatttttttctggagaattgtaaaataaagttttctatttttccttaagtcccctaaaagccataatttttattattcctttttctcttttttcaattctatgaatatgtattattttaaagttatatttttcacacagagatgatgctatattacaccttcccttttttgttggtttcttaaactctaatctcatgacagattataccttccttattacttgttttatcttactcagaatctttgaatatatttttctgcccagaattatctaaacaaaagggagaacaaaagaagtatgtctcacttgggaactgaatcaactctaaatcagttttgtcacaaaactttttgtatttgactggcaatgctgattaaaattaaaaatgcacagaa

SEQ ID NO: 9275 - DNA, 1400 bp, Homo sapiens
  source 1..1400: mol_type = unassigned DNA
atacagtttctctttgccagactagactaaagaaggagcactaatttattctgataaaacaggtctatgcagctaccaggacaatggaatctacgttgactttagcaacggaacaacctgttaagaagaacactcttaagaaatataaaatagcttgcattggtctctctcctttgggatctcacctcaccacaacctctgtttcccaggctcaagtgatcctcctgcctcagcctcctgagtagcttggaccacaggcacatgccacaaggctcagctaagtttttgttcttcttgctttgctggtgatcatgtcacttggattaggcctggggcttggactcaggaaactggaaaagcaaggcagctgcaggaagaagtgctttgatgcatcatttagaggactggagaactgccggtgtgatgtggcatgtaaagaccgaggtgattgctgctgggattttgaagacacctgtgtggaatcaactcgaatatggatgtgcaataaatttcgttgtggagagaccagattagaggccagcctttgctcttgttcagatgactgtttgcagaggaaagattgctgtgctgactataagagtgtttgccaaggagaaacctcatggctggaagaaaactgtgacacagcccagcagtctcagtgcccagaagggtttgacctgccaccagttatcttgttttctatggatggatttagagctgaatatttatacacatgggatactttaatgccaaatatcaataaactgaaaacatgtggaattcattcaaaatacatgagagctatgtatcctaccaaaaccttcccaaatcattacaccattgtcacgggcttgtatccagagtcacatggcatcattgacaataatatgtatgatgtaaatctcaacaagaatttttcactttcttcaaaggaacaaaataatccagcctggtggcatgggcaaccagtatgtagcattctacacgtcgcaactgaagtaacctccatttctcagtgtgacaggaggacactcttctcactcagtggagcaagttctatgtcacccatctagtttctaagggctgagggtgcaaagatgtggctgacagcaatgtatcaaggtttaaaagccgctacctacttttggcccggatcagaagtggctataaatggctcctttccttccatatacatgccttacaacggaagtgtcccatttgaagagaggatttctacactgttaaaatggctggacctgcccaaagctgaaagacccaggttttataccatgtattttgaagaacctgattcctctggacatgcaggtggaccagtcagtgccagagtaattaaagccttacaggtagtagatcatgcttttgggatgttgatggaa

SEQ ID NO: 9276 - DNA, 1430 bp, Homo sapiens
  source 1..1430: mol_type = unassigned DNA
atacagtttctctttgccagactagactaaagaaggagcactaatttattctgataaaacaggtctatgcagctaccaggacaatggaatctacgttgactttagcaacggaacaacctgttaagaagaacactcttaagaaatataaaatagcttgcattagactgggtttcaccatgttgcccaggctggtctcaaactcctggatcaagtgatctacctgcctcggcctcccaaagtgctgggactacaggcatgaaccactgcacctggcctctagtgttttcctcagccaagaattccaagttcttcttgctttgctggtgatcatgtcacttggattaggcctggggcttggactcaggaaactggaaaagcaaggcagctgcaggaagaagtgctttgatgcatcatttagaggactggagaactgccggtgtgatgtggcatgtaaagaccgaggtgattgctgctgggattttgaagacacctgtgtggaatcaactcgaatatggatgtgcaataaatttcgttgtggagagaccagattagaggccagcctttgctcttgttcagatgactgtttgcagaggaaagattgctgtgctgactataagagtgtttgccaaggagaaacctcatggctggaagaaaactgtgacacagcccagcagtctcagtgcccagaagggtttgacctgccaccagttatcttgttttctatggatggatttagagctgaatatttatacacatgggatactttaatgccaaatatcaataaactgaaaacatgtggaattcattcaaaatacatgagagctatgtatcctaccaaaaccttcccaaatcattacaccattgtcacgggcttgtatccagagtcacatggcatcattgacaataatatgtatgatgtaaatctcaacaagaatttttcactttcttcaaaggaacaaaataatccagcctggtggcatgggcaaccaatgtggctgacagcaatgtatcaaggtttaaaagccgctacctacttttggcccggatcagaagtggctataaatggctcctttccttccatatacatgccttacaacgggtagtgaagcactttcagatattctcccagctaggcagaaatgatcaagatgttttctgtcttaatcttggtggcaattctattaatccagttgtttaagccaaaaatcttgggaatcaccattgattcctttcctttatgtcactcaagcagtctctcagtaaatgcttttggctgtaattaaaaatctatgtagcctgagaactttttattacctctagcattaccactctggttcgagctgtcatctcttgcctgtattaactgcagttgcctctttactcatctctgcttcttatcctttataatctagtctcatcccacccaccag

SEQ ID NO: 9277 - DNA, 1918 bp, Homo sapiens
  source 1..1918: mol_type = unassigned DNA
caacaacgtggcctggaggcaatggccctggcctctcgtgtccccttctctcacccgcccagacttgccctctttggaggtcgcccgggctaaggtcttctccactggcccctgagattgccatcacctccagctcctcctctcctgaagttggcagcccctcctgggttccagcctcctgagatgccagacccactggggcagtacccacaggccctgagcctacatcaaccaccccagtgacaccccaagcctgcagcattttccacccccagccccctggtcccaccttgccttccgcccaccttcccacctgctgcagggagggccctcggctgagccttcagacacacttgcaccccatccgctcccctcctgaatttcttctgaccctcccttggcttcacagcacctgaaggccaggctgaggccccctgctctcatggccagccctggaaagcctggggctgatgaggcccaggaggaggagggggaactcgaggggggctctgcagggccgcgggctgcaatactggagcaggctgaggagctgtttctgctgtgtgacaaggaggctaagggcttcatcaccaagcacgacctgcagggtctccagagcgacctgcccctcacgccagagcagctggaggctgtgtttgaaagtctggaccgggctcacactggcttcctcaccgccagggagttctgcctgggcctggggatgtttgtgggggtggcgtcagcccagggagcgaacccctgcaggactcccgaggagacctttgagtcgggcgggctcgacgtgcagggcacggcgggctctctggatgaggaggaggaagaggaggagcgattccacactgtgctggagcagctgggggtggccccggtcctgggcaagcagcgggctgtgaggacgctctgggccaggctgcagcgcgagcgccccgagctgctgggctctttcgaggatgttctgatacgcgcgtcggcctgcctggaggaggcggcccgggagcgcgacggcctggagcaggcgctgcggaggcgcgagagcgagcacgagagggaggtgcgcgctctgtacgaggagacggagcagcttcgggagcagagccggcgcccgccgagtcagaacttcgcccgcggggagcggagaagccgtctggagctggagctgcagagccgcgagcaggacctggaacgcgcgggcctgcggcagcgggagttagagcagcagctgcacgcccaggctgcggagcacctggaggcacaggcccagaactcccagctgtggcgggcgcacgaggcgctgcgaacgcagctggagggggcgcaggagcagatccgcaggctggagagcgaagcacgaggccgccaggagcaaacccaacgagacgtggtcgccgtctccaggaacatgcagaaagagaaagtcagcctgctacggcaactggagctgctcagggagctgaatacacggctgcgggatgacagggacgcctgcgaggccaggcgggcgggcagcagctgcaggaaggctctgacaacagcccgcctgcctgggcccacctgctgctgctgctgttgctgggctcggccccccagacgcggctctggccaccttcccagtgcccggtgaccagccccgagtgactcacggaccatgagctagaagctgcccttgcaggaggcttgtcatgggtcgggggtgcccactcaggatgcaggctctccccagtgggccccaggctcgcctgactgaagacatgaaggacctagcctaggagtggtcagggtcccgggagtggccagggtcccgtgtgtgccctctgccagtcttcgctctgtccccgttcaatcaaccccatctcagttcagcagaaaaccccctcgtcaaataaaacccactgactgc

SEQ ID NO: 9278 - DNA, 1820 bp, Homo sapiens
  source 1..1820: mol_type = unassigned DNA
aggtctagccggcaagccggagggcgggcgagacaacaacgtggcctggaggcaatggccctggcctctcgtgtccccttctctcacccgcccagacttgccctctttggaggtcgcccgggctaagctttcaggaccccaccttccttatcaccaggtcttctccactggcccctgagattgccatcacctccagctcctcctctcctgaagttggcagcccctcctgggttccagcctcctgagatgccagacccactggggcagtacccacaggccctgagcctacatcaaccaccccagtgacaccccaagcctgcagcattttccacccccagccccctggtcccaccttgccttccgcccaccttcccacctgctgcagggagggccctcggctgagccttcagacacacttgcaccccatccgctcccctcctgaatttcttctgaccctcccttggcttcacagcacctgaaggccaggctgaggccccctgctctcatggccagccctggaaagcctggggctgatgaggcccaggaggaggagggggaactcgaggggggctctgcagggccgcgggctgcaatactggagcaggctgaggagctgtttctgctgtgtgacaaggaggctaagggcttcatcaccaagcacgacctgcagggtctccagagcgacctgcccctcacgccagagcagctggaggctgtgtttgaaagtctggaccgggctcacactggcttcctcaccgccagggagttctgcctgggcctggggatgtttgtgggggtggcgtcagcccagggagcgaacccctgcaggactcccgaggagacctttgagtcgggcgggctcgacgtgcagggcacggcgggctctctggatgaggaggaggaagaggaggagcgattccacactgtgctggagcagctgggggtggccccggtcctgggcaagcagcgggctgtgaggacgctctgggccaggctgcagcgcgagcgccccgagctgctgggctctttcgaggatgttctgatacgcgcgtcggcctgcctggaggaggcggcccgggagcgcgacggcctggagcaggcgctgcggaggcgcgagagcgagcacgagagggaggtgcgcgctctgtacgaggagacggagcagcttcgggagcagagccggcgcccgccgagtcagaacttcgcccgcggggagcggagaagccgtctggagctggagctgcagagccgcgagcaggacctggaacgcgcgggcctgcggcagcgggagagacgtggtcgccgtctccaggaacatgcagaaagagaaagtcagcctgctacggcaactggagctgctcagggagctgaatacacggctgcgggatgacagggacgcctgcgaggccaggcgggcgggcagcagctgcaggaaggctctgacaacagcccgcctgcctgggcccacctgctgctgctgctgttgctgggctcggccccccagacgcggctctggccaccttcccagtgcccggtgaccagccccgagtgactcacggaccatgagctagaagctgcccttgcaggaggcttgtcatgggtcgggggtgcccactcaggatgcaggctctccccagtgggccccaggctcgcctgactgaagacatgaaggacctagcctaggagtggtcagggtcccgggagtggccagggtcccgtgtgtgccctctgccagtcttcgctctgtccccgttcaatcaaccccatctcagttcagcagaaaaccccctcgtcaaataaaacccactgactgcactgcg

SEQ ID NO: 9279 - DNA, 824 bp, Homo sapiens
  source 1..824: mol_type = unassigned DNA
ggcggggcgcgcccagtgtttccgggaggagcggcccgggcgcgcggcaggtgcggcggcgcaactcgcgggtaggcgaccgctggtcccgccgctgaggcccctccactgccgcccgcccggcaccccctccgggccgccgtggcccgcgccaaacctgagcgtctcggtcgggaactccggttaccccctcggggcgcaaggcggcaggggtcttctccactggcccctgagattgccatcacctccagctcctcctctcctgaagttggcagcccctcctgggttccagcctcctgagatgccagacccactggggcagtacccacaggccctgagcctacatcaaccaccccagtgacaccccaagcctgcagcattttccacccccagccccctggtcccaccttgccttccgcccaccttcccacctgctgcagggagggccctcggctgagccttcagacacacttgcaccccatccgctcccctcctgaatttcttctgaccctcccttggcttcacagcacctgaaggccaggctgaggccccctgctctcatggccagccctggaaagcctggggctgatgaggcccaggaggaggagggggaactcgaggggggctctgcagggccgcgggctgcaatactggagcaggctgaggagctgtttctgctgtgtgacaaggaggctaagggcttcatcaccaagcacgacctgcagggtctccagagcgacctgcccctcacgccagagcagctggaggctgtgtttgaaagtctggaccgggctcacactggcttcctcaccgccagggagttc

SEQ ID NO: 9280 - DNA, 575 bp, Homo sapiens
  source 1..575: mol_type = unassigned DNA
ctataagcccagccttttgtggttcagctgggtcgcacgctggatcccaggccccttccttgaaaagcagaggccttgtaccccccagggttgccgggcgggacagtgattccagcccttcaggtcttctccactggcccctgagattgccatcacctccagctcctcctctcctgaagttggcagcccctcctgggttccagcctcctgagatgccagacccactggggcagtacccacaggccctgagcctacatcaaccaccccagtgacaccccaagcctgcagcattttccacccccagccccctggtcccaccttgccttccgcccaccttcccacctgctgcagggagggccctcggctgagccttcagacacacttgcaccccatccgctcccctcctgaatttcttctgaccctcccttggcttcacagcacctgaaggccaggctgaggccccctgctctcatggccagccctggaaagcctggggctgatgaggcccaggaggaggagggggaactcgaggggggctctgcagggccgcgggctgcaatactggagcaggctga

SEQ ID NO: 9281 - DNA, 1786 bp, Homo sapiens
  source 1..1786: mol_type = unassigned DNA
ggacctcaggtctagccggcaagccggagggcgggcgagacaacaacgtggcctggaggcaatggccctggcctctcgtgtccccttctctcacccgcccagacttgccctctttggaggtcgcccgggtcttctccactggcccctgagattgccatcacctccagctcctcctctcctgaagttggcagcccctcctgggttccagcctcctgagatgccagacccactggggcagtacccacaggccctgagcctacatcaaccaccccagtgacaccccaagcctgcagcattttccacccccagccccctggtcccaccttgccttccgcccaccttcccacctgctgcagggagggccctcggctgagccttcagacacacttgcaccccatccgctcccctcctgaatttcttctgaccctcccttggcttcacagcacctgaaggccaggctgaggccccctgctctcatggccagccctggaaagcctggggctgatgaggcccaggaggaggagggggaactcgaggggggctctgcagggccgcgggctgcaatactggagcaggctgaggagctgtttctgctgtgtgacaaggaggctaagggcttcatcaccaagcacgacctgcagggtctccagagcgacctgcccctcacgccagagcagctggaggctgtgtttgaaagtctggaccgggctcacactggcttcctcaccgccagggagttctgcctgggcctggggatgtttgtgggggtggcgtcagcccagggagcgaacccctgcaggactcccgaggagacctttgagtcgggcgggctcgacgtgcagggcacggcgggctctctggatgaggaggaggaagaggaggagcgattccacactgtgctggagcagctgggggtggccccggtcctgggcaagcagcgggctgtgaggacgctctgggccaggctgcagcgcgagcgccccgagctgctgggctctttcgaggatgttctgatacgcgcgtcggcctgcctggaggaggcggcccgggagcgcgacggcctggagcaggcgctgcggaggcgcgagagcgagcacgagagggaggtgcgcgctctgtacgaggagacggagcagcttcgggagcagagccggcgcccgccgagtcagaacttcgcccgcggggagcggagaagccgtctggagctggagctgcagagccgcgagcaggacctggaacgcgcgggcctgcggcagcgggagagacgtggtcgccgtctccaggaacatgcagaaagagaaagtcagcctgctacggcaactggagctgctcagggagctgaatacacggctgcgggatgacagggacgcctgcgaggccaggcgggcgggcagcagctgcaggaaggctctgacaacagcccgcctgcctgggcccacctgctgctgctgctgttgctgggctcggccccccagacgcggctctggccaccttcccagtgcccggtgaccagccccgagtgactcacggaccatgagctagaagctgcccttgcaggaggcttgtcatgggtcgggggtgcccactcaggatgcaggctctccccagtgggccccaggctcgcctgactgaagacatgaaggacctagcctaggagtggtcagggtcccgggagtggccagggtcccgtgtgtgccctctgccagtcttcgctctgtccccgttcaatcaaccccatctcagttcagcagaaaaccccctcgtcaaataaaacccactgactgca

SEQ ID NO: 9282 - DNA, 530 bp, Homo sapiens
  source 1..530: mol_type = unassigned DNA
aggtgcggcggcgcaactcgcgggtcttctccactggcccctgagattgccatcacctccagctcctcctctcctgaagttggcagcccctcctgggttccagcctcctgagatgccagacccactggggcagtacccacaggccctgagcctacatcaaccaccccagtgacaccccaagcctgcagcattttccacccccagccccctggtcccaccttgccttccgcccaccttcccacctgctgcagggagggccctcggctgagccttcagacacacttgcaccccatccgctcccctcctgaatttcttctgaccctcccttggcttcacagcacctgaaggccaggctgaggccccctgctctcatggccagccctggaaagcctggggctgatgaggcccaggaggaggagggggaactcgaggggggctctgcagggccgcgggctgcaatactggagcaggctgaggagctgtttctgctgtgtgacaaggaggctaagggcttcatcaccaagcacgac

SEQ ID NO: 9283 - DNA, 742 bp, Homo sapiens
  source 1..742: mol_type = unassigned DNA
ataagcccagccttttgtggttcagctgggtcgcacgctggatcccaggccccttccttgaaaagcagaggccttgtaccccccagggttgccgggcgggacagtgattccagcccttcagctttcaggaccccaccttccttatcaccaggtcttctccactggcccctgagattgccatcacctccagctcctcctctcctgaagttggcagcccctcctgggttccagcctcctgagatgccagacccactggggcagtacccacaggccctgagcctacatcaaccaccccagtgacaccccaagcctgcagcattttccacccccagccccctggtcccaccttgccttccgcccaccttcccacctgctgcagggagggccctcggctgagccttcagacacacttgcaccccatccgctcccctcctgaatttcttctgaccctcccttggcttcacagcacctgaaggccaggctgaggccccctgctctcatggccagccctggaaagcctggggctgatgaggcccaggaggaggagggggaactcgaggggggctctgcagggccgcgggctgcaatactggagcaggctgaggagctgtttctgctgtgtgacaaggaggctaagggcttcatcaccaagcacgacctgcagggtctccagagcgacctgcccctcacgccagagcagctggaggctgtgtttgaaagtctggaccgggctcacactggc

SEQ ID NO: 9284 - DNA, 2186 bp, Homo sapiens
  source 1..2186: mol_type = unassigned DNA
gtcgggcggagcaggcggctgcttgacagctgagagccgagcgggcggcgcgggcaggtccacgggaagcctacacgcccaaggtcatgccctgaccacagctgcccttcaggaggctggcacggagccacctggggccattgggctgtttgtcaagggtggggcagcagcaacttgccactcttcctccatgagcccagccagagcctccactgggcacttagcacaagaaaaaccctgcaggagccggatccagagcgctgggattcagcaggagtgccaggagaattcaacacaggtgtgctgcctcctctcctgccaggtgtgtggctgcacaggagtcttgctgatggtggaattcaagtcaccagtggccaaagtaccctccaggtgtgaagagttgcaggtcctccgaggagccgggagctgcaaggttctgaaaaagacttcaagaaactgactaatcgcgatggctgcccctgacgggagggtagtctccagaccccagagacttggtcaggggtctggccaggggccaaaggggagtggagcctgcctgcatcccctggacagcctggagcagaaggagactcaggagcaaacgtcgggccagctagtcatgctgaggaaggcacaggagttctttcagacctgtgatgctgaaggcaagggcttcatcgccaggaaggatatgcagaggctgcataaggagctaccgctcagcctggaggaactggaggatgtgtttgatgccctggatgctgatggcaatggctatctgaccccacaggagttcactactggatttagtcacttcttcttcagccagaataacccaagtcaggaagatgcaggtgaacaggtggcccagcgccatgaagagaaggtgtatctgtccagaggggatgaggatctgggcgacatgggcgaagatgaggaagcccagttccggatgctgatggacagacttggagcccaaaaggtgttggaagatgaaagtgatgtcaagcagctctggttgcagctgaagaaggaggaacctcatttactgtccaactttgaagacttcctgaccagaatcatctcccagctccaagaagcccatgaggagaagaatgaactggagtgtgccctaaaaaggaaaattgctgcttatgatgaagaaatccagcatctctatgaggagatggaacaacaaatcaaaagtgagaaggagcagtttctcctgaaggacacagagaggtttcaagcccgcagtcaagagctggagcagaaactgttatgtaaggagcaggagctggagcagctcacccagaagcagaaaaggctggaaggtcagtgcacagccctgcatcatgacaagcatgagaccaaggctgagaataccaagctgaaactcactaaccaggagctggcccgggagctggagcggacttcctgggagctccaggatgctcagcagcagttggaaagcctccagcaagaggcctgcaaactccaccaagagaaggagatggaagtgtaccgtgtgacggagagtctacagcgtgagaaggccgggctcctcaagcagctggatttcctaaggtgcgtcggtgggcactggcctgtgctgagagcacctcccagaagcctggggtcggaaggaccagtctgagggtcatccttgcctacgtgctggaaaaacgtgcctgctgagagagtgccctcaattcccttggtccccagtgcagtgtttggaccaccaagtagccactctattatgtttggtccgtttacacatgcgcccacatccagtttattcctcctggtggggaggctctgccccactcctctgagtccctcacaggactgtgcttggtacttgatctcatgcgagcagagctgggtttaatgagcatttaatctatgctagaaatattatctcgttcattgtcagcaaaactgttaggtgagtagggcagttcattcacaggaatttactgatgggaagttgatattagaggaaagaagtaatttaccacaggcgacacagctactctctgatggggccagaatggaaatccgtaactcggctgtgttctgttcatgtttgttgaatgagtaaatgaatcacaaacagagcaccaagaaaaagctttctcagccttcaaagacccccagcaataaactcaaagtttactggt

SEQ ID NO: 9285 - DNA, 2697 bp, Homo sapiens
  source 1..2697: mol_type = unassigned DNA
aaagagtcgggcggagcaggcggctgcttgacagctgagagccgagcgggcggcgcgggcaggtccacgggaagcctacacgcccaaggtcatgccctgaccacagctgcccttcaggaggctggcacggagccacctggggccattgggctgtttgtcaagggtggggcagcagcaacttgccactcttcctccatgagcccagccagagcctccactgggcacttagcacaagaaaaaccctgcaggagccggatccagagcgctgggattcagcaggagtgccaggagaattcaacacaggtgtgctgcctcctctcctgccaggtgtgtggctgcacaggagtcttgctgatggtggaattcaagtcaccagtggccaaagtaccctccaggtgtgaagagttgcaggtcctccgaggagccgggagctgcaaggttctgaaaaagacttcaagaaactgactaatcgcgatggctgcccctgacgggagggtagtctccagaccccagagacttggtcaggggtctggccaggggccaaaggggagtggagcctgcctgcatcccctggacagcctggagcagaaggagactcaggagcaaacgtcgggccagctagtcatgctgaggaaggcacaggagttctttcagacctgtgatgctgaaggcaagggcttcatcgccaggaaggatatgcagaggctgcataaggagctaccgctcagcctggaggaactggaggatgtgtttgatgccctggatgctgatggcaatggctatctgaccccacaggagttcactactggatttagtcacttcttcttcagccagaataacccaagtcaggaagatgcaggtgaacaggtggcccagcgccatgaagagaaggtgtatctgtccagaggggatgaggatctgggcgacatgggcgaagatgaggaagcccagttccggatgctgatggacagacttggagcccaaaaggtgttggaagatgaaagtgatgtcaagcagctctggttgcagctgaagaaggaggaacctcatttactgtccaactttgaagacttcctgaccagaatcatctcccagctccaagaagcccatgaggagaagaatgaactggagtgtgccctaaaaaggaaaattgctgcttatgatgaagaaatccagcatctctatgaggagatggaacaacaaatcaaaagtgagaaggagcagtttctcctgaaggacacagagaggtttcaagcccgcagtcaagagctggagcagaaactgttatgtaaggagcaggagctggagcagctcacccagaagcagaaaaggctggaaggtcagtgcacagccctgcatcatgacaagcatgagaccaaggctgagaataccaagctgaaactcactaaccaggagctggcccgggagctggagcggacttcctgggagctccaggatgctcagcagcagttggaaagcctccagcaagaggcctgcaaactccaccaagagaaggagatggaagtgtaccgtgtgacggagagtctacagcgtgagaaggccgggctcctcaagcagctggatttcctaagggaaaggaacaagcaccttcgggatgaacgggacatatgttttcagaaaaataaggcagccaaggcaaacacagctgcttccagggcaagttggaaaaagagatctggctctgtgataggcaaatatgtggacagcagagggattcttaggagccagtcagaggaggaggaggaggtgtttggcatcccaaggagaagctccctgggcctgagtggatatcccctaacagaagaggagccaggaaccggggagccagggcctgggggtccgtacccccggccgctccgcagaatcatctccgttgaagaagaccccctgccccagctcctggatggtggctttgagcaacccctgagcaaatgctcagaagaggaagaggtctctgaccagggggtacagggacaaatcccggaggccccacccttgaaactcacccccacatccccccgagggcagcctgttggaaaagaagccctgtgtaaggaggaaagctctccctctgcccctgaccggctcttcaagattgtgttcgtgggcaattccgcggtggggaagacatccttcctgaggagattctgtgaggaccggttctccccaggcatggcggccactgtgggcattgattaccgtgtgaagacgttgaatgtggacaactctcaggtggccctgcagctgtgggacacggctgggcaggagaggtaccggtgcatcacccagcagttcttcagaaaggcagatggtgtcatcgtcatgtacgatctcacagacaagcagtcgttcctgtcggtccggcggtggctgagcagcgtggaggaagctgtgggagaccgggtgcctgttcttctgctgggtaataagcttgacaacgagaaggagcgggaagtcccccggggcctcggagagcagcttgccacggagaacaatctgatcttctatgaatgcagcgcctactctggtcacaacaccaaagagtccctgctccatctggccaggttcctcaaggagcaagaagacacagtgagagaggacaccattcaggtcggccaccctgctaagaagaaatcctgctgtggctgatagggtcctacaaggactgcccccagc

SEQ ID NO: 9286 - DNA, 2228 bp, Homo sapiens
  source 1..2228: mol_type = unassigned DNA
accgcttggcgcgcgcacgtcccggagggcgtccagggggcgccgcttcccgttcagctccgctgaggggctggtccagcccgcgcggctcggagcggaaagagtcgggcggagcaggcggctgcttgacagctgagagccgagcgggcggcgcgggcaggtccacgggaagcctacacgcccaaggtcatgccctgaccacagctgcccttcaggaggctggcacggagccacctggggccattgggctgtttgtcaagggtggggcagcagcaacttgccactcttcctccatgagcccagccagagcctccactgggcacttagcacaagaaaaaccctgcaggagccggatccagagcgctgggattcagcaggagtgccaggagaattcaacacaggtgtgctgcctcctctcctgccaggtgtgtggctgcacaggagtcttgctgatggtggaattcaagtcaccagtggccaaagtaccctccaggtgtgaagagttgcaggtcctccgaggagccgggagctgcaaggttctgaaaaagacttcaagaaactgactaatcgcgatggctgcccctgacgggagggtagtctccagaccccagagacttggtcaggggtctggccaggggccaaaggggagtggagcctgcctgcatcccctggacagcctggagcagaaggagactcaggagcaaacgtcgggccagctagtcatgctgaggaaggcacaggagttctttcagacctgtgatgctgaaggcaagggcttcatcgccaggaaggatatgcagaggctgcataaggagctaccgctcagcctggaggaactggaggatgtgtttgatgccctggatgctgatggcaatggctatctgaccccacaggagttcactactggatttagtcacttcttcttcagccagaataacccaagtcaggaagatgcaggtgaacaggtggcccagcgccatgaagagaaggtgtatctgtccagaggggatgaggatctgggcgacatgggcgaagatgaggaagcccagttccggatgctgatggacagacttggagcccaaaaggtgttggaagatgaaagtgatgtcaagcagctctggttgcagctgaagaaggaggaacctcatttactgtccaactttgaagacttcctgaccagaatcatctcccagctccaagaagcccatgaggagaagaatgaactggagtgtgccctaaaaaggaaaattgctgcttatgatgaagaaatccagcatctctatgaggagatggaacaacaaatcaaaagtgagaaggagcagtttctcctgaaggacacagagaggtttcaagcccgcagtcaagagctggagcagaaactgttatgtaaggagcaggagctggagcagctcacccagaagcagaaaaggctggaaggtcagtgcacagccctgcatcatgacaagcatgagaccaaggctgagaataccaagctgaaactcactaaccaggagctggcccgggagctggagcggacttcctgggagctccaggatgctcagcagcagttggaaagcctccagcaagaggcctgcaaactccaccaagagaaggagatggaagtgtaccgtgtgacggagagtctacagcgtgagaaggccgggctcctcaagcagctggatttcctaagggaaaggaacaagcaccttcgggatgaacgggacatatgttttcagaaaaataaggcagccaaggcaaacacagctgcttccagggcaagttggaaaaagagatctggctctgtgataggcaaatatgtggacagcagagggattcttaggagatggccacagagagatagaggcatcccgactcttcagtatcagacccagagagaccttgaagactgcaagcatgaaatgaaaaagatatgcaaagcggaagtgactctggagatgtaaatcagctcatcagtaaaacctttgggcctgatcatcatgaattcttgttctaaatagctgaataatgagatacaatttgggagccaaatctctgcaatagtggttggcctgttggttcctcagaatggaatggattgattgattgattcagcagacgtttactgattacctactgtgtaccagacattcttttgagttctgtaaagcctccaaaaataaattagacatgaggtcctaccattaatctccattattaaatgctcactt

SEQ ID NO: 9287 - DNA, 630 bp, Homo sapiens
  source 1..630: mol_type = unassigned DNA
agagaaggagatggaagtgtaccgtgtgacggagagtctacagcgtgagaaggccgggctcctcaagcagctggatttcctaagggaaaggaacaagcaccttcgggatgaacgggacatatgttttcagaaaaataaggcagccaaggcaaacacagctgcttccagggcaagttggaaaaagagatctggctctgtgataggcaaatatgtggacagcagagggattcttaggagatggccacagagagatagaggcatcccgactcttcagtatcagacccagagagaccttgaagactgcaagcatgaaatgaaaaagatatgcaaagcggaagtgactctggagatgtaaatcagctcatcagtaaaacctttgggcctgatcatcatgaattcttgttctaaatagctgaataatgagatacaatttgggagccaaatctctgcaatagtggttggcctgttggttcctcagaatggaatggattgattgattgattcagcagacgtttactgattacctactgtgtaccagacattcttttgagttctgtaaagcctccaaaaataaattagacatgaggtcctaccattaatctccattattaaatgctcacttaataaata

SEQ ID NO: 9288 - DNA, 2231 bp, Homo sapiens
  source 1..2231: mol_type = unassigned DNA
agcgttaccatggatcctggaggtgcccgcgaacactgcttgtcgcctgggcaaccggagaggacgaagcaggacctaggtggcggcggtggtaccggctgcaatggtgtccaatcccgtgcatggcttgccctttcttccgggcacgtcctttaaggactctacgaaaacagccttccacagaagtcagacgctgagctacaggaacggctatgcaattgttcgacgtccaacagttgggataggcggagaccggctccagttcaaccagctgtcccaggctgagctggatgagttggccagtaaggcaccagtcttaacttatggccaacctaaacaagccccacctgcggattttattcctgcgcatgtggcctttgacaaaaaggtactgaaatttgatgcctatttccaagaagatgttcctatgtcaactgaggaacagtataggatccgtcaggtgaacatttactattatctagaagatgacagcatgtctgtcatagagcctgttgtagaaaattctggaatccttcaaggcaagttaataaaacgccagcggctagccaagaatgaccggggtgaccattaccattggaaagacctaaatcgaggaataaacatcacaatttatggcaaaactttccgcgttgttgactgtgaccaattcacacaggtatttttagaaagccaaggaattgagttaaatccaccagagaagatggctcttgatccttacactgaactccgaaaacagcctcttcgtaagtatgtcaccccatcagactttgatcaactcaagcaatttctcacctttgacaaacaggtccttcgattctatgcaatctgggatgatacagacagcatgtatggtgaatgtcggacctacatcattcattactatcttatggatgatacggtggaaattcgagaggtccacgaacggaatgatgggagagatcctttcccactcctaatgaaccgccagcgtgtgcccaaagttttggtggaaaatgcaaagaacttccctcagtgtgtgctagaaatctctgaccaagaagtgttggaatggtatactgctaaagacttcattgttgggaagtcactcactatccttgggagaactttcttcatttatgattgtgatccatttactcgacggtattacaaagagaagtttggaatcactgatttaccacgtattgatgtgagcaagcgggaaccacctccagtaaaacaggagttgcctccttataacggttttggactagtggaagattctgctcagaattgttttgctctcattccaaaagctccaaaaaaagacgttattaaaatgctggtgaatgataacaaggtgcttcgttatttggctgtactggaatcccccatcccagaagacaaagaccgcagatttgtcttctcttactttctagctaccgacatgatcagtatctttgagcctcctgttcgcaattctggtatcattgggggcaagtaccttggcaggactaaagttgttaaaccatactctacagtggacaaccctgtctactatggccccagtgacttcttcattggtgctgtgattgaagtgtttggtcaccggttcatcatccttgatacagacgagtatgttttgaaatacatggagagcaacgctgcccagtattcaccagaagcactcgcgtcaattcagaaccatgtccgaaagcgagaagcgcctgctccagaagcagaaagcaagcaaactgaaaaggatccaggcgtgcaggaattggaagcattaatagacacaattcagaagcaactgaaagatcactcatgcaaagacaacattcgtgaggcatttcaaatttatgacaaggaagcttcaggatatgtggacagagacatgttctttaaaatctgtgaatcgcttaacgtcccagtggatgactccttggttaaggagttaatcaggatgtgctctcatggagaaggcaaaattaactactataactttgttcgtgctttctcaaactgacctgctgatgagaaaatgcaagacaatttttgatactggaactatgctttgaaatacaccttacactcttcatagaggcatttacagggttcctgaagttttatttctgttttggttcttctttcactcctactgaagtcgaaactaaattggatctaataggatctaagattggtgccttatttagggtgataggggtatagca

SEQ ID NO: 9289 - DNA, 2020 bp, Homo sapiens
  source 1..2020: mol_type = unassigned DNA
gaggacgaagcaggacctaggtggcggcggtggtaccggctgcaatggtgtccaatcccgtgcatggcttgccctttcttccgggcacgtcctttaaggactctacgaaaacagccttccacagaagtcagacgctgagctacaggaacggctatgcaattgttcgacgtccaacagttgggataggcggagaccggctccagttcaaccagctgtcccaggctgagctggatgagttggccagtactgaaatttgatgcctatttccaagaagatgttcctatgtcaactgaggaacagtataggatccgtcaggtgaacatttactattatctagaagatgacagcatgtctgtcatagagcctgttgtagaaaattctggaatccttcaaggcaagttaataaaacgccagcggctagccaagaatgaccggggtgaccattaccattggaaagacctaaatcgaggaataaacatcacaatttatggcaaaactttccgcgttgttgactgtgaccaattcacacaggtatttttagaaagccaaggaattgagttaaatccaccagagaagatggctcttgatccttacactgaactccgaaaacagcctcttcgtaagtatgtcaccccatcagactttgatcaactcaagcaatttctcacctttgacaaacaggtccttcgattctatgcaatctgggatgatacagacagcatgtatggtgaatgtcggacctacatcattcattactatcttatggatgatacggtggaaattcgagaggtccacgaacggaatgatgggagagatcctttcccactcctaatgaaccgccagcgtgtgcccaaagttttggtggaaaatgcaaagaacttccctcagtgtgtgctagaaatctctgaccaagaagtgttggaatggtatactgctaaagacttcattgttgggaagtcactcactatccttgggagaactttcttcatttatgattgtgatccatttactcgacggtattacaaagagaagtttggaatcactgatttaccacgtattgatgtgagcaagcgggaaccacctccagtaaaacaggagttgcctccttataacggttttggactagtggaagattctgctcagaattgttttgctctcattccaaaagctccaaaaaaagacgttattaaaatgctggtgaatgataacaaggtgcttcgttatttggctgtactggaatcccccatcccagaagacaaagaccgcagatttgtcttctcttactttctagctaccgacatgatcagtatctttgagcctcctgttcgcaattctggtatcattgggggcaagtaccttggcaggactaaagttgttaaaccatactctacagtggacaaccctgtctactatggccccagtgacttcttcattggtgctgtgattgaagtgtttggtcaccggttcatcatccttgatacagacgagtatgttttgaaatacatggagagcaacgctgcccagtattcaccagaagcactcgcgtcaattcagaaccatgtccgaaagcgagaagcgcctgctccagaagcagaaagcaagcaaactgaaaaggatccaggcgtgcaggaattggaagcattaatagacacaattcagaagcaactgaaagatcactcatgcaaagacaacattcgtgaggcatttcaaatttatgacaaggaagcttcaggatatgtggacagagacatgttctttaaaatctgtgaatcgcttaacgtcccagtggatgactccttggttaaggaggtcacctgcaagcggcttctcctgcctgcctttacatttcccagtcctgtctggatcccactgtgcggtctctgacctcctctgcacaacctgagctggtgtccacttcttactgacatcccatctgcttctgagaactcatgtgagccagggcaggcatctgccctagaagcttcttcttttgtctgaaagctagttgtttaaagagcat

SEQ ID NO: 9290 - DNA, 5445 bp, Homo sapiens
  source 1..5445: mol_type = unassigned DNA
tttttttttttttagtttttgtagagacagcatcttgttgcccaggctggtctcgaactctggggctgaagtgattctccctcttcagcctcccagagttctgggattataggcacgagccaccatgcccagccttaatgttgaaaacagccttccacagaagtcagacgctgagctacaggaacggctatgcaattgttcgacgtccaacagttgggataggcggagaccggctccagttcaaccagctgtcccaggctgagctggatgagttggccagtaaggcaccagtcttaacttatggccaacctaaacaagccccacctgcggattttattcctgcgcatgtggcctttgacaaaaaggtactgaaatttgatgcctatttccaagaagatgttcctatgtcaactgaggaacagtataggatccgtcaggtgaacatttactattatctagaagatgacagcatgtctgtcatagagcctgttgtagaaaattctggaatccttcaaggcaagttaataaaacgccagcggctagccaagaatgaccggggtgaccattaccattggaaagacctaaatcgaggaataaacatcacaatttatggcaaaactttccgcgttgttgactgtgaccaattcacacaggtatttttagaaagccaaggaattgagttaaatccaccagagaagatggctcttgatccttacactgaactccgaaaacagcctcttcgtaagtatgtcaccccatcagactttgatcaactcaagcaatttctcacctttgacaaacaggtccttcgattctatgcaatctgggatgatacagacagcatgtatggtgaatgtcggacctacatcattcattactatcttatggatgatacggtggaaattcgagaggtccacgaacggaatgatgggagagatcctttcccactcctaatgaaccgccagcgtgtgcccaaagttttggtggaaaatgcaaagaacttccctcagtgtgtgctagaaatctctgaccaagaagtgttggaatggtatactgctaaagacttcattgttgggaagtcactcactatccttgggagaactttcttcatttatgattgtgatccatttactcgacggtattacaaagagaagtttggaatcactgatttaccacgtattgatgtgagcaagcgggaaccacctccagtaaaacaggagttgcctccttataacggttttggactagtggaagattctgctcagaattgttttgctctcattccaaaagctccaaaaaaagacgttattaaaatgctggtgaatgataacaaggtgcttcgttatttggctgtactggaatcccccatcccagaagacaaagaccgcagatttgtcttctcttactttctagctaccgacatgatcagtatctttgagcctcctgttcgcaattctggtatcattgggggcaagtaccttggcaggactaaagttgttaaaccatactctacagtggacaaccctgtctactatggccccagtgacttcttcattggtgctgtgattgaagtgtttggtcaccggttcatcatccttgatacagacgagtatgttttgaaatacatggagagcaacgctgcccagtattcaccagaagcactcgcgtcaattcagaaccatgtccgaaagcgagaagcgcctgctccagaagcagaaagcaagcaaactgaaaaggatccaggcgtgcaggaattggaagcattaatagacacaattcagaagcaactgaaagatcactcatgcaaagacaacattcgtgaggcatttcaaatttatgacaaggaagcttcaggatatgtggacagagacatgttctttaaaatctgtgaatcgcttaacgtcccagtggatgactccttggttaaggagttaatcaggatgtgctctcatggagaaggcaaaattaactactataactttgttcgtgctttctcaaactgacctgctgatgagaaaatgcaagacaatttttgatactggaactatgctttgaaatacaccttacactcttcatagaggcatttacagggttcctgaagttttatttctgttttggttcttctttcactcctactgaagtcgaaactaaattggatctaataggatctaagattggtgccttatttagggtgataggggtatagcaatgtctaattttgtgtgtcaaattgacttggccacagggggcccaaatatttcctttctttctttttaaaaaaataaatttttttagagatgggatctcactctgtcatacaggctggagtgtggtggcactatcctagttctatgaagcctcagactcctgggctcaagtgatcctcccacttcaacctccccagtagctgggacaacaggctcaagccaccatgcccagctaatttttaaaattattttgtagagacaaggtcttgctaggttgcctgaacttgtctcaaactcatgagctccagaaattctcccacctcagcctccaaaagtgctgggattataggcatgagccactgtgcccagcctcagatatttcattattctgggggtttctctgaaggtatttttcgatgagataaacatttgaatcagaagactaagtaaaacagatagtcctccctaatgtgggtgggcctcctccaatcatttgaagacatgagtagaataaaaaggctgacctttccccaggtaagagaattcctcctgcctgactggcttcaaattggaacatcagccttttcttgccttcagacacaaatggaaacatcagctgttggtctggagcctgctgaccttcagactggacctaaaccatcagctctcctaagtcataggcctttggattcagactggaattatacctttagctctcctgggtctccagcttgccaatttaccctgcagatcttgggacttgtaagccttcataattgtgtgagcaatttcttataactctctctttctctctctctacatatatatatatatatatattttatatgtacacattcatacacacacacgcttatatgtatacatatagtatgtatatgtgtatatatattatgtatatacatatatgtgcacacatctctactaaaaatagaaaaattagccaggtgtggtggcgtgtgcctgtagtcccagccactcgggaggcttaaatgggagaatcacttgaaccctggaggcagaggttgcagtgagccaagaccacgccactgcactccatccagcctgggtgacagagcaagactccatctcaaaaaaaaaaaggttagaaaaatgctgcttttagagagcctggccttgagagaggaaggaaagactagttgcagttactattctctggtgagctctgactggctttttacaaacagggcttctctttggttgaagtcagccactaagttcatctttaaacatgctatctcaaattccccgaagccacccaaaatgtggtatgaatgaggatagagttacacagaattcagactgctttgccctctcagaacttctagggaacttcccttggtgtttccttccctaacgagctcagccacttgtaaccagcttattgaaagggctgtgaatgtattatgttgattccttttctgttccaggttattatcttgggaataacccatgttttgttttgttttaccctcagtcgctcataactatttaaaacagtatctctttcaagtacagatgctcctctacttatggggctatgtctcaataaactcacgtaagtaaaaaatatcacaagttgaaaacacatttaataaccctgataagcccattgtaaagtaggcaaataagttggaccattgaaagttggggactatctgtattttagaagttttttcagcttaaaaattaccaagctctatcctacttggcccagctcagtccttcccccaggcttagaagcctgtggtaaagagtgtgtgtatactggggtgatgatagtggtttcttcttactcccttctttctgtcttctgctccctttgttcctattcagccatgctgctgtttctagcccatgtaggctctgggaaaggttaagcgggtagaaaccagagaaaaagggcaaagtcttatttctgtggctagtaatgtcgtaatgtggggccaggtctgagtgacatgtgccgaaaggctgactctttctcccagagcaccttttctctctttttggattcagggggtacatgtgcaggtttgttacatgagtatattgcacccaggtagtgagcatagtgcccagtaagtagtttttccacacataccccctccttcccttcccactctggtagtccccagtgtctattgttcccatcattatgtctatgtgtattcaatgtttagctcccacttagaagtaagaacatgcaatatttggtttcctattcctgcatcaattcactttaggataatggcctccagctgcatccatgttgctgcagaatacatgatttcattttttatggctgcgtagtattccatggtgtagatatacttcatttaaaaaatctaatccaccattgattggcacctaggttgattccatgtcctttgctcagagccccgttttggtgagttcttagaactctttccaaccggaaactgcccagtgcaccactctcagatggacgggacccagtctgtacctgatcaccccggctctaatggtatggtctccaaggctccttctgatcttcccaggaggccctttcaggctgacacaccttccagggtgtgcactctcgccatgttctcacccagatggctctcttggctgtgtaattaggcagctcaatccctttcctttagactgtttcaggggagaaccaggtaccccaaatcttatgctctccaaactccaggggacagacacatgtcaaaccctgagtcttttaaagtataccctcacttagcttgcagacccaaggcactccagcccctttcaagaagcttgcactttctgatattttctccatcactcttgcctcctgtggtagaggagctttgggctactccttaacaaatcattcatggatcggcagcaaatctgcaacatatggatatatttgccaatttttgtcctcagctttgggtctcagccaaaatggagatttaggaaagtctcatttagcatcctctagcctgcttttggctgttttgttttgtttttgtgtttgttttttagagacagggtcttactctgttgccagactggaatgcggtggtgtgaccatagctcactgcagcctcaaactcctgggctcatgcaatcctcctgcctcagccttctgagtagctaggcctgtagtctcagagggaactgtcttcaataaagttggcactgtccacatacactcctt

SEQ ID NO: 9291 - DNA, 3251 bp, Homo sapiens
  source 1..3251: mol_type = unassigned DNA
aacgtgggggccaaacaacacggccgggaggcgccgctgcctgccgggccctctcttctgggaccctggattttcggacactgagcgccatggccctgcctctgctgccgggcaacagcttcaaccgcaacgtgggaaaggagaagtttcacaaatcccaacattggggcttttgcaacaatgttatgatgttggtgagtgatgaaaagcctggaataggtggagaaccacttctggggcaaaagataaagcctaaatgtagcatatatcctaaaggagatggaagtgatgtaccatcatgggtagcctttgataaacaggtattatcttttgatgcctatttggaagaggaagtacttgataaaagccaaaccaactacagaataagatactataaaatctacttctaccctgaagatgacacaattcaagtaaatgaaccagaggtgaaaaatagtggattacttcaagggacttctatccggcgtcatcggattactcttccgcctcctgatgaggatcagttttatactgtgtatcattttaatgtcggcacagaggttgtcttctatggccggacattcaagatttatgactgtgatgcattcacaagaaactttttgaggaaaataggggtcaaagtgaatcccccagtgcaatgtccagaagatccttacatgaagattcggagagaggttgtagaacacgtagagcccttacgtccctacgaatccctcgacaccctgaaacagttcctccagtatcatggcaagattttgtgtttcttctgcctgtgggatgactcagtctcaatgtttggagaccgtagagaactcatcctgcattacttcttgtgtgatgatactattgaaatcaaagaattgcttccacacagctcaggccgagatgctctaaaaatgttcctccggaggagtaagctacccaagaattgcccacctagagtctatcaaccaggccagataacagatcgagcagttctcaattcatatggtgactttataaagaaccaagcggatggctacctgttcgatagatataagctaggaaaagtagaccaagagttttacaaagatagtgacctgtccctaggagtcaccatcaatgtgtggggaagaaaagtgctcctttatgactgtgatgaatttacgaagtcttattataagtctaaatatggaattgagaactttacctcagtttcatgcaagcctccttctcctcctccaaaaatagaaaggaaatttccaccttacaacggttttggttctgaagaggattctctccgtaactgcatagacctcaagcccacacctcatcggaggaacttcaagaagtttatggaaaaagacagctatggctccaaaagcaatatactccgtttttttgcaaaactagtcacagacaaatgtgttgacttggacaggatgtttgttatttcatattatctcggtgatgacaccatttcagtgtttgaacctatagagaggaattcaggaattgctggtgggatgttcttgaaaagaagtcgcgttaagaagcctggacaagaagtctttaaaagtgaactatctgaatatatcaaggccgaggagctgtacattggagtcacggtgaatgtgaatggttacctatttcgtttgctcaatgctgatgagtataccttaaactacatggagcagaatacagataagtatcctttcagtaacctcaaacttgccctacaaaagctgaagcaagaagaaggaaaatccagagagctcaagcaggtatttaaagctgctgactctaagcacacaaatatggtggattataatacattcagagacatattgatgtctttgactgttggaaaccttgcagagcaagaatttgtaaccattgcacgtcactaccgtgtgcctgagggcacatgttcagatatggatttcttaatcgcactggcccacgaaaagttcaagaaaaatatgtttgagaatttcgacactttcatttattcctgtgtgtatgaagatcgagaaaaaaaaaatgtattacccaccaaagacattaaaaggctgtgcaaatcctccagattacctttgagtgatgatcttctagaatccttattgtcaaggtttgaagacagtgaaaaacaaatagattataagtcatttttctctgccctgaactggagaaagaatccagtgcctgaattgcaaccagcatcataccttaaagagagatgtgaagatgtttggcttggtatgccatcacctattcctgcgaaatacattgactactggacctttttgaaggacgcgtttggcttagaggaggaataaccatgccagttttggtcaattctctatgatttacttctctcattttgccacatttactttagtagatataatttcattaaaaacaaaaaagaaacaaggtttatattaaatggaaatccataaaccacaattaatcctattttgtcatgttagttttacagaacatcatgttacattgccgacgtactgttactatttaaaatgccatcttaaaacatgttgaatatttttattatatgtatggtttattaataccaaaaaatcttctgataatttttgatccaacataatttgattcattactatatgaacagaaaatgacttttgaaggttatacatgacaatacaaaatcaaattatatcacagcaataagttgtgattctattaaacatttttgaaacctttttgacacgtttattacttacataattaagttttgtagcaacccacctcatcaaaataattcttaaacctctctagagtaaatatatttatcttttgaacttagtaaagctatgggaagaaaaagaacctccaacacacacacacacacacacacacacgcacgtgcacacacactggaaacatatgcagtatttatatttgtaatgcccttttttctatctaaagtcagcttgttagcttaggaatatatgcatgtgtgtataattatagtttgaccaaaactttattatgtctaaaatatttacaaatgtgaaagctgaagattttgagatttttgttttttttttggtttgttttacacacacatcccacgcgccccaccctagaggtttaaatattcagaaactacaacatttttcccctgcatttttctagttctatttttatttttcttcagcagaactcttgtcatgtagtgtacatttgattaaaacccatagccatgt

SEQ ID NO: 9292 - DNA, 1484 bp, Homo sapiens
  source 1..1484: mol_type = unassigned DNA
atctcactcatttgttcatatattggtctctgaggtcccttctaggctctgacaactggaaactctgaaaatagacatattgatgtctttgactgttggaaaccttgcagagcaagaatttgtaaccattgcacgtcactaccgtgtgcctgagggcacatgttcagatatggatttcttaatcgcactggcccacgaaaagttcaagaaaaatatgtttgagaatttcgacactttcatttattcctgtgtgtatgaagatcgagaaaaaaaaaatgtattacccaccaaagacattaaaaggctgtgcaaatcctccagattacctttgagtgatgatcttctagaatccttattgtcaaggtttgaagacagtgaaaaacaaatagattataagtcatttttctctgccctgaactggagaaagaatccagtgcctgaattgcaaccagcatcataccttaaagagagatgtgaagatgtttggcttggtatgccatcacctattcctgcgaaatacattgactactggacctttttgaaggacgcgtttggcttagaggaggaataaccatgccagttttggtcaattctctatgatttacttctctcattttgccacatttactttagtagatataatttcattaaaaacaaaaaagaaacaaggtttatattaaatggaaatccataaaccacaattaatcctattttgtcatgttagttttacagaacatcatgttacattgccgacgtactgttactatttaaaatgccatcttaaaacatgttgaatatttttattatatgtatggtttattaataccaaaaaatcttctgataatttttgatccaacataatttgattcattactatatgaacagaaaatgacttttgaaggttatacatgacaatacaaaatcaaattatatcacagcaataagttgtgattctattaaacatttttgaaacctttttgacacgtttattacttacataattaagttttgtagcaacccacctcatcaaaataattcttaaacctctctagagtaaatatatttatcttttgaacttagtaaagctatgggaagaaaaagaacctccaacacacacacacacacacacacacacgcacgtgcacacacactggaaacatatgcagtatttatatttgtaatgcccttttttctatctaaagtcagcttgttagcttaggaatatatgcatgtgtgtataattatagtttgaccaaaactttattatgtctaaaatatttacaaatgtgaaagctgaagattttgagatttttgttttttttttggtttgttttacacacacatcccacgcgccccaccctagaggtttaaatattcagaaactacaacatttttcccctgcatttttctagttctatttttatttttcttcagcagaactcttgtcatgtagtgtacatttgattaaaacccatagccatgta

SEQ ID NO: 9293 - DNA, 1430 bp, Homo sapiens
  source 1..1430: mol_type = unassigned DNA
aacgtgggggccaaacaacacggccgggaggcgccgctgcctgccgggccctctcttctgggaccctggattttcggacactgagcgccatggccctgcctctgctgccgggcaacagcttcaaccgcaacgtgggaaaggagaagtttcacaaatcccaacattggggcttttgcaacaatgttatgatgttggtgagtgatgaaaagcctggaataggtggagaaccacttctggggcaaaagataaagcctaaatgtagcatatatcctaaaggagatggaagtgatgtaccatcatgggtagcctttgataaacaggtattatcttttgatgcctatttggaagaggaagtacttgataaaagccaaaccaactacagaataagatactataaaatctacttctaccctgaagatgacacaattcaagtaaatgaaccagaggtgaaaaatagtggattacttcaagggacttctatccggcgtcatcggattactcttccgcctcctgatgaggatcagttttatactgtgtatcattttaatgtcggcacagaggttgtcttctatggccggacattcaagatttatgactgtgatgcattcacaagaaactttttgaggaaaataggggtcaaagtgaatcccccagtgcaatgtccagaagatccttacatgaagattcggagagaggttgtagaacacgtagagcccttacgtccctacgaatccctcgacaccctgaaacagttcctccagtatcatggcaagattttgtgtttcttctgcctgtgggatgactcagtctcaatgtttggagaccgtagagaactcatcctgcattacttcttgtgtgatgatactattgaaatcaaagaattgcttccacacagctcaggccgagatgctctaaaaatgttcctccggaggagtaagctacccaagaattgcccacctagagtctatcaaccaggccagataacagatcgagcagttctcaattcatatggtgactttataaagaaccaagcggatggctacctgttcgatagatataagctaggaaaagtagaccaagagttttacaaagatagtgacctgtccctaggagtcaccatcaatgtgtggggaagaaaagtgctcctttatgactgtgatgaatttacgaagtcttattataagtctaaatatggaattgagaactttacctcagtttcatgcaagcctccttctcctcctccaaaaatagaaaggaaatttccaccttacaacggttttggttctgaagaggattctctccgtaactgcatagacctcaagcccacacctcatcggaggaacttcaagaagtttatggaaaaagacagctatggctccaaaagcaatatactctttttttgcaaaactagtcacagacaaatgtgttga

SEQ ID NO: 9294 - DNA, 2464 bp, Homo sapiens
  source 1..2464: mol_type = unassigned DNA
gggggccaaacaacacggccgggaggcgccgctgcctgccgggccctctcttctgggaccctggattttcggacactgagcgccatggccctgcctctgctgccgggcaacagcttcaaccgcaacgtgggaaaggagaagtttcacaaatcccaacattggggcttttgcaacaatgttatgatgttggtgagtgatgaaaagcctggaataggtggagaaccacttctggggcaaaagataaagcctaaatgtagcatatatcctaaaggagatggaagtgatgtaccatcatgggtagcctttgataaacaggtattatcttttgatgcctatttggaagaggaagtacttgataaaagccaaaccaactacagaataagatactataaaatctacttctaccctgaagatgacacaattcaagtaaatgaaccagaggtgaaaaatagtggattacttcaagggacttctatccggcgtcatcggattactcttccgcctcctgatgaggatcagttttatactgtgtatcattttaatgtcggcacagaggttgtcttctatggccggacattcaagatttatgactgtgatgcattcacaagaaactttttgaggaaaataggggtcaaagtgaatcccccagtgcaatgtccagaagatccttacatgaagattcggagagaggttgtagaacacgtagagcccttacgtccctacgaatccctcgacaccctgaaacagttcctccagtatcatggcaagattttgtgtttcttctgcctgtgggatgactcagtctcaatgtttggagaccgtagagaactcatcctgcattacttcttgtgtgatgatactattgaaatcaaagaattgcttccacacagctcaggccgagatgctctaaaaatgttcctccggaggagtaagctacccaagaattgcccacctagagtctatcaaccaggccagataacagatcgagcagttctcaattcatatggtgactttataaagaaccaagcggatggctacctgttcgatagatataagctaggaaaagtagaccaagagttttacaaagatagtgacctgtccctaggagtcaccatcaatgtgtggggaagaaaagtgctcctttatgactgtgatgaatttacgaagtcttattataagtctaaatatggaattgagaactttacctcagtttcatgcaagcctccttctcctcctccaaaaatagaaaggaaatttccaccttacaacggttttggttctgaagaggattctctccgtaactgcatagacctcaagcccacacctcatcggaggaacttcaagaagtttatggaaaaagacagctatggctccaaaagcaatatactccgtttttttgcaaaactagtcacagacaaatgtgttgacttggacaggatgtttgttatttcatattatctcggtgatgacaccatttcagtgtttgaacctatagagaggaattcaggaattgctggtgggatgttcttgaaaagaagtcgcgttaagaagcctggacaagaagtctttaaaagtgaactatctgaatatatcaaggccgaggagctgtacattggagtcacggtgaatgtgaatggttacctatttcgtttgctcaatgctgatgagtataccttaaactacatggagcagaatacagataagtatcctttcagtaacctcaaacttgccctacaaaagctgaagcaagaagaaggaaaatccagagagctcaagcaggtatttaaagctgctgactctaagcacacaaatatggtggattataatacattcagagacatattgatgtctttgactgttggaaaccttgcagagcaagaatttgtaaccattgcacgtcactaccgtgtgcctgagggcacatgttcagatatggatttcttaatcgcactggcccacgaaaagttcaagaaaaatatgtttgagaatttcgacactttcatttattcctgtgtgtatgaagatcgagaaaaaaaaaatgtattacccaccaaagacattaaaaggctgtgcaaatcctccagattacctttgagtgatgatcttctagaatccttattgtcaaggtttgaagacagtgaaaaacaaatagattataagtcatttttctctgccctgaactggagaaagaatccagtgcctgaattgcaaccagcatcataccttaaagagagatgtgaagatgtttggcttggtatgccatcacctattcctgcgaaatacattgactactggacctttttgaaggacgcgtttggcttagaggaggaataaccatgccagttttggtcaattctctatgatttacttctctcattttgccacatttactttagtagatataatttcattaaaaacaaaaaagaaacaaggtttatattaaatggaaatccataaaccacaa

SEQ ID NO: 9295 - DNA, 2274 bp, Homo sapiens
  source 1..2274: mol_type = unassigned DNA
aaacaacacggccgggaggcgccgctgcctgccgggccctctcttctgggaccctggattttcggacactgagcgccatggccctgcctctgctgccgggcaacagcttcaaccgcaacgtgagaaaggagatggaagtgatgtaccatcatgggtagcctttgataaacaggtattatcttttgatgcctatttggaagaggaagtacttgataaaagccaaaccaactacagaataagatactataaaatctacttctaccctgaagatgacacaattcaagtaaatgaaccagaggtgaaaaatagtggattacttcaagggacttctatccggcgtcatcggattactcttccgcctcctgatgaggatcagttttatactgtgtatcattttaatgtcggcacagaggttgtcttctatggccggacattcaagatttatgactgtgatgcattcacaagaaactttttgaggaaaataggggtcaaagtgaatcccccagtgcaatgtccagaagatccttacatgaagattcggagagaggttgtagaacacgtagagcccttacgtccctacgaatccctcgacaccctgaaacagttcctccagtatcatggcaagattttgtgtttcttctgcctgtgggatgactcagtctcaatgtttggagaccgtagagaactcatcctgcattacttcttgtgtgatgatactattgaaatcaaagaattgcttccacacagctcaggccgagatgctctaaaaatgttcctccggaggagtaagctacccaagaattgcccacctagagtctatcaaccaggccagataacagatcgagcagttctcaattcatatggtgactttataaagaaccaagcggatggctacctgttcgatagatataagctaggaaaagtagaccaagagttttacaaagatagtgacctgtccctaggagtcaccatcaatgtgtggggaagaaaagtgctcctttatgactgtgatgaatttacgaagtcttattataagtctaaatatggaattgagaactttacctcagtttcatgcaagcctccttctcctcctccaaaaatagaaaggaaatttccaccttacaacggttttggttctgaagaggattctctccgtaactgcatagacctcaagcccacacctcatcggaggaacttcaagaagtttatggaaaaagacagctatggctccaaaagcaatatactccgtttttttgcaaaactagtcacagacaaatgtgttgacttggacaggatgtttgttatttcatattatctcggtgatgacaccatttcagtgtttgaacctatagagaggaattcaggaattgctggtgggatgttcttgaaaagaagtcgcgttaagaagcctggacaagaagtctttaaaagtgaactatctgaatatatcaaggccgaggagctgtacattggagtcacggtgaatgtgaatggttacctatttcgtttgctcaatgctgatgagtataccttaaactacatggagcagaatacagataagtatcctttcagtaacctcaaacttgccctacaaaagctgaagcaagaagaaggaaaatccagagagctcaagcaggtatttaaagctgctgactctaagcacacaaatatggtggattataatacattcagagacatattgatgtctttgactgttggaaaccttgcagagcaagaatttgtaaccattgcacgtcactaccgtgtgcctgagggcacatgttcagatatggatttcttaatcgcactggcccacgaaaagttcaagaaaaatatgtttgagaatttcgacactttcatttattcctgtgtgtatgaagatcgagaaaaaaaaaatgtattacccaccaaagacattaaaaggctgtgcaaatcctccagattacctttgagtgatgatcttctagaatccttattgtcaaggtttgaagacagtgaaaaacaaatagattataagtcatttttctctgccctgaactggagaaagaatccagtgcctgaattgcaaccagcatcataccttaaagagagatgtgaagatgtttggcttggtatgccatcacctattcctgcgaaatacattgactactggacctttttgaaggacgcgtttggcttagaggaggaataaccatgccagttttggtcaattctctatgatttacttctctcattttgccacatttactttagtagatataatttcattaaaaa

SEQ ID NO: 9296 - DNA, 2259 bp, Homo sapiens
  source 1..2259: mol_type = unassigned DNA
cccagcctgtcccgggccgcgagcgcttccagtcgggttacttctgggggacaagaaaggcaccgtctgaacggtcgagacgctttttcccgctacggttttccccggagctgacaggggcagcaaggtcggagttgatccgagggtccctgcctggtcccggggggacggtcagcctcccgcccggagccgcggggagaggaagcaggtcggggtctccgggacgcgcagacacccagacaccggcggcctcctcccaccaggctggcagtcgctgagccctggcgcctccttaaagccgcagctccgccccgaccgccccgcccgccagtccgtcctcagaccctcccaaccgccgggtccccgccgcctcggcggagtgttgtagagcctcgagcctgcgaggagcgcgccgcccgccagctccctgcgtcccgtcccgcgtccccgcgttcccgcgtcctgcgatccgccgccatggccagtgaggagctggcgtgcaagctggagcgccggctgcggcgcgaggaggccgaggagagtggcccccagctggctcccctcggcgccccagccccggagcccaagcccgagcccgagcctcccgcccgtgcgcccacggccagcgccgacgcggagctgagcgcccagctgagccggcggctggacatcaacgagggcgctgcgcggccccggcgctgcagggtcttcaacccctacacggagttcccggagttcagccgccgcctcatcaaggacctggagagcatgttcaaactgtatgacgctgggcgggatggcttcatcgacctgatggagctgaagctgatgatggagaagctgggggccccccagacccacctgggcctgaagagcatgatcaaggaggtggatgaggacttcgatggcaagctcagcttccgggagttcctgctcattttccacaaggccgcggcaggggagctgcaggaggacagtgggctgatggcgctggcaaagctttctgagatcgatgtggccctggagggtgtcaaaggtgccaagaacttctttgaagccaaggtccaagccttgtcatcggccagtaagtttgaagcagagttgaaagctgagcaagatgagcggaagcgggaggaggaggagaggcggctccgccaggcagccttccagaaactcaaggccaacttcaatacatagtcctgctgaccttgccctctgcccacagctgtgcctcacagatgccccgagaagagatgactaggcatcttcatcactgctgtcggtcccctccctgagccagcatctccatccaccaccccgtgccagctcccgtgccagccttcattcctcccagtgtccaagcccctccaggagggtcctggggtgggccagatgcctgcccacctctgtctcctgcctctgctcctctgcccttcttatagccagaacttgtatcttctcagcaaccttcactttgtccttgtccctttaccattccccatcaaagagtagtctgctatatcaatttgtgtagatatgtctgtctttttgggtcctcagagaaaatgcccattttctcggagaattctctgcactcctctctgcttcacattcaacttccctgttctcatctttggtaggattctgccagttgcttttgcatcttctgttcctgggtaatggtgggtcttaatggaggctgggtggaccactgcccgtccactcttcaacaggaggaacagcatgccaccatagtaacacacattagagaaaggacagaggtctgctccttcctgccacctttctcctggccccttagcattcccccagtccctccctcttcaccttgctccgtctatgtcttcccagctcagccttttccccactcttaaatactgtactacttcactgtaagaacgaaagaatagttaggataccaatgagtaaaagggttcctgttcactctgactctgtgcaaattgtattacagtagaccgctgacgttcccaagtgacagatccagggcctttcaaacatccccaaagtcatggccatactcaccattagccagtttctaacatctgtttcagggtatccagctgtagatgttcttatcccccatacttgtgagttcttggggttgctcacaaatactaggggtttttgttgtatttttaacaaatatatcctaatgtcatatttattctcttttgtaactgctgtctttacaataaagaaatcatctgcctttctatctta

SEQ ID NO: 9297 - DNA, 1156 bp, Homo sapiens
  source 1..1156: mol_type = unassigned DNA
gctaagtgcaggcggataccccggccttggcggctgcttgcctttctccgtactgtccctgtgaaggccaagatctgtaacgctgacagtccccagacatacgatgggagagttgcagtatgacgctgggcgggatggcttcatcgacctgatggagctgaagctgatgatggagaagctgggggccccccagacccacctgggcctgaagagcatgatcaaggaggtggatgaggacttcgatggcaagctcagcttccgggagttcctgctcattttccacaaggccgcggcaggggagctgcaggaggacagtgggctgatggcgctggcaaagctttctgagatcgatgtggccctggagggtgtcaaaggtgccaagaacttctttgaagccaaggtccaagccttgtcatcggccagtaagtttgaagcagagttgaaagctgagcaagatgagcggaagcgggaggaggaggagaggcggctccgccaggcagccttccagaaactcaaggccaacttcaatacatagtcctgctgaccttgccctctgcccacagctgtgcctcacagatgccccgagaagagatgactaggcatcttcatcactgctgtcggtcccctccctgagccagcatctccatccaccaccccgtgccagctcccgtgccagccttcattcctcccagtgtccaagcccctccaggagggtcctggggtgggccagatgcctgcccacctctgtctcctgcctctgctcctctgcccttcttatagccagaacttgtatcttctcagcaaccttcactttgtccttgtccctttaccattccccatcaaagagtagtctgctatatcaatttgtgtagatatgtctgtctttttgggtcctcagagaaaatgcccattttctcggagaattctctgcactcctctctgcttcacattcaacttccctgttctcatctttggtaggattctgccagttgcttttgcatcttctgttcctgggtaatggtgggtcttaatggaggctgggtggaccactgcccgtccactcttcaacaggaggaacagcatgccaccatagtaacacacattagagaaaggacagaggtctgctccttcctgccacctttctcctggcccctta

SEQ ID NO: 9298 - DNA, 1817 bp, Homo sapiens
  source 1..1817: mol_type = unassigned DNA
actctacagcgtgtatccgtggctgtaacgtgagctggtggagcagtcaaggttagacaggaaattttaattaccctggacttatctggaggcctctttcaaagggaggcaatgagggcagccacttaaaggcaggaccccaatgcaacatcttaaaatgcagccgcaaggtttttgcagcatactaaaagcttgtgttttaattccccaaagagagggtgggaagaggaacatttggctatgggaaagttgtctttttcttaagaatctgaaacggtgatgtcatggatgtcctgccagtgccagagtcccgcgttaccaagacaccagtgaaacccaaaaaggtatgacgctgggcgggatggcttcatcgacctgatggagctgaagctgatgatggagaagctgggggccccccagacccacctgggcctgaagagcatgatcaaggaggtggatgaggacttcgatggcaagctcagcttccgggagttcctgctcattttccacaaggccgcggcaggggagctgcaggaggacagtgggctgatggcgctggcaaagctttctgagatcgatgtggccctggagggtgtcaaaggtgccaagaacttctttgaagccaaggtccaagccttgtcatcggccagtaagtttgaagcagagttgaaagctgagcaagatgagcggaagcgggaggaggaggagaggcggctccgccaggcagccttccagaaactcaaggccaacttcaatacatagtcctgctgaccttgccctctgcccacagctgtgcctcacagatgccccgagaagagatgactaggcatcttcatcactgctgtcggtcccctccctgagccagcatctccatccaccaccccgtgccagctcccgtgccagccttcattcctcccagtgtccaagcccctccaggagggtcctggggtgggccagatgcctgcccacctctgtctcctgcctctgctcctctgcccttcttatagccagaacttgtatcttctcagcaaccttcactttgtccttgtccctttaccattccccatcaaagagtagtctgctatatcaatttgtgtagatatgtctgtctttttgggtcctcagagaaaatgcccattttctcggagaattctctgcactcctctctgcttcacattcaacttccctgttctcatctttggtaggattctgccagttgcttttgcatcttctgttcctgggtaatggtgggtcttaatggaggctgggtggaccactgcccgtccactcttcaacaggaggaacagcatgccaccatagtaacacacattagagaaaggacagaggtctgctccttcctgccacctttctcctggccccttagcattcccccagtccctccctcttcaccttgctccgtctatgtcttcccagctcagccttttccccactcttaaatactgtactacttcactgtaagaacgaaagaatagttaggataccaatgagtaaaagggttcctgttcactctgactctgtgcaaattgtattacagtagaccgctgacgttcccaagtgacagatccagggcctttcaaacatccccaaagtcatggccatactcaccattagccagtttctaacatctgtttcagggtatccagctgtagatgttcttatcccccatacttgtgagttcttggggttgctcacaaatactaggggtttttgttgtatttttaacaaatatatcctaatgtcatatttattctcttttgtaactgctgtctttacaataaagaaatcatctgcctttc

SEQ ID NO: 9299 - DNA, 1538 bp, Homo sapiens
  source 1..1538: mol_type = unassigned DNA
aggaattacatgtttcggagactaacgagtgtcctttcatcccggtcatgcattcctttgaccctgcaggtatgacgctgggcgggatggcttcatcgacctgatggagctgaagctgatgatggagaagctgggggccccccagacccacctgggcctgaagagcatgatcaaggaggtggatgaggacttcgatggcaagctcagcttccgggagttcctgctcattttccacaaggccgcggcaggggagctgcaggaggacagtgggctgatggcgctggcaaagctttctgagatcgatgtggccctggagggtgtcaaaggtgccaagaacttctttgaagccaaggtccaagccttgtcatcggccagtaagtttgaagcagagttgaaagctgagcaagatgagcggaagcgggaggaggaggagaggcggctccgccaggcagccttccagaaactcaaggccaacttcaatacatagtcctgctgaccttgccctctgcccacagctgtgcctcacagatgccccgagaagagatgactaggcatcttcatcactgctgtcggtcccctccctgagccagcatctccatccaccaccccgtgccagctcccgtgccagccttcattcctcccagtgtccaagcccctccaggagggtcctggggtgggccagatgcctgcccacctctgtctcctgcctctgctcctctgcccttcttatagccagaacttgtatcttctcagcaaccttcactttgtccttgtccctttaccattccccatcaaagagtagtctgctatatcaatttgtgtagatatgtctgtctttttgggtcctcagagaaaatgcccattttctcggagaattctctgcactcctctctgcttcacattcaacttccctgttctcatctttggtaggattctgccagttgcttttgcatcttctgttcctgggtaatggtgggtcttaatggaggctgggtggaccactgcccgtccactcttcaacaggaggaacagcatgccaccatagtaacacacattagagaaaggacagaggtctgctccttcctgccacctttctcctggccccttagcattcccccagtccctccctcttcaccttgctccgtctatgtcttcccagctcagccttttccccactcttaaatactgtactacttcactgtaagaacgaaagaatagttaggataccaatgagtaaaagggttcctgttcactctgactctgtgcaaattgtattacagtagaccgctgacgttcccaagtgacagatccagggcctttcaaacatccccaaagtcatggccatactcaccattagccagtttctaacatctgtttcagggtatccagctgtagatgttcttatcccccatacttgtgagttcttggggttgctcacaaatactaggggtttttgttgtatttttaacaaatatatcctaatgtcatatttattctcttttgtaactgctgtctttacaataaagaaatcatctgcc

SEQ ID NO: 9300 - DNA, 1003 bp, Homo sapiens
  source 1..1003: mol_type = unassigned DNA
acttctgggggacaagaaaggcaccgtctgaacggtcgagacgctttttcccgctacggttttccccggagctgacaggggcagcaaggtcggagttgatccgagggtccctgcctggtcccggggggacggtcagcctcccgcccggagccgcggggagaggaagcaggtcggggtctccgggacgcgcagacacccagacaccggcggcctcctcccaccaggctggcagtcgctgagccctggcgcctccttaaagccgcagctccgccccgaccgccccgcccgccagtccgtcctcagaccctcccaaccgccgggtccccgccgcctcggcggagtgttgtagagcctcgagcctgcgaggagcgcgccgcccgccagctccctgcgtcccgtcccgcgtccccgcgttcccgcgtcctgcgatccgccgcctcatcaaggacctggagagcatgttcaaactgtatgacgctgggcgggatggcttcatcgacctgatggagctgaagctgatgatggagaagctgggggccccccagacccacctgggcctgaagagcatgatcaaggaggtggatgaggacttcgatggcaagctcagcttccgggagttcctgctcattttccacaaggccgcggcaggggagctgcaggaggacagtgggctgatggcgctggcaaagctttctgagatcgatgtggccctggagggtgtcaaaggtgccaagaacttctttgaagccaaggtccaagccttgtcatcggccagtaagtttgaagcagagttgaaagctgagcaagatgagcggaagcgggaggaggaggagaggcggctccgccaggcagccttccagaaactcaaggccaacttcaatacatagtcctgctgaccttgccctctgcccacagctgtgcctcacagatgccccgagaagagatgactaggcatcttcatcactgctgtcggtcccctccctgagccagcatctccatccac

SEQ ID NO: 9301 - DNA, 5438 bp, Homo sapiens
  source 1..5438: mol_type = unassigned DNA
gggtcgtccgtcgcgccgcccggcgaggagtgggctggcggcggtagctgtcgcccgcttggttgcgtgaccgcggggtccgcgtccgctccctccacccttcgcccttcgcccttcgcctcgttccggcctccgcggcccagcaacggccgtcatggtgccgtcggcgctccctgcgcggccccgctgagcctcggtgcggcggcgagcgcggtcgagatcgccatgcctacccgagtatgctgctgctgttccgctttgcgtcctcgctacaaacgcctggtggacaacatattccctgaagatccaaaagatggccttgtgaaaactgatatggagaaattgacattttatgcagtatctgctccagagaaactggatcgaattggttcttacctggcagaaaggttgagcagggatgttgtcagacatcgttctgggtatgttttgattgctatggaggcactggaccaacttctcatggcttgccattctcaaagcattaagccatttgtagaaagctttcttcatatggtggcaaagctgctggaatcgggggaaccaaagcttcaagttcttggaacaaattcttttgtcaaatttgcaaatattgaagaagacacaccatcctatcacagacgttatgacttttttgtgtctcgattcagtgccatgtgccattcctgtcatagtgatccagaaatacgaacagagatacgaattgctggaattagaggtattcaaggtgtggttcgcaaaacagtcaacgatgaacttcgggccaccatttgggaacctcagcatatggataagattgttccatccctcctgtttaacatgcaaaagatagaagaagttgacagtcgcataggccctccttcttctccttctgcaactgacaaagaagagaatcctgctgtgctggctgaaaactgtttcagagaactgctgggtcgagcaacttttgggaatatgaataatgctgttagaccagtttttgcgcatttagatcatcacaaactgtgggatcccaatgaatttgcagttcactgctttaaaattataatgtattccattcaggctcagtattctcaccatgtgatccaggagattctaggacaccttgatgctcgtaaaaaagatgctccccgggttcgagcaggtattattcaggttctgttagaggctgttgccattgctgctaaaggttccataggtccgacagtgctggaagtcttcaatacccttttgaaacatctgcgtctcagcgttgaattcgaagcaaatgatttacaggggggatctgtaggcagtgtcaacttaaatacaagttccaaagacaatgatgagaagattgtgcagaatgctatcatccaaacaataggattttttggaagtaacctaccagattatcagaggtcagaaatcatgatgttcattatggggaaagtacctgtctttggaacatctacccatactttggatatcagtcaactaggggatttgggaaccaggagaattcagataatgttgctgagatctttgcttatggtgacctctggatataaagcgaagacgattgttactgcactgccagggtctttcctggatcctttgttatcaccatctctcatggaggactacgaactgagacagttggtcttggaagtaatgcataatctcatggatcgtcatgacaatagggcaaagcttcgagggatcagaataataccggatgtagctgacctaaagataaaaagagaaaaaatttgcagacaagacacaagtttcatgaaaaagaatgggcaacagctgtatcggcacatatatttgggttgtaaagaggaagacaacgttcagaaaaactatgaactactttatacttctcttgctcttataactattgaactggctaatgaagaagtagttattgatctcattcgactggccattgctttacaggacagtgcaattatcaatgaggataatttgccaatgttccatcgttgtggaatcatggcactggttgcagcatacctcaactttgtaagtcagatgatagctgtccctgcattttgccagcatgttagcaaggttattgaaattcgaactatggaagccccttattttctaccagagcatatcttcagagataagtgcatgcttccaaaatctttagagaagcatgaaaaagatttgtactttctgaccaacaagattgcagagtcgctaggtggaagtggatatagtgttgagagattgtcagttccgtatgtaccacaagtaacagatgaagatcgactttctagaagaaaaagcattgtggacaccgtatccattcaggtggatattttatccaacaatgttccttctgatgatgtggttagtaacactgaagaaatcacttttgaagcattgaagaaagcaattgataccagtggaatggaagaacaggaaaaggaaaagaggcgtcttgtgatagagaaatttcagaaagcaccttttgaagaaatagcagcacagtgtgaatccaaagcaaatttgcttcatgatagacttgcccaaatattggaactcaccatacgtcctcctcccagtccatcaggaacactgaccattacttctgggcatgcccaataccaatctgtcccagtctatgagatgaagtttccagatctgtgtgtgtactgatcggcgcatgaagacctcaggatatgatttgtaaagcctaaaaattaaggccaagctgagctttcagggtttacttaatgtgtattaacatacttcttgaaaataatgatggaacatatctttaaccaaatgtttggcataccatattagaagttttggagctatatataatttcgagtactttcaaagatagatttatgccatgttaatttgctttgaggttcctgttgcctttttaagttgaacatgttttggtttcactttattccactgttaagtagtatgttttaaacttttcacaaatgtaatgttttttaaaaagtaagccttcagaggattgaaactgtataaattgtttatctcttaaacatctacacagccgcttagatgtagaatttttgttgttgttttctgcaaaggcagatacatttaaatatattcctagtcctgggactgcaaaactgttcggtggctttttgtccccatgctttagataagctgggataggcaccttgctattcagttactataataatatgtgataggcattcctcatcttcttcacaataataggacatctgttgaatagcattcctcgaatataaccctaaaaacgccatactttaaattgtctggttcttgtaatattgtgtttcctgccaagagtttgaccattctgcttgagaagtgtagagcttactcttggagtaccaaactgtgcaatatttttacatcataagatgtattagtttacaggctgtgctttgaaattatagtagtattttgctgtggctccattaattaaatgagatatatatttagtgcagaaaaaagacatttaaaacagctattagttcacctgtgaagagtctgtacattttgatttctattaagagcacatttatttacatttgtatattattttaaatcctcatagtcaaaaaattctccagatggacttttaatttgtaagatttgaactgtgacttgtatacatctgtttagaatcaattatatttgaaaagctgcctgtgttttaacagtcaagtgtgctaaagtttgtcaatttaagctgcttttgatttcagctaccaagatcacaggtgcactctacacataacactgacagacccataacattacatacatcttagtgaattctatcacatggtaaaatgaacagctttctttgtaactcataaaattctcttaggacatttttataaagtcacctgtttatagttctatcttttcagattccatttctttttacataaaacagcatacatatcaaaaactgtagcctagaatacagtttaatttttggcttttgtttttgtttaaaaaattgcagtgaagaatgggatgtttgtgtttatggctatttgggcacctttagtagaaacagacaaaagtaaggaaacgataataggacaagcatacttgaaaatttctgaatacttaaacaaaagcgcaacatcttgaaaaccagtctagtcattgaaacctatgaaatgacactgaaagatcctgggctgcttcttaaataagtagatcagcaagacttgtttcagagtgacagtggagtcgttaccgctggaggactaaagggccctgtggcagctgtcactggaactttgcctcttgatcaggaaaaatgcttcaccagtccgtaaagccaagttgtatttttttaattgcccttttttccttctgtatttttaaagaaggatgttaatttttgactatatattttaaaaaaatctaagcagggggacatgcaaaaacaatcatcatccacttggatgtcattttatagattaacactgtgtgcttttgtatggaaaaaatatatataatttaatagtataaaaaataaaatatatattcatttgcacttacgtgaaacacaaactttgctctacaaaatttcgtgtttcttagtgattttaaaatgcatgtattgcatgtaaaggaaaaccattacaattaatgtttatcacacctttatcttggtctttgttgatttgggttttgttggggtttttgttactgtttttaaattacagtaggcttctatatatcctggatttctgaactggtcttgttgacaaggattcccaagaaatggatcttttcactggctgactctcccatatctgcaagagattctgcaggaactgggtgtgcacacggtgttgtagccagttcaggtactgaatatttaggatttggtgaagttcactgtattgctatatttttgtagataaataaaactcaataaattgttaatcattctctttttgctgtatagaattgcttatatcactctttctttcatgacattggttaacatttaaatgttcctcctgtacttgtgttgtctgtgaccgcttatagagttttattgttattggtgtttacctgaatacctatgcgtacacacacacatatttccttaatacttctgaactcattatcttttagaataataatactactacactttaccagcaattaacttctccctacccaaaatgtttttcttcctgtctgaaaatggaactaatttgtcttattcgtgcttatatctgtattaaatgcaataaagttagtttttgaaatgtaaaaattcactgtgcaattcatatgtcagcaataaaacatagattatttgtatataagttcatttttatagctattgttacatttaattaaatttattcaatatttgcttaaattaaaaa

SEQ ID NO: 9302 - DNA, 4776 bp, Homo sapiens
  source 1..4776: mol_type = unassigned DNA
atgaaatctagagtatgctgctgctgttccgctttgcgtcctcgctacaaacgcctggtggacaacatattccctgaagatccaaaagatggccttgtgaaaactgatatggagaaattgacattttatgcagtatctgctccagagaaactggatcgaattggttcttacctggcagaaaggttgagcagggatgttgtcagacatcgttctgggtatgttttgattgctatggaggcactggaccaacttctcatggcttgccattctcaaagcattaagccatttgtagaaagctttcttcatatggtggcaaagctgctggaatcgggggaaccaaagcttcaagttcttggaacaaattcttttgtcaaatttgcaaatattgaagaagacacaccatcctatcacagacgttatgacttttttgtgtctcgattcagtgccatgtgccattcctgtcatagtgatccagaaatacgaacagagatacgaattgctggaattagaggtattcaaggtgtggttcgcaaaacagtcaacgatgaacttcgggccaccatttgggaacctcagcatatggataagattgttccatccctcctgtttaacatgcaaaagatagaagaagttgacagtcgcataggccctccttcttctccttctgcaactgacaaagaagagaatcctgctgtgctggctgaaaactgtttcagagaactgctgggtcgagcaacttttgggaatatgaataatgctgttagaccagtttttgcgcatttagatcatcacaaactgtgggatcccaatgaatttgcagttcactgctttaaaattataatgtattccattcaggctcagtattctcaccatgtgatccaggagattctaggacaccttgatgctcgtaaaaaagatgctccccgggttcgagcaggtattattcaggttctgttagaggctgttgccattgctgctaaaggttccataggtccgacagtgctggaagtcttcaatacccttttgaaacatctgcgtctcagcgttgaattcgaagcaaatgatttacaggggggatctgtaggcagtgtcaacttaaatacaagttccaaagacaatgatgagaagattgtgcagaatgctatcatccaaacaataggattttttggaagtaacctaccagattatcagaggtcagaaatcatgatgttcattatggggaaagtacctgtctttggaacatctacccatactttggatatcagtcaactaggggatttgggaaccaggagaattcagataatgttgctgagatctttgcttatggtgacctctggatataaagcgaagacgattgttactgcactgccagggtctttcctggatcctttgttatcaccatctctcatggaggactacgaactgagacagttggtcttggaagtaatgcataatctcatggatcgtcatgacaatagggcaaagcttcgagggatcagaataataccggatgtagctgacctaaagataaaaagagaaaaaatttgcagacaagacacaagtttcatgaaaaagaatgggcaacagctgtatcggcacatatatttgggttgtaaagaggaagacaacgttcagaaaaactatgaactactttatacttctcttgctcttataactattgaactggctaatgaagaagtagttattgatctcattcgactggccattgctttacaggacagtgcaattatcaatgaggataatttgccaatgttccatcgttgtggaatcatggcactggttgcagcatacctcaactttgtaagtcagatgatagctgtccctgcattttgccagcatgttagcaaggttattgaaattcgaactatggaagccccttattttctaccagagcatatcttcagagataagtgcatgcttccaaaatctttagagaagcatgaaaaagatttgtactttctgaccaacaagattgcagagtcgctaggtggaagtggatatagtgttgagagattgtcagttccgtatgtaccacaagtaacagatgaagatcgactttctagaagaaaaagcattgtggacaccgtatccattcaggtggatattttatccaacaatgttccttctgatgatgtggttagtaacactgaagaaatcacttttgaagcattgaagaaagcaattgataccagtggaatggaagaacaggaaaaggaaaagaggcgtcttgtgatagagaaatttcagaaagcaccttttgaagaaatagcagcacagtgtgaatccaaagcaaatttgcttcatgatagacttgcccaaatattggaactcaccatacgtcctcctcccagtccatcaggaacactgaccattacttctgggcatgcccaataccaatctgtcccagtctatgagatgaagtttccagatctgtgtgtgtactgatcggcgcatgaagacctcaggatatgatttgtaaagcctaaaaattaaggccaagctgagctttcagggtttacttaatgtgtattaacatacttcttgaaaataatgatggaacatatctttaaccaaatgtttggcataccatattagaagttttggagctatatataatttcgagtactttcaaagatagatttatgccatgttaatttgctttgaggttcctgttgcctttttaagttgaacatgttttggtttcactttattccactgttaagtagtatgttttaaacttttcacaaatgtaatgttttttaaaaagtaagccttcagaggattgaaactgtataaattgtttatctcttaaacatctacacagccgcttagatgtagaatttttgttgttgttttctgcaaaggcagatacatttaaatatattcctagtcctgggactgcaaaactgttcggtggctttttgtccccatgctttagataagctgggataggcaccttgctattcagttactataataatatgtgataggcattcctcatcttcttcacaataataggacatctgttgaatagcattcctcgaatataaccctaaaaacgccatactttaaattgtctggttcttgtaatattgtgtttcctgccaagagtttgaccattctgcttgagaagtgtagagcttactcttggagtaccaaactgtgcaatatttttacatcataagatgtattagtttacaggctgtgctttgaaattatagtagtattttgctgtggctccattaattaaatgagatatatatttagtgcagaaaaaagacatttaaaacagctattagttcacctgtgaagagtctgtacattttgatttctattaagagcacatttatttacatttgtatattattttaaatcctcatagtcaaaaaattctccagatggacttttaatttgtaagatttgaactgtgacttgtatacatctgtttagaatcaattatatttgaaaagctgcctgtgttttaacagtcaagtgtgctaaagtttgtcaatttaagctgcttttgatttcagctaccaagatcacaggtgcactctacacataacactgacagacccataacattacatacatcttagtgaattctatcacatggtaaaatgaacagctttctttgtaactcataaaattctcttaggacatttttataaagtcacctgtttatagttctatcttttcagattccatttctttttacataaaacagcatacatatcaaaaactgtagcctagaatacagtttaatttttggcttttgtttttgtttaaaaaattgcagtgaagaatgggatgtttgtgtttatggctatttgggcacctttagtagaaacagacaaaagtaaggaaacgataataggacaagcatacttgaaaatttctgaatacttaaacaaaagcgcaacatcttgaaaaccagtctagtcattgaaacctatgaaatgacactgaaagatcctgggctgcttcttaaataagtagatcagcaagacttgtttcagagtgacagtggagtcgttaccgctggaggactaaagggccctgtggcagctgtcactggaactttgcctcttgatcaggaaaaatgcttcaccagtccgtaaagccaagttgtatttttttaattgcccttttttccttctgtatttttaaagaaggatgttaatttttgactatatattttaaaaaaatctaagcagggggacatgcaaaaacaatcatcatccacttggatgtcattttatagattaacactgtgtgcttttgtatggaaaaaatatatataatttaatagtataaaaaataaaatatatattcatttgcacttacgtgaaacacaaactttgctctacaaaatttcgtgtttcttagtgattttaaaatgcatgtattgcatgtaaaggaaaaccattacaattaatgtttatcacacctttatcttggtctttgttgatttgggttttgttggggtttttgttactgtttttaaattacagtaggcttctatatatcctggatttctgaactggtcttgttgacaaggattcccaagaaatggatcttttcactggctgactctcccatatctgcaagagattctgcaggaactgggtgtgcacacggtgttgtagccagttcaggtactgaatatttaggatttggtgaagttcactgtattgctatatttttgtagataaataaaactcaataaattgttaatcattctctttttgctgt

SEQ ID NO: 9303 - DNA, 4644 bp, Homo sapiens
  source 1..4644: mol_type = unassigned DNA
atgccaaaaggagtatgctgctgctgttccgctttgcgtcctcgctacaaacgcctggtggacaacatattccctgaagatccaaaagatggccttgtgaaaactgatatggagaaattgacattttatgcagtatctgctccagagaaactggatcgaattggttcttacctggcagaaaggttgagcagggatgttgtcagacatcgttctgggtatgttttgattgctatggaggcactggaccaacttctcatggcttgccattctcaaagcattaagccatttgtagaaagctttcttcatatggtggcaaagctgctggaatcgggggaaccaaagcttcaagttcttggaacaaattcttttgtcaaatttgcaaatattgaagaagacacaccatcctatcacagacgttatgacttttttgtgtctcgattcagtgccatgtgccattcctgtcatagtgatccagaaatacgaacagagatacgaattgctggaattagaggtattcaaggtgtggttcgcaaaacagtcaacgatgaacttcgggccaccatttgggaacctcagcatatggataagattgttccatccctcctgtttaacatgcaaaagatagaagaagttgacagtcgcataggccctccttcttctccttctgcaactgacaaagaagagaatcctgctgtgctggctgaaaactgtttcagagaactgctgggtcgagcaacttttgggaatatgaataatgctgttagaccagtttttgcgcatttagatcatcacaaactgtgggatcccaatgaatttgcagttcactgctttaaaattataatgtattccattcaggctcagtattctcaccatgtgatccaggagattctaggacaccttgatgctcgtaaaaaagatgctccccgggttcgagcaggtattattcaggttctgttagaggctgttgccattgctgctaaaggttccataggtccgacagtgctggaagtcttcaatacccttttgaaacatctgcgtctcagcgttgaattcgaagcaaatgatttacaggggggatctgtaggcagtgtcaacttaaatacaagttccaaagacaatgatgagaagattgtgcagaatgctatcatccaaacaataggattttttggaagtaacctaccagattatcagaggtcagaaatcatgatgttcattatggggaaagtacctgtctttggaacatctacccatactttggatatcagtcaactaggggatttgggaaccaggagaattcagataatgttgctgagatctttgcttatggtgacctctggatataaagcgaagacgattgttactgcactgccagggtctttcctggatcctttgttatcaccatctctcatggaggactacgaactgagacagttggtcttggaagtaatgcataatctcatggatcgtcatgacaatagggcaaagcttcgagggatcagaataataccggatgtagctgacctaaagataaaaagagaaaaaatttgcagacaagacacaagtttcatgaaaaagaatgggcaacagctgtatcggcacatatatttgggttgtaaagaggaagacaacgttcagaaaaactatgaactactttatacttctcttgctcttataactattgaactggctaatgaagaagtagttattgatctcattcgactggccattgctttacaggacagtgcaattatcaatgaggataatttgccaatgttccatcgttgtggaatcatggcactggttgcagcatacctcaactttgtaagtcagatgatagctgtccctgcattttgccacaagattgcagagtcgctaggtggaagtggatatagtgttgagagattgtcagttccgtatgtaccacaagtaacagatgaagatcgactttctagaagaaaaagcattgtggacaccgtatccattcaggtggatattttatccaacaatgttccttctgatgatgtggttagtaacactgaagaaatcacttttgaagcattgaagaaagcaattgataccagtggaatggaagaacaggaaaaggaaaagaggcgtcttgtgatagagaaatttcagaaagcaccttttgaagaaatagcagcacagtgtgaatccaaagcaaatttgcttcatgatagacttgcccaaatattggaactcaccatacgtcctcctcccagtccatcaggaacactgaccattacttctgggcatgcccaataccaatctgtcccagtctatgagatgaagtttccagatctgtgtgtgtactgatcggcgcatgaagacctcaggatatgatttgtaaagcctaaaaattaaggccaagctgagctttcagggtttacttaatgtgtattaacatacttcttgaaaataatgatggaacatatctttaaccaaatgtttggcataccatattagaagttttggagctatatataatttcgagtactttcaaagatagatttatgccatgttaatttgctttgaggttcctgttgcctttttaagttgaacatgttttggtttcactttattccactgttaagtagtatgttttaaacttttcacaaatgtaatgttttttaaaaagtaagccttcagaggattgaaactgtataaattgtttatctcttaaacatctacacagccgcttagatgtagaatttttgttgttgttttctgcaaaggcagatacatttaaatatattcctagtcctgggactgcaaaactgttcggtggctttttgtccccatgctttagataagctgggataggcaccttgctattcagttactataataatatgtgataggcattcctcatcttcttcacaataataggacatctgttgaatagcattcctcgaatataaccctaaaaacgccatactttaaattgtctggttcttgtaatattgtgtttcctgccaagagtttgaccattctgcttgagaagtgtagagcttactcttggagtaccaaactgtgcaatatttttacatcataagatgtattagtttacaggctgtgctttgaaattatagtagtattttgctgtggctccattaattaaatgagatatatatttagtgcagaaaaaagacatttaaaacagctattagttcacctgtgaagagtctgtacattttgatttctattaagagcacatttatttacatttgtatattattttaaatcctcatagtcaaaaaattctccagatggacttttaatttgtaagatttgaactgtgacttgtatacatctgtttagaatcaattatatttgaaaagctgcctgtgttttaacagtcaagtgtgctaaagtttgtcaatttaagctgcttttgatttcagctaccaagatcacaggtgcactctacacataacactgacagacccataacattacatacatcttagtgaattctatcacatggtaaaatgaacagctttctttgtaactcataaaattctcttaggacatttttataaagtcacctgtttatagttctatcttttcagattccatttctttttacataaaacagcatacatatcaaaaactgtagcctagaatacagtttaatttttggcttttgtttttgtttaaaaaattgcagtgaagaatgggatgtttgtgtttatggctatttgggcacctttagtagaaacagacaaaagtaaggaaacgataataggacaagcatacttgaaaatttctgaatacttaaacaaaagcgcaacatcttgaaaaccagtctagtcattgaaacctatgaaatgacactgaaagatcctgggctgcttcttaaataagtagatcagcaagacttgtttcagagtgacagtggagtcgttaccgctggaggactaaagggccctgtggcagctgtcactggaactttgcctcttgatcaggaaaaatgcttcaccagtccgtaaagccaagttgtatttttttaattgcccttttttccttctgtatttttaaagaaggatgttaatttttgactatatattttaaaaaaatctaagcagggggacatgcaaaaacaatcatcatccacttggatgtcattttatagattaacactgtgtgcttttgtatggaaaaaatatatataatttaatagtataaaaaataaaatatatattcatttgcacttacgtgaaacacaaactttgctctacaaaatttcgtgtttcttagtgattttaaaatgcatgtattgcatgtaaaggaaaaccattacaattaatgtttatcacacctttatcttggtctttgttgatttgggttttgttggggtttttgttactgtttttaaattacagtaggcttctatatatcctggatttctgaactggtcttgttgacaaggattcccaagaaatggatcttttcactggctgactctcccatatctgcaagagattctgcaggaactgggtgtgcacacggtgttgtagccagttcaggtactgaatatttaggatttggtgaagttcactgtattgctatatttttgtagataaataaaactcaataaattgttaatcattctctttttgctgt

SEQ ID NO: 9304 - DNA, 4972 bp, Homo sapiens
  source 1..4972: mol_type = unassigned DNA
gaggagtgggctggcggcggtagctgtcgcccgcttggttgcgtgaccgcggggtccgcgtccgctccctccacccttcgcccttcgcccttcgcctcgttccggcctccgcggcccagcaacggccgtcatggtgccgtcggcgctccctgcgcggccccgctgagcctcggtgcggcggcgagcgcggtcgagatcgccatgcctacccgagtatgctgctgctgttccgctttgcgtcctcgctacaaacgcctggtggacaacatattccctgaagatccaaaagatggccttgtgaaaactgatatggagaaattgacattttatgcagtatctgctccagagaaactggatcgaattggttcttacctggcagaaaggttgagcagggatgttgtcagacatcgttctgggtatgttttgattgctatggaggcactggaccaacttctcatggcttgccattctcaaagcattaagccatttgtagaaagctttcttcatatggtggcaaagctgctggaatcgggggaaccaaagcttcaagttcttggaacaaattcttttgtcaaatttgcaaatattgaagaagacacaccatcctatcacagacgttatgacttttttgtgtctcgattcagtgccatgtgccattcctgtcatagtgatccagaaatacgaacagagatacgaattgctggaattagaggtattcaaggtgtggttcgcaaaacagtcaacgatgaacttcgggccaccatttgggaacctcagcatatggataagattgttccatccctcctgtttaacatgcaaaagatagaagaagttgacagtcgcataggccctccttcttctccttctgcaactgacaaagaagagaatcctgctgtgctggctgaaaactgtttcagagaactgctgggtcgagcaacttttgggaatatgaataatgctgttagaccagtttttgcgcatttagatcatcacaaactgtgggatcccaatgaatttgcagttcactgctttaaaattataatgtattccattcaggctcagtattctcaccatgtgatccaggagattctaggacaccttgatgctcgtaaaaaagatgctccccgggttcgagcaggtattattcaggttctgttagaggctgttgccattgctgctaaaggttccataggtccgacagtgctggaagtcttcaatacccttttgaaacatctgcgtctcagcgttgaattcgaagcaaatgatttacaggggggatctgtaggcagtgtcaacttaaatacaagttccaaagacaatgatgagaagattgtgcagaatgctatcatccaaacaataggattttttggaagtaacctaccagattatcagaggtcagaaatcatgatgttcattatggggaaagtacctgtctttggaacatctacccatactttggatatcagtcaactaggggatttgggaaccaggagaattcagataatgttgctgagatctttgcttatggtgacctctggatataaagcgaagacgattgttactgcactgccagggtctttcctggatcctttgttatcaccatctctcatggaggactacgaactgagacagttggtcttggaagtaatgcataatctcatggatcgtcatgacaatagggcaaagcttcgagggatcagaataataccggatgtagctgacctaaagataaaaagagaaaaaatttgcagacaagacacaagtttcatgaaaaagaatgggcaacagctgtatcggcacatatatttgggttgtaaagaggaagacaacgttcagaaaaactatgaactactttatacttctcttgctcttataactattgaactggctaatgaagaagtagttattgatctcattcgactggccattgctttacaggacagtgcaattatcaatgaggataatttgccaatgttccatcgttgtggaatcatggcactggttgcagcatacctcaactttgtaagtcagatgatagctgtccctgcattttgccagcatgttagcaaggttattgaaattcgaagaagccccttattttctaccagagcatatcttcagagataagtgcatgcttccaaaatctttagagaagcatgaaaaagatttgtactttctgaccaacaagattgcagagtcgctaggtggaagtggatatagtgttgagagattgtcagttccgtatgtaccacaagtaacagatgaagatcgactttctagaagaaaaagcattgtggacaccgtatccattcaggtggatattttatccaacaatgttccttctgatgatgtggttagtaacactgaagaaatcacttttgaagcattgaagaaagcaattgataccagtggaatggaagaacaggaaaaggaaaagaggcgtcttgtgatagagaaatttcagaaagcaccttttgaagaaatagcagcacagtgtgaatccaaagcaaatttgcttcatgatagacttgcccaaatattggaactcaccatacgtcctcctcccagtccatcaggaacactgaccattacttctgggcatgcccaataccaatctgtcccagtctatgagatgaagtttccagatctgtgtgtgtactgatcggcgcatgaagacctcaggatatgatttgtaaagcctaaaaattaaggccaagctgagctttcagggtttacttaatgtgtattaacatacttcttgaaaataatgatggaacatatctttaaccaaatgtttggcataccatattagaagttttggagctatatataatttcgagtactttcaaagatagatttatgccatgttaatttgctttgaggttcctgttgcctttttaagttgaacatgttttggtttcactttattccactgttaagtagtatgttttaaacttttcacaaatgtaatgttttttaaaaagtaagccttcagaggattgaaactgtataaattgtttatctcttaaacatctacacagccgcttagatgtagaatttttgttgttgttttctgcaaaggcagatacatttaaatatattcctagtcctgggactgcaaaactgttcggtggctttttgtccccatgctttagataagctgggataggcaccttgctattcagttactataataatatgtgataggcattcctcatcttcttcacaataataggacatctgttgaatagcattcctcgaatataaccctaaaaacgccatactttaaattgtctggttcttgtaatattgtgtttcctgccaagagtttgaccattctgcttgagaagtgtagagcttactcttggagtaccaaactgtgcaatatttttacatcataagatgtattagtttacaggctgtgctttgaaattatagtagtattttgctgtggctccattaattaaatgagatatatatttagtgcagaaaaaagacatttaaaacagctattagttcacctgtgaagagtctgtacattttgatttctattaagagcacatttatttacatttgtatattattttaaatcctcatagtcaaaaaattctccagatggacttttaatttgtaagatttgaactgtgacttgtatacatctgtttagaatcaattatatttgaaaagctgcctgtgttttaacagtcaagtgtgctaaagtttgtcaatttaagctgcttttgatttcagctaccaagatcacaggtgcactctacacataacactgacagacccataacattacatacatcttagtgaattctatcacatggtaaaatgaacagctttctttgtaactcataaaattctcttaggacatttttataaagtcacctgtttatagttctatcttttcagattccatttctttttacataaaacagcatacatatcaaaaactgtagcctagaatacagtttaatttttggcttttgtttttgtttaaaaaattgcagtgaagaatgggatgtttgtgtttatggctatttgggcacctttagtagaaacagacaaaagtaaggaaacgataataggacaagcatacttgaaaatttctgaatacttaaacaaaagcgcaacatcttgaaaaccagtctagtcattgaaacctatgaaatgacactgaaagatcctgggctgcttcttaaataagtagatcagcaagacttgtttcagagtgacagtggagtcgttaccgctggaggactaaagggccctgtggcagctgtcactggaactttgcctcttgatcaggaaaaatgcttcaccagtccgtaaagccaagttgtatttttttaattgcccttttttccttctgtatttttaaagaaggatgttaatttttgactatatattttaaaaaaatctaagcagggggacatgcaaaaacaatcatcatccacttggatgtcattttatagattaacactgtgtgcttttgtatggaaaaaatatatataatttaatagtataaaaaataaaatatatattcatttgcacttacgtgaaacacaaactttgctctacaaaatttcgtgtttcttagtgattttaaaatgcatgtattgcatgtaaaggaaaaccattacaattaatgtttatcacacctttatcttggtctttgttgatttgggttttgttggggtttttgttactgtttttaaattacagtaggcttctatatatcctggatttctgaactggtcttgttgacaaggattcccaagaaatggatcttttcactggctgactctcccatatctgcaagagattctgcaggaactgggtgtgcacacggtgttgtagccagttcaggtactgaatatttaggatttggtgaagttcactgtattgctatatttttgtagataaataaaactcaataaattgttaatcattctctttttgctgt

SEQ ID NO: 9305 - DNA, 5247 bp, Homo sapiens
  source 1..5247: mol_type = unassigned DNA
acagatgaggaccagtaaacacaatagaaagtttatttaatgtggagtatgctgctgctgttccgctttgcgtcctcgctacaaacgcctggtggacaacatattccctgaagatccaaaagatggccttgtgaaaactgatatggagaaattgacattttatgcagtatctgctccagagaaactggatcgaattggttcttacctggcagaaaggttgagcagggatgttgtcagacatcgttctgggtatgttttgattgctatggaggcactggaccaacttctcatggcttgccattctcaaagcattaagccatttgtagaaagctttcttcatatggtggcaaagctgctggaatcgggggaaccaaagcttcaagttcttggaacaaattcttttgtcaaatttgcaaatattgaagaagacacaccatcctatcacagacgttatgacttttttgtgtctcgattcagtgccatgtgccattcctgtcatagtgatccagaaatacgaacagagatacgaattgctggaattagaggtattcaaggtgtggttcgcaaaacagtcaacgatgaacttcgggccaccatttgggaacctcagcatatggataagattgttccatccctcctgtttaacatgcaaaagatagaagaagttgacagtcgcataggccctccttcttctccttctgcaactgacaaagaagagaatcctgctgtgctggctgaaaactgtttcagagaactgctgggtcgagcaacttttgggaatatgaataatgctgttagaccagtttttgcgcatttagatcatcacaaactgtgggatcccaatgaatttgcagttcactgctttaaaattataatgtattccattcaggctcagtattctcaccatgtgatccaggagattctaggacaccttgatgctcgtaaaaaagatgctccccgggttcgagcaggtattattcaggttctgttagaggctgttgccattgctgctaaaggttccataggtccgacagtgctggaagtcttcaatacccttttgaaacatctgcgtctcagcgttgaattcgaagcaaatgatttacaggggggatctgtaggcagtgtcaacttaaatacaagttccaaagacaatgatgagaagattgtgcagaatgctatcatccaaacaataggattttttggaagtaacctaccagattatcagaggtcagaaatcatgatgttcattatggggaaagtacctgtctttggaacatctacccatactttggatatcagtcaactaggggatttgggaaccaggagaattcagataatgttgctgagatctttgcttatggtgacctctggatataaagcgaagacgattgttactgcactgccagggtctttcctggatcctttgttatcaccatctctcatggaggactacgaactgagacagttggtcttggaagtaatgcataatctcatggatcgtcatgacaatagggcaaagcttcgagggatcagaataataccggatgtagctgacctaaagataaaaagagaaaaaatttgcagacaagacacaagtttcatgaaaaagaatgggcaacagctgtatcggcacatatatttgggttgtaaagaggaagacaacgttcagaaaaactatgaactactttatacttctcttgctcttataactattgaactggctaatgaagaagtagttattgatctcattcgactggccattgctttacaggacagtgcaattatcaatgaggataatttgccaatgttccatcgttgtggaatcatggcactggttgcagcatacctcaactttgtaagtcagatgatagctgtccctgcattttgccagcatgttagcaaggttattgaaattcgaactatggaagccccttattttctaccagagcatatcttcagagataagtgcatgcttccaaaatctttagagaagcatgaaaaagatttgtactttctgaccaacaagattgcagagtcgctaggtggaagtggatatagtgttgagagattgtcagttccgtatgtaccacaagtaacagatgaagatcgactttctagaagaaaaagcattgtggacaccgtatccattcaggtggatattttatccaacaatgttccttctgatgatgtggttagtaacactgaagaaatcacttttgaagcattgaagaaagcaattgataccagtggaatggaagaacaggaaaaggaaaagaggcgtcttgtgatagagaaatttcagaaagcaccttttgaagaaatagcagcacagtgtgaatccaaagcaaatttgcttcatgatagacttgcccaaatattggaactcaccatacgtcctcctcccagtccatcaggaacactgaccattacttctgggcatgcccaataccaatctgtcccagtctatgagatgaagtttccagatctgtgtgtgtactgatcggcgcatgaagacctcaggatatgatttgtaaagcctaaaaattaaggccaagctgagctttcagggtttacttaatgtgtattaacatacttcttgaaaataatgatggaacatatctttaaccaaatgtttggcataccatattagaagttttggagctatatataatttcgagtactttcaaagatagatttatgccatgttaatttgctttgaggttcctgttgcctttttaagttgaacatgttttggtttcactttattccactgttaagtagtatgttttaaacttttcacaaatgtaatgttttttaaaaagtaagccttcagaggattgaaactgtataaattgtttatctcttaaacatctacacagccgcttagatgtagaatttttgttgttgttttctgcaaaggcagatacatttaaatatattcctagtcctgggactgcaaaactgttcggtggctttttgtccccatgctttagataagctgggataggcaccttgctattcagttactataataatatgtgataggcattcctcatcttcttcacaataataggacatctgttgaatagcattcctcgaatataaccctaaaaacgccatactttaaattgtctggttcttgtaatattgtgtttcctgccaagagtttgaccattctgcttgagaagtgtagagcttactcttggagtaccaaactgtgcaatatttttacatcataagatgtattagtttacaggctgtgctttgaaattatagtagtattttgctgtggctccattaattaaatgagatatatatttagtgcagaaaaaagacatttaaaacagctattagttcacctgtgaagagtctgtacattttgatttctattaagagcacatttatttacatttgtatattattttaaatcctcatagtcaaaaaattctccagatggacttttaatttgtaagatttgaactgtgacttgtatacatctgtttagaatcaattatatttgaaaagctgcctgtgttttaacagtcaagtgtgctaaagtttgtcaatttaagctgcttttgatttcagctaccaagatcacaggtgcactctacacataacactgacagacccataacattacatacatcttagtgaattctatcacatggtaaaatgaacagctttctttgtaactcataaaattctcttaggacatttttataaagtcacctgtttatagttctatcttttcagattccatttctttttacataaaacagcatacatatcaaaaactgtagcctagaatacagtttaatttttggcttttgtttttgtttaaaaaattgcagtgaagaatgggatgtttgtgtttatggctatttgggcacctttagtagaaacagacaaaagtaaggaaacgataataggacaagcatacttgaaaatttctgaatacttaaacaaaagcgcaacatcttgaaaaccagtctagtcattgaaacctatgaaatgacactgaaagatcctgggctgcttcttaaataagtagatcagcaagacttgtttcagagtgacagtggagtcgttaccgctggaggactaaagggccctgtggcagctgtcactggaactttgcctcttgatcaggaaaaatgcttcaccagtccgtaaagccaagttgtatttttttaattgcccttttttccttctgtatttttaaagaaggatgttaatttttgactatatattttaaaaaaatctaagcagggggacatgcaaaaacaatcatcatccacttggatgtcattttatagattaacactgtgtgcttttgtatggaaaaaatatatataatttaatagtataaaaaataaaatatatattcatttgcacttacgtgaaacacaaactttgctctacaaaatttcgtgtttcttagtgattttaaaatgcatgtattgcatgtaaaggaaaaccattacaattaatgtttatcacacctttatcttggtctttgttgatttgggttttgttggggtttttgttactgtttttaaattacagtaggcttctatatatcctggatttctgaactggtcttgttgacaaggattcccaagaaatggatcttttcactggctgactctcccatatctgcaagagattctgcaggaactgggtgtgcacacggtgttgtagccagttcaggtactgaatatttaggatttggtgaagttcactgtattgctatatttttgtagataaataaaactcaataaattgttaatcattctctttttgctgtatagaattgcttatatcactctttctttcatgacattggttaacatttaaatgttcctcctgtacttgtgttgtctgtgaccgcttatagagttttattgttattggtgtttacctgaatacctatgcgtacacacacacatatttccttaatacttctgaactcattatcttttagaataataatactactacactttaccagcaattaacttctccctacccaaaatgtttttcttcctgtctgaaaatggaactaatttgtcttattcgtgcttatatctgtattaaatgcaataaagttagtttttgaaatgtaaaaattcactgtgcaattcatatgtcagcaataaaacatagattatttgtatataagttcatttttatagctattgttacatttaattaaatttattcaatatttgcttaaattaaaaa

SEQ ID NO: 9306 - DNA, 1820 bp, Homo sapiens
  source 1..1820: mol_type = unassigned DNA
agatcagacccacggggctgccctcccctgcgcactcccctcgctgcccgggcccggagcgcagcgcggccgcacaggtatttttgctgtgctgtgcaaggaactctgctagctcaagattcacaatgttgaaagcccttttcctaactatgctgactctggcgctggtcaagtcacaggacaccgaagaaaccatcacgtacacgcaatgcactgacggatatgagtgggatcctgtgagacagcaatgcaaagatattgatgaatgtgacattgtcccagacgcttgtaaaggtggaatgaagtgtgtcaaccactatggaggatacctctgccttccgaaaacagcccagattattgtcaataatgaacagcctcagcaggaaacacaaccagcagaaggaacctcaggggcaaccaccggggttgtagctgccagcagcatggcaaccagtggagtgttgcccgggggtggttttgtggccagtgctgctgcagtcgcaggccctgaaatgcagactggccgaaataactttgtcatccggcggaacccagctgaccctcagcgcattccctccaacccttcccaccgtatccagtgtgcagcaggctacgagcaaagtgaacacaacgtgtgccaagacatagacgagtgcactgcagggacgcacaactgtagagcagaccaagtgtgcatcaatttacggggatcctttgcatgtcagtgccctcctggatatcagaagcgaggggagcagtgcgtagacatagatgaatgtaccatccctccatattgccaccaaagatgcgtgaatacaccaggctcattttattgccagtgcagtcctgggtttcaattggcagcaaacaactatacctgcgtagatataaatgaatgtgatgccagcaatcaatgtgctcagcagtgctacaacattcttggttcattcatctgtcagtgcaatcaaggatatgagctaagcagtgacaggctcaactgtgaagacattgatgaatgcagaacctcaagctacctgtgtcaatatcaatgtgtcaatgaacctgggaaattctcatgtatgtgcccccagggataccaagtggtgagaagtagaacatgtcaagatataaatgagtgtgagaccacaaatgaatgccgggaggatgaaatgtgttggaattatcatggcggcttccgttgttatccacgaaatccttgtcaagatccctacattctaacaccagagaaccgatgtgtttgcccagtctcaaatgccatgtgccgagaactgccccagtcaatagtctacaaatacatgagcatccgatctgataggtctgtgccatcagacatcttccagatacaggccacaactatttatgccaacaccatcaatacttttcggattaaatctggaaatgaaaatggagagttctacctacgacaaacaagtcctgtaagtgcaatgcttgtgctcgtgaagtcattatcaggaccaagagaacatatcgtggacctggagatgctgacagtcagcagtatagggaccttccgcacaagctctgtgttaagattgacaataatagtggggccattttcattttagtcttttctaagagtcaaccacaggcatttaagtcagccaaagaatattgttaccttaaagcactattttatttatagatatatctagtgcatctacatctctatactgtacactcacccataattcaaacaattacaccatggtataaagtgggcatttaatatgtaaagattcaaagtttgtctttattactatatgtaaattagacattaa

SEQ ID NO: 9307 - DNA, 2917 bp, Homo sapiens
  source 1..2917: mol_type = unassigned DNA
cgaaggtagcgtgtcggggacccagactgataagacaaaagagaatcagtcgctttgggctgcccctccacacaacctgggacttttaaacaaagctgtgcgcagagaaaggcgtggaaatgccactttgagagtttgtgctgggggatgtgagaagctctgagacatgtgagaaggtctagtattctactagaactggaagattgctctccgagttttgttttgttattttgtttaaaaaataaaaagcttgaggccaaggcaattcatattggctcacaggtatttttgctgtgctgtgcaaggaactctgctagctcaagattcacaatgttgaaagcccttttcctaactatgctgactctggcgctggtcaagtcacaggacaccgaagaaaccatcacgtacacgcaatgcactgacggatatgagtgggatcctgtgagacagcaatgcaaagatattgatgaatgtgacattgtcccagacgcttgtaaaggtggaatgaagtgtgtcaaccactatggaggatacctctgccttccgaaaacagcccagattattgtcaataatgaacagcctcagcaggaaacacaaccagcagaaggaacctcaggggcaaccaccggggttgtagctgccagcagcatggcaaccagtggagtgttgcccgggggtggttttgtggccagtgctgctgcagtcgcaggccctgaaatgcagactggccgaaataactttgtcatccggcggaacccagctgaccctcagcgcattccctccaacccttcccaccgtatccagtgtgcagcaggctacgagcaaagtgaacacaacgtgtgccaagacatagacgagtgcactgcagggacgcacaactgtagagcagaccaagtgtgcatcaatttacggggatcctttgcatgtcagtgccctcctggatatcagaagcgaggggagcagtgcgtagacatagatgaatgtaccatccctccatattgccaccaaagatgcgtgaatacaccaggctcattttattgccagtgcagtcctgggtttcaattggcagcaaacaactatacctgcgtagatataaatgaatgtgatgccagcaatcaatgtgctcagcagtgctacaacattcttggttcattcatctgtcagtgcaatcaaggatatgagctaagcagtgacaggctcaactgtgaagacattgatgaatgcagaacctcaagctacctgtgtcaatatcaatgtgtcaatgaacctgggaaattctcatgtatgtgcccccagggataccaagtggtgagaagtagaacatgtcaagatataaatgagtgtgagaccacaaatgaatgccgggaggatgaaatgtgttggaattatcatggcggcttccgttgttatccacgaaatccttgtcaagatccctacattctaacaccagagaaccgatgtgtttgcccagtctcaaatgccatgtgccgagaactgccccagtcaatagtctacaaatacatgagcatccgatctgataggtctgtgccatcagacatcttccagatacaggccacaactatttatgccaacaccatcaatacttttcggattaaatctggaaatgaaaatggagagttctacctacgacaaacaagtcctgtaagtgcaatgcttgtgctcgtgaagtcattatcaggaccaagagaacatatcgtggacctggagatgctgacagtcagcagtatagggaccttccgcacaagctctgtgttaagattgacaataatagtggggccattttcattttagtcttttctaagagtcaaccacaggcatttaagtcagccaaagaatattgttaccttaaagcactattttatttatagatatatctagtgcatctacatctctatactgtacactcacccataattcaaacaattacaccatggtataaagtgggcatttaatatgtaaagattcaaagtttgtctttattactatatgtaaattagacattaatccactaaactggtcttcttcaagagagctaagtatacactatctggtgaaacttggattctttcctataaaagtgggaccaagcaatgatgatcttctgtggtgcttaaggaaacttactagagctccactaacagtctcataaggaggcagccatcataaccattgaatagcatgcaagggtaagaatgagtttttaactgctttgtaagaaaatggaaaaggtcaataaagatatatttctttagaaaatggggatctgccatatttgtgttggtttttattttcatatccagcctaaaggtggttgtttattatatagtaataaatcattgctgtacaatatgctggtttctgtagggtatttttaattttgtcagaaattttagattgtgaatattttgtaaaaaacagtaagcaaaattttccagaattcccaaaatgaaccagatatcccctagaaaattatactattgagaaatctatggggaggatatgagaaaataaattccttctaaaccacattggaactgacctgaagaagcaaactcggaaaatataataacatccctgaattcaggacttccacaagatgcagaacaaaatggataaaaggtatttcactggagaagttttaatttctaagtaaaatttaaatcctaacacttcactaatttataactaaaatttctcatcttcgtacttgatgctcacagaggaagaaaatgatgatggtttttattcctggcatccagagtgacagtgaacttaagcaaattaccctcctacccaattctatggaatattttatacgtctccttgtttaaaatgtcactgctttactttgatgtatcatatttttaaataaaaataaatattcctttagaagatc

SEQ ID NO: 9308 - DNA, 3024 bp, Homo sapiens
  source 1..3024: mol_type = unassigned DNA
agatgctgtgttcccctcctcagagaagaagaaaacgcactagagagtgggagcatccccaaggctgaagcgcatccaggacatcacatgtcaacgtgtcctctctggcgtggggtccccgcgagtctgggaaacgaggagctggcaagggagggcaagcgggggcggcaaagagggcccctggagcagggggcgcggacctcgctgcgctgcgcgctctaccgccgggctcgcaacgctgggctcagcgctcgcgcctccctcagctctctcctccgccccccttcgccctccccctttccctccctttctcctcctcctcctgccgccgcggccgctgccggacttcgccagatcagacccacggggctgccctcccctgcgcactcccctcgctgcccgggcccggagcgcagcgcggccgcacagattcacaatgttgaaagcccttttcctaactatgctgactctggcgctggtcaagtcacaggacaccgaagaaaccatcacgtacacgcaatgcactgacggatatgagtgggatcctgtgagacagcaatgcaaagatattgatgaatgtgacattgtcccagacgcttgtaaaggtggaatgaagtgtgtcaaccactatggaggatacctctgccttccgaaaacagcccagattattgtcaataatgaacagcctcagcaggaaacacaaccagcagaaggaacctcaggggcaaccaccggggttgtagctgccagcagcatggcaaccagtggagtgttgcccgggggtggttttgtggccagtgctgctgcagtcgcaggccctgaaatgcagactggccgaaataactttgtcatccggcggaacccagctgaccctcagcgcattccctccaacccttcccaccgtatccagtgtgcagcaggctacgagcaaagtgaacacaacgtgtgccaagacatagacgagtgcactgcagggacgcacaactgtagagcagaccaagtgtgcatcaatttacggggatcctttgcatgtcagtgccctcctggatatcagaagcgaggggagcagtgcgtagacatagatgaatgtaccatccctccatattgccaccaaagatgcgtgaatacaccaggctcattttattgccagtgcagtcctgggtttcaattggcagcaaacaactatacctgcgtagatataaatgaatgtgatgccagcaatcaatgtgctcagcagtgctacaacattcttggttcattcatctgtcagtgcaatcaaggatatgagctaagcagtgacaggctcaactgtgaagacattgatgaatgcagaacctcaagctacctgtgtcaatatcaatgtgtcaatgaacctgggaaattctcatgtatgtgcccccagggataccaagtggtgagaagtagaacatgtcaagatataaatgagtgtgagaccacaaatgaatgccgggaggatgaaatgtgttggaattatcatggcggcttccgttgttatccacgaaatccttgtcaagatccctacattctaacaccagagaaccgatgtgtttgcccagtctcaaatgccatgtgccgagaactgccccagtcaatagtctacaaatacatgagcatccgatctgataggtctgtgccatcagacatcttccagatacaggccacaactatttatgccaacaccatcaatacttttcggattaaatctggaaatgaaaatggagagttctacctacgacaaacaagtcctgtaagtgcaatgcttgtgctcgtgaagtcattatcaggaccaagagaacatatcgtggacctggagatgctgacagtcagcagtatagggaccttccgcacaagctctgtgttaagattgacaataatagtggggccattttcattttagtcttttctaagagtcaaccacaggcatttaagtcagccaaagaatattgttaccttaaagcactattttatttatagatatatctagtgcatctacatctctatactgtacactcacccataattcaaacaattacaccatggtataaagtgggcatttaatatgtaaagattcaaagtttgtctttattactatatgtaaattagacattaatccactaaactggtcttcttcaagagagctaagtatacactatctggtgaaacttggattctttcctataaaagtgggaccaagcaatgatgatcttctgtggtgcttaaggaaacttactagagctccactaacagtctcataaggaggcagccatcataaccattgaatagcatgcaagggtaagaatgagtttttaactgctttgtaagaaaatggaaaaggtcaataaagatatatttctttagaaaatggggatctgccatatttgtgttggtttttattttcatatccagcctaaaggtggttgtttattatatagtaataaatcattgctgtacaatatgctggtttctgtagggtatttttaattttgtcagaaattttagattgtgaatattttgtaaaaaacagtaagcaaaattttccagaattcccaaaatgaaccagatatcccctagaaaattatactattgagaaatctatggggaggatatgagaaaataaattccttctaaaccacattggaactgacctgaagaagcaaactcggaaaatataataacatccctgaattcaggacttccacaagatgcagaacaaaatggataaaaggtatttcactggagaagttttaatttctaagtaaaatttaaatcctaacacttcactaatttataactaaaatttctcatcttcgtacttgatgctcacagaggaagaaaatgatgatggtttttattcctggcatccagagtgacagtgaacttaagcaaattaccctcctacccaattctatggaatattttatacgtctccttgtttaaaatgtcactgctttactttgatgtatcatatttttaaataaaaataaatattcctttagaagatca

SEQ ID NO: 9309 - DNA, 1837 bp, Homo sapiens
  source 1..1837: mol_type = unassigned DNA
agatcagacccacggggctgccctcccctgcgcactcccctcgctgcccgggcccggagcgcagcgcggccgcacaggtatttttgctgtgctgtgcaaggaactctgctagctcaagattcacaatgttgaaagcccttttcctaactatgctgactctggcgctggtcaagtcacaggacaccgaagaaaccatcacgtacacgcaatgcactgacggatatgagtgggatcctgtgagacagcaatgcaaagatattgatgaatgtgacattgtcccagacgcttgtaaaggtggaatgaagtgtgtcaaccactatggaggatacctctgccttccgaaaacagcccagattattgtcaataatgaacagcctcagcagtgaacacaacgtgtgccaagacatagacgagtgcactgcagggacgcacaactgtagagcagaccaagtgtgcatcaatttacggggatcctttgcatgtcagtgccctcctggatatcagaagcgaggggagcagtgcgtagacatagatgaatgtaccatccctccatattgccaccaaagatgcgtgaatacaccaggctcattttattgccagtgcagtcctgggtttcaattggcagcaaacaactatacctgcgtagatataaatgaatgtgatgccagcaatcaatgtgctcagcagtgctacaacattcttggttcattcatctgtcagtgcaatcaaggatatgagctaagcagtgacaggctcaactgtgaagacattgatgaatgcagaacctcaagctacctgtgtcaatatcaatgtgtcaatgaacctgggaaattctcatgtatgtgcccccagggataccaagtggtgagaagtagaacatgtcaagatataaatgagtgtgagaccacaaatgaatgccgggaggatgaaatgtgttggaattatcatggcggcttccgttgttatccacgaaatccttgtcaagatccctacattctaacaccagagaaccgatgtgtttgcccagtctcaaatgccatgtgccgagaactgccccagtcaatagtctacaaatacatgagcatccgatctgataggtctgtgccatcagacatcttccagatacaggccacaactatttatgccaacaccatcaatacttttcggattaaatctggaaatgaaaatggagagttctacctacgacaaacaagtcctgtaagtgcaatgcttgtgctcgtgaagtcattatcaggaccaagagaacatatcgtggacctggagatgctgacagtcagcagtatagggaccttccgcacaagctctgtgttaagattgacaataatagtggggccattttcattttagtcttttctaagagtcaaccacaggcatttaagtcagccaaagaatattgttaccttaaagcactattttatttatagatatatctagtgcatctacatctctatactgtacactcacccataattcaaacaattacaccatggtataaagtgggcatttaatatgtaaagattcaaagtttgtctttattactatatgtaaattagacattaatccactaaactggtcttcttcaagagagctaagtatacactatctggtgaaacttggattctttcctataaaagtgggaccaagcaatgatgatcttctgtggtgcttaaggaaacttactagagctccactaacagtctcataaggaggcagccatcataaccattgaatagcatgcaagggtaagaatgagtttttaactgctttgtaagaaaatggaaaaggtcaataaagatatatttctttagaaaatggg

SEQ ID NO: 9310 - DNA, 547 bp, Homo sapiens
  source 1..547: mol_type = unassigned DNA
acttcgccagatcagacccacggggctgccctcccctgcgcactcccctcgctgcccgggcccggagcgcagcgcggccgcacagcctgctttgtaggtgcagtataaaatgcacgctgaatgtcttttgtatgtaaacagcgtagcaggatggagtaacgtgaaatgcaattctacagcagtttttacgtctttgctgcctcgttcgttggctaccgagaaggttcaggagggggaggggagatgagaaagcagattggaagttgagtatggtggagcctcagcctctcccaccctcctttcctcgcttgtgctcactgctaaagttttgttactttccccgcagcagatactaaacattagtttgtcctgtattttctttgagattcacaatgttgaaagcccttttcctaactatgctgactctggcgctggtcaagtcacaggacaccgaagaaaccatcacgtacacgcaatgcactgacggatatgagtgggatcctgtgagacagcaatgcaaagatattgatgaatgtgacattgtccc

SEQ ID NO: 9311 - DNA, 339 bp, Homo sapiens
  source 1..339: mol_type = unassigned DNA
agacccacggggctgccctcccctgcgcactcccctcgctgcccgggcccggagcgcagcgcggccgcacaggtatttttgctgtgctgtgcaaggaactctgctagctcaagcctgctttgtaggtgcagtataaaatgcacgctgaatgtcttttgtatgtaaacagcgtagcaggatggagtaacgtgaaatgcaattctacagcagtttttacgtctttgctgcctcgttcgttggctaccgagaagattcacaatgttgaaagcccttttcctaactatgctgactctggcgctggtcaagtcacaggacaccgaagaaaccatcacgtacacg

SEQ ID NO: 9312 - DNA, 1809 bp, Homo sapiens
  source 1..1809: mol_type = unassigned DNA
acggggctgccctcccctgcgcactcccctcgctgcccgggcccggagcgcagcgcggccgcacagattcacaatgttgaaagcccttttcctaactatgctgactctggcgctggtcaagtcacaggacaccgaagaaaccatcacgtacacgcaatgcactgacggatatgagtgggatcctgtgagacagcaatgcaaagaagattcctgacttattttattactgaccacagatattgatgaatgtgacattgtcccagacgcttgtaaaggtggaatgaagtgtgtcaaccactatggaggatacctctgccttccgaaaacagcccagattattgtcaataatgaacagcctcagcaggaaacacaaccagcagaaggaacctcaggggcaaccaccggggttgtagctgccagcagcatggcaaccagtggagtgttgcccgggggtggttttgtggccagtgctgctgcagtcgcaggccctgaaatgcagactggccgaaataactttgtcatccggcggaacccagctgaccctcagcgcattccctccaacccttcccaccgtatccagtgtgcagcaggctacgagcaaagtgaacacaacgtgtgccaagacatagacgagtgcactgcagggacgcacaactgtagagcagaccaagtgtgcatcaatttacggggatcctttgcatgtcagtgccctcctggatatcagaagcgaggggagcagtgcgtagacattgatgaatgcagaacctcaagctacctgtgtcaatatcaatgtgtcaatgaacctgggaaattctcatgtatgtgcccccagggataccaagtggtgagaagtagaacatgtcaagatataaatgagtgtgagaccacaaatgaatgccgggaggatgaaatgtgttggaattatcatggcggcttccgttgttatccacgaaatccttgtcaagatccctacattctaacaccagagaaccgatgtgtttgcccagtctcaaatgccatgtgccgagaactgccccagtcaatagtctacaaatacatgagcatccgatctgataggtctgtgccatcagacatcttccagatacaggccacaactatttatgccaacaccatcaatacttttcggattaaatctggaaatgaaaatggagagttctacctacgacaaacaagtcctgtaagtgcaatgcttgtgctcgtgaagtcattatcaggaccaagagaacatatcgtggacctggagatgctgacagtcagcagtatagggaccttccgcacaagctctgtgttaagattgacaataatagtggggccattttcattttagtcttttctaagagtcaaccacaggcatttaagtcagccaaagaatattgttaccttaaagcactattttatttatagatatatctagtgcatctacatctctatactgtacactcacccataattcaaacaattacaccatggtataaagtgggcatttaatatgtaaagattcaaagtttgtctttattactatatgtaaattagacattaatccactaaactggtcttcttcaagagagctaagtatacactatctggtgaaacttggattctttcctataaaagtgggaccaagcaatgatgatcttctgtggtgcttaaggaaacttactagagctccactaacagtctcataaggaggcagccatcataaccattgaatagcatgcaagggtaagaatgagtttttaactgctttgtaagaaaatggaaaaggtcaataaagatatatttctttag

SEQ ID NO: 9313 - DNA, 558 bp, Homo sapiens
  source 1..558: mol_type = unassigned DNA
agacccacggggctgccctcccctgcgcactcccctcgctgcccgggcccggagcgcagcgcggccgcacaggtatttttgctgtgctgtgcaaggaactctgctagctcaagcctgctttgtaggtgcagtataaaatgcacgctgaatgtcttttgtatgtaaacagcgtagcaggatggagtaacgtgaaatgcaattctacagcagtttttacgtctttgctgcctcgttcgttggctaccgagaaggttcaggagggggaggggagatgagaaagcagattggaaattcacaatgttgaaagcccttttcctaactatgctgactctggcgctggtcaagtcacaggacaccgaagaaaccatcacgtacacgcaatgcactgacggatatgagtgggatcctgtgagacagcaatgcaaagatattgatgaatgtgacattgtcccagacgcttgtaaaggtggaatgaagtgtgtcaaccactatggaggatacctctgccttccgaaaacagcccagattattgtcaataatgaacagcctcagcaggaa

SEQ ID NO: 9314 - DNA, 733 bp, Homo sapiens
  source 1..733: mol_type = unassigned DNA
gacccacggggctgccctcccctgcgcactcccctcgctgcccgggcccggagcgcagcgcggccgcacagcctgctttgtaggtgcagtataaaatgcacgctgaatgtcttttgtatgtaaacagcgtagcaggatggagtaacgtgaaatgcaattctacagcagtttttacgtctttgctgcctcgttcgttggctaccgagaagattcacaatgttgaaagcccttttcctaactatgctgactctggcgctggtcaagtcacaggacaccgaagaaaccatcacgtacacgcaatgcactgacggatatgagtgggatcctgtgagacagcaatgcaaagatattgatgaatgtgacattgtcccagacgcttgtaaaggtggaatgaagtgtgtcaaccactatggaggatacctctgccttccgaaaacagcccagattattgtcaataatgaacagcctcagcaggaaacacaaccagcagaaggaacctcaggggcaaccaccggggttgtagctgccagcagcatggcaaccagtggagtgttgcccgggggtggttttgtggccagtgctgctgcagtcgcaggccctgaaatgcagactggccgaaataactttgtcatccggcggaacccagctgaccctcagcgcattccctccaacccttcccaccgtatccagtgtgcagcaggctacgagcaaagtgaacacaacgtgtgccaag

SEQ ID NO: 9315 - DNA, 572 bp, Homo sapiens
  source 1..572: mol_type = unassigned DNA
acttcgccagatcagacccacggggctgccctcccctgcgcactcccctcgctgcccgggcccggagcgcagcgcggccgcacaggtatttttgctgtgctgtgcaaggaactctgctagctcaagcgtagcaggatggagtaacgtgaaatgcaattctacagcagtttttacgtctttgctgcctcgttcgttggctaccgagaagattcacaatgttgaaagcccttttcctaactatgctgactctggcgctggtcaagtcacaggacaccgaagaaaccatcacgtacacgcaatgcactgacggatatgagtgggatcctgtgagacagcaatgcaaagatattgatgaatgtgacattgtcccagacgcttgtaaaggtggaatgaagtgtgtcaaccactatggaggatacctctgccttccgaaaacagcccagattattgtcaataatgaacagcctcagcaggaaacacaaccagcagaaggaacctcaggggcaaccaccggggttgtagctgccagcagcatggcaaccagtggagtgttgcccgggggtggttttgtg

SEQ ID NO: 9316 - DNA, 559 bp, Homo sapiens
  source 1..559: mol_type = unassigned DNA
agacccacggggctgccctcccctgcgcactcccctcgctgcccgggcccggagcgcagcgcggccgcacaggtatttttgctgtgctgtgcaaggaactctgctagctcaagcgtagcaggatggagtaacgtgaaatgcaattctacagcagtttttacgtctttgctgcctcgttcgttggctaccgagaaggttcaggagggggaggggagatgagaaagcagattggaaattcacaatgttgaaagcccttttcctaactatgctgactctggcgctggtcaagtcacaggacaccgaagaaaccatcacgtacacgcaatgcactgacggatatgagtgggatcctgtgagacagcaatgcaaagatattgatgaatgtgacattgtcccagacgcttgtaaaggtggaatgaagtgtgtcaaccactatggaggatacctctgccttccgaaaacagcccagattattgtcaataatgaacagcctcagcaggaaacacaaccagcagaaggaacctcaggggcaaccaccggggttgtagctgccagcagc

SEQ ID NO: 9317 - DNA, 552 bp, Homo sapiens
  source 1..552: mol_type = unassigned DNA
atcagacccacggggctgccctcccctgcgcactcccctcgctgcccgggcccggagcgcagcgcggccgcacaggtatttttgctgtgctgtgcaaggaactctgctagctcaagcgtagcaggatggagtaacgtgaaatgcaattctacagcagtttttacgtctttgctgcctcgttcgttggctaccgagaaggttcaggagggggaggggagatgagaaagcagattggaagttgagtatggtggagcctcagcctctcccaccctcctttcctcgcttgtgctcactgctaaagttttgttactttccccgcagcagatactaaacattagtttgtcctgtattttctttgagattcacaatgttgaaagcccttttcctaactatgctgactctggcgctggtcaagtcacaggacaccgaagaaaccatcacgtacacgcaatgcactgacggatatgagtgggatcctgtgagacagcaatgcaaagatattgatgaatgtgacattgtcccagacgcttgtaaaggtggaatgaagtgtgt

SEQ ID NO: 9318 - DNA, 2034 bp, Homo sapiens
  source 1..2034: mol_type = unassigned DNA
gcggggggtcggggtccctccccctggcgctggctcaggaatccgccgaagggcgggcggaggcgccggggtgggccgcgccgcggcaggcgggcgggcggggggcgcttcctggggccgcgcgtccagggagctgtgccgtccgcccgtccgtctgcccgcaggcattgcccgagccagccgagccgccagagccgcgggccgcgggggtgtcgcgggcccaaccccaggatgctcccctgcgcctcctgcctacccgggtctctactgctctgggcgctgctactgttgctcttgggatcagcttctcctcaggattctgaagagcccgacagctacacggaatgcacagatggctatgagtgggacccagacagccagcactgccgggatgtcaacgagtgtctgaccatccctgaggcctgcaagggggaaatgaagtgcatcaaccactacgggggctacttgtgcctgccccgctccgctgccgtcatcaacgacctacacggcgagggacccccgccaccagtgcctcccgctcaacaccccaacccctgcccaccaggctatgagcccgacgatcaggacagctgtgtggatgtggacgagtgtgcccaggccctgcacgactgtcgccccagccaggactgccataacttgcctggctcctatcagtgcacctgccctgatggttaccgcaagatcgggcccgagtgtgtggacatagacgagtgccgctaccgctactgccagcaccgctgcgtgaacctgcctggctccttccgctgccagtgcgagccgggcttccagctggggcctaacaaccgctcctgtgttgatgtgaacgagtgtgacatgggggccccatgcgagcagcgctgcttcaactcctatgggaccttcctgtgtcgctgccaccagggctatgagctgcatcgggatggcttctcctgcagtgatattgatgagtgtagctactccagctacctctgtcagtaccgctgcatcaacgagccaggccgtttctcctgccactgcccacagggttaccagctgctggccacacgcctctgccaagacattgatgagtgtgagtctggtgcgcaccagtgctccgaggcccaaacctgtgtcaacttccatgggggctaccgctgcgtggacaccaaccgctgcgtggagccctacatccaggtctctgagaaccgctgtctctgcccggcctccaaccctctatgtcgagagcagccttcatccattgtgcaccgctacatgaccatcacctcggagcggagcgtgcccgctgacgtgttccagatccaggcgacctccgtctaccccggtgcctacaatgcctttcagatccgtgctggaaactcgcagggggacttttacattaggcaaatcaacaacgtcagcgccatgctggtcctcgcccggccggtgacgggcccccgggagtacgtgctggacctggagatggtcaccatgaattccctcatgagctaccgggccagctctgtactgaggctcaccgtctttgtaggggcctacaccttctgaggagcaggagggagccaccctccctgcagctaccctagctgaggagcctgttgtgaggggcagaatgagaaaggcaataaagggagaaagaaagtcctggtggctgaggtgggcgggtcacactgcaggaagcctcaggctggggcagggtggcacttgggggggcaggccaagttcacctaaatgggggtctctatatgttcaggcccaggggcccccattgacaggagctgggagctctgcaccacgagcttcagtcaccccgagaggagaggaggtaacgaggagggcggactccaggccccggcccagagatttggacttggctggcttgcaggggtcctaagaaactccactctggacagcgccaggaggccctgggttccattcctaactctgcctcaaactgtacatttggataagccctagtagttccctgggcctgtttttctataaaacgaggcaactgga

SEQ ID NO: 9319 - DNA, 907 bp, Homo sapiens
  source 1..907: mol_type = unassigned DNA
gggcgtgggccggagtctcggccgagtccgcggcagcgtagcgcccacagaggcccgcgctcctcggccttcgccgcaggggcgcggggcgggggcggggtggccggggcgggtgggcctgggacccgggcctgggacctgggcctgtgaggagtcggcccccagccctgggaggccccgaggcccaagcacggtcctgagcgggcagtggcgggggctgggctcgggctcccggtacagggagttgaggtgccgcgggcagaggcccctgacccgtgtccaccatctcgcagccccaggatgctcccctgcgcctcctgcctacccgggtctctactgctctgggcgctgctactgttgctcttgggatcagcttctcctcaggattctgaagagcccgacagctacacggaatgcacagatggctatgagtgggacccagacagccagcactgccgggatgtcaacgagtgtctgaccatccctgaggcctgcaagggggaaatgaagtgcatcaaccactacgggggctacttgtgcctgccccgctccgctgccgtcatcaacgacctacacggcgagggacccccgccaccagtgcctcccgctcaacaccccaacccctgcccaccaggctatgagcccgacgatcaggacagctgtgtggatgtggacgagtgtgcccaggccctgcacgactgtcgccccagccaggactgccataacttgcctggctcctatcagtgcacctgccctgatggttaccgcaagatcgggcccgagtgtgtggacatagacgagtgccgctaccgctactgccagcaccgctgcgtgaacctgcctggctccttccgctgccagtgcgagccgggcttccagctggggcctaacaaccgctcctgtgttg

SEQ ID NO: 9320 - DNA, 614 bp, Homo sapiens
  source 1..614: mol_type = unassigned DNA
gacgctggtgcgaggaggtcgaggaggcgccttggcacccgactctggcatcccgcacccccaggatgctcccctgcgcctcctgcctacccgggtctctactgctctgggcgctgctactgttgctcttgggatcagcttctcctcaggattctgaagagcccgacagctacacggaatgcacagatggctatgagtgggacccagacagccagcactgccgggatgtcaacgagtgtctgaccatccctgaggcctgcaagggggaaatgaagtgcatcaaccactacgggggctacttgtgcctgccccgctccgctgccgtcatcaacgacctacacggcgagggacccccgccaccagtgcctcccgctcaacaccccaacccctgcccaccaggctatgagcccgacgatcaggacagctgtgtggatgtggacgagtgtgcccaggccctgcacgactgtcgccccagccaggactgccataacttgcctggctcctatcagtgcacctgccctgatggttaccgcaagatcgggcccgagtgtgtggacatagacgagtgccgctaccgctactgccagcaccgctgcgtgaacctgcctggctcc

SEQ ID NO: 9321 - DNA, 1813 bp, Homo sapiens
  source 1..1813: mol_type = unassigned DNA
gggcggggggcgcttcctggggccgcgcgtccagggagctgtgccgtccgcccgtccgtctgcccgcaggcattgcccgagccagccgagccgccagagccgcgggccgcgggggtgtcgcgggcccaaccccaggatgctcccctgcgcctcctgcctacccgggtctctactgctctgggcgctgctactgttgctcttgggatcagcttctcctcaggattctgaagagcccgacagctacacggaatgcacagatggctatgagtgggacccagacagccagcactgccgggatgtcaacgagtgtctgaccatccctgaggcctgcaagggggaaatgaagtgcatcaaccactacgggggctacttgtgcctgccccgctccgctgccgtcatcaacgacctacacggcgagggacccccgccaccagtgcctcccgctcaacaccccaacccctgcccaccaggctatgagcccgacgatcaggacagctgtgtggatgtggacgagtgtgcccaggccctgcacgactgtcgccccagccaggactgccataacttgcctggctcctatcagtgcacctgccctgatggttaccgcaagatcgggcccgagtgtgtggacatagacgagtgccgctaccgctactgccagcaccgctgcgtgaacctgcctggctccttccgctgccagtgcgagccgggcttccagctggggcctaacaaccgctcctgtgttgatgtgaacgagtgtgacatgggggccccatgcgagcagcgctgcttcaactcctatgggaccttcctgtgtcgctgccaccagggctatgagctgcatcgggatggcttctcctgcagtgatattgatgagtgtagctactccagctacctctgtcagtaccgctgcatcaacgagccaggccgtttctcctgccactgcccacagggttaccagctgctggccacacgcctctgccaagacattgatgagtgtgagtctggtgcgcaccagtgctccgaggcccaaacctgtgtcaacttccatgggggctaccgctgcgtggacaccaaccgctgcgtggagccctacatccaggtctctgagaaccgctgtctctgcccggcctccaaccctctatgtcgagagcagccttcatccattgtgcaccgctacatgaccatcacctcggagcggagcgtgcccgctgacgtgttccagatccaggcgacctccgtctaccccggtgcctacaatgcctttcagatccgtgctggaaactcgcagggggacttttacattaggcaaatcaacaacgtcagcgccatgctggtcctcgcccggccggtgacgggcccccgggagtacgtgctggacctggagatggtcaccatgaattccctcatgagctaccgggccagctctgtactgaggctcaccgtctttgtaggggcctacaccttctgaggagcaggagggagccaccctccctgcagctaccctagctgaggagcctgttgtgaggggcagaatgagaaaggcccaggggcccccattgacaggagctgggagctctgcaccacgagcttcagtcaccccgagaggagaggaggtaacgaggagggcggactccaggccccggcccagagatttggacttggctggcttgcaggggtcctaagaaactccactctggacagcgccaggaggccctgggttccattcctaactctgcctcaaactgtacatttggataagccctagtagttccctgggcctgtttttctataaaacgaggcaactggactgtta

SEQ ID NO: 9322 - DNA, 2657 bp, Homo sapiens
  source 1..2657: mol_type = unassigned DNA
cttttctttgaatgacagaactacagcataatgcgtggcttcaacctgctcctcttctggggatgttgtgttatgcacagctgggaagggcacataagacccacacggaaaccaaacacaaagggtaataactgtagagacagtaccttgtgcccagcttatgccacctgcaccaatacagtggacagttactattgcgcttgcaaacaaggcttcctgtccagcaatgggcaaaatcacttcaaggatccaggagtgcgatgcaaagatattgatgaatgttctcaaagcccccagccctgtggtcctaactcatcctgcaaaaacctgtcagggaggtacaagtgcagctgtttagatggtttctcttctcccactggaaatgactgggtcccaggaaagccgggcaatttctcctgtactgatatcaatgagtgcctcaccagcagcgtctgccctgagcattctgactgtgtcaactccatgggaagctacagttgcagctgtcaagttggattcatctctagaaactccacctgtgaagacgtggatgaatgtgcagatccaagagcttgcccagagcatgcaacttgtaataacactgttggaaactactcttgtttctgcaacccaggatttgaatccagcagtggccacttgagtttccagggtctcaaagcatcgtgtgaagatattgatgaatgcactgaaatgtgccccatcaattcaacatgcaccaacactcctgggagctacttttgcacctgccaccctggctttgcaccaagcaatggacagttgaatttcacagaccaaggagtggaatgtagagatattgatgagtgccgccaagatccatcaacctgtggtcctaattctatctgcaccaatgccctgggctcctacagctgtggctgcattgcaggctttcatcccaatccagaaggctcccagaaagatggcaacttcagctgccaaagggttctcttcaaatgtaaggaagatgtgatacccgataataagcagatccagcaatgccaagagggaaccgcagtgaaacctgcatatgtctccttttgtgcacaaataaataacatcttcagcgttctggacaaagtgtgtgaaaataaaacgaccgtagtttctctgaagaatacaactgagagctttgtccctgtgcttaaacaaatatccacgtggactaaattcaccaaggaagagacgtcctccctggccacagtcttcctggagagtgtggaaagcatgacactggcatctttttggaaaccctcagcaaatatcactccggctgttcggacggaatacttagacattgagagcaaagttatcaacaaagaatgcagtgaagagaatgtgacgttggacttggtagccaagggggataagatgaagatcgggtgttccacaattgaggaatctgaatccacagagaccactggtgtggcttttgtctcctttgtgggcatggaatcggttttaaatgagcgcttcttcaaagaccaccaggctcccttgaccacctctgagatcaagctgaagatgaattctcgagtcgttgggggcataatgactggagagaagaaagacggcttctcagatccaatcatctacactctggagaacattcagccaaagcagaagtttgagaggcccatctgtgtttcctggagcactgatgtgaagggtggaagatggacatcctttggctgtgtgatcctggaagcttctgagacatataccatctgcagctgtaatcagatggcaaatcttgccgttatcatggcgtctggggagctcacgatgggctgcgccatcatcgcgggcttcctgcactaccttttccttgcctgcttcttctggatgctggtggaggctgtgatactgttcttgatggtcagaaacctgaaggtggtgaattacttcagctctcgcaacatcaagatgctgcacatctgtgcctttggttatgggctgccgatgctggtggtggtgatctctgccagtgtgcagccacagggctatggaatgcataatcgctgctggctgaatacagagacagggttcatctggagtttcttggggccagtttgcacagttatagtgatcaactcccttctcctgacctggaccttgtggatcctgaggcagaggctttccagtgttaatgccgaagtctcaacgctaaaagacaccaggttactgaccttcaaggcctttgcccagctcttcatcctgggctgctcctgggtgctgggcatttttcagattggacctgtggcaggtgtcatggcttacctgttcaccatcatcaacagcctgcagggggccttcatcttcctcatccactgtctgctcaacggccaggtacgagaagaatacaagaggtggatcactgggaagacgaagcccagctcccagtcccagacctcaaggatcttgctgtcctccatgccatccgcttccaagacgggttaaagtcctttcttgctttcaaatatgctatggagccacagttgaggacagtagtttcctgcaggagcctaccctgaaatctcttctcagcttaacatggaaatgaggatcccaccagccccagaaccctctggggaagaatgttgggggcggtcttcctgtgg

SEQ ID NO: 9323 - DNA, 3122 bp, Homo sapiens
  source 1..3122: mol_type = unassigned DNA
aaaagtttcttttctttgaatgacagaactacagcataatgcgtggcttcaacctgctcctcttctggggatgttgtgttatgcacagctgggaagggcacataagacccacacggaaaccaaacacaaagggtaataactgtagagacagtaccttgtgcccagcttatgccacctgcaccaatacagtggacagttactattgcgcttgcaaacaaggcttcctgtccagcaatgggcaaaatcacttcaaggatccaggagtgcgatgcaaagatattgatgaatgttctcaaagcccccagccctgtggtcctaactcatcctgcaaaaacctgtcagggaggtacaagtgcagctgtttagatggtttctcttctcccactggaaatgactgggtcccaggaaagccgggcaatttctcctgtactgatatcaatgagtgcctcaccagcagcgtctgccctgagcattctgactgtgtcaactccatgggaagctacagttgcagctgtcaagttggattcatctctagaaactccacctgtgaagacgtggatgaatgtgcagatccaagagcttgcccagagcatgcaacttgtaataacactgttggaaactactcttgtttctgcaacccaggatttgaatccagcagtggccacttgagtttccagggtctcaaagcatcgtgtgaagatattgatgaatgcactgaaatgtgccccatcaattcaacatgcaccaacactcctgggagctacttttgcacctgccaccctggctttgcaccaagcaatggacagttgaatttcacagaccaaggagtggaatgtagagatattgatgagtgccgccaagatccatcaacctgtggtcctaattctatctgcaccaatgccctgggctcctacagctgtggctgcattgcaggctttcatcccaatccagaaggctcccagaaagatggcaacttcagctgccaaagggttctcttcaaatgtaaggaagatgtgatacccgataataagcagatccagcaatgccaagagggaaccgcagtgaaacctgcatatgtctccttttgtgcacaaataaataacatcttcagcgttctggacaaagtgtgtgaaaataaaacgaccgtagtttctctgaagaatacaactgagagctttgtccctgtgcttaaacaaatatccacgtggactaaattcaccaaggaagagacgtcctccctggccacagtcttcctggagagtgtggaaagcatgacactggcatctttttggaaaccctcagcaaatatcactccggctgttcggacggaatacttagacattgagagcaaagttatcaacaaagaatgcagtgaagagaatgtgacgttggacttggtagccaagggggataagatgaagatcgggtgttccacaattgaggaatctgaatccacagagaccactggtgtggcttttgtctcctttgtgggcatggaatcggttttaaatgagcgcttcttcaaagaccaccaggctcccttgaccacctctgagatcaagctgaagatgaattctcgagtcgttgggggcataatgactggagagaagaaagacggcttctcagatccaatcatctacactctggagaacattcagccaaagcagaagtttgagaggcccatctgtgtttcctggagcactgatgtgaagggtggaagatggacatcctttggctgtgtgatcctggaagcttctgagacatataccatctgcagctgtaatcagatggcaaatcttgccgttatcatggcgtctggggagctcacgatggacttttccttgtacatcattagccatgtaggcattatcatctccttggtgtgcctcgtcttggccatcgccacctttctgctgtgtcgctccatccgaaatcacaacacctacctccacctgcacctctgcgtgtgtctcctcttggcgaagactctcttcctcgccggtatacacaagactgacaacaagatgggctgcgccatcatcgcgggcttcctgcactaccttttccttgcctgcttcttctggatgctggtggaggctgtgatactgttcttgatggtcagaaacctgaaggtggtgaattacttcagctctcgcaacatcaagatgctgcacatctgtgcctttggttatgggctgccgatgctggtggtggtgatctctgccagtgtgcagccacagggctatggaatgcataatcgctgctggctgaatacagagacagggttcatctggagtttcttggggccagtttgcacagttatagtgatcaactcccttctcctgacctggaccttgtggatcctgaggcagaggctttccagtgttaatgccgaagtctcaacgctaaaagacaccaggttactgaccttcaaggcctttgcccagctcttcatcctgggctgctcctgggtgctgggcatttttcagattggacctgtggcaggtgtcatggcttacctgttcaccatcatcaacagcctgcagggggccttcatcttcctcatccactgtctgctcaacggccaggtacgagaagaatacaagaggtggatcactgggaagacgaagcccagctcccagtcccagacctcaaggatcttgctgtcctccatgccatccgcttccaagacgggttaaagtcctttcttgctttcaaatatgctatggagccacagttgaggacagtagtttcctgcaggagcctaccctgaaatctcttctcagcttaacatggaaatgaggatcccaccagccccagaaccctctggggaagaatgttgggggcggtcttcctgtggttgtatgcactgatgagaaatcaggcgtttctgctccaaacgaccattttatcttcgtgctctgcaacttcttcaattccagagtttctgagaacagacccaaattcaatggcatgaccaagaacacctggctaccattttgttttctcctgcccttgttggtgcatggttctaagcatgcccctccagagcctatcatacgcctgatacagagaacctctcaataaatgatttgtcgcctgtctgactgatttaccctagg

SEQ ID NO: 9324 - DNA, 3056 bp, Homo sapiens
  source 1..3056: mol_type = unassigned DNA
cttttctttgaatgacagaactacagcataatgcgtggcttcaacctgctcctcttctggggatgttgtgttatgcacagctgggaagggcacataagacccacacggaaaccaaacacaaagggtaataactgtagagacagtaccttgtgcccagcttatgccacctgcaccaatacagtggacagttactattgcgcttgcaaacaaggcttcctgtccagcaatgggcaaaatcacttcaaggatccaggagtgcgatgcaaagatatcaatgagtgcctcaccagcagcgtctgccctgagcattctgactgtgtcaactccatgggaagctacagttgcagctgtcaagttggattcatctctagaaactccacctgtgaagacgtggatgaatgtgcagatccaagagcttgcccagagcatgcaacttgtaataacactgttggaaactactcttgtttctgcaacccaggatttgaatccagcagtggccacttgagtttccagggtctcaaagcatcgtgtgaagatattgatgaatgcactgaaatgtgccccatcaattcaacatgcaccaacactcctgggagctacttttgcacctgccaccctggctttgcaccaagcaatggacagttgaatttcacagaccaaggagtggaatgtagagatattgatgagtgccgccaagatccatcaacctgtggtcctaattctatctgcaccaatgccctgggctcctacagctgtggctgcattgcaggctttcatcccaatccagaaggctcccagaaagatggcaacttcagctgccaaagggttctcttcaaatgtaaggaagatgtgatacccgataataagcagatccagcaatgccaagagggaaccgcagtgaaacctgcatatgtctccttttgtgcacaaataaataacatcttcagcgttctggacaaagtgtgtgaaaataaaacgaccgtagtttctctgaagaatacaactgagagctttgtccctgtgcttaaacaaatatccacgtggactaaattcaccaaggaagagacgtcctccctggccacagtcttcctggagagtgtggaaagcatgacactggcatctttttggaaaccctcagcaaatatcactccggctgttcggacggaatacttagacattgagagcaaagttatcaacaaagaatgcagtgaagagaatgtgacgttggacttggtagccaagggggataagatgaagatcgggtgttccacaattgaggaatctgaatccacagagaccactggtgtggcttttgtctcctttgtgggcatggaatcggttttaaatgagcgcttcttcaaagaccaccaggctcccttgaccacctctgagatcaagctgaagatgaattctcgagtcgttgggggcataatgactggagagaagaaagacggcttctcagatccaatcatctacactctggagaacattcagccaaagcagaagtttgagaggcccatctgtgtttcctggagcactgatgtgaagggtggaagatggacatcctttggctgtgtgatcctggaagcttctgagacatataccatctgcagctgtaatcagatggcaaatcttgccgttatcatggcgtctggggagctcacgatggacttttccttgtacatcattagccatgtaggcattatcatctccttggtgtgcctcgtcttggccatcgccacctttctgctgtgtcgctccatccgaaatcacaacacctacctccacctgcacctctgcgtgtgtctcctcttggcgaagactctcttcctcgccggtatacacaagactgacaacaagatgggctgcgccatcatcgcgggcttcctgcactaccttttccttgcctgcttcttctggatgctggtggaggctgtgatactgttcttgatggtcagaaacctgaaggtggtgaattacttcagctctcgcaacatcaagatgctgcacatctgtgcctttggttatgggctgccgatgctggtggtggtgatctctgccagtgtgcagccacagggctatggaatgcataatcgctgctggctgaatacagagacagggttcatctggagtttcttggggccagtttgcacagttatagtggtaagcaaatactacaacagcctggcgaagtgtgttctgaaggaggagcaaggagacctgcgagatctggaatttccagggacgtgtgcagctgagaggatcaactcccttctcctgacctggaccttgtggatcctgaggcagaggctttccagtgttaatgccgaagtctcaacgctaaaagacaccaggttactgaccttcaaggcctttgcccagctcttcatcctgggctgctcctgggtgctgggcatttttcagattggacctgtggcaggtgtcatggcttacctgttcaccatcatcaacagcctgcagggggccttcatcttcctcatccactgtctgctcaacggccaggtacgagaagaatacaagaggtggatcactgggaagacgaagcccagctcccagtcccagacctcaaggatcttgctgtcctccatgccatccgcttccaagacgggttaaagtcctttcttgctttcaaatatgctatggagccacagttgaggacagtagtttcctgcaggagcctaccctgaaatctcttctcagcttaacatggaaatgaggatcccaccagccccagaaccctctggggaagaatgttgggggcggtcttcctgtggttgtatgcactgatgagaaatcaggcgtttctgctccaaacgaccattttatcttcgtgctctgcaacttcttcaattccagagtttctgagaacagacccaaattcaatggcatgaccaagaacacctggctaccattttgttttctcctgcccttgttggtgcatggttctaagcatgcccctccagagcctatcatacgcctgatacagagaacctctcaataaatgatttgtcgcctgtctgactgatttaccctag

SEQ ID NO: 9325 - DNA, 2670 bp, Homo sapiens
  source 1..2670: mol_type = unassigned DNA
gaatgacagaactacagcataatgcgtggcttcaacctgctcctcttctggggatgttgtgttatgcacagctgggaagggcacataagacccacacggaaaccaaacacaaagggtaataactgtagagacagtaccttgtgcccagcttatgccacctgcaccaatacagtggacagttactattgcgcttgcaaacaaggcttcctgtccagcaatgggcaaaatcacttcaaggatccaggagtgcgatgcaaagatattgatgaatgcactgaaatgtgccccatcaattcaacatgcaccaacactcctgggagctacttttgcacctgccaccctggctttgcaccaagcaatggacagttgaatttcacagaccaaggagtggaatgtagagatattgatgagtgccgccaagatccatcaacctgtggtcctaattctatctgcaccaatgccctgggctcctacagctgtggctgcattgcaggctttcatcccaatccagaaggctcccagaaagatggcaacttcagctgccaaagggttctcttcaaatgtaaggaagatgtgatacccgataataagcagatccagcaatgccaagagggaaccgcagtgaaacctgcatatgtctccttttgtgcacaaataaataacatcttcagcgttctggacaaagtgtgtgaaaataaaacgaccgtagtttctctgaagaatacaactgagagctttgtccctgtgcttaaacaaatatccacgtggactaaattcaccaaggaagagacgtcctccctggccacagtcttcctggagagtgtggaaagcatgacactggcatctttttggaaaccctcagcaaatatcactccggctgttcggacggaatacttagacattgagagcaaagttatcaacaaagaatgcagtgaagagaatgtgacgttggacttggtagccaagggggataagatgaagatcgggtgttccacaattgaggaatctgaatccacagagaccactggtgtggcttttgtctcctttgtgggcatggaatcggttttaaatgagcgcttcttcaaagaccaccaggctcccttgaccacctctgagatcaagctgaagatgaattctcgagtcgttgggggcataatgactggagagaagaaagacggcttctcagatccaatcatctacactctggagaacattcagccaaagcagaagtttgagaggcccatctgtgtttcctggagcactgatgtgaagggtggaagatggacatcctttggctgtgtgatcctggaagcttctgagacatataccatctgcagctgtaatcagatggcaaatcttgccgttatcatggcgtctggggagctcacgatggacttttccttgtacatcattagccatgtaggcattatcatctccttggtgtgcctcgtcttggccatcgccacctttctgctgtgtcgctccatccgaaatcacaacacctacctccacctgcacctctgcgtgtgtctcctcttggcgaagactctcttcctcgccggtatacacaagactgacaacaagatgggctgcgccatcatcgcgggcttcctgcactaccttttccttgcctgcttcttctggatgctggtggaggctgtgatactgttcttgatggtcagaaacctgaaggtggtgaattacttcagctctcgcaacatcaagatgctgcacatctgtgcctttggttatgggctgccgatgctggtggtggtgatctctgccagtgtgcagccacagggctatggaatgcataatcgctgctggctgaatacagagacagggttcatctggagtttcttggggccagtttgcacagttatagtgatcaactcccttctcctgacctggaccttgtggatcctgaggcagaggctttccagtgttaatgccgaagtctcaacgctaaaagacaccaggttactgaccttcaaggcctttgcccagctcttcatcctgggctgctcctgggtgctgggcatttttcagattggacctgtggcaggtgtcatggcttacctgttcaccatcatcaacagcctgcagggggccttcatcttcctcatccactgtctgctcaacggccaggtacgagaagaatacaagaggtggatcactgggaagacgaagcccagctcccagtcccagacctcaaggatcttgctgtcctccatgccatccgcttccaagacgggttaaagtcctttcttgctttcaaatatgctatggagccacagttgaggacagtagtttcctgcaggagcctaccctgaaatctcttctcagcttaacatggaaatgaggatcccaccagccccagaaccctctggggaagaatgttgggggcggtcttcctgtggttgtatgcactgatgagaaatcaggcgtttctgctccaaacgaccattttatcttcgtgctctgcaacttcttcaattccagagtttctgagaacagacccaaattcaatggcatgaccaagaacacctggctaccattttgttttctcctgcccttgttggtgcatggttctaagcatgcccctccagagcctatcatacgcctgatacagagaacctctcaataaatgatttgtcgcctgtctgactg

SEQ ID NO: 9326 - DNA, 2556 bp, Homo sapiens
  source 1..2556: mol_type = unassigned DNA
gaatgacagaactacagcataatgcgtggcttcaacctgctcctcttctggggatgttgtgttatgcacagctgggaagggcacataagacccacacggaaaccaaacacaaagggtaataactgtagagacagtaccttgtgcccagcttatgccacctgcaccaatacagtggacagttactattgcgcttgcaaacaaggcttcctgtccagcaatgggcaaaatcacttcaaggatccaggagtgcgatgcaaagatattgatgaatgttctcaaagcccccagccctgtggtcctaactcatcctgcaaaaacctgtcagggaggtacaagtgcagctgtttagatggtttctcttctcccactggaaatgactgggtcccaggaaagccgggcaatttctcctgtactgatatcaatgagtgcctcaccagcagggttctcttcaaatgtaaggaagatgtgatacccgataataagcagatccagcaatgccaagagggaaccgcagtgaaacctgcatatgtctccttttgtgcacaaataaataacatcttcagcgttctggacaaagtgtgtgaaaataaaacgaccgtagtttctctgaagaatacaactgagagctttgtccctgtgcttaaacaaatatccacgtggactaaattcaccaaggaagagacgtcctccctggccacagtcttcctggagagtgtggaaagcatgacactggcatctttttggaaaccctcagcaaatatcactccggctgttcggacggaatacttagacattgagagcaaagttatcaacaaagaatgcagtgaagagaatgtgacgttggacttggtagccaagggggataagatgaagatcgggtgttccacaattgaggaatctgaatccacagagaccactggtgtggcttttgtctcctttgtgggcatggaatcggttttaaatgagcgcttcttcaaagaccaccaggctcccttgaccacctctgagatcaagctgaagatgaattctcgagtcgttgggggcataatgactggagagaagaaagacggcttctcagatccaatcatctacactctggagaacattcagccaaagcagaagtttgagaggcccatctgtgtttcctggagcactgatgtgaagggtggaagatggacatcctttggctgtgtgatcctggaagcttctgagacatataccatctgcagctgtaatcagatggcaaatcttgccgttatcatggcgtctggggagctcacgatggacttttccttgtacatcattagccatgtaggcattatcatctccttggtgtgcctcgtcttggccatcgccacctttctgctgtgtcgctccatccgaaatcacaacacctacctccacctgcacctctgcgtgtgtctcctcttggcgaagactctcttcctcgccggtatacacaagactgacaacaagatgggctgcgccatcatcgcgggcttcctgcactaccttttccttgcctgcttcttctggatgctggtggaggctgtgatactgttcttgatggtcagaaacctgaaggtggtgaattacttcagctctcgcaacatcaagatgctgcacatctgtgcctttggttatgggctgccgatgctggtggtggtgatctctgccagtgtgcagccacagggctatggaatgcataatcgctgctggctgaatacagagacagggttcatctggagtttcttggggccagtttgcacagttatagtgatcaactcccttctcctgacctggaccttgtggatcctgaggcagaggctttccagtgttaatgccgaagtctcaacgctaaaagacaccaggttactgaccttcaaggcctttgcccagctcttcatcctgggctgctcctgggtgctgggcatttttcagattggacctgtggcaggtgtcatggcttacctgttcaccatcatcaacagcctgcagggggccttcatcttcctcatccactgtctgctcaacggccaggtacgagaagaatacaagaggtggatcactgggaagacgaagcccagctcccagtcccagacctcaaggatcttgctgtcctccatgccatccgcttccaagacgggttaaagtcctttcttgctttcaaatatgctatggagccacagttgaggacagtagtttcctgcaggagcctaccctgaaatctcttctcagcttaacatggaaatgaggatcccaccagccccagaaccctctggggaagaatgttgggggcggtcttcctgtggttgtatgcactgatgagaaatcaggcgtttctgctccaaacgaccattttatcttcgtgctctgcaacttcttcaattccagagtttctgagaacagacccaaattcaatggcatgaccaagaacacctggctaccattttgttttctcctgcccttgttggtgcatggttctaagcatgcccctccagagcctatcatacgcctgatacagagaacctctcaataaatgatttgtcgcctgtc

SEQ ID NO: 9327 - DNA, 2501 bp, Homo sapiens
  source 1..2501: mol_type = unassigned DNA
aaaagtttcttttctttgaatgacagaactacagcataatgcgtggcttcaacctgctcctcttctggggatgttgtgttatgcacagctgggaagggcacataagacccacacggaaaccaaacacaaagggtaataactgtagagacagtaccttgtgcccagcttatgccacctgcaccaatacagtggacagttactattgcgcttgcaaacaaggcttcctgtccagcaatgggcaaaatcacttcaaggatccaggagtgcgatgcaaagatattgatgaatgttctcaaagcccccagccctgtggtcctaactcatcctgcaaaaacctgtcagggaggtacaagtgcagctgtttagatggtttctcttctcccactggaaatgactgggtcccaggaaagccgggcaatttctcctgtactgatatcaatgagtgcctcaccagcagcgtctgccctgagcattctgactgtgtcaactccatgggaagctacagttgcagctgtcaagttggattcatctctagaaactccacctgtgaagacgtggatgaatgtgcagatccaagagcttgcccagagcatgcaacttgtaataacactgttggaaactactcttgtttctgcaacccaggatttgaatccagcagtggccacttgagtttccagggtctcaaagcatcgtgtgaagatattgatgaatgcactgaaatgtgccccatcaattcaacatgcaccaacactcctgggagctacttttgcacctgccaccctggctttgcaccaagcaatggacagttgaatttcacagaccaaggagtggaatgtagagatattgatgagtgccgccaagatccatcaacctgtggtcctaattctatctgcaccaatgccctgggctcctacagctgtggctgcattgcaggctttcatcccaatccagaaggctcccagaaagatggcaacttcagctgccaaagggttctcttcaaatgtaaggaagatgtgatacccgataataagcagatccagcaatgccaagagggaaccgcagtgaaacctgcatatgtctccttttgtgcacaaataaataacatcttcagcgttctggacaaagtgtgtgaaaataaaacgaccgtagtttctctgaagaatacaactgagagctttgtccctgtgcttaaacaaatatccacgtggactaaattcaccaaggaagagacgtcctccctggccacagtcttcctggagagtgtggaaagcatgacactggcatctttttggaaaccctcagcaaatatcactccggctgttcggacggaatacttagacattgagagcaaagttatcaacaaagaatgcagtgaagagaatgtgacgttggacttggtagccaagggggataagatgaagatcgggtgttccacaattgaggaatctgaatccacagagaccactggtgtggcttttgtctcctttgtgggcatggaatcggttttaaatgagcgcttcttcaaagaccaccaggctcccttgaccacctctgagatcaagctgaagatgaattctcgagtcgttgggggcataatgactggagagaagaaagacggcttctcagatccaatcatctacactctggagaacattcagccaaagcagaagtttgagaggcccatctgtgtttcctggagcactgatgtgaagggtggaagatggacatcctttggctgtgtgatcctggaagcttctgagacatataccatctgcagctgtaatcagatggcaaatcttgccgttatcatggcgtctggggagctcacgatgggctgcgccatcatcgcgggcttcctgcactaccttttccttgcctgcttcttctggatgctggtggaggctgtgatactgttcttgatggtcagaaacctgaaggtggtgaattacttcagctctcgcaacatcaagatgctgcacatctgtgcctttggttatgggctgccgatgctggtggtggtgatctctgccagtgtgcagccacagggctatggaatgcataatcgctgctggctgaatacagagacagggttcatctggagtttcttggggccagtttgcacagttatagtgatcaactcccttctcctgacctggaccttgtggatcctgaggcagaggctttccagtgttaatgccgaagtctcaacgctaaaagacaccaggttactgaccttcaaggcctttgcccagctcttcatcctgggctgctcctgggtgctgggcatttttcagattggacctgtggcaggtgtcatggcttacctgttcaccatcatcaacagcctgcagggggccttcatcttcctcatccactgtctgctcaacggccaggtacgagaagaatacaagaggtggatcactgggaagacgaagcccagctcccagtcccagacctcaaggatcttgctgtcctccatgccatccgcttccaagacgggt

SEQ ID NO: 9328 - DNA, 2398 bp, Homo sapiens
  source 1..2398: mol_type = unassigned DNA
accccgtccagcttcatccgcagaggagcctcggccaggcttgccagggcgcccccagcccctccccaggccgcgagcgcccctgccgcggtgcctggcctcccctcccagactgcagggacagcacccggtaactgcgagtggagcggaggacccgagcggctgaggagagaggaggcggcggcttagctgctacggggtccggccggcgccctcccgaggggggctcaggaggaggaaggaggacccgtgcgagaatgcctctgccctggagccttgcgctcccgctgctgctctcctgggtggcaggtggtttcgggaacgcggccagtgcaaggcatcacgggttgttagcatcggcacgtcagcctggggtctgtcactatggaactaaactggcctgctgctacggctggagaagaaacagcaagggagtctgtgaagctacatgcgaacctggatgtaagtttggtgagtgcgtgggaccaaacaaatgcagatgctttccaggatacaccgggaaaacctgcagtcaagatgtgaatgagtgtggaatgaaaccccggccatgccaacacagatgtgtgaatacacacggaagctacaagtgcttttgcctcagtggccacatgctcatgccagatgctacgtgtgtgaactctaggacatgtgccatgataaactgtcagtacagctgtgaagacacagaagaagggccacagtgcctgtgtccatcctcaggactccgcctggccccaaatggaagagactgtctagatattgatgaatgtgcctctggtaaagtcatctgtccctacaatcgaagatgtgtgaacacatttggaagctactactgcaaatgtcacattggtttcgaactgcaatatatcagtggacgatatgactgtatagatataaatgaatgtactatggatagccatacgtgcagccaccatgccaattgcttcaatacccaagggtccttcaagtgtaaatgcaagcagggatataaaggcaatggacttcggtgttctgctatccctgaaaattctgtgaaggaagtcctcagagcacctggtaccatcaaagacagaatcaagaagttgcttgctcacaaaaacagcatgaaaaagaaggcaaaaattaaaaatgttaccccagaacccaccaggactcctacccctaaggtgaacttgcagcccttcaactatgaagagatagtttccagaggcgggaactctcatggaggtaaaaaagggaatgaagagaaaatgaaagaggggcttgaggatgagaaaagagaagagaaagccctgaagaatgacatagaggagcgaagcctgcgaggagatgtgtttttccctaaggtgaatgaagcaggtgaattcggcctgattctggtccaaaggaaagcgctaacttccaaactggaacataaagatttaaatatctcggttgactgcagcttcaatcatgggatctgtgactggaaacaggatagagaagatgattttgactggaatcctgctgatcgagataatgctattggcttctatatggcagttccggccttggcaggtcacaagaaagacattggccgattgaaacttctcctacctgacctgcaaccccaaagcaacttctgtttgctctttgattaccggctggccggagacaaagtcgggaaacttcgagtgtttgtgaaaaacagtaacaatgccctggcatgggagaagaccacgagtgaggatgaaaagtggaagacagggaaaattcagttgtatcaaggaactgatgctaccaaaagcatcatttttgaagcagaacgtggcaagggcaaaaccggcgaaatcgcagtggatggcgtcttgcttgtttcaggcttatgtccagatagccttttatctgtggatgactgaatgttactatctttatatttgactttgtatgtcagttccctggtttttttgatattgcatcataggacctctggcattttagaattactagctgaaaaattgtaatgtaccaacagaaatattattgtaagatgcctttcttgtataagatatgccaatatttgctttaaatatcatatcactgtatcttctcagtcatttctgaatctttccacattatattataaaatatggaaatgtcagtttatctcccctcctcagtatatctgatttgtataagtaagttgatgagcttctctctacaacatttctagaaaatagaaaaaaaagcacagagaaatgtttaactgtttgactcttatgatacttcttggaaactatgacatcaaagatagacttttgcctaagtggcttagctgggtctttcatagccaaacttgtatatttaaattctttgtaataataatatccaaatcatc

SEQ ID NO: 9329 - DNA, 2385 bp, Homo sapiens
  source 1..2385: mol_type = unassigned DNA
ccgcagaggagcctcggccaggcttgccagggcgcccccagcccctccccaggccgcgagcgcccctgccgcggtgcctggcctcccctcccagactgcagggacagcacccggtaactgcgagtggagcggaggacccgagcggctgaggagagaggaggcggcggcttagctgctacggggtccggccggcgccctcccgaggggggctcaggaggaggaaggaggacccgtgcgagaatgcctctgccctggagccttgcgctcccgctgctgctctcctgggtggcaggtggtttcgggaacgcggccagtgcaaggcatcacgggttgttagcatcggcacgtcagcctggggtctgtcactatggaactaaactggcctgctgctacggctggagaagaaacagcaagggagtctgtgaagctacatgcgaacctggatgtaagtttggtgagtgcgtgggaccaaacaaatgcagatgctttccaggatacaccgggaaaacctgcagtcaagatgtgaatgagtgtggaatgaaaccccggccatgccaacacagatgtgtgaatacacacggaagctacaagtgcttttgcctcagtggccacatgctcatgccagatgctacgtgtgtgaactctaggacatgtgccatgataaactgtcagtacagctgtgaagacacagaagaagggccacagtgcctgtgtccatcctcaggactccgcctggccccaaatggaagagactgtctagatattgatgaatgtgcctctggtaaagtcatctgtccctacaatcgaagatgtgtgaacacatttggaagctactactgcaaatgtcacattggtttcgaactgcaatatatcagtggacgatatgactgtatagatataaatgaatgtactatggatagccatacgtgcagccaccatgccaattgcttcaatacccaagggtccttcaagtgtaaatgcaagcagggatataaaggcaatggacttcggtgttctgctatccctgaaaattctgtgaaggaagtcctcagagcacctggtaccatcaaagacagaatcaagaagttgcttgctcacaaaaacagcatgaaaaagaaggcaaaaattaaaaatgttaccccagaacccaccaggactcctacccctaaggtgaacttgcagcccttcaactatgaagagatagtttccagaggcgggaactctcatggaggtaaaaaagggaatgaagagaaaatgaaagaggggcttgaggatgagaaaagagaagagaaagccctgaagaatgacatagaggagcgaagcctgcgaggagatgtgtttttccctaaggtgaatgaagcaggtgaattcggcctgattctggtccaaaggaaagcgctaacttccaaactggaacataaagcagatttaaatatctcggttgactgcagcttcaatcatgggatctgtgactggaaacaggatagagaagatgattttgactggaatcctgctgatcgagataatgctattggcttctatatggcagttccggccttggcaggtcacaagaaagacattggccgattgaaacttctcctacctgacctgcaaccccaaagcaacttctgtttgctctttgattaccggctggccggagacaaagtcgggaaacttcgagtgtttgtgaaaaacagtaacaatgccctggcatgggagaagaccacgagtgaggatgaaaagtggaagacagggaaaattcagttgtatcaaggaactgatgctaccaaaagcatcatttttgaagcagaacgtggcaagggcaaaaccggcgaaatcgcagtggatggcgtcttgcttgtttcaggcttatgtccagatagccttttatctgtggatgactgaatgttactatctttatatttgactttgtatgtcagttccctggtttttttgatattgcatcataggacctctggcattttagaattactagctgaaaaattgtaatgtaccaacagaaatattattgtaagatgcctttcttgtataagatatgccaatatttgctttaaatatcatatcactgtatcttctcagtcatttctgaatctttccacattatattataaaatatggaaatgtcagtttatctcccctcctcagtatatctgatttgtataagtaagttgatgagcttctctctacaacatttctagaaaatagaaaaaaaagcacagagaaatgtttaactgtttgactcttatgatacttcttggaaactatgacatcaaagatagacttttgcctaagtggcttagctgggtctttcatagccaaacttgtatatttaaattctttgtaataataatatccaaatcatca

SEQ ID NO: 9330 - DNA, 1530 bp, Homo sapiens
  source 1..1530: mol_type = unassigned DNA
ctgcaccaagctggccctgcacggctgcaagggaggctcctgtggacaggccaggcaggtgggcctcaggaggtgcctccaggcggccagtgggcctgaggccccagcaagggctagggtccatctccagtcccaggacacagcagcggccaccatggccacgcctgggctccagcagcatcagcccccaggaccggggaggcacaggtggcccccaccacccggaggagcagctcctgcccctgtccgggggatgactgattctcctccgccaggccacccagaggagaaggccaccccgcctggaggcacaggccatgaggggctctcaggaggtgctgctgatgtggcttctggtgttggcagtgggcggcacagagcacgcctaccggcccggccgtagggtgtgtgctgtccgggctcacggggaccctgtctccgagtcgttcgtgcagcgtgtgtaccagcccttcctcaccacctgcgacgggcaccgggcctgcagcacctaccgaaccatctataggaccgcctaccgccgcagccctgggctggcccctgccaggcctcgctacgcgtgctgccccggctggaagaggaccagcgggcttcctggggcctgtggagcagcaatatgccagccgccatgccggaacggagggagctgtgtccagcctggccgctgccgctgccctgcaggatggcggggtgacacttgccagtcagatgtggatgaatgcagtgctaggaggggcggctgtccccagcgctgcgtcaacaccgccggcagttactggtgccagtgttgggaggggcacagcctgtctgcagacggtacactctgtgtgcccaagggagggccccccagggtggcccccaacccgacaggagtggacagtgcaatgaaggaagaagtgcagaggctgcagtccagggtggacctgctggaggagaagctgcagctggtgctggccccactgcacagcctggcctcgcaggcactggagcatgggctcccggaccccggcagcctcctggtgcactccttccagcagctcggccgcatcgactccctgagcgagcagatttccttcctggaggagcagctggggtcctgctcctgcaagaaagactcgtgactgcccagcgccccaggctggactgagcccctcacgccgccctgcagcccccatgcccctgcccaacatgctgggggtccagaaaccacctcggggtgactgagcggaaggccaggcagggccttcctcctcttcctcctccccttcctcgggaggctccccagaccctggcatgggatgggctgggatcttctctgtgaatccacccctggctacccccaccctggctaccccaacggcatcccaaggccaggtgggccctcagctgagggaaggtacgagctccctgctggagcctgggacccatggcacaggccaggcagcccggaggctgggtggggcctcagtgggggctgctgcctgacccccagcacaataaaaatgaaacgtg

SEQ ID NO: 9331 - DNA, 1282 bp, Homo sapiens
  source 1..1282: mol_type = unassigned DNA
ggcgcgtgcgcgccccggatccggcggccacccagaggagaaggccaccccgcctggaggcacaggccatgaggggctctcaggaggtgctgctgatgtggcttctggtgttggcagtgggcggcacagagcacgcctaccggcccggccgtagggtgtgtgctgtccgggctcacggggaccctgtctccgagtcgttcgtgcagcgtgtgtaccagcccttcctcaccacctgcgacgggcaccgggcctgcagcacctaccgaaccatctataggaccgcctaccgccgcagccctgggctggcccctgccaggcctcgctacgcgtgctgccccggctggaagaggaccagcgggcttcctggggcctgtggagcagcaatatgccagccgccatgccggaacggagggagctgtgtccagcctggccgctgccgctgccctgcaggatggcggggtgacacttgccagtcagatgtggatgaatgcagtgctaggaggggcggctgtccccagcgctgcgtcaacaccgccggcagttactggtgccagtgttgggaggggcacagcctgtctgcagacggtacactctgtgtgcccaagggagggccccccagggtggcccccaacccgacaggagtggacagtgcaatgaaggaagaagtgcagaggctgcagtccagggtggacctgctggaggagaagctgcagctggtgctggccccactgcacagcctggcctcgcaggcactggagcatgggctcccggaccccggcagcctcctggtgcactccttccagcagctcggccgcatcgactccctgagcgagcagatttccttcctggaggagcagctggggtcctgctcctgcaagaaagactcgtgactgcccagcgccccaggctggactgagcccctcacgccgccctgcagcccccatgcccctgcccaacatgctgggggtccagaaaccacctcggggtgactgagcggaaggccaggcagggccttcctcctcttcctcctccccttcctcgggaggctccccagaccctggcatgggatgggctgggatcttctctgtgaatccacccctggctacccccaccctggctaccccaacggcatcccaaggccaggtgggccctcagctgagggaaggtacgagctccctgctggagcctgggacccatggcacaggccaggcagcccggaggctgggtggggcctcagtgggggctgctgcctgacccccagcacaataaaaatgaaacgtga

SEQ ID NO: 9332 - DNA, 2125 bp, Homo sapiens
  source 1..2125: mol_type = unassigned DNA
agatgcaaagccggtggggacctgccaagaagccagcccacaaggccatggactcctccacgccatcagctggagcagtgggcagccccaggaagggagacgggagcggccaggggaagggcgaggggtcccccgggcgacccccgaggctcaggcgcccggactccagtcctgggcctccgttttccacccttgaacaagcggcttccacctgtgagccagctgcctcctctgaaaatggaagcccctcaactcagagggtgtcgctctgggacgtgggtcaggggccggagcaggcagggagaggtgagaggaaaggctggggaccctcacttctccctgcccaaaccctcgctcgggagcagacggctcctctgcccgcaggcacccctgcctggcagctccctccagcccccgtcgggtccgggacgtcctctgatgggaaggttccaccacatccgtggctgacagagccagcccgtccgaggccggggggcgctcggggtaaacaggaagccccatccctcccgcactctgcttcactccctcctcctgcacctcctgcagcccggctcccgcggccgcgcctggtgcccctctgtctcgcgccacctgagatgcccaggctggcctctgccaggggcttagtctgccctctcctggggcttcagaggccaaaagcaccctggtgaggggtccgggaggcccgggagggcccggggggctctgccaggcccctccacgcctctctgcccagccagcacgctctgggaagcagcccccaggaccggggaggcacaggtggcccccaccacccggaggagcagctcctgcccctgtccgggggatgactgattctcctccgccaggccacccagaggagaaggccaccccgcctggaggcacaggccatgaggggctctcaggaggtgctgctgatgtggcttctggtgttggcagtgggcggcacagagcacgcctaccggcccggccgtagggtgtgtgctgtccgggctcacggggaccctgtctccgagtcgttcgtgcagcgtgtgtaccagcccttcctcaccacctgcgacgggcaccgggcctgcagcacctaccgaaccatctataggaccgcctaccgccgcagccctgggctggcccctgccaggcctcgctacgcgtgctgccccggctggaagaggaccagcgggcttcctggggcctgtggagcagcaatatgccagccgccatgccggaacggagggagctgtgtccagcctggccgctgccgctgccctgcaggatggcggggtgacacttgccagtcagatgtggatgaatgcagtgctaggaggggcggctgtccccagcgctgcgtcaacaccgccggcagttactggtgccagtgttgggaggggcacagcctgtctgcagacggtacactctgtgtgcccaagggagggccccccagggtggcccccaacccgacaggagtggacagtgcaatgaaggaagaagtgcagaggctgcagtccagggtggacctgctggaggagaagctgcagctggtgctggccccactgcacagcctggcctcgcaggcactggagcatgggctcccggaccccggcagcctcctggtgcactccttccagcagctcggccgcatcgactccctgagcgagcagatttccttcctggaggagcagctggggtcctgctcctgcaagaaagactcgtgactgcccagcgccccaggctggactgagcccctcacgccgccctgcagcccccatgcccctgcccaacatgctgggggtccagaaaccacctcggggtgactgagcggaaggccaggcagggccttcctcctcttcctcctccccttcctcgggaggctccccagaccctggcatgggatgggctgggatcttctctgtgaatccacccctggctacccccaccctggctaccccaacggcatcccaaggccaggtgggccctcagctgagggaaggtacgagctccctgctggagcctgggacccatggcacaggccaggcagcccggaggctgggtggggcctcagtgggggctgctgcctgacccccagcacaataaaaatgaaacgtga

SEQ ID NO: 9333 - DNA, 1529 bp, Homo sapiens
  source 1..1529: mol_type = unassigned DNA
ccaagctggccctgcacggctgcaagggaggctcctgtggacaggccaggcaggtgggcctcaggaggtgcctccaggcggccagtgggcctgaggccccagcaagggctagggtccatctccagtcccaggacacagcagcggccaccatggccacgcctgggctccagcagcatcagcagcccccaggaccggggaggcacaggtggcccccaccacccggaggagcagctcctgcccctgtccgggggatgactgattctcctccgccaggccacccagaggagaaggccaccccgcctggaggcacaggccatgaggggctctcaggaggtgctgctgatgtggcttctggtgttggcagtgggcggcacagagcacgcctaccggcccggccgtagggtgtgtgctgtccgggctcacggggaccctgtctccgagtcgttcgtgcagcgtgtgtaccagcccttcctcaccacctgcgacgggcaccgggcctgcagcacctaccgaaccatctataggaccgcctaccgccgcagccctgggctggcccctgccaggcctcgctacgcgtgctgccccggctggaagaggaccagcgggcttcctggggcctgtggagcagcaatatgccagccgccatgccggaacggagggagctgtgtccagcctggccgctgccgctgccctgcaggatggcggggtgacacttgccagtcagatgtggatgaatgcagtgctaggaggggcggctgtccccagcgctgcgtcaacaccgccggcagttactggtgccagtgttgggaggggcacagcctgtctgcagacggtacactctgtgtgcccaagggagggccccccagggtggcccccaacccgacaggagtggacagtgcaatgaaggaagaagtgcagaggctgcagtccagggtggacctgctggaggagaagctgcagctggtgctggccccactgcacagcctggcctcgcaggcactggagcatgggctcccggaccccggcagcctcctggtgcactccttccagcagctcggccgcatcgactccctgagcgagcagatttccttcctggaggagcagctggggtcctgctcctgcaagaaagactcgtgactgcccagcgccccaggctggactgagcccctcacgccgccctgcagcccccatgcccctgcccaacatgctgggggtccagaaaccacctcggggtgactgagcggaaggccaggcagggccttcctcctcttcctcctccccttcctcgggaggctccccagaccctggcatgggatgggctgggatcttctctgtgaatccacccctggctacccccaccctggctaccccaacggcatcccaaggccaggtgggccctcagctgagggaaggtacgagctccctgctggagcctgggacccatggcacaggccaggcagcccggaggctgggtggggcctcagtgggggctgctgcctgacccccagcacaataaaaatgaaacgtga

SEQ ID NO: 9334 - DNA, 1310 bp, Homo sapiens
  source 1..1310: mol_type = unassigned DNA
ccaggcccacccaccagtctgagctgcttctgctgaggctggtctgcttgaagcctcccaggagaaagaagccagcctgtagggtccagcgtcaaagcgaatcatggggtccagggctgagctgtgcactctcttaggcggattctccttcctcctgctactgataccaggcgagggggccaagggtggatccctcagagagagtcagggagtctgctccaagcagacactggtggtcccgctccactacaacgagtcctacagccaaccagtgtacaagccctacctgaccttgtgcgctgggaggcgcatctgcagcacttacaggaccatgtaccgcgttatgtggcgggaggtgaggcgggaggttcagcagacccatgcagtgtgctgccagggctggaagaagcggcacccgggggcgctcacctgtgaagccatctgcgccaagccttgcctgaacggaggcgtctgcgttaggcctgaccagtgcgagtgcgcccccggctggggagggaagcactgtcatgtggacgtggatgaatgtaggaccagcatcaccctctgctcgcaccattgttttaatacggcaggcagcttcacctgcggctgcccccatgacctagtgctaggcgtggacgggcgcacctgcatggaggggtccccagagcccccaaccagtgccagcatactcagcgtggccgttcgggaggcggaaaaagatgagcgcgctctgaagcaggagattcacgagctgcgagggcgcctggagcggctggagcagtgggccggtcaggctggggcctgggtcagagcggtgctgcccgtgccgcctgaagagctgcagccagaacaggtggctgagctgtggggccggggtgaccggatcgaatctctcagcgaccaggtgctgctgctggaggagaggctaggtgcctgctcctgtgaggacaacagcctgggcctcggcgtcaatcatcgataagaagcctctacagcacccctgccccctaatttatacagaaaccggacccactaatcctctgggattggccgactgtgagctgcagataaggctatcagccaccaaagagcaatgaacaatggaaacttcagagagctgaagaaagggggaggcctgtgttcttggcctgcccctgagtcttctggctgggggcaggttgcctgggcaagaactgcttcttcaattccttaacaaatgcaaccaccaacacccagatctctctctctctttattttcagtttttttgctgttatccagataattaataaaaaccaaccacgcaaaa

SEQ ID NO: 9335 - DNA, 1312 bp, Homo sapiens
  source 1..1312: mol_type = unassigned DNA
gctgcttctgctgaggctggtctgcttgaagcctcccaggagaaagaagccaggtgggaatggagagagagaggaagcctgtagggtccagcgtcaaagcgaatcatggggtccagggctgagctgtgcactctcttaggcggattctccttcctcctgctactgataccaggcgagggggccaagggtggatccctcagagagagtcagggagtctgctccaagcagacactggtggtcccgctccactacaacgagtcctacagccaaccagtgtacaagccctacctgaccttgtgcgctgggaggcgcatctgcagcacttacaggaccatgtaccgcgttatgtggcgggaggtgaggcgggaggttcagcagacccatgcagtgtgctgccagggctggaagaagcggcacccgggggcgctcacctgtgaagccatctgcgccaagccttgcctgaacggaggcgtctgcgttaggcctgaccagtgcgagtgcgcccccggctggggagggaagcactgtcatgtggacgtggatgaatgtaggaccagcatcaccctctgctcgcaccattgttttaatacggcaggcagcttcacctgcggctgcccccatgacctagtgctaggcgtggacgggcgcacctgcatggaggggtccccagagcccccaaccagtgccagcatactcagcgtggccgttcgggaggcggaaaaagatgagcgcgctctgaagcaggagattcacgagctgcgagggcgcctggagcggctggagcagtgggccggtcaggctggggcctgggtcagagcggtgctgcccgtgccgcctgaagagctgcagccagaacaggtggctgagctgtggggccggggtgaccggatcgaatctctcagcgaccaggtgctgctgctggaggagaggctaggtgcctgctcctgtgaggacaacagcctgggcctcggcgtcaatcatcgataagaagcctctacagcacccctgccccctaatttatacagaaaccggacccactaatcctctgggattggccgactgtgagctgcagataaggctatcagccaccaaagagcaatgaacaatggaaacttcagagagctgaagaaagggggaggcctgtgttcttggcctgcccctgagtcttctggctgggggcaggttgcctgggcaagaactgcttcttcaattccttaacaaatgcaaccaccaacacccagatctctctctctctttattttcagtttttttgctgttatccagataattaataaaaaccaaccacgcaaaa

SEQ ID NO: 9336 - DNA, 1312 bp, Homo sapiens
  source 1..1312: mol_type = unassigned DNA
gctgcttctgctgaggctggtctgcttgaagcctcccaggagaaagaagccaggtgggaatggagagagagaggaagcctgtagggtccagcgtcaaagcgaatcatggggtccagggctgagctgtgcactctcttaggcggattctccttcctcctgctactgataccaggcgagggggccaagggtggatccctcagagagagtcagggagtctgctccaagcagacactggtggtcccgctccactacaacgagtcctacagccaaccagtgtacaagccctacctgaccttgtgcgctgggaggcgcatctgcagcacttacaggaccatgtaccgcgttatgtggcgggaggtgaagcgggaggttcagcagacccatgcagtgtgctgccagggctggaagaagcggcacccgggggcgctcacctgtgaagccatctgcgccaagccttgcctgaacggaggcgtctgcgttaggcctgaccagtgcgagtgcgcccccggctggggagggaagcactgtcatgtggacgtggatgaatgtaggaccagcatcaccctctgctcgcaccattgttttaatacggcaggcagcttcacctgcggctgcccccatgacctagtgctaggcgtggacgggcgcacctgcatggaggggtccccagagcccccaaccagtgccagcatactcagcgtggccgttcgggaggcggaaaaagatgagcgcgctctgaagcaggagattcacgagctgcgagggcgcctggagcggctggagcagtgggccggtcaggctggggcctgggtcagagcggtgctgcccgtgccgcctgaagagctgcagccagaacaggtggctgagctgtggggccggggtgaccggatcgaatctctcagcgaccaggtgctgctgctggaggagaggctaggtgcctgctcctgtgaggacaacagcctgggcctcggcgtcaatcatcgataagaagcctctacagcacccctgccccctaatttatacagaaaccggacccactaatcctctgggattggccgactgtgagctgcagataaggctatcagccaccaaagagcaatgaacaatggaaacttcagagagctgaagaaagggggaggcctgtgttcttggcctgcccctgagtcttctggctgggggcaggttgcctgggcaagaactgcttcttcaattccttaacaaatgcaaccaccaacacccagatctctctctctctttattttcagtttttttgctgttatccagataattaataaaaaccaaccacgcaaaa

SEQ ID NO: 9337 - DNA, 825 bp, Homo sapiens
  source 1..825: mol_type = unassigned DNA
gggaatggagagagagaggaagcctgtagggtccagcgtcaaagcgaatcatggggtccagggctgagctgtgcactctcttaggcggattctccttcctcctgctactgataccaggcgagggggccaagggtggatccctcagagagagtcagggagtctgctccaagcagacactggtggtcccgctccactacaacgagtcctacagccaaccagtgtacaagccctacctgaccttgtgcgctgggaggcgcatctgcagcacttacaggaccatgtaccgcgttatgtggcgggaggtgaggcgggaggttcagcagacccatgcagtgtgctgccagggctggaagaagcggcacccgggggcgctcacctgtgaagccatctgcgccaagccttgcctgaacggaggcgtctgcgttaggcctgaccagtgcgagtgcgcccccggctggggagggaagcactgtcatgtgggcagcttcacctgcggctgcccccatgacctagtgctaggcgtggacgggcgcacctgcatggaggggtccccagagcccccaaccagtgccagcatactcagcgtggccgttcgggaggcggaaaaagatgagcgcgctctgaagcaggagattcacgagctgcgagggcgcctggagcggctggagcagtgggccggtcaggctggggcctgggtcagagcggtgctgcccgtgccgcctgaagagctgcagccagaacaggtggctgagctgtggggccggggtgaccggatcgaatctctcagcgaccaggtgctgctgctggaggagaggctaggtgcct

SEQ ID NO: 9338 - DNA, 1312 bp, Homo sapiens; identical to SEQ ID NO: 9335
  source 1..1312: mol_type = unassigned DNA

SEQ ID NO: 9339 - DNA, 1310 bp, Homo sapiens; identical to SEQ ID NO: 9334
  source 1..1310: mol_type = unassigned DNA

SEQ ID NO: 9340 - DNA, 1312 bp, Homo sapiens
  source 1..1312: mol_type = unassigned DNA
gctgcttctgctgaggctggtctgcttgaagcctcccaggagaaagaagccaggtgggaatggagagagagaggaagcctgtagggtccagcgtcaaagcgaatcatggggtccagggctgagctgtgcactctcttaggcggattctccttcctcctgctactgataccaggcgagggggccaagggtggatccctcagagagagtcagggagtctgctccaagcagacactggtggtcccgctccactacaacgagtcctacagccaaccagtgtacaagccctacctgaccttgtgcgctgggaggcgcatctgcagcacttacaggaccatgtaccgcgttatgtggcgggaggtgaggcgggaggttcagcagacccatgcagtgtgctgccagggctggaagaagcggcacccgggggcgctcacctgtgaagccatctgcgccaagccttgcctgaacggaggcgtctgcgttaggcctgaccagtgcgagtgcgcccccggctggggagggaagcactgtcatgtggacgtggatgaatgtaggaccagcatcaccctctgctcgcaccattgttttaatacggcaggcagcttcacctgcggctgcccccatgacctagtgctaggcgtggacgggcgcacctgcatggaggggtccccagagcccccaaccagtgccagcatactcagcgtggccgttcgggaggcggaaaaagatgagcgcgctctgaagcaggagattcacgagctgcgagggcgcctggagcggctggagcagtgggccggtcaggctggggcctgggtcagagcggtgctgcccgtgccgcctgaagagctgcagccagaacaggtggctgagctgtggggccggggtgaccggatcgaatctctcagcgaccaggtgctgctgctggaggagaggctaggtgcctgctcctgtgaggacaacagcctgggcctcggcgtcaatcatcgataagaagcctctacagcacccctgccccctaatttatacagaaaccggacccactaatcctctgggattggccgactgtgagctgcagataaggctatcagccaccaaagagcaatgaacaatggaaacttcagagagctgaagaaacggggaggcctgtgttcttggcctgcccctgagtcttctggctgggggcaggttgcctgggcaagaactgcttcttcaattccttaacaaatgcaaccaccaacacccagatctctctctctctttattttcagtttttttgctgttatccagataattaataaaaaccaaccacgcaaaa

SEQ ID NO: 9341 - DNA, 825 bp, Homo sapiens; identical to SEQ ID NO: 9337
  source 1..825: mol_type = unassigned DNA

SEQ ID NO: 9342 - DNA, 825 bp, Homo sapiens; identical to SEQ ID NO: 9337
  source 1..825: mol_type = unassigned DNA

SEQ ID NO: 9343 - DNA, 825 bp, Homo sapiens
  source 1..825: mol_type = unassigned DNA
gggaatggagagagagaggaagcctgtagggtccagcgtcaaagcgaatcatggggtccagggctgagctgtgcactctcttaggcggattctccttcctcctgctactgataccaggcgagggggccaagggtggatccctcagagagagtcagggagtctgctccaagcagacactggtggtcccgctccactacaacgagtcctacagccaaccagtgtacaagccctacctgaccttgtgcgctgggaggcgcatctgcagcacttacaggaccatgtaccgcgttatgtggcgggaggtgaagcgggaggttcagcagacccatgcagtgtgctgccagggctggaagaagcggcacccgggggcgctcacctgtgaagccatctgcgccaagccttgcctgaacggaggcgtctgcgttaggcctgaccagtgcgagtgcgcccccggctggggagggaagcactgtcatgtgggcagcttcacctgcggctgcccccatgacctagtgctaggcgtggacgggcgcacctgcatggaggggtccccagagcccccaaccagtgccagcatactcagcgtggccgttcgggaggcggaaaaagatgagcgcgctctgaagcaggagattcacgagctgcgagggcgcctggagcggctggagcagtgggccggtcaggctggggcctgggtcagagcggtgctgcccgtgccgcctgaagagctgcagccagaacaggtggctgagctgtggggccggggtgaccggatcgaatctctcagcgaccaggtgctgctgctggaggagaggctaggtgcct

SEQ ID NO: 9344 - DNA, 1312 bp, Homo sapiens; identical to SEQ ID NO: 9335
  source 1..1312: mol_type = unassigned DNA

SEQ ID NO: 9345 - DNA, 1309 bp, Homo sapiens
  source 1..1309: mol_type = unassigned DNA
gctgcttctgctgaggctggtctgcttgaagcctcccaggagaaagaagccaggtgggaatggagagagagaggaagcctgtagggtccagcgtcaaagcgaatcatggggtccagggctgagctgtgcactctcttaggcggattctccttcctcctgctactgataccaggcgagggggccaagggtggatccctcagagagagtcagggagtctgctccaagcagacactggtggtcccgctccactacaacgagtcctacagccaaccagtgtacaagccctacctgaccttgtgcgctgggaggcgcatctgcagcacttacaggaccatgtaccgcgttatgtggcgggaggtgaggcgggaggttcagcagacccatgcagtgtgctgccagggctggaagaagcggcacccgggggcgctcacctgtgaagccatctgcgccaagccttgcctgaacggaggcgtctgcgttaggcctgaccagtgcgagtgcgcccccggctggggagggaagcactgtcatgtggacgtggatgaatgtaggaccagcatcaccctctgctcgcaccattgttttaatacggcaggcagcttcacctgcggctgcccccatgacctagtgctaggcgtggacgggcgcacctgcatggaggggtccccagagcccccaaccagtgccagcatactcagcgtggccgttcgggaggcggaaaaagatgagcgcgctctgaagcaggagattcacgagctgcgagggcgcctggagcggctggagcagtgggccggtcaggctggggcctgggtcagagcggtgctgcccgtgccgcctgaagagctgcagccagaacaggtggctgagctgtggggccggggtgaccggatcgaatctctcagcgaccaggtgctgctgctggaggagaggctaggtgcctgctcctgtgaggacaacagcctgggcctcggcgtcaatcatcgataagaagcctctacagcacccctgccccctaatttatacagaaaccggacccactaatcctctgggattggccgactgtgagctgcagataaggctatcagccaccaaagagcaatgaacaatggaaacttcagagagctgaagaaagggggaggcctgtgttcttggcctgcccctgagtcttctggctgggggcaggttgcctgggcaagaactgcttcaattccttaacaaatgcaaccaccaacacccagatctctctctctctttattttcagtttttttgctgttatccagataattaataaaaaccaaccacgcaaaa

SEQ ID NO: 9346 - DNA, 1310 bp, Homo sapiens
  source 1..1310: mol_type = unassigned DNA
ccaggcccacccaccagtctgagctgcttctgctgaggctggtctgcttgaagcctcccaggagaaagaagccagcctgtagggtccagcgtcaaagcgaatcatggggtccagggctgagctgtgcactctcttaggcggattctccttcctcctgctactgataccaggcgagggggccaagggtggatccctcagagagagtcagggagtctgctccaagcagacactggtggtcccgctccactacaacgagtcctacagccaaccagtgtacaagccctacctgaccttgtgcgctgggaggcgcatctgcagcacttacaggaccatgtaccgcgttatgtggcgggaggtgaggcgggaggttcagcagacccatgcagtgtgctgccagggctggaagaagcggcacccgggggcgctcacctgtgaagccatctgcgccaagccttgcctgaacggaggcgtctgcgttaggcctgaccagtgcgagtgcgcccccggctggggagggaagcactgtcatgtggacgtggatgaatgtaggaccagcatcaccctctgctcgcaccattgttttaatacggcaggcagcttcacctgcggctgcccccatgacctagtgctaggcgtggacgggcgcacctgcatggaggggtccccagagcccccaaccagtgccagcatactcagcgtggccgttcgggaggcggaaaaagatgagcgcgctctgaagcaggagattcacgagctgcgagggcgcctggagcggctggagcagtgggccggtcaggctggggcctgggtcagagcggtgctgcccgtgccgcctgaagagctgcagccagaacaggtggctgagctgtggggccggggtgaccggatcgaatctctcagcgaccaggtgctgctgctggaggagaggctaggtgcctgctcctgtgaggacaacagcctgggcctcggcgtcaatcatcgataagaagcctctacagcacccctgccccctaatttatacagaaaccggacccactaatcctctgggattggccgactgtgagctgcagataaggctatcagccaccaaagagcaatgaacaatggaaacttcagagagctgaagaaacggggaggcctgtgttcttggcctgcccctgagtcttctggctgggggcaggttgcctgggcaagaactgcttcttcaattccttaacaaatgcaaccaccaacacccagatctctctctctctttattttcagtttttttgctgttatccagataattaataaaaaccaaccacgcaaaa

SEQ ID NO: 9347 - DNA, 1310 bp, Homo sapiens
  source 1..1310: mol_type = unassigned DNA
ccaggcccacccaccagtctgagctgcttctgctgaggctggtctgcttgaagcctcccaggagaaagaagccagcctgtagggtccagcgtcaaagcgaatcatggggtccagggctgagctgtgcactctcttaggcggattctccttcctcctgctactgataccaggcgagggggccaagggtggatccctcagagagagtcagggagtctgctccaagcagacactggtggtcccgctccactacaacgagtcctacagccaaccagtgtacaagccctacctgaccttgtgcgctgggaggcgcatctgcagcacttacaggaccatgtaccgcgttatgtggcgggaggtgaagcgggaggttcagcagacccatgcagtgtgctgccagggctggaagaagcggcacccgggggcgctcacctgtgaagccatctgcgccaagccttgcctgaacggaggcgtctgcgttaggcctgaccagtgcgagtgcgcccccggctggggagggaagcactgtcatgtggacgtggatgaatgtaggaccagcatcaccctctgctcgcaccattgttttaatacggcaggcagcttcacctgcggctgcccccatgacctagtgctaggcgtggacgggcgcacctgcatggaggggtccccagagcccccaaccagtgccagcatactcagcgtggccgttcgggaggcggaaaaagatgagcgcgctctgaagcaggagattcacgagctgcgagggcgcctggagcggctggagcagtgggccggtcaggctggggcctgggtcagagcggtgctgcccgtgccgcctgaagagctgcagccagaacaggtggctgagctgtggggccggggtgaccggatcgaatctctcagcgaccaggtgctgctgctggaggagaggctaggtgcctgctcctgtgaggacaacagcctgggcctcggcgtcaatcatcgataagaagcctctacagcacccctgccccctaatttatacagaaaccggacccactaatcctctgggattggccgactgtgagctgcagataaggctatcagccaccaaagagcaatgaacaatggaaacttcagagagctgaagaaagggggaggcctgtgttcttggcctgcccctgagtcttctggctgggggcaggttgcctgggcaagaactgcttcttcaattccttaacaaatgcaaccaccaacacccagatctctctctctctttattttcagtttttttgctgttatccagataattaataaaaaccaaccacgcaaaa

SEQ ID NO: 9348 - DNA, 1277 bp, Homo sapiens
  source 1..1277: mol_type = unassigned DNA
tgctgaggctggtctgcttgaagcctcccaggagaaagaagccagcctgtagggtccagcgtcaaagcgaatcatggggtccagggctgagctgtgcactctcttaggcggattctccttcctcctgctactgataccaggcgagggggccaagggtggatccctcagagagagtcagggagtctgctccaagcagacactggtggtcccgctccactacaacgagtcctacagccaaccagtgtacaagccctacctgaccttgtgcgctgggaggcgcatctgcagcacttacaggaccatgtaccgcgttatgtggcgggaggtgaggcgggaggttcagcagacccatgcagtgtgctgccagggctggaagaagcggcacccgggggcgctcacctgtgaagccatctgcgccaagccttgcctgaacggaggcgtctgcgttaggcctgaccagtgcgagtgcgcccccggctggggagggaagcactgtcatgtggacgtggatgaatgtaggaccagcatcaccctctgctcgcaccattgttttaatacggcaggcagcttcacctgcggctgcccccatgacctagtgctaggcgtggacgggcgcacctgcatggaggggtccccagagcccccaaccagtgccagcatactcagcgtggccgttcgggaggcggaaaaagatgagcgcgctctgaagcaggagattcacgagctgcgagggcgcctggagcggctggagcagtgggccggtcaggctggggcctgggtcagagcggtgctgcccgtgccgcctgaagagctgcagccagaacaggtggctgagctgtggggccggggtgaccggatcgaatctctcagcgaccaggtgctgctgctggaggagaggctaggtgcctgctcctgtgaggacaacagcctgggcctcggcgtcaatcatcgataagaagcctctacagcacccctgccccctaatttatacagaaaccggacccactaatcctctgggattggccgactgtgagctgcagataaggctatcagccaccaaagagcaatgaacaatggaaacttcagagagctgaagaaagggggaggcctgtgttcttggcctgcccctgagtcttctggctgggggcaggttgcctgggcaagaactgcttcaattccttaacaaatgcaaccaccaacacccagatctctctctctctttattttcagtttttttgctgttatccagataattaataaaaaccaaccacgcaaaa

SEQ ID NO: 9349 - DNA, 1310 bp, Homo sapiens; identical to SEQ ID NO: 9334
  source 1..1310: mol_type = unassigned DNA

SEQ ID NO: 9350 - DNA, 1312 bp, Homo sapiens
  source 1..1312: mol_type = unassigned DNA
gctgcttctgctgaggctggtctgcttgaagcctcccaggagaaagaagccaggtgggaatggagagagagaggaagcctgtagggtccagcgtcaaagcgaatcatggggtccagggctgagctgtgcactctcttaggcggattctccttcctcctgctactgataccaggcgagggggccaagggtggatccctcagagagagtcagggagtctgctccaagcagacactggtggtcccgctccactacaacgagtcctacagccaaccagtgtacaagccctacctgaccttgtgcgctgggaggcgcatctgcagcacttacaggaccatgtaccgcgttatgtggcgggaggtgaggcgggaggttcagcagacccatgcagtgtgctgccagggctggaagaagcggcacccgggggcgctcacctgtgaagccatctgcgccaagccttgcctgaacggaggcgtctgcgttaggcctgaccagtgcgagtgcgcccccggctggggagggaagcactgtcatgtggacgtggatgaatgtaggaccagcatcaccctctgctcgcaccattgttttaatacggcaggcagcttcacctgcggctgcccccatgacctagtgctaggcgtggacgggcgcacctgcatggaggggtccccagagcccccaaccagtgccagcatactcagcgtggccgttcgggaggcagaaaaagatgagcgcgctctgaagcaggagattcacgagctgcgagggcgcctggagcggctggagcagtgggccggtcaggctggggcctgggtcagagcggtgctgcccgtgccgcctgaagagctgcagccagaacaggtggctgagctgtggggccggggtgaccggatcgaatctctcagcgaccaggtgctgctgctggaggagaggctaggtgcctgctcctgtgaggacaacagcctgggcctcggcgtcaatcatcgataagaagcctctacagcacccctgccccctaatttatacagaaaccggacccactaatcctctgggattggccgactgtgagctgcagataaggctatcagccaccaaagagcaatgaacaatggaaacttcagagagctgaagaaagggggaggcctgtgttcttggcctgcccctgagtcttctggctgggggcaggttgcctgggcaagaactgcttcttcaattccttaacaaatgcaaccaccaacacccagatctctctctctctttattttcagtttttttgctgttatccagataattaataaaaaccaaccacgcaaaa

SEQ ID NO: 9351 - DNA, 825 bp, Homo sapiens; identical to SEQ ID NO: 9337
  source 1..825: mol_type = unassigned DNA

SEQ ID NO: 9352 - DNA, 1310 bp, Homo sapiens
  source 1..1310: mol_type = unassigned DNA
ccaggcccacccaccagtctgagctgcttctgctgaggctggtctgcttgaagcctcccaggagaaagaagccagcctgtagggtccagcgtcaaagcgaatcatggggtccagggctgagctgtgcactctcttaggcggattctccttcctcctgctactgataccaggcgagggggccaagggtggatccctcagagagagtcagggagtctgctccaagcagacactggtggtcccgctccactacaacgagtcctacagccaaccagtgtacaagccctacctgaccttgtgcgctgggaggcgcatctgcagcacttacaggaccatgtaccgcgttatgtggcgggaggtgaggcgggaggttcagcagacccatgcagtgtgctgccagggctggaagaagcggcacccgggggcgctcacctgtgaagccatctgcgccaagccttgcctgaacggaggcgtctgcgttaggcctgaccagtgcgagtgcgcccccggctggggagggaagcactgtcatgtggacgtggatgaatgtaggaccagcatcaccctctgctcgcaccattgttttaatacggcaggcagcttcacctgcggctgcccccatgacctagtgctaggcgtggacgggcgcacctgcatggaggggtccccagagcccccaaccagtgccagcatactcagcgtggccgttcgggaggcagaaaaagatgagcgcgctctgaagcaggagattcacgagctgcgagggcgcctggagcggctggagcagtgggccggtcaggctggggcctgggtcagagcggtgctgcccgtgccgcctgaagagctgcagccagaacaggtggctgagctgtggggccggggtgaccggatcgaatctctcagcgaccaggtgctgctgctggaggagaggctaggtgcctgctcctgtgaggacaacagcctgggcctcggcgtcaatcatcgataagaagcctctacagcacccctgccccctaatttatacagaaaccggacccactaatcctctgggattggccgactgtgagctgcagataaggctatcagccaccaaagagcaatgaacaatggaaacttcagagagctgaagaaagggggaggcctgtgttcttggcctgcccctgagtcttctggctgggggcaggttgcctgggcaagaactgcttcttcaattccttaacaaatgcaaccaccaacacccagatctctctctctctttattttcagtttttttgctgttatccagataattaataaaaaccaaccacgcaaaa

SEQ ID NO: 9353 - DNA, 7097 bp, Homo sapiens
  source 1..7097: mol_type = unassigned DNA
ttaggggcagaaaaacatttgtaataattaatggctttgagagacacaaggctttgtttgccccagagtattagttaacccacctagtgctcctaatcatacaatattaaggattgggagggacattcattgcctcactctctatttgtttcaccttctgtaaaattggtagaataatagtacccacttcatagcattgtatgatgattaaattggttaatatttttaaaatgcttagaacacagattgggcacataacagcaagcaccacatgtgtttataagataaattcctttgtgttgccttccgttaaagtttaaataagtaaataaataaataaatacttgcatgacattttgaagtctctctataacatctgagtaagtggcggctgcgacaatgctactggagttccagaatcgtgttggtgacaagattgttcaccagcatatggtgtggtgaaaactcactaatttggaattagttcagattattaagcctgaataggtgaaaatcctgaaatcaaggatctttggaactatttgaaatcagtattttatattttcctgttgtattcattaaagtgttgcaagtgttctatttgatggattaagtatatttaggatatacatgttcaatttgtgattttgtatacttaattggaacaagaaagctaataaaggttttgatatggacatctattcttttaagtaaacttcaatgaaaatatatgagtagagcatatagagatgtaaataatttgtggacacaccacagactgaaatagcaaatttaaaagaaattgttggaagaatcaagtgtttgtggaatgagtcctcctagtaaagttcctgctcttgtgaataattaagcctcatgtataattactatagcaaaaggaagcctaagaagtattagactctacttgtatttaaattacattttacataatttatgtgtatgaaaaatgttttaaatgcttattttcgtaagccatgagatagctcctttatattttaagaatttctgaattaatttgcttggattttattagtgcaaatggcagagctagcaattcctttttctgtgttcccattccatcctattcatccctcttttaggaaactctgaactctggattgtccttgtttacatacctgcctcctgcattggactatgtgtctctgagtgtagtatgactaattcatttgtttgtcaaggactctcaatgcatttgttgaacagcctaattagtaatgtctgcaacaatgacattttactgtatttaataaagctctgggaaagtaggatacacataagacaggtctaggtctaaattctttacagaaacttggatttttagttcggtttgaaatttgaagatgtgagtatatttatctcagtttcccaaaggacaagctaattggaattatcatcctctttcacttgattggatccccagaatgccatttacgcatgcagcaggattttataacagttttaaattctgtatatttgatgaagaggttttatatttttggattcaagcctctttttaaacttctacaatatggtttacaataattccttatatcctgcttttgaaatacatattacaactttttaagtttggaaggctatatttcaaggactgaagttacagtatactcaagtgatacacaagcctagcaccccactttccacatagtgttcgataaagattgataaactcgaaatcacagaccttttaattcttaagacaaatagcagcagaaagaaacatctttggcttatttctggtaaggtttttatgctctgtaaaacaaagaattgtattcatccgcgcagcacagattctattaaaaataaatgtgagagtcgttaatgtagtactgctcatttaccatcaaaattcacttttcaggaataatcccatcagtttaaattggatattggaatgagcattgattacatttaacttggtagcccaaaatttcttcatggggttttgaactcggcgggatttcaaaggttttaaaaatgagtttttgattttttttaaaaccctcaaatttcattacctttaaactaggtcgaaacggggcgcaagagattggattaacaccatagtaatacttattttgttcttaaccatttcagggcttcttgaaatagaggctgtatggtgtaatggaaaaaacagccttggaatctgggagcctgattcctggattcagtcccagttttgcgtgaccttgggcaagttactttacttctctgaatttccgtttcctcctctgcaaaatgaggatcgcaatagccaccttgcaaccttgactggagcgagcctcgcacaccccgcgccggcctggaggaagagcagccatgattacgccgccttcgctccgctacccgcttgcggctggcgccctcctccagcaggtgtaggcgctgccgcgctgccccacgcctttccgccgctcgcgggcctgcgcctcggcgtccccgaggaggccgctgcgggctgaggtagcgcaccggcctctcggcgtcccagtccggtcccgggcggagggaaagcgggcgacccacctccgaggcagaagccgaggcccggccccgccgagtgcggaggagcgcaggcagcccccgcccctcggccctccccccggccctcccggccctccctccgccccctccgccctcgcgcgccgcccgcccgggtcgccgcggggccgtggtgtacgtgcagagcgcgcagagcgagtggcgcccgtatgccctgcgctcctccacagcctgggccgggccgcccgggacgctgaggcggcggcggcggccgagggggccggtcttgcgctccccaggcccgcgcgcctgagcccaggttgccattcgccgcacaggccctattctctcagccctcggcggcgatgaggcgctgaggcggctgccggcgctgcgccggagcttaggactcggaagcggccgggccgagggcgtggggtgccggcctccctgaggcgagggtagcgggtgcatggcgcagtaacggcccctatctctctccccgctccccagcctcgggcgaggccgtccggccgctacccctcctgctcggccgccgcagtcgccgtcgccgccgccgccgccgccatggccaatgacagcggcgggcccggcgggccgagcccgagcgagcgagaccggcagtactgcgagctgtgcgggaagatggagaacctgctgcgctgcagccgctgccgcagctccttctactgctgcaaggagcaccagcgtcaggactggaagaagcacaagctcgtgtgccagggcagcgagggcgccctcggccacggagtgggcccacaccagcattccggccccgcgccgccggctgcagtgccgccgcccagggccggggcccgggagcccaggaaggcagcggcgcgccgggacaacgcctccggggacgcggccaagggaaaagtaaaggccaagcccccggccgacccagcggcggccgcgtcgccgtgtcgtgcggccgccggcggccagggctcggcggtggctgccgaagccgagcccggcaaggaggagccgccggcccgctcatcgctgttccaggagaaggcgaacctgtaccccccaagcaacacgcccggggatgcgctgagccccggcggcggcctgcggcccaacgggcagacgaagcccctgccggcgctgaagctggcgctcgagtacatcgtgccgtgcatgaacaagcacggcatctgtgtggtggacgacttcctcggcaaggagaccggacagcagatcggcgacgaggtgcgcgccctgcacgacaccgggaagttcacggacgggcagctggtcagccagaagagtgactcgtccaaggacatccgaggcgataagatcacctggatcgagggcaaggagcccggctgcgaaaccattgggctgctcatgagcagcatggacgacctgatacgccactgtaacgggaagctgggcagctacaaaatcaatggccggacgaaagccatggttgcttgttatccgggcaatggaacgggttatgtacgtcatgttgataatccaaatggagatggaagatgtgtgacatgtatatattatcttaataaagactgggatgccaaggtaagtggaggtatacttcgaatttttccagaaggcaaagcccagtttgctgacattgaacccaaatttgatagactgctgtttttctggtctgaccgtcgcaaccctcatgaagtacaaccagcatatgctacaaggtacgcaataactgtttggtattttgatgcagatgagagagcacgagctaaagtaaaatatctaacaggtgaaaaaggtgtgagggttgaactcaataaaccttcagattcggtcggtaaagacgtcttctagagcctttgatccagcaataccccacttcacctacaatattgttaactatttgttaacttgtgaatacgaataaatgggataaagaaaaatagacaaccagttcgcattttaataaggaaacagaaacaactttttgtgttgcatcaaacagaagattttgactgctgtgactttgtactgcatgatcaacttcaaatctgtgattgcttacaggaggaagataagctactaattgaaaatggtttttacatctggatatgaaataagtgccctgtgtagaatttttttcattcttatattttgccagatctgttatctagctgagttcatttcatctctcccttttttatatcaagtttgaatttgggataatttttctatattaggtacaatttatctaaactgaattgagaaaaaattacagtattattcctcaaaataacatcaatctatttttgtaaacctgttcatactattaaattttgccctaaaagacctcttaataatgattgttgccagtgactgatgattaattttattttacttaaaataagaaaaggagcactttaattacaactgaaaaatcagattgttttgtagtccttccttacactaatttgaactgttaaagattgctgctttttttttgacattgtcaataacgaaacctaattgtaaaacagtcaccatttactaccaataacttttagttaatgttttacaaggaaaaagacacaagaagagtttaaatttttttgttttgttttgtttttttgagacagtcttgctctgttacccaggctggaggggagtggtgcattcttggctcactgcaacctccgcctcccaggttcaagcaatcctcccacctcagcctcccaactagctgggactgcaggcacacaccaccatgcctgactaatttttgtatgtttagtagagacggggttttgccatgttgcctaggctggggtttaagttaaattttttaaaaaactaaagtgactggcactaagtgaacttgagattatcctcagcttcaagttcctaagataagggctttcttaagctttcaggtgtatgtatcctctagatgtagacaataatgtcccatttctaagtcttttccttttgcttctccttaaattgattgtacttccaaatttgctgttatgtttttttcctaatactgtgatctatctgatctgcagacaagaaccttgtctctgttgaagagcatcaaggggagattatgtacacattgaaactgaagtgtggtgttactgacggaatgtgcagtaactcctcagatatctgttaaggcatttcccagatgtgatgccagccttcttacctgtactgaaagatgcttagcttagaaaaaaacaaaacagatgcaaaatcagataattttattttgtttcatgggttttcttatttactttttaaacaaggaaggaatattagaaaatcacacaaggcctcacatacatgttatttaaagaatgaattgggacggatgtcttagacttcactttcctaggctttttagcaaaacctaaagggtggtatccatattttgcgtgaattatgggtgtaagaccttgcccacttaggttttctatctctgtccttgatcttctttgccaaaatgtgagtatacagaaattttctgtatatttcaacttaagacatttttagcatctgtatagtttgtattcaatttgagaccttttctatgggaagctcagtaatttttattaaaagattgccattgctattcatgtaaaacatggaaaaaaattgtgtagtgaagccaacagtggacttaggatgggattgaatgttcagtatagtgatctcacttaggagaatttgcaggagaaagtgatagtttattgttttttcctcgcccatattcagttttgttctacttcctccccttccttccagatgataacatcacatctctacagtaagtgcctctgccagcccaacccaggagcgcaagttgtctttgccatctggtctatagtacagtgcgcggcgttaggccacaactcaaaagcattatcttttttagggttagtagaaattgttttatgttgatgggaggtttgtttgattgtcaaaatgtacagccacagccttttaatttgggagcccctgttgtcattcaaatgtgtacctctacagttgtaaaaagtattagattctactatctgtgggttgtgcttgccagacaggtcttaaattgtatattttttggaaaagtttatatactctcttaggaatcattgtgaaaagatcaagaaatcaggatggccatttatttaatatccattcatttcatgttagtgggactattaacttgtcaccaagcaggactctatttcaaacaaaatttaaaactgtttgtggcctatatgtgtttaatcctggttaaagataaagcttcataatgctgtttttattcaacacattaaccagctgtaaaacacagacctttatcaagagtaggcaaagattttcaggattcatatacagatagactataaagtcatgtaatttgaaaagcagtgtttcattatgaaagagctctcaagttgcttgtaaagctaatctaattaaaaagatgtataaatgttgttgaaacatta

SEQ ID NO: 9354 - DNA, 419 bp, Homo sapiens
  source 1..419: mol_type = unassigned DNA
agggctcggcggtggctgccgaagccgagcccggcaaggaggagccgccggcccgctcatcgctgttccaggagaaggcgaacctgtaccccccaagcaacacgcccggggatgcgctgagccccggcggcggcctgcggcccaacgggcagacgaagcccctgccggcgctgaagctggcgctcgagtacatcgtgccgtgcatgaacaagcacggcatctgtgtggtggacgacttcctcggcaaggagaccggacagcagatcggcgacgaggtgcgcgccctgcacgacaccgggaagttcacggacggcagctggtcagccagaagagtgactcgtccaaggacatccgaggcgataagatcacctggatcgagggcaaggagcccggctgcgaaaccattgggctgctcatga

SEQ ID NO: 9355 - DNA, 2145 bp, Homo sapiens
  source 1..2145: mol_type = unassigned DNA
acgtgcccaccgggcgaggcggggcggggcgtcgcgcgcggtgggggcggggtatggcgcgctgtgcggcgcagggcggctggcacaaacggcggcgccggggccggaggaaaaagctcgccaccctgaagggtcccttcccaagcccttagggaccgcagaggacttggggaccagcaagcaacccccagggcacgagaagagctcttgctgtctgccctgcctcaccctgccccacgccaggcccggtggcccccagctgcatcaagtggaggcggaggaggaggcggaggagggtggcaccatgggcccgggcggtgccctccatgcccgggggatgaagacactgctgccatggacagcccgtgccagccgcagcccctaagtcaggctctccctcagttaccagggtcttcgtcagagcccttggagcctgagcctggccgggccaggatgggagtggagagttacctgccctgtcccctgctcccctcctaccactgtccaggagtgcctagtgaggcctcggcagggagtgggacccccagagccacagccacctctaccactgccagccctcttcgggacggttttggcgggcaggatggtggtgagctgcggccgctgcagagtgaaggcgctgcagcgctggtcaccaaggggtgccagcgattggcagcccagggcgcacggcctgaggcccccaaacggaaatgggccgaggatggtggggatgccccttcacccagcaaacggccctgggccaggcaagagaaccaggaggcagagcgggagggtggcatgagctgcagctgcagcagtggcagtggtgaggccagtgctgggctgatggaggaggcgctgccctctgcgcccgagcgcctggccctggactatatcgtgccctgcatgcggtactacggcatctgcgtcaaggacagcttcctgggggcagcactgggcggtcgcgtgctggccgaggtggaggccctcaaacggggtgggcgcctgcgagacgggcagctagtgagccagagggcgatcccgccgcgcagcatccgtggggaccagattgcctgggtggaaggccatgaaccaggctgtcgaagcattggtgccctcatggcccatgtggacgccgtcatccgccactgcgcagggcggctgggcagctatgtcatcaacgggcgcaccaaggccatggtggcgtgttacccaggcaacgggctcgggtacgtaaggcacgttgacaatccccacggcgatgggcgctgcatcacctgtatctattacctgaatcagaactgggacgttaaggtgcatggcggcctgctgcagatcttccctgagggccggcccgtggtagccaacatcgagccactctttgaccggttgctcattttctggtctgaccggcggaacccccacgaggtgaagccagcctatgccaccaggtacgccatcactgtctggtattttgatgccaaggagcgggcagcagccaaagacaagtatcagctagcatcaggacagaaaggtgtccaagtacctgtatcacagccgcctacgcccacctagtggccagtcccagagccgcatggcagacagcttaaatgacttcaggagagccctgggcctgtgctggctgctccttccctgccaccgctgctgcttctgactttgcctctgtcctgcctggtgtggagggctctgtctgttgctgaggaccaaggaggagaagagacctttgctgccccatcatgggggctggggttgtcacctggacagggggcagccgtggaggccaccgttaccaactgaagctgggggcctgggtcctaccctgtctggtcatgaccccattaggtatggagagctgggaggaggcattgtcacttcccaccaggatgcaggacttggggttgaggtgagtcatggcctcttgctggcaatggggtgggaggagtacccccaagtcctctcactcctccagcctggaatgtgaagtgactccccaacccctttggccatggcaggcaccttttggactgggctgccactgcttgggcagagtaaaaggtgccaggaggagcatgggtgtggaagtcctgtcagccaagaaataaaagtttacctcagagctgc

SEQ ID NO: 9356 - DNA, 2088 bp, Homo sapiens
  source 1..2088: mol_type = unassigned DNA
gctttcccctgcctgcctgtctctagtttctctcacatccctttttttttttcctttctctagccaccctgaagggtcccttcccaagcccttagggaccgcagaggacttggggaccagcaagcaacccccagggcacgagaagagctcttgctgtctgccctgcctcaccctgccccacgccaggcccggtggcccccagctgcatcaagtggaggcggaggaggaggcggaggagggtggcaccatgggcccgggcggtgccctccatgcccgggggatgaagacactgctgccatggacagcccgtgccagccgcagcccctaagtcaggctctccctcagttaccagggtcttcgtcagagcccttggagcctgagcctggccgggccaggatgggagtggagagttacctgccctgtcccctgctcccctcctaccactgtccaggagtgcctagtgaggcctcggcagggagtgggacccccagagccacagccacctctaccactgccagccctcttcgggacggttttggcgggcaggatggtggtgagctgcggccgctgcagagtgaaggcgctgcagcgctggtcaccaaggggtgccagcgattggcagcccagggcgcacggcctgaggcccccaaacggaaatgggccgaggatggtggggatgccccttcacccagcaaacggccctgggccaggcaagagaaccaggaggcagagcgggagggtggcatgagctgcagctgcagcagtggcagtggtgaggccagtgctgggctgatggaggaggcgctgccctctgcgcccgagcgcctggccctggactatatcgtgccctgcatgcggtactacggcatctgcgtcaaggacagcttcctgggggcagcactgggcggtcgcgtgctggccgaggtggaggccctcaaacggggtgggcgcctgcgagacgggcagctagtgagccagagggcgatcccgccgcgcagcatccgtggggaccagattgcctgggtggaaggccatgaaccaggctgtcgaagcattggtgccctcatggcccatgtggacgccgtcatccgccactgcgcagggcggctgggcagctatgtcatcaacgggcgcaccaaggccatggtggcgtgttacccaggcaacgggctcgggtacgtaaggcacgttgacaatccccacggcgatgggcgctgcatcacctgtatctattacctgaatcagaactgggacgttaaggtgcatggcggcctgctgcagatcttccctgagggccggcccgtggtagccaacatcgagccactctttgaccggttgctcattttctggtctgaccggcggaacccccacgaggtgaagccagcctatgccaccaggtacgccatcactgtctggtattttgatgccaaggagcgggcagcagccaaagacaagtatcagctagcatcaggacagaaaggtgtccaagtacctgtatcacagccgcctacgcccacctagtggccagtcccagagccgcatggcagacagcttaaatgacttcaggagagccctgggcctgtgctggctgctccttccctgccaccgctgctgcttctgactttgcctctgtcctgcctggtgtggagggctctgtctgttgctgaggaccaaggaggagaagagacctttgctgccccatcatgggggctggggttgtcacctggacagggggcagccgtggaggccaccgttaccaactgaagctgggggcctgggtcctaccctgtctggtcatgaccccattaggtatggagagctgggaggaggcattgtcacttcccaccaggatgcaggacttggggttgaggtgagtcatggcctcttgctggcaatggggtgggaggagtacccccaagtcctctcactcctccagcctggaatgtgaagtgactccccaacccctttggccatggcaggcaccttttggactgggctgccactgcttgggcagagtaaaaggtgccaggaggagcatgggtgtggaagtcctgtcagccaagaaataaaagtttacctcagagctgc

SEQ ID NO: 9357 - DNA, 2709 bp, Homo sapiens
  source 1..2709: mol_type = unassigned DNA
ccggagtctggccgcagtcgcggcagtggtggcttcccatccccaaaaggcgccctccgactccttgcgccgcactgctcgccgggccagtccggaaacgggtcgtggagctccgcaccactcccgctggttcccgaaggcagatcccttctcccgagagttgcgagaaactttcccttgtccccgacgctgcagcggctcgggtaccgtggcagccgcaggtttctgaaccccgggccacgctccccgcgcctcggcttcgcgctcgtgtagatcgttccctctctggttgcacgctggggatcccggacctcgattctgcgggcgagatgcccctgggacacatcatgaggctggacctggagaaaattgccctggagtacatcgtgccctgtctgcacgaggtgggcttctgctacctggacaacttcctgggcgaggtggtgggcgactgcgtcctggagcgcgtcaagcagctgcactgcaccggggccctgcgggacggccagctggcggggccgcgcgccggcgtctccaagcgacacctgcggggcgaccagatcacgtggatcgggggcaacgaggagggctgcgaggccatcagcttcctcctgtccctcatcgacaggctggtcctctactgcgggagccggctgggcaaatactacgtcaaggagaggtctaaggcaatggtggcttgctatccgggaaatggaacaggttatgttcgccacgtggacaaccccaacggtgatggtcgctgcatcacctgcatctactatctgaacaagaattgggatgccaagctacatggtgggatcctgcggatatttccagaggggaaatcattcatagcagatgtggagcccatttttgacagactcctgttcttctggtcagatcgtaggaacccacacgaagtgcagccctcttacgcaaccagatatgctatgactgtctggtactttgatgctgaagaaagggcagaagccaaaaagaaattcaggaatttaactaggaaaactgaatctgccctcactgaagactgaccgtgctctgaaatctgctggccttgttcattttagtaacggttcctgaattctcttaaattctttgagatccaaagatggcctcttcagtgacaacaatctccctgctacttcttgcatccttcacatccctgtcttgtgtgtggtacttcatgttttcttgccaagactgtgttgatcttcagatactctctttgccagatgaagttacttgctaactccagaaattcctgcagacatcctactcggccagcggtttacctgatagattcggtaatactatcaagagaagagcctaggagcacagcgagggaatgaaccttacttgcactttatgtatacttcctgatttgaaaggaggaggtttgaaaagaaaaaaatggaggtggtagatgccacagagaggcatcacggaagccttaacagcaggaaacagagaaatttgtgtcatctgaacaatttccagatgttcttaatccagggctgttggggtttctggagaattatcacaacctaatgacattaatacctctagaaagggctgctgtcatagtgaacaatttataagtgtcccatggggcagacactccttttttcccagtcctgcaacctggattttctgcctcagccccattttgctgaaaataatgactttctgaataaagatggcaacacaattttttctccattttcagttcttacctgggaacctaattccccagaagctaaaaaactagacattagttgttttggttgctttgttggaatggaatttaaatttaaatgaaaggaaaaatatatccctggtagttttgtgttaaccactgataactgtggaaagagctaggtctactgatatacaataaacatgtgtgcatcttgaacaatttgagaggggaggtggagttggaaatgtgggtgttcctgttttttttttttttttttttttagttttcctttttaatgagctcaccctttaacacaaaaaaagcaaggtgatgtattttaaaaaaggaagtggaaataaaaaaatctcaaagctatttgagttctcgtctgtccctagcagtctttcttcagctcacttggctctctagatccactgtggttggcagtatgaccagaatcatggaatttgctagaactgtggaagcttctactcctgcagtaagcacagatcgcactgcctcaataacttggtattgagcacgtattttgcaaaagctacttttcctagttttcagtattactttcatgttttaaaaatccctttaatttcttgcttgaaaatcccatgaacattaaagagccagaaatattttcctttgttatgtacggatatatatatatatagtcttccaagatagaagtttactttttcctcttctggttttggaaaatttccagataagacatgtcaccattaattctcaacgactgctctattttgttgtacggtaatagttatcaccttctaaattactatgtaatttattcacttattatgtttattgtcttgtatcctttctctggagtgtaagcacaatgaagacaggaattttgtatatttttaaccaatgcaacatactctcagcacctaaaatagtgccgggaacatagtaagggctcagtaaatacttgttgaataaactcagtctcc

SEQ ID NO: 9358 - DNA, 1917 bp, Homo sapiens
  source 1..1917: mol_type = unassigned DNA
gagtctggccgcagtcgcggcagtggtggcttcccatccccaaaaggcgccctccgactccttgcgccgcactgctcgccgggccagtccggaaacgggtcgtggagctccgcaccactcccgctggttcccgaaggcagatcccttctcccgagatgcccctgggacacatcatgaggctggacctggagaaaattgccctggagtacatcgtgccctgtctgcacgaggtgggcttctgctacctggacaacttcctgggcgaggtggtgggcgactgcgtcctggagcgcgtcaagcagctgcactgcaccggggccctgcgggacggccagctggcggggccgcgcgccggcgtctccaagcgacacctgcggggcgaccagatcacgtggatcgggggcaacgaggagggctgcgaggccatcagcttcctcctgtccctcatcgacaggctggtcctctactgcgggagccggctgggcaaatactacgtcaaggagaggtctaaggcaatggtggcttgctatccgggaaatggaacaggttatgttcgccacgtggacaaccccaacggtgatggtcgctgcatcacctgcatctactatctgaacaagaattgggatgccaagctacatggtgggatcctgcggatatttccagaggggaaatcattcatagcagatgtggagcccatttttgacagactcctgttcttctggtcagatcgtaggaacccacacgaagtgcagccctcttacgcaaccagatatgctatgactgtctggtactttgatgctgaagaaagggcagaagccaaaaagaaattcaggaatttaactaggaaaactgaatctgccctcactgaagactgaccgtgctctgaaatctgctggccttgttcattttagtaacggttcctgaattctcttaaattctttgagatccaaagatggcctcttcagtgacaacaatctccctgctacttcttgcatccttcacatccctgtcttgtgtgtggtacttcatgttttcttgccaagactgtgttgatcttcagatactctctttgccagatgaagttacttgctaactccagaaattcctgcagacatcctactcggccagcggtttacctgatagattcggtaatactatcaagagaagagcctaggagcacagcgagggaatgaaccttacttgcactttatgtatacttcctgatttgaaaggaggaggtttgaaaagaaaaaaatggaggtggtagatgccacagagaggcatcacggaagccttaacagcaggaaacagagaaatttgtgtcatctgaacaatttccagatgttcttaatccagggctgttggggtttctggagaattatcacaacctaatgacattaatacctctagaaagggctgctgtcatagtgaacaatttataagtgtcccatggggcagacactccttttttcccagtcctgcaacctggattttctgcctcagccccattttgctgaaaataatgactttctgaataaagatggcaacacaattttttctccattttcagttcttacctgggaacctaattccccagaagctaaaaaactagacattagttgttttggttgctttgttggaatggaatttaaatttaaatgaaaggaaaaatatatccctggtagttttgtgttaaccactgataactgtggaaagagctaggtctactgatatacaataaacatgtgtgcatcttgaacaatttgagaggggaggtggagttggaaatgtgggtgttcctgttttttttttttttttttttttagttttcctttttaatgagctcaccctttaacacaaaaaaagcaaggtgatgtattttaaaaaaggaagtggaaataaaaaaatctcaaagct

SEQ ID NO: 9359 - DNA, 4551 bp, Homo sapiens
  source 1..4551: mol_type = unassigned DNA
ccctaccgcccccaattccgccctgcccccgccgcggcggcgctagccgccactgagggaccgaccctataaaggccgctccgcgaggggtgcgcagcattcggcagagggcgcttcgacgggctgggctgtgcgcctgcgcagtgtgggtcgctcccgattccctgccccggccggccccgcctcggctccgcaccctcgccccgctctcagccgccgctctgccccgcagcagccagccccgtgtccggcagtatgttcagctgggtcagcaaggatgcccgccgcaagaaggagccggagctcttccagacggtggctgaggggctgcggcagctgtacgcgcagaagctgctacccctggaggagcactaccgcttccacgagttccactcgcccgcgctggaggacgctgacttcgacaacaagcctatggtgctcctcgtggggcagtacagcacgggcaagaccaccttcatccgacacctgatcgagcaggacttcccggggatgcgcatcgggcccgagcccaccaccgactccttcatcgccgtcatgcacggccccactgagggcgtggtgccgggcaacgcgctcgtggtggacccgcggcgccccttccgcaagctcaacgcgtttggcaacgctttcctcaacaggttcatgtgtgcccagctgcccaaccccgtcctggacagcatcagcatcatcgacacccccgggatcctgtctggagagaagcagcggatcagcagaggctatgactttgcagccgtcctggagtggttcgcggagcgtgtggaccgcatcatcctgctcttcgacgcccacaagctggacatctccgatgagttctcggaagtgatcaaggctctgaagaaccatgaggacaagatccgcgtggtgctgaacaaggcagaccagatcgagacgcagcagctgatgcgggtgtacggggccctcatgtggtccctgggcaagatcatcaacacccccgaggtggtcagggtctacatcggctccttctggtcccacccgctcctcatccccgacaaccgcaagctctttgaggccgaggagcaggacctcttcaaggacatccagtcactgccccgaaacgccgccctcaggaagctcaatgacctgatcaagcgggcacggctggccaaggttcacgcctacatcatcagctccctcaagaaagagatgcccaatgtctttggtaaagagagcaaaaagaaagagctggtgaacaacctcggagagatctaccagaagattgagcgcgagcaccagatctcccctggggacttcccgagcctccgcaagatgcaggaactcctgcagacccaggacttcagcaagttccaggcgctgaagcccaagctgctggacacggtggatgacatgctggccaacgacatcgcgcggctgatggtgatggtgcggcaggaggagtccctgatgccttcccaggtggtcaagggcggcgcctttgacggcaccatgaacgggccgttcgggcacggctacggcgagggggccggcgagggcatcgacgacgtggagtgggtggtgggcaaggacaagcccacctacgacgagatcttctacacgctgtcccctgtcaacggcaagatcacgggcgccaacgccaagaaggagatggtgaagtccaagctccccaacaccgtgctagggaagatctggaagctggccgacgtggacaaggacgggctgctggacgacgaggagttcgcgctggccaaccacctcatcaaggtcaagctggagggccacgagctgcctgccgacctgcccccgcacctggtgccgccctccaagcgcagacatgagtgatggcgcccggccccgcacctgccatttgcacgcccggccgggaggcagagacggggggaggggaagcctcaccatttctcaaggtccataaagactgagcggatgtttcctcgcctctcgaaaaggaaaaccaccatctttcttttaaggctgttcctgggcctggcgggggaggcaggggtgagaggatggaattgtgtgcacaagaactgtggctattttaatatataacgttagaggctgcgttctttgtcgccgcctcccctgtgtgccagccctgtgtgcacggcctctgccccccggcctttgctgtggctggagctggacagtgcagcgactgcgaccgtgggggagccaggtcgcccttttggcagctgctaggctgaggctgcatggacaggaacaccaggcaccctccgtgtgcttctgagctgaggttgcttcacgggaccgtggcttccttcctcacctggctctgcctcccccgtgctctcgggcgaagtgggttcttgtgccttcccctcccgggcccaggctccccgtgcgcgggccctgccctttcctcccgcgccccaccggctccgacgcgcaaccccgctcagcagtcacagaagcagggcccagccaccttggtctttttttgggagttcaggggagtaggagaatgtcttccagaaaaatacataagctagtttctgttctgtaaagtgatatctttcatacttgaccaaagttcccaataacttcccaaccactgttcaaaagctgtgatttttgtctccccttcccaccctccagccaaggagcagccctgcccagggggcattaggtgtgggtacccggggagcaccccgttcctggaccccagtgttgcatttcctggctgaggaagggtggtcatcccagctcctgccctaccctctcacttaactggagctttgggacgcaccctccacagtgggaggtggtggtgggtggcggtggcggggcctcacgacagcttggtgctggtaagaggaagcccgtggttctggctaggctctcatgtccagacagcggggaccaggggaaaacccagccccttctgtaatcccccttcatttcctaccttccttcctcctctgtttagcaaaggagggcagctcacttggatgtccttacaacgcccctggcccccaggttgagcaataagaaaccagaaccttgcggcccagtggcccgggccagttcaggccgcctccccctcctctgcctggggccattgagcccagcctccagggcccgggcgcgtttgcaggccagtggccactgtccgggctgtgatggcaccaaggcaggtggagcaccaggtaccacacagctgggcttcccaccaggctttcccgcgggggtctcagggagcttctccccagcgctgctcggagtctgcaggaactggccttgttctccttagcccgtcactccatacagtattaggtgaggatggatgcgggcgctgtccttgccgggaagtcactgttgaagttgcagtggcttgttcacacctgtgggaagagaagtgaagactttctccttgcattaaaaagtctgaactgtgcgaaagcttcgggtgcttccttgtcttttccaggggcagcagtcctgggccatcctcccctggtgtctgagggggtgatgccagcagggacagagtggcaaggcagccggggcaaggtgaccaaccctgcccagtcctgctctgctgggcagtagctgccccctcctactaagagggccaggcctgtagggaaaagggtttctggggtgatgcccccttccctgagcaaggtgggagctgagcagttcacttggggtggggaggggggaaacagttgggaggatgttgatagctgaggcctaggctggcacccctcagccacagacggatgagtgggcacctgcaggccctcggcactgggtggcatcaagtaaacaagggtttctgggctttggagccagactggctccttgctagccccaaggacggtttaagtacagggaagccgggcctctgaagacaaagcagatagcctgtgacaaacatgcaactaagggtggggccagtcaggcccaggtgatgtcacagatgggggactgtttataccagcagagggaagggtgactgattagtgacccttcataaaagggtgcagacttgaggtgccatgggtagaggctgctccagcccctctggcagaaggcaggacagaaacaagttcctgagggtttcagggacccagttgtgtgctccgagcctagctggtgtggtggtgtctggtcctatgaccagcacttgaggtgccagtggatgcttcagttgctgcagggctggccggccctccctgcgtcactcagctgccacctgtgggcattcaccctgtgccaggtggagctgcgctgtcacgatctgaggaagttcatgttcccccatttcacagagggagagtccgagactgaggactgccgaaataacaaaggtggtagaagcagatgcaaaccaggccgtccaactccagcgtgctttccatcaggttactaatccaaagcacacactaagaggaaaaaacggtagatccccccaaccccacccttagactgcagctgtactcagggctgagagacccacattaaaggttaaatgctgtcactcca

SEQ ID NO: 9360 - DNA, 3618 bp, Homo sapiens
  source 1..3618: mol_type = unassigned DNA
aaaggggtctgtgtgtggccggggaggatggcgggggagtgagccccatggaacagccaggaactgataaaagatgaggggacaaagacagtgtgtgtctgggaagctgggctgagaggaggaggtgccgccgcctgggggtactccgatgcttccggggattccgagccagctggaggaccgcacgtggcgaacggcgggcgcggcgcgtagtcagggaaccagggtgcctgactgggtgtctcgtggagccatcccgcgggggtgtgggggggccacggtgccggaaggcgcgcggcccagaggccgtctccgccgaacgcccgctcctcgccttcctaaccgcagcactttcgcgagcctccctacgaggggcggggcgaaacagcagccagccccgtgtccggcagtatgttcagctgggtcagcaaggatgcccgccgcaagaaggagccggagctcttccagacggtggctgaggggctgcggcagctgtacgcgcagaagctgctacccctggaggagcactaccgcttccacgagttccactcgcccgcgctggaggacgctgacttcgacaacaagcctatggtgctcctcgtggggcagtacagcacgggcaagaccaccttcatccgacacctgatcgagcaggacttcccggggatgcgcatcgggcccgagcccaccaccgactccttcatcgccgtcatgcacggccccactgagggcgtggtgccgggcaacgcgctcgtggtggacccgcggcgccccttccgcaagctcaacgcgtttggcaacgctttcctcaacaggttcatgtgtgcccagctgcccaaccccgtcctggacagcatcagcatcatcgacacccccgggatcctgtctggagagaagcagcggatcagcagaggctatgactttgcagccgtcctggagtggttcgcggagcgtgtggaccgcatcatcctgctcttcgacgcccacaagctggacatctccgatgagttctcggaagtgatcaaggctctgaagaaccatgaggacaagatccgcgtggtgctgaacaaggcagaccagatcgagacgcagcagctgatgcgggtgtacggggccctcatgtggtccctgggcaagatcatcaacacccccgaggtggtcagggtctacatcggctccttctggtcccacccgctcctcatccccgacaaccgcaagctctttgaggccgaggagcaggacctcttcaaggacatccagtcactgccccgaaacgccgccctcaggaagctcaatgacctgatcaagcgggcacggctggccaaggttcacgcctacatcatcagctccctcaagaaagagatgcccaatgtctttggtaaagagagcaaaaagaaagagctggtgaacaacctcggagagatctaccagaagattgagcgcgagcaccagatctcccctggggacttcccgagcctccgcaagatgcaggaactcctgcagacccaggacttcagcaagttccaggcgctgaagcccaagctgctggacacggtggatgacatgctggccaacgacatcgcgcggctgatggtgatggtgcggcaggaggagtccctgatgccttcccaggtggtcaagggcggcgcctttgacggcaccatgaacgggccgttcgggcacggctacggcgagggggccggcgagggcatcgacgacgtggagtgggtggtgggcaaggacaagcccacctacgacgagatcttctacacgctgtcccctgtcaacggcaagatcacgggcgccaacgccaagaaggagatggtgaagtccaagctccccaacaccgtgctagggaagatctggaagctggccgacgtggacaaggacgggctgctggacgacgaggagttcgcgctggccaaccacctcatcaaggtcaagctggagggccacgagctgcctgccgacctgcccccgcacctggtgccgccctccaagcgcagacatgagtgatggcgcccggccccgcacctgccatttgcacgcccggccgggaggcagagacggggggaggggaagcctcaccatttctcaaggtccataaagactgagcggatgtttcctcgcctctcgaaaaggaaaaccaccatctttcttttaaggctgttcctgggcctggcgggggaggcaggggtgagaggatggaattgtgtgcacaagaactgtggctattttaatatataacgttagaggctgcgttctttgtcgccgcctcccctgtgtgccagccctgtgtgcacggcctctgccccccggcctttgctgtggctggagctggacagtgcagcgactgcgaccgtgggggagccaggtcgcccttttggcagctgctaggctgaggctgcatggacaggaacaccaggcaccctccgtgtgcttctgagctgaggttgcttcacgggaccgtggcttccttcctcacctggctctgcctcccccgtgctctcgggcgaagtgggttcttgtgccttcccctcccgggcccaggctccccgtgcgcgggccctgccctttcctcccgcgccccaccggctccgacgcgcaaccccgctcagcagtcacagaagcagggcccagccaccttggtctttttttgggagttcaggggagtaggagaatgtcttccagaaaaatacataagctagtttctgttctgtaaagtgatatctttcatacttgaccaaagttcccaataacttcccaaccactgttcaaaagctgtgatttttgtctccccttcccaccctccagccaaggagcagccctgcccagggggcattaggtgtgggtacccggggagcaccccgttcctggaccccagtgttgcatttcctggctgaggaagggtggtcatcccagctcctgccctaccctctcacttaactggagctttgggacgcaccctccacagtgggaggtggtggtgggtggcggtggcggggcctcacgacagcttggtgctggtaagaggaagcccgtggttctggctaggctctcatgtccagacagcggggaccaggggaaaacccagccccttctgtaatcccccttcatttcctaccttccttcctcctctgtttagcaaaggagggcagctcacttggatgtccttacaacgcccctggcccccaggttgagcaataagaaaccagaaccttgcggcccagtggcccgggccagttcaggccgcctccccctcctctgcctggggccattgagcccagcctccagggcccgggcgcgtttgcaggccagtggccactgtccgggctgtgatggcaccaaggcaggtggagcaccaggtaccacacagctgggcttcccaccaggctttcccgcgggggtctcagggagcttctccccagcgctgctcggagtctgcaggaactggccttgttctccttagcccgtcactccatacagtattaggtgaggatggatgcgggcgctgtccttgccgggaagtcactgttgaagttgcagtggcttgttcacacctgtgggaagagaagtgaagactttctccttgcattaaaaagtctgaactgtgcgaaa

SEQ ID NO: 9361 - DNA, 557 bp, Homo sapiens
  source 1..557: mol_type = unassigned DNA
gattctcaccagcctggacagccaaaggggtctgtgtgtggccggggaggatggcgggggagtgagccccatggaacagccaggaactggtaaggggagcagccagccccgtgtccggcagtatgttcagctgggtcagcaaggatgcccgccgcaagaaggagccggagctcttccagacggtggctgaggggctgcggcagctgtacgcgcagaagctgctacccctggaggagcactaccgcttccacgagttccactcgcccgcgctggaggacgctgacttcgacaacaagcctatggtgctcctcgtggggcagtacagcacgggcaagaccaccttcatccgacacctgatcgagcaggacttcccggggatgcgcatcgggcccgagcccaccaccgactccttcatcgccgtcatgcacggccccactgagggcgtggtgccgggcaacgcgctcgtggtggacccgcggcgccccttccgcaagctcaacgcgtttggcaacgctttcctcaacaggttcatgtgtgcccagctgcccaaccccgtc

SEQ ID NO: 9362 - DNA, 1457 bp, Homo sapiens
  source 1..1457: mol_type = unassigned DNA
gtgtggccggggaggatggcgggggagtgagccccatggaacagccaggaactgcagccagccccgtgtccggcagtatgttcagctgggtcagcaaggatgcccgccgcaagaaggagccggagctcttccagacggtggctgaggggctgcggcagctgtacgcgcagaagctgctacccctggaggagcactaccgcttccacgagttccactcgcccgcgctggaggacgctgacttcgacaacaagcctatggtgctcctcgtggggcagtacagcacgggcaagaccaccttcatccgacacctgatcgagcaggacttcccggggatgcgcatcgggcccgagcccaccaccgactccttcatcgccgtcatgcacggccccactgagggcgtggtgccgggcaacgcgctcgtggtggacccgcggcgccccttccgcaagctcaacgcgtttggcaacgctttcctcaacaggttcatgtgtgcccagctgcccaaccccgtcctggacagcatcagcatcatcgacacccccgggatcctgtctggagagaagcagcggatcagcagaggctatgactttgcagccgtcctggagtggttcgcggagcgtgtggaccgcatcatcctgctcttcgacgcccacaagctggacatctccgatgagttctcggaagtgatcaaggctctgaagaaccatgaggacaagatccgcgtggtgctgaacaaggcagaccagatcgagacgcagcagctgatgcgggtgtacggggccctcatgtggtccctgggcaagatcatcaacacccccgaggtggtcagggtctacatcggctccttctggtcccacccgctcctcatccccgacaaccgcaagctctttgaggccgaggagcaggacctcttcaaggacatccagtcactgccccgaaacgccgccctcaggaagctcaatgacctgatcaagcgggcacggctggccaaggttcacgcctacatcatcagctccctcaagaaagagatgcccaatgtctttggtaaagagagcaaaaagaaagagctggtgaacaacctcggagagatctaccagaagattgagcgcgagcaccagatctcccctggggacttcccgagcctccgcaagatgcaggaactcctgcagacccaggacttcagcaagttccaggcgctgaagcccaagctgctggacgacgaggagttcgcgctggccaaccacctcatcaaggtcaagctggagggccacgagctgcctgccgacctgcccccgcacctggtgccgccctccaagcgcagacatgagtgatggcgcccggccccgcacctgccatttgcacgcccggccgggaggcagagacggggggaggggaagcctcaccatttctcaaggtccataaagactgagcggatgtttcctcgcctctcgaaaagg

SEQ ID NO: 9363 - DNA, 534 bp, Homo sapiens
  source 1..534: mol_type = unassigned DNA
agattgaccgtacgccagcctcagagagagaaggcccaggcggggaggagtaaagcctccctgggagagccagccccgtgtccggcagtatgttcagctgggtcagcaaggatgcccgccgcaagaaggagccggagctcttccagacggtggctgaggggctgcggcagctgtacgcgcagaagctgctacccctggaggagcactaccgcttccacgagttccactcgcccgcgctggaggacgctgacttcgacaacaagcctatggtgctcctcgtggggcagtacagcacgggcaagaccaccttcatccgacacctgatcgagcaggacttcccggggatgcgcatcgggcccgagcccaccaccgactccttcatcgccgtcatgcacggccccactgagggcgtggtgccgggcaacgcgctcgtggtggacccgcggcgccccttccgcaagctcaacgcgtttggcaacgctttcctcaacaggttcatgtgtgcccagctgcccaaccccgtcctggacagca

SEQ ID NO: 9364 - DNA, 2023 bp, Homo sapiens
  source 1..2023: mol_type = unassigned DNA
attcggcagagggcgcttcgacgggctgggctgtgcgcctgcgcagtgtgggtcgctcccgattccctgccccggccggccccgcctcggctccgcaccctcgccccgctctcagccgccgctctgccccgcagcagccagccccgtgtccggcagtatgttcagctgggtcagcaaggatgcccgccgcaagaaggagcactaccgcttccacgagttccactcgcccgcgctggaggacgctgacttcgacaacaagcctatggtgctcctcgtggggcagtacagcacgggcaagaccaccttcatccgacacctgatcgagcaggacttcccggggatgcgcatcgggcccgagcccaccaccgactccttcatcgccgtcatgcacggccccactgagggcgtggtgccgggcaacgcgctcgtggtggacccgcggcgccccttccgcaagctcaacgcgtttggcaacgctttcctcaacaggttcatgtgtgcccagctgcccaaccccgtcctggacagcatcagcatcatcgacacccccgggatcctgtctggagagaagcagcggatcagcagaggctatgactttgcagccgtcctggagtggttcgcggagcgtgtggaccgcatcatcctgctcttcgacgcccacaagctggacatctccgatgagttctcggaagtgatcaaggctctgaagaaccatgaggacaagatccgcgtggtgctgaacaaggcagaccagatcgagacgcagcagctgatgcgggtgtacggggccctcatgtggtccctgggcaagatcatcaacacccccgaggtggtcagggtctacatcggctccttctggtcccacccgctcctcatccccgacaaccgcaagctctttgaggccgaggagcaggacctcttcaaggacatccagtcactgccccgaaacgccgccctcaggaagctcaatgacctgatcaagcgggcacggctggccaaggttcacgcctacatcatcagctccctcaagaaagagatgcccaatgtctttggtaaagagagcaaaaagaaagagctggtgaacaacctcggagagatctaccagaagattgagcgcgagcaccagatctcccctggggacttcccgagcctccgcaagatgcaggaactcctgcagacccaggacttcagcaagttccaggcgctgaagcccaagctgctggacacggtggatgacatgctggccaacgacatcgcgcggctgatggtgatggtgcggcaggaggagtccctgatgccttcccaggtggtcaagggcggcgcctttgacggcaccatgaacgggccgttcgggcacggctacggcgagggggccggcgagggcatcgacgacgtggagtgggtggtgggcaaggacaagcccacctacgacgagatcttctacacgctgtcccctgtcaacggcaagatcacgggcgccaacgccaagaaggagatggtgaagtccaagctccccaacaccgtgctagggaagatctggaagctggccgacgtggacaaggacgggctgctggacgacgaggagttcgcgctggccaaccacctcatcaaggtcaagctggagggccacgagctgcctgccgacctgcccccgcacctggtgccgccctccaagcgcagacatgagtgatggcgcccggccccgcacctgccatttgcacgcccggccgggaggcagagacggggggaggggaagcctcaccatttctcaaggtccataaagactgagcggatgtttcctcgcctctcgaaaaggaaaaccaccatctttcttttaaggctgttcctgggcctggcgggggaggcaggggtgagaggatggaattgtgtgcacaagaactgtggctattttaatatataacgttagaggctgcgttctttgtcgccgcctcccctgtgtgccagccctgtgtgcacggcctctgccccccggcctttgctgtggctggagctggacagtgca

SEQ ID NO: 9365 - DNA, 3583 bp, Homo sapiens
  source 1..3583: mol_type = unassigned DNA
ttttgaggggggcgcctcgtcccgcccctccctcctgtcctccctcccgtcctccccgctccgggccccacccggctcagacggctccggacgggaccgcgagcacaggccgctccgcgggcgcttcggatcctcgcgggaccccaccctctcccagcctgcccagcccgctgcagccgccagcgcgccccgtcggcagctctccatctgcacgtctctccgtgaaccccgtgagcggtgtgcagccaccatgttcagctggctgaagcggggcggggcacggggccagcagcccgaggccatccgcacggtgacctcggccctcaaggagctgtaccgcacgaagctgctgccgctggaggagcactaccgctttggggccttccactcgccggccctggaggacgcagacttcgacggcaagcccatggtgctggtggccggccagtacagcacgggcaagaccagcttcatccagtacctgctggagcaggaggtgcccggctcccgcgtggggcctgagcccaccaccgactgctttgtggccgtcatgcacggggacactgagggcaccgtgcccggcaacgccctcgtcgtggacccggacaagcccttccgcaaactcaaccctttcggaaacaccttcctcaacaggttcatgtgtgcccagctccctaatcaggtcctggagagcatcagcatcatcgacaccccgggtatcctgtcgggtgccaagcagagagtgagccgcggctacgacttcccggccgtgctgcgctggttcgcggagcgcgtggacctcatcatcctgctctttgatgcgcacaagctggagatctcggacgagttctcagaggccatcggcgcgttgcggggccatgaggacaagatccgcgtggtgctcaacaaggccgacatggtggagacgcagcagctgatgcgcgtctacggcgcgctcatgtgggcgctgggcaaggtggtgggcacgcccgaggtgctgcgcgtctacatcggctccttctggtcccagcccctcctcgtgcccgacaaccggcgcctcttcgagctggaggagcaggacctcttccgcgacatccagggcctgccccggcacgcagccttgcgcaagctcaacgacctggtgaagagggcccggctggtgcgagttcacgcttacatcatcagctacctgaagaaggagatgccctctgtgtttgggaaggagaacaagaagaagcagctgatcctcaaactgcccgtcatctttgcgaagattcagctggaacatcacatctcccctggggactttcctgattgccagaaaatgcaggagctgctgatggcgcacgacttcaccaagtttcactcgctgaagccgaagctgctagaggcactggacgagatgctgacgcacgacatcgccaagctcatgcccctgctgcggcaggaggagctggagagcaccgaggtgggcgtgcaggggggcgcttttgagggcacccacatgggcccgtttgtggagcggggacctgacgaggccatggaggacggcgaggagggctcggacgacgaggccgagtgggtggtgaccaaggacaagtccaaatacgacgagatcttctacaacctggcgcctgccgacggcaagctgagcggctccaaggccaagacctggatggtggggaccaagctccccaactcagtgctggggcgcatctggaagctcagcgatgtggaccgcgacggcatgctggatgatgaggagttcgcgctggccagccacctcatcgaggccaagctggaaggccacgggctgcccgccaacctgccccgtcgcctggtgccaccctccaagcgacgccacaagggctccgccgagtgagccggcccccctcccatggccctgctgtggctccccagctccagtcggctgcacgcacacccctgctccggctcacacacgccctgcctgccctccctgcccagctgtaaggaccgggggtctccctcctcactaccgccagacaccccggtggaagcatttagaggggaccacgggagggacaaggcttctctgtccgcccttcacacctccagcctcacgttcacttaggcacatcacacacacactggcacacgcaggcatccatccatccgtcattcattcaaatatttattgagcacctactatgtgcccagccctgttctaggcactgggcattaccatagagaacaaaatagacaaatacatctgccctcatggaaggtgacgttcccaggagagggcacctacacagtcacgcaaacacacactaattcctggcagggcccccagcccctcccctggctgagcagccctgtggctgaaatgactagcagataaacagacccccttctgctccgcttcctcctgcccagccaggcaacaccctcaaccggctccatcacatcctcaggtctcgggaccatggggggctcagaggggagacacacctactgcttcctcagatgggcccctccgcagccccttcccttgctcggggaaagcccccaattctgcccacacccatttatttccttccttccttccttcttttctttccttccttccttcttttttgtttttgcccccaattctgcccatacccatttctttctttccttccttccttcttttttgtttttgcccccagttctgtccacaccccttccctttcctgtcctgtcctttctttcttttttgatagaatcttgctctgtcgcccaggctggagtgcagtggtgagatctcagctcactgcaacctccacctcctgggttgaagtgattctcgtgcctcagcctcctgagtagctgggactgcaggcacgcgccaccacgcccagctaatttttgtatttgagtagagacggggtttcaccatgttggccaggctggtctcgaactccgcatctcaggtgatctgctcgccttggcctcccaaagtgatgggattacaggcatgagccaccgtgcccggcttcacacccatttctttaaaaaggatcccgtagcaggcagaaaagccccttccatcctgctcctctgatactgtgcccccttggagatatttccgtcctccacccacgtgtctgtggctggaactgcccagcctgctcctggccccctggaagcctccccacagctggtaatctggacttaaggattgctgggccaccgcctctctgcctaccaccattccatatttaagtggagcccctacgtagaaaggccccggggctttattttagtctccttttcagggatgtcgtgggcgggggagggggttcttggtgctacagccctctccccacccctaaagggacgccgacgctgtttgctgccttcaccacatattagtgcttgaccctggcaggggaccccatggaaaagatggggaagagcaaaatacatggagacgacgcaccctccaggatgctcgctgggattcccacgcccaccactgtcccccaccccatggctgggaggggcctctgaacggaacagtgtccccacagagcgaataaagccaaggcttcttccc

SEQ ID NO: 9366 - DNA, 1639 bp, Homo sapiens
  source 1..1639: mol_type = unassigned DNA
agacggctccggacgggaccgcgagcacaggccgctccgcgggcgcttcggatcctcgcgggaccccaccctctcccagcctgcccagcccgctgcagccgccagcgcgccccgtcggcagctctccatctgcacgtctctccgtgaaccccgtgagcggtgtgcagccaccatgttcagctggctgaagcggggcggggcacggggccagcagcccgaggccatccgcacggtgacctcggccctcaaggagctgtaccgcacgaagctgctgccgctggaggagcactaccgctttggggccttccactcgccggccctggaggacgcagacttcgacggcaagcccatggtgctggtggccggccagtacagcacgggcaagaccagcttcatccagtacctgctggagcaggaggtgcccggctcccgcgtggggcctgagcccaccaccgactgctttgtggccgtcatgcacggggacactgagggcaccgtgcccggcaacgccctcgtcgtggacccggacaagcccttccgcaaactcaaccctttcggaaacaccttcctcaacaggttcatgtgtgcccagctccctaatcaggtcctggagagcatcagcatcatcgacaccccgggtatcctgtcgggtgccaagcagagagtgagccgcggctacgacttcccggccgtgctgcgctggttcgcggagcgcgtggacctcatcatcctgctctttgatgcgcacaagctggagatctcggacgagttctcagaggccatcggcgcgttgcggggccatgaggacaagatccgcgtggtgctcaacaaggccgacatggtggagacgcagcagctgatgcgcgtctacggcgcgctcatgtgggcgctgggcaaggtggtgggcacgcccgaggtgctgcgcgtctacatcggctccttctggtcccagcccctcctcgtgcccgacaaccggcgcctcttcgagctggaggagcaggacctcttccgcgacatccagggcctgccccggcacgcagccttgcgcaagctcaacgacctggtgaagagggcccggctggtgcgagttcacgcttacatcatcagctacctgaagaaggagatgccctctgtgtttgggaaggagaacaagaagaagcagctgatcctcaaactgcccgtcatctttgcgaagattcagctggaacatcacatctcccctggggactttcctgattgccagaaaatgcaggagctgctgatggcgcacgacttcaccaagtttcactcgctgaagccgaagctgctagaggcactggacgagatgctgacgcacgacatcgccaagctcatgcccctgctgcggcaggaggagctggagagcaccgaggtgggcgtgcaggggggcgcttttgagggcacccacatgggcccgtttgtggagcggggacctgacgaggccatggaggaccaaggacaagtccaaatacgacgagatcttctacaacctggcgcctgccgacggcaagctgagcggctccaaggccaagacctggatggtggggaccaagctccccaactcagtgctggggcgcatctggaagctcagcgatgtggaccgcgacggcatgctggatga

SEQ ID NO: 9367 - DNA, 1766 bp, Homo sapiens
  source 1..1766: mol_type = unassigned DNA
agacggctccggacgggaccgcgagcacaggccgctccgcgggcgcttcggatcctcgcgggaccccaccctctcccagcctgcccagcccgctgcagccgccagcgcgccccgtcggttcatgtgtgcccagctccctaatcaggtcctggagagcatcagcatcatcgacaccccgggtatcctgtcgggtgccaagcagagagtgagccgcggctacgacttcccggccgtgctgcgctggttcgcggagcgcgtggacctcatcatcctgctctttgatgcgcacaagctggagatctcggacgagttctcagaggccatcggcgcgttgcggggccatgaggacaagatccgcgtggtgctcaacaaggccgacatggtggagacgcagcagctgatgcgcgtctacggcgcgctcatgtgggcgctgggcaaggtggtgggcacgcccgaggtgctgcgcgtctacatcggctccttctggtcccagcccctcctcgtgcccgacaaccggcgcctcttcgagctggaggagcaggacctcttccgcgacatccagggcctgccccggcacgcagccttgcgcaagctcaacgacctggtgaagagggcccggctggtgcgagttcacgcttacatcatcagctacctgaagaaggagatgccctctgtgtttgggaaggagaacaagaagaagcagctgatcctcaaactgcccgtcatctttgcgaagattcagctggaacatcacatctcccctggggactttcctgattgccagaaaatgcaggagctgctgatggcgcacgacttcaccaagtttcactcgctgaagccgaagctgctagaggcactggacgagatgctgacgcacgacatcgccaagctcatgcccctgctgcggcaggaggagctggagagcaccgaggtgggcgtgcaggggggcgcttttgagggcacccacatgggcccgtttgtggagcggggacctgacgaggccatggaggacggcgaggagggctcggacgacgaggccgagtgggtggtgaccaaggacaagtccaaatacgacgagatcttctacaacctggcgcctgccgacggcaagctgagcggctccaaggccaagacctggatggtggggaccaagctccccaactcagtgctggggcgcatctggaagctcagcgatgtggaccgcgacggcatgctggatgatgaggagttcgcgctggccagccacctcatcgaggccaagctggaaggccacgggctgcccgccaacctgccccgtcgcctggtgccaccctccaagcgacgccacaagggctccgccgagtgagccggcccccctcccatggccctgctgtggctccccagctccagtcggctgcacgcacacccctgctccggctcacacacgccctgcctgccctccctgcccagctgtaaggaccgggggtctccctcctcactaccgccagacaccccggtggaagcatttagaggggaccacgggagggacaaggcttctctgtccgcccttcacacctccagcctcacgttcacttaggcacatcacacacacactggcacacgcaggcatccatccatccgtcattcattcaaatatttattgagcacctactatgtgcccagccctgttctaggcactgggcattaccatagagaacaaaatagacaaatacatctgccctcatggaaggtgacgttcccaggagagggcacctacacagtcacgc

SEQ ID NO: 9368 - DNA, 2614 bp, Homo sapiens
  source 1..2614: mol_type = unassigned DNA
agacggctccggacgggaccgcgagcacaggccgctccgcgggcgcttcggatcctcgcgggaccccaccctctcccagcctgcccagcccgctgcagccgccagcgcgccccgtcggcagctctccatctgcacgtctctccgtgaaccccgtgagcggtgtgcagccaccatgttcagctggctgaagcggggcggggcacggggccagcagcccgaggccatccgcacggtgacctcggccctcaaggagctgtaccgcacgaagctgctgccgctggaggagcactaccgctttggggccttccactcgccggccctggaggacgcagacttcgacggcaagcccatggtgctggtggccggccagtacagcacgggcaagaccagcttcatccagtacctgctggagcaggaggtgcccggctcccgcgtggggcctgagcccaccaccgactgctttgtggccgtcatgcacggggacactgagggcaccgtgcccggcaacgccctcgtcgtggacccggacaagcccttccgcaaactcaaccctttcggaaacaccttcctcaacaggttcatgtgtgcccagctccctaatcaggtcctggagagcatcagcatcatcgacaccccgggtatcctgtcgggtgccaagcagagagtgagccgcggctacgacttcccggccgtgctgcgctggttcgcggagcgcgtggacctcatcatcctgctctttgatgcgcacaagctggagatctcggacgagttctcagaggccatcggcgcgttgcggggccatgaggacaagatccgcgtggtgctcaacaaggccgacatggtggagacgcagcagctgatgcgcgtctacggcgcgctcatgtgggcgctgggcaaggtggtgggcacgcccgaggtgctgcgcgtctacatcggctccttctggtcccagcccctcctcgtgcccgacaaccggcgcctcttcgagctggaggagcaggacctcttccgcgacatccagggcctgccccggcacgcagccttgcgcaagctcaacgacctggtgaagagggcccggctggtgcgagttcacgcttacatcatcagctacctgaagaaggagatgccctctgtgtttgggaaggagaacaagaagaagcagctgatcctcaaactgcccgtcatctttgcgaagattcagctggaacatcacatctcccctggggactttcctgattgccagaaaatgcaggagctgctgatggcgcacgacttcaccaagtttcactcgctgaagccgaagctgctagaggcactggacgagatgctgacgcacgacatcgccaagctcatgcccctgctgcggcaggaggagctggagagcagccctgtggctgaaatgactagcagataaacagacccccttctgctccgcttcctcctgcccagccaggcaacaccctcaaccggctccatcacatcctcaggtctcgggaccatggggggctcagaggggagacacacctactgcttcctcagatgggcccctccgcagccccttcccttgctcggggaaagcccccaattctgcccacacccatttatttccttccttccttccttcttttctttccttccttccttcttttttgtttttgcccccaattctgcccatacccatttctttctttccttccttccttcttttttgtttttgcccccagttctgtccacaccccttccctttcctgtcctgtcctttctttcttttttgatagaatcttgctctgtcgcccaggctggagtgcagtggtgagatctcagctcactgcaacctccacctcctgggttgaagtgattctcgtgcctcagcctcctgagtagctgggactgcaggcacgcgccaccacgcccagctaatttttgtatttgagtagagacggggtttcaccatgttggccaggctggtctcgaactccgcatctcaggtgatctgctcgccttggcctcccaaagtgatgggattacaggcatgagccaccgtgcccggcttcacacccatttctttaaaaaggatcccgtagcaggcagaaaagccccttccatcctgctcctctgatactgtgcccccttggagatatttccgtcctccacccacgtgtctgtggctggaactgcccagcctgctcctggccccctggaagcctccccacagctggtaatctggacttaaggattgctgggccaccgcctctctgcctaccaccattccatatttaagtggagcccctacgtagaaaggccccggggctttattttagtctccttttcagggatgtcgtgggcgggggagggggttcttggtgctacagccctctccccacccctaaagggacgccgacgctgtttgctgccttcaccacatattagtgcttgaccctggcaggggaccccatggaaaagatggggaagagcaaaatacatggagacgacgcaccctccaggatgctcgctgggattcccacgcccaccactgtcccccaccccatggctgggaggggcctctgaacggaacagtgtccccacagagcgaataaagccaaggcttcttccc

SEQ ID NO: 9369 - DNA, 1919 bp, Homo sapiens
  source 1..1919: mol_type = unassigned DNA
agacggctccggacgggaccgcgagcacaggccgctccgcgggcgcttcggatcctcgcgggaccccaccctctcccagcctgcccagcccgctgcagccgccagcgcgccccgtcggcagctctccatctgcacgtctctccgtgaaccccgtgagcggtgtgcagccaccatgttcagctggctgaagcggggcggggcacggggccagcagcccgaggccatccgcacggtgacctcggccctcaaggagctgtaccgcacgaagctgctgccgctggaggagcactaccgctttggggccttccactcgccggccctggaggacgcagacttcgacggcaagcccatggtgctggtggccggccagtacagcacgggcaagaccagcttcatccagtacctgctggagcaggaggtgcccggctcccgcgtggccgtcatgcacggggacactgagggcaccgtgcccggcaacgccctcgtcgtggacccggacaagcccttccgcaaactcaaccctttcggaaacaccttcctcaacaggttcatgtgtgcccagctccctaatcaggtcctggagagcatcagcatcatcgacaccccgggtatcctgtcgggtgccaagcagagagtgagccgcggctacgacttcccggccgtgctgcgctggttcgcggagcgcgtggacctcatcatcctgctctttgatgcgcacaagctggagatctcggacgagttctcagaggccatcggcgcgttgcggggccatgaggacaagatccgcgtggtgctcaacaaggccgacatggtggagacgcagcagctgatgcgcgtctacggcgcgctcatgtgggcgctgggcaaggtggtgggcacgcccgaggtgctgcgcgtctacatcggctccttctggtcccagcccctcctcgtgcccgacaaccggcgcctcttcgagctggaggagcaggacctcttccgcgacatccagggcctgccccggcacgcagccttgcgcaagctcaacgacctggtgaagagggcccggctggtgcgagttcacgcttacatcatcagctacctgaagaaggagatgccctctgtgtttgggaaggagaacaagaagaagcagctgatcctcaaactgcccgtcatctttgcgaagattcagctggaacatcacatctcccctggggactttcctgattgccagaaaatgcaggagctgctgatggcgcacgacttcaccaagtttcactcgctgaagccgaagctgctagaggcactggacgagatgctgacgcacgacatcgccaagctcatgcccctgctgcggcaggaggagctggagagcaccgaggtgggcgtgcaggggggcgcttttgagggcacccacatgggcccgtttgtggagcggggacctgacgaggccatggaggacggcgaggagggctcggacgacgaggccgagtgggtggtgaccaaggacaagtccaaatacgacgagatcttctacaacctggcgcctgccgacggcaagctgagcggctccaaggccaagacctggatggtggggaccaagctccccaactcagtgctggggcgcatctggaagctcagcgatgtggaccgcgacggcatgctggatgatgaggagttcgcgctggccagccacctcatcgaggccaagctggaaggccacgggctgcccgccaacctgccccgtcgcctggtgccaccctccaagcgacgccacaagggctccgccgagtgagccggcccccctcccatggccctgctgtggctccccagctccagtcggctgcacgcacacccctgctccggctcacacacgccctgcctgccctccctgcccagctgtaaggaccgggggtctccctcctcactaccgccagaca

SEQ ID NO: 9370 - DNA, 1215 bp, Homo sapiens
  source 1..1215: mol_type = unassigned DNA
gaggccaagaaggttctagggggtggaggagcctgaggtgttggtttaaggagcagcgagagtgggttcacgcttacatcatcagctacctgaagaaggagatgccctctgtgtttgggaaggagaacaagaagaagcagctgatcctcaaactgcccgtcatctttgcgaagattcagctggaacatcacatctcccctggggactttcctgattgccagaaaatgcaggagctgctgatggcgcacgacttcaccaagtttcactcgctgaagccgaagctgctagaggcactggacgagatgctgacgcacgacatcgccaagctcatgcccctgctgcggcaggaggagctggagagcaccgaggtgggcgtgcaggggggcgcttttgagggcacccacatgggcccgtttgtggagcggggacctgacgaggccatggaggacggcgaggagggctcggacgacgaggccgagtgggtggtgaccaaggacaagtccaaatacgacgagatcttctacaacctggcgcctgccgacggcaagctgagcggctccaaggccaagacctggatggtggggaccaagctccccaactcagtgctggggcgcatctggaagctcagcgatgtggaccgcgacggcatgctggatgatgaggagttcgcgctggccagccacctcatcgaggccaagctggaaggccacgggctgcccgccaacctgccccgtcgcctggtgccaccctccaagcgacgccacaagggctccgccgagtgagccggcccccctcccatggccctgctgtggctccccagctccagtcggctgcacgcacacccctgctccggctcacacacgccctgcctgccctccctgcccagctgtaaggaccgggggtctccctcctcactaccgccagacaccccggtggaagcatttagaggggaccacgggagggacaaggcttctctgtccgcccttcacacctccagcctcacgttcacttaggcacatcacacacacactggcacacgcaggcatccatccatccgtcattcattcaaatatttattgagcacctactatgtgcccagccctgttctaggcactgggcattaccatagagaacaaaatagacaaatacatctgccctcatggaaggtgacgttcccaggagagggcacctacacagtcacgcaaacacacacta

SEQ ID NO: 9371 - DNA, 4636 bp, Homo sapiens
  source 1..4636: mol_type = unassigned DNA
aactttaattgccaagatttcacccctcctcctcaagcccagattatttatcctccctccggcctgggctgctggatgcagcagcggctgggcttggtcccaggagcagggagagtgcgctcccggccctcctagccgcgtgcccgggccatggtgcggctgagccccgcgcttgggtgaggcggcggcgcggctcggagcccggcggaccggtcctacgggacatcttcccctgaggaggagtcttcccctggggctgcgtgccgggggcgagcggcggccgcgatgttcagctggctgggtacggacgaccgccggaggaaggaccccgaggttttccagacggtgagtgaggggctcaagaaactctacaagagcaagctgctgcccttggaagagcattaccgcttccacgagttccactcgcccgccctggaggatgccgacttcgacaacaagcccatggttctgctggtgggccagtactccactgggaagaccaccttcatcaggtacctgctggaacaggacttcccaggcatgaggattgggcctgagcccaccacagactccttcattgcggtgatgcagggagacatggaggggatcatccctgggaacgccctggtggtggatcccaagaaacccttcaggaaactcaacgcctttggcaacgccttcttgaacaggttcgtgtgtgcccagctacctaaccctgtgctggagagcatcagcgtcatcgacacaccagggatcctctctggggagaagcagaggatcagccgggggtatgactttgcagctgtccttgagtggtttgccgagcgggttgaccgcatcattctgctcttcgatgcccacaaactggacatctctgatgagttctcagaagtcatcaaagccctcaagaaccacgaggacaagatgcgagtggtgctgaacaaagctgaccagatcgagacgcagcagctgatgcgggtgtacggggccctcatgtggtccttggggaagatcgtgaacaccccagaggtgatccgggtctacatcggctccttctggtcccaccccctcctcatccctgacaaccggaagctctttgaggctgaggaacaggacctattcagggacatccagagtctgccccgaaatgctgccctgcgcaagctcaacgacctcatcaaaagggccaggctggccaaggtccacgcctacatcatcagctctctgaagaaggagatgccctcggtgttcgggaaggacaacaagaagaaggagctggtcaacaacctggccgagatctatggccggatcgagcgggagcaccagatctcacctggggacttccccaatctgaagaggatgcaggaccagctgcaggcccaggactttagcaagttccagccgctgaagagcaagctgctggaggtagtggacgacatgctggcccatgacattgcccagctcatggtgctagtgcgccaggaggagtcacagcggcccatccagatggtgaagggcggagcgttcgagggcaccctgcacggcccctttgggcatggctatggggagggggctggagaaggtatcgatgatgctgagtgggtggtggccagggacaagcccatgtacgacgagatcttctacaccctgtcaccggtggatggcaagatcacaggcgctaatgccaagaaggagatggtgcgctccaagctgcccaacagtgtgctgggcaagatctggaagctggccgacattgacaaggatggcatgctggacgacgacgagtttgcactggccaaccacctcatcaaagtcaagctggaggggcacgagctgcccaacgagctgcctgcccacctcctgcccccgtccaagaggaaagttgccgagtgatggggtggggggacattcagacgggcagtgttagaggaggagatgggagcggtgactacacacacacacacacacacacacacacacacaaacatgcacacacacatatgcatatcttgacattgctctgtaggtgagagaggaccatgacgcccatgtttgcagctgatacttgtttgggcacacctccaagttctcgggattagaaggacaagagcactcccaggccccagagtctaagcctaagtctctatcgctcttcccctctcctcggccactccccagataccagacctgaggcaattcacttgccagcacagatggccaacccacctccagattccccagtgcttccacacccgggctctgagcaaatggaaaagacttttcatttagtagacaattcacttctttttctgtgcttcccctatctgctttggcttcctaataagaaatccattcaagagctaggagatctgagggcaggcgggcagctgcagggaggagaggtgagaaaggaagcgtcttctagagacattggcccaggagctctgttctttcctaatctaagcctctgtcttcttcggcaaaccttgctttgaactctgccagtatttcattttaaagaatcccagagcgggagagagaagagaaaaaaattgataagagtgaggaaattgtcctgtagtctattgaaaaccagtcaaggtggttttagttcatagattttgttagatgttctttccacctggcctatgatgtttagatgttcatacttgactcacatttacccagcccctcctgcgtaccaggagctgtgttaggcactttatatacattattctatgtggccctcactgatgccccagggaagtatgcattagccttcccattttgcagttgaggaggctgagtagcctcagaagggtttaggcgaccttctgaaactcacagaagtcacgtgatggagagaggattcaaagccagggcctcagaccctcacacacttgtctgtgctatgatgtatgcaggatcccagcattgatacccaatgacaaactatggagaacaagcaaagtatgcaggccccctgcagcctcccaggacaggctggcaagggaggagggccggccagcatttggtggcccatcagtctggccatctgtcacgtcacagaagcaaaccgtgccttctggctctgcgccccatattcccagcatcatagacatccaacagcaccagcaggagagtgggctagcctgctggatgctgttcgtgcctgtccctgctctgcctcccacccagttgcctgaatcatcccagctcagatgcagccactgtctcttgtcaagtgggacctcatactattctcagaaggctaacttgagaggtttggggccttgttccccagagggtccccagggactctgcagtgtccttggcaaatccccactgtactcaatgccctacattctcttctgtggtctctcccctggcttgcttcatggccactgaaccaatcactttgtatgctatgctcctactgtgatggaaaacaaaatgagtataacttattttatatccatattcagactatatagagaatattctatgcatctatgacgtgcttactactgcagtgcatttgtcattagtcttcatgttaatacagtacatttattctttggtacctgcctggccacagagcatcattcaatggaggctgagggagaagggctgggttcttacttggagttcctggtgaaatctttggctggaaagggctcactggggccacccaatggccagcatccacaaccagcttcccagtgggctggagtttgtctaggctcagtgaccaacccaggcacagctggtggagccaccgctccctgctcctctggagtgaagatgttccctaagcccctgggcttccttctgcaaatacacatttctctttcacatgaaatgaagggcagacaaaggccaggcaaagaggtctcacctgctctggagaaaacccttgagtgccgagtgcaggttagggaccatttctcaactccacacctttcttcaagctgaaggagaaatgggaaggaaatagcagaggtaggtgaagttcctgtctttttattttataggaaagggagatgtctgttatcccctttcttcactgccactggacacacatgccactttcctgcccttctacatatgctgcctctcttccctctctccatcttgaagtctccacccaggagagacctgtgaggtgtgggaattccatgtttgcacagctcccatctccctggaaagaggaactgatgtttgaggggacagatgtgggtcactttccctggcagtgccctctagccttgctgccttggctttctgaccccttccaggcttcaggggcctgggagatctcatgcctcagcccaggaaacatttaatagggaaagcagagacatgtcatgtcagccccacagacaagaatttctagagcacttgtcctgttgttccttgccccgacattactcagtctgggccatggaatccatccaataaacacagcaacaccctatgctactgaccaagcaaagcttgcccctggtaccaaagagctaaatcatgaccaaagtgtgacatgaatgtaactgaaatgcgggttagttgctcaatgtatgcaaagtcccacggacaagagtaaagtctgataccaataaagtgaatgtattccaaa

SEQ ID NO: 9372 - DNA, 3328 bp, Homo sapiens
  source 1..3328: mol_type = unassigned DNA
aaacatggcggcgccctgcgcggcttcccgtcgccgcaaccgtggggccggccctgccttgccagtactaggggacttcctctgcgcgccggcttcctgcccagctggcatttaaaccaccgcctggggctgcaggatgctgctgcggatgcagagctgtccgcgggctgggcagcgtcgccgtctcccctgagccgcctcggtccggcaggagcggagccgaagcatcccttgctgcacgcagggcagagcaggcgagggctgggggccgatcggggaccccggcttgggaccccggcatctggcagtttccttgcaggttcaactttaattgccaagatttcacccctcctcctcaagcccagattatttatcctccctccggcctgggctgctggatgcagcagcggctgggcttggtcccaggagcagggagagtgcgctcccggccctcctagccgcgtgcccgggccatggtgcggctgagccccgcgcttgggtgaggcggcggcgcggctcggagcccggcggaccggtcctacgggacatcttcccctgaggaggagtcttcccctggggctgcgtgccgggggcgagcggcggccgcgatgttcagctggctgggtacggacgaccgccggaggaaggaccccgaggttttccagacggtgagtgaggggctcaagaaactctacaagagcaagctgctgcccttggaagagcattaccgcttccacgagttccactcgcccgccctggaggatgccgacttcgacaacaagcccatggttctgctggtgggccagtactccactgggaagaccaccttcatcaggtacctgctggaacaggacttcccaggcatgaggattgggcctgagcccaccacagactccttcattgcggtgatgcagggagacatggaggggatcatccctgggaacgccctggtggtggatcccaagaaacccttcaggaaactcaacgcctttggcaacgccttcttgaacaggttcgtgtgtgcccagctacctaaccctgtgctggagagcatcagcgtcatcgacacaccagggatcctctctggggagaagcagaggatcagccggggaccagctgcaggcccaggactttagcaagttccagccgctgaagagcaagctgctggaggtagtggacgacatgctggcccatgacattgcccagctcatggtgctagtgcgccaggaggagtcacagcggcccatccagatggtgaagggcggagcgttcgagggcaccctgcacggcccctttgggcatggctatggggagggggctggagaaggtatcgatgatgctgagtgggtggtggccagggacaagcccatgtacgacgagatcttctacaccctgtcaccggtggatggcaagatcacaggcgctaatgccaagaaggagatggtgcgctccaagctgcccaacagtgtgctgggcaagatctggaagctggccgacattgacaaggatggcatgctggacgacgacgagtttgcactggccaaccacctcatcaaagtcaagctggaggggcacgagctgcccaacgagctgcctgcccacctcctgcccccgtccaagaggaaagttgccgagtgatggggtggggggacattcagacgggcagtgttagaggaggagatgggagcggtgactacacacacacacacacacacacacacacacacaaacatgcacacacacatatgcatatcttgacattgctctgtaggtgagagaggaccatgacgcccatgtttgcagctgatacttgtttgggcacacctccaagttctcgggattagaaggacaagagcactcccaggccccagagtctaagcctaagtctctatcgctcttcccctctcctcggccactccccagataccagacctgaggcaattcacttgccagcacagatggccaacccacctccagattccccagtgcttccacacccgggctctgagcaaatggaaaagacttttcatttagtagacaattcacttctttttctgtgcttcccctatctgctttggcttcctaataagaaatccattcaagagctaggagatctgagggcaggcgggcagctgcagggaggagaggtgagaaaggaagcgtcttctagagacattggcccaggagctctgttctttcctaatctaagcctctgtcttcttcggcaaaccttgctttgaactctgccagtatttcattttaaagaatcccagagcgggagagagaagagaaaaaaattgataagagtgaggaaattgtcctgtagtctattgaaaaccagtcaaggtggttttagttcatagattttgttagatgttctttccacctggcctatgatgtttagatgttcatacttgactcacatttacccagcccctcctgcgtaccaggagctgtgttaggcactttatatacattattctatgtggccctcactgatgccccagggaagtatgcattagccttcccattttgcagttgaggaggctgagtagcctcagaagggtttaggcgaccttctgaaactcacagaagtcacgtgatggagagaggattcaaagccagggcctcagaccctcacacacttgtctgtgctatgatgtatgcaggatcccagcattgatacccaatgacaaactatggagaacaagcaaagtatgcaggccccctgcagcctcccaggacaggctggcaagggaggagggccggccagcatttggtggcccatcagtctggccatctgtcacgtcacagaagcaaaccgtgccttctggctctgcgccccatattcccagcatcatagacatccaacagcaccagcaggagagtgggctagcctgctggatgctgttcgtgcctgtccctgctctgcctcccacccagttgcctgaatcatcccagctcagatgcagccactgtctcttgtcaagtgggacctcatactattctcagaaggctaacttgagaggtttggggccttgttccccagagggtccccagggactctgcagtgtccttggcaaatccccactgtactcaatgccctacattctcttctgtggtctctcccctggcttgcttcatggccactgaaccaatcactttgtatgctatgctcctactgtgatggaaaacaaaatgagtataacttattttatatccatattcagactatatagagaatattctatgcatctatgacgtgcttactactgcagtgcatttgtcattagtcttcatgttaatacagtacatttattctttggta

SEQ ID NO: 9373 - DNA, 3983 bp, Homo sapiens
  source 1..3983: mol_type = unassigned DNA
ccagcgcggccggggcggctcagtgcgagccggggagagtcgaacccggagcagggtcccatccgagcgtggactggcggcaggatgttcagctggatggggcggcaggcgggcgggcgcgaacgcgctggcggcgcggacgcggtgcagacggtgacgggcgggctgcgctcgctctacctgcgcaaggtgctgccgctggaggaggcgtaccgcttccacgagttccactcgcctgcgctggaggacgccgacttcgagaacaagcccatgatcctgctggtgggccagtacagcaccggcaagaccaccttcatcagatacctactggagcaggatttcccaggcatgaggattggtccggagcccaccacagactccttcatcgccgtgatgtatggagagactgagggcagcaccccagggaatgctttagtcgtggaccccaaaaagccgtttagaaagctcagtcgctttggaaacgctttcctgaatcgattcatgtgctcacagctccccaatcaggtcctgaagagcatcagcgtcatcgacagccccggcatcctttctggggagaagcagcgcatcagccgaggctatgacttctgccaggtcctgcagtggtttgccgagagggtggacaggatcatcctgctctttgacgctcacaagctggacatctcagatgaattctcagaggccatcaaggccttccggggccaggacgacaagatccgtgtcgtgctgaacaaggccgaccaagtggacacgcagcagctgatgcgggtctacggggccctcatgtggtccctaggcaaggtcatcaacacgcccgaggtactgcgcgtctacattggctccttctgggcgcagcccctgcagaacacggacaaccgccggctcttcgaggctgaggcccaggacctctttagagacatccagagcctcccccagaaggcagcggtgcgcaagctcaacgacctcatcaagcgagcgaggctggccaaggtgcatgcctacatcatcagctacctgaagaaggagatgccaagtgtatttggaaaggaaaacaagaagagagagcttatcagcaggctaccggaaatctacattcagctacagcgagaataccagatttctgcaggggacttccctgaggtcaaggctatgcaggaacagcttgagaactatgacttcaccaaattccactcgctgaagcccaagctgatcgaggcagtggacaacatgctgagcaacaagatctcgcccctcatgaacctcatcagccaggaggagacgagcacgcccacgcagctggtgcagggcggcgccttcgatggcaccaccgagggccccttcaaccagggctacggggagggtgccaaggagggcgccgacgaggaggagtgggtcgtggccaaagacaagcccgtctacgacgagctcttctacactctgtcgcccatcaatggcaagatatcaggtgtcaacgccaagaaggagatggtgacctccaagctgcccaacagcgtcctgggcaagatctggaagctggccgactgcgactgcgacggcatgcttgatgaggaggagttcgcgctggccaagcacctcatcaagatcaagctcgacggctacgagctgcccagcagcctgcccccccacctcgtgcccccctcgcacaggaagtccctgcccaaggccgactgaggggtgggctgcagaacggggtgggaactgggggacctgggcctcaggcctgctccaccactgactcaccgaatgaccttgggcaaggcactgccctctctgtgccttggtttccccatctgtagaatggggagggtggacactggaaactagatgacttctttcacctccaaaattcccttagtttctatgaaaatattgggggtaggggggtggattaggagattgaagggttgagaagaaagagaaattgtccaaagagtcctcagaacctgcctggagaaatgcgcatgggggtgggcctggtaagtcccaggaaccacaggaagtgagctaaggctcacccagagcagctgggtctccaggctgcctgggctttttgtcctcatgaacaactctggagcagctgtctgtccctcagagggcacctggaggcagcaaagattatcttatttattttattttgttttctgctatatttagagtggcaaaaaaatagagcagagggtttctgctgtctccagactgtctaccaaagagaaggcgacagatgcctcctgggtttggaagggggatgcactgtggatctgccatccattctgcagtctccagcagagcaggcagtcaggccccagcgtgcctccatcccagtgccccgatgaccatctggtcagccctcccaacctcccttccagggggcttaccagcaaagccatattcggctaggaatttggaattcacaacctttattaacccctggcaaaacttcccgtttgcatgtcaaatcacattgaagcctgaaaattagcttttcttactggtttttccaataagtaatagcaaagcccacttatcatacttaaactacagtaaagaaaagaggtggttctctgcagtgatcgtttagtgtggccctcaaacattaaatatcccgaggtctccttggtgggtggcaggatttaaattcaatcaaatcctgtcctagtgtgtgcagtgtcttcggccctgtggacacaggtgaatgagggaccagccctgccctgggctgttgagaagagatcagtccacccagagttagacattgtttttgtagaaaacaggcatttattatgtctagggttttgtgttttttttttttccttacaggataaaagcctttatacagaaacaaaatggaacctttcatataaaaccttttctttaaaggctgtgtggttcgtatcatgaatgcccatcacgaggcaggattcgggcacatacctgtacttctgctccagagtgtgcgctccccaaatcccctgagtaaacctctctggactgctgctcagacacctgcgtcaggtggaggtgcctccccctctgtgggcaccagcttggggaggtaggtgacttttccttgcaaatctccctgcctcatctccagaaaattgcatacctgcatggcctctctgcattatttatgcaggaagagacacgaaacagcaatggccacatggtatgggggcctgctggcaccagaagtgaatgaaatcagaaccgtcccactgagtcttccaaaaggcacataattttttttttctgtcacctgcctttggtgacagggtcaaaggcacagattgaagagaaaatcttgatttgggagaagcatttatatccagatgcctacccttacactccctagcttactttctacataatttagttttaagagcaggaaatgcataacatggtttttagtcttaacaagcacttaaattcattagacgcatagaaaagaaccatttattattttattatttttatttttattttgagaggaagtctctgtcacccaggctggagtgcagtggcgcaatctcagttcactgcaacctccgcctcccaggttcaagtgattcccctgcctcagcctcccaagtagctgggactacaggcacccgccaccacgcccggctaatttttgtattttagtagagatggggttttaccatgttggtcaatatggtctcgatctcctgacctcgtgatctacccacctcggcctcccaaagtgctgtaacctaagcagacagttctgtgaatgcgtgaggaccacctgaagtctgcagccacggtggaggtcaccaaagggtgaactgagagagaagagggaattcacttgcccaaaggtttacagatgcccaggcaaactgatttttccatccagaattatcttgttctttaactctcctcaattgtcatatataaacatgaatttatatacatgtgtgtca

SEQ ID NO: 9374 - DNA, 2235 bp, Homo sapiens
  source 1..2235: mol_type = unassigned DNA
ggcgcacttccgcccgggcgcattgtagccccgcggacagctgggccagggtgcgggcctgcgcctccctcggctcctggcgcgggcctcggggagaggggtggaagatgtctatggatgtgacattcctggggacgggtgcagcatacccatctccaacccggggtgcctctgctgtggtccttcggtgtgaaggcgagtgctggctctttgactgtggggagggaacacagacacagcttatgaaaagccaacttaaagcagggagaattaccaagatcttcatcacacaccttcatggagaccatttctttggccttcctgggctcctctgcacaatcagcctgcagagtggctccatggtgtccaaacagcctattgaaatctatggccctgtagggcttcgggactttatctggcgaaccatggaactctctcacacggagctggtcttccattatgtggttcatgaactggttcctacagcagatcaatgtcctgcagaagaactaaaagaatttgcgcatgtgaatagagcagacagtcctcccaaagaggaacaaggaagaactatcctgttagactcagaagaaaactcataccttctgtttgatgatgaacaatttgttgtaaaagcatttcgcctctttcacagaattccctcatttgggttttcagtcgtggaaaagaaacgcccaggtaaactcaatgcacagaaacttaaagaccttggtgttccaccaggtcctgcctatgggaagctgaaaaatggaatttctgttgttctggaaaatggggttacaatttctccccaagatgtcttaaaaaagcctattgttggaagaaaaatctgcatattgggtgactgctctggggttgtgggtgatggaggagtaaaactgtgctttgaagcagacctgttgatccacgaagcaaccctggatgatgcccagatggacaaagcaaaggagcatggccacagcacaccacagatggcagcaacatttgcaaagttgtgccgtgcaaagaggctggttctgactcacttcagtcagaggtacaaaccagttgccttggccagagaaggagaaacagatggcattgcagaactaaaaaagcaagctgaatcagtgttagatctccaagaagtgactctagcagaagattttatggtgataagcattccaatcaagaaatgaaaccagtgttcctgagtgcacactgacatgtctgtgaatatgttactgaacctatagtccagtttttttatttcttgttttagtctgaaattatttgggccctaataatcctaaaaagaatggagctgcattgatgaattggctcagtatttaaagggagcaaactttttgataataaatctttttaagagaaaaaaaacccagcatcctttttgaagtccagatttgtcaaaatgatagactattcagttatacatcttattttgtgctactaccacagatagccaatattccatgcagtcctgggcttagcttctgcccagctttattgctgctattggcaaagagcacaggactcagccctcgtggctaaaaatggtattttggcagtttgtattgaatctgtttgtgttattaacagaagagggagaaatgtcatgagacgttggacaggcaggattgatgatagcatgaccatagctttgctggaatactgaatgcagggtttggctaggtgtttattttaacattttattaaactttctatttgggtcttaacccatggttctcagctggggtgacactgctcctctagaagcaggtttgaaattatgggtatgttttcttgtcacagtgactgagtacggtggtggtagtggtggtactactactactggtatttagtcagcagggataagggatgttagctgtcctgcaaagttttggtcagtcatatacaataaagaatcatctcaccccgaaatgcaaattgcaggcccattgagatacacagcaagttagtttatactcttgatgtgaatatagtttaccaaaattagtgacataatgagtggaattactaggtaagtcaaatcctaaagagtgaatgtgttagaattgcagtgtcataccaaataacattcaaaagaaatgagccattaagtgaagcttatgaacctggaggtaaaaaatgcttatctgttaaactgaggtttcattgacgtgtccctattaataaacgttatttgccccacaa

SEQ ID NO: 9375 - DNA, 2982 bp, Homo sapiens
  source 1..2982: mol_type = unassigned DNA
agcggctaggtggtgcacgggaaacgcgggcgtaggtgaccggcggctttctcagttttggtggagacgggcgcatgtgggcgctttgctcgctgctgcggtccgcggccggacgcaccatgtcgcagggacgcaccatatcgcaggcacccgcccgccgcgagcggccgcgcaaggacccgctgcggcacctgcgcacgcgagagaagcgcggaccgtcggggtgctccggcggcccaaacaccgtgtacctgcaggtggtggcagcgggtagccgggactcgggcgccgcgctctacgtcttctccgagttcaaccggtatctcttcaactgtggagaaggcgttcagagactcatgcaggagcacaagttaaaggttgctcgcctggacaacatattcctgacacgaatgcactggtctaatgttgggggcttaagtggaatgattcttactttaaaggaaaccgggcttccaaagtgtgtactttctggacctccacaactggaaaaatacctcgaagcaatcaaaatattttctggtccattgaaaggaatagaactggctgtgcggccccactctgccccagaatacgaggatgaaaccatgacagtttaccagatccccatacacagtgaacagaggaggggaaagcaccaaccatggcagagtccagaaaggcctctcagcaggctcagtccagagcgatcttcagactccgagtcgaatgaaaatgagccacaccttccacatggtgttagccagagaagaggggtcagggactcttccctggtcgtagctttcatctgtaagcttcacttaaagagaggaaacttcttggtgctcaaagcaaaggagatgggcctcccagttgggacagctgccatcgctcccatcattgctgctgtcaaggacgggaaaagcatcactcatgaaggaagagagattttggctgaagagctgtgtactcctccagatcctggtgctgcttttgtggtggtagaatgtccagatgaaagcttcattcaacccatctgtgagaatgccacctttcagaggtaccaaggaaaggcagatgcccccgtggccttggtggttcacatggccccagcatctgtgcttgtggacagcaggtaccagcagtggatggagaggtttgggcctgacacccagcacttggtcctgaatgagaactgtgcctcagttcacaaccttcgcagccacaagattcaaacccagctcaacctcatccacccggacatcttccccctgctcaccagtttccgctgtaagaaggagggccccaccctcagtgtgcccatggttcagggtgaatgcctcctcaagtaccagctccgtcccaggagggagtggcagagggatgccattattacttgcaatcctgaggaattcatagttgaggcgctgcagcttcccaacttccagcagagcgtgcaggagtacaggaggagtgcgcaggacggcccagccccagcagagaaaagaagtcagtacccagaaatcatcttccttggaacagggtctgccatcccgatgaagattcgaaatgtcagtgccacacttgtcaacataagccccgacacgtctctgctactggactgtggtgagggcacatttgggcagctgtgccgtcattacggagaccaggtggacagggtcctgggcaccctggctgctgtgtttgtgtcccacctgcacgcagatcaccacacgggcttgccaagtatcttgctgcagagagaacgcgccttggcatctttgggaaagccgcttcaccctttgctggtggttgcccccaaccagctcaaagcctggctccagcagtaccacaaccagtgccaggaggtcctgcaccacatcagtatgattcctgccaaatgccttcaggaaggggctgagatctccagtcctgcagtggaaagattgatcagttcgctgttgcgaacatgtgatttggaagagtttcagacctgtctggtgcggcactgcaagcatgcgtttggctgtgcgctggtgcacacctctggctggaaagtggtctattccggggacaccatgccctgcgaggctctggtccggatggggaaagatgccaccctcctgatacatgaagccaccctggaagatggtttggaagaggaagcagtggaaaagacacacagcacaacgtcccaagccatcagcgtggggatgcggatgaacgcggagttcattatgctgaaccacttcagccagcgctatgccaaggtccccctcttcagccccaacttcagcgagaaagtgggagttgcctttgaccacatgaaggtctgctttggagactttccaacaatgcccaagctgattcccccactgaaagccctgtttgctggcgacatcgaggagatggaggagcgcagggagaagcgggagctgcggcaggtgcgggcggccctcctgtccagggagctggcaggcggcctggaggatggggagcctcagcagaagcgggcccacacagaggagccacaggccaagaaggtcagagcccagtgaagatctgggagaccctgaactcagaaggctgtgtgtcttctgccccacgcacgcacccgtatctgccctccttgctggtagaagctgaagagcacggtcccccaggaggcagctcaggataggtggtatggagctgtgccgaggcttgggctcccacataagcactagtctatagatgcctcttaggactggtgcctggcacagccgcgggccaggaggctgccacacggaagcaagcagatgaactaatttcatttcaaggcagtttttaaagaagtcttggaaacagacggcggcacctttcctctaatccagcaaagtgattccctgcacaccagagacaagcagagtaacaggatcagtgggtctaagtgtccgagacttaacgaaaatagtatttcagctgcaataaagattgagtttgcaa

SEQ ID NO: 9376 - DNA, 2923 bp, Homo sapiens
  source 1..2923: mol_type = unassigned DNA
agcggctaggtggtgcacgggaaacgcgggcgtaggtgaccggcggctttctcagttttggtggagacgggcgcatgtgggcgctttgctcgctgctgcggtccgcggccggacgcaccatgtcgcagggacgcaccatatcgcaggcacccgcccgccgcgagcggccgcgcaaggacccgctgcggcacctgcgcacgcgagagaagcgcggaccgtcggggtgctccggcggcccaaacaccgtgtacctgcaggtggtggcagcgggtagccgggactcgggcgttcagagactcatgcaggagcacaagttaaaggttgctcgcctggacaacatattcctgacacgaatgcactggtctaatgttgggggcttaagtggaatgattcttactttaaaggaaaccgggcttccaaagtgtgtactttctggacctccacaactggaaaaatacctcgaagcaatcaaaatattttctggtccattgaaaggaatagaactggctgtgcggccccactctgccccagaatacgaggatgaaaccatgacagtttaccagatccccatacacagtgaacagaggaggggaaagcaccaaccatggcagagtccagaaaggcctctcagcaggctcagtccagagcgatcttcagactccgagtcgaatgaaaatgagccacaccttccacatggtgttagccagagaagaggggtcagggactcttccctggtcgtagctttcatctgtaagcttcacttaaagagaggaaacttcttggtgctcaaagcaaaggagatgggcctcccagttgggacagctgccatcgctcccatcattgctgctgtcaaggacgggaaaagcatcactcatgaaggaagagagattttggctgaagagctgtgtactcctccagatcctggtgctgcttttgtggtggtagaatgtccagatgaaagcttcattcaacccatctgtgagaatgccacctttcagaggtaccaaggaaaggcagatgcccccgtggccttggtggttcacatggccccagcatctgtgcttgtggacagcaggtaccagcagtggatggagaggtttgggcctgacacccagcacttggtcctgaatgagaactgtgcctcagttcacaaccttcgcagccacaagattcaaacccagctcaacctcatccacccggacatcttccccctgctcaccagtttccgctgtaagaaggagggccccaccctcagtgtgcccatggttcagggtgaatgcctcctcaagtaccagctccgtcccaggagggagtggcagagggatgccattattacttgcaatcctgaggaattcatagttgaggcgctgcagcttcccaacttccagcagagcgtgcaggagtacaggaggagtgcgcaggacggcccagccccagcagagaaaagaagtcagtacccagaaatcatcttccttggaacagggtctgccatcccgatgaagattcgaaatgtcagtgccacacttgtcaacataagccccgacacgtctctgctactggactgtggtgagggcacatttgggcagctgtgccgtcattacggagaccaggtggacagggtcctgggcaccctggctgctgtgtttgtgtcccacctgcacgcagatcaccacacgggcttgccaagtatcttgctgcagagagaacgcgccttggcatctttgggaaagccgcttcaccctttgctggtggttgcccccaaccagctcaaagcctggctccagcagtaccacaaccagtgccaggaggtcctgcaccacatcagtatgattcctgccaaatgccttcaggaaggggctgagatctccagtcctgcagtggaaagattgatcagttcgctgttgcgaacatgtgatttggaagagtttcagacctgtctggtgcggcactgcaagcatgcgtttggctgtgcgctggtgcacacctctggctggaaagtggtctattccggggacaccatgccctgcgaggctctggtccggatggggaaagatgccaccctcctgatacatgaagccaccctggaagatggtttggaagaggaagcagtggaaaagacacacagcacaacgtcccaagccatcagcgtggggatgcggatgaacgcggagttcattatgctgaaccacttcagccagcgctatgccaaggtccccctcttcagccccaacttcagcgagaaagtgggagttgcctttgaccacatgaaggtctgctttggagactttccaacaatgcccaagctgattcccccactgaaagccctgtttgctggcgacatcgaggagatggaggagcgcagggagaagcgggagctgcggcaggtgcgggcggccctcctgtccagggagctggcaggcggcctggaggatggggagcctcagcagaagcgggcccacacagaggagccacaggccaagaaggtcagagcccagtgaagatctgggagaccctgaactcagaaggctgtgtgtcttctgccccacgcacgcacccgtatctgccctccttgctggtagaagctgaagagcacggtcccccaggaggcagctcaggataggtggtatggagctgtgccgaggcttgggctcccacataagcactagtctatagatgcctcttaggactggtgcctggcacagccgcgggccaggaggctgccacacggaagcaagcagatgaactaatttcatttcaaggcagtttttaaagaagtcttggaaacagacggcggcacctttcctctaatccagcaaagtgattccctgcacaccagagacaagcagagtaacaggatcagtgggtctaagtgtccgagacttaacgaaaatagtatttcagctgcaataaagattgagtttgc

SEQ ID NO: 9377 - DNA, 3683 bp, Homo sapiens
  source 1..3683: mol_type = unassigned DNA
agctcggtgcacggcgcgctgattggctggatccgccatgcggagcggctaggtggtgcacgggaaacgcgggcgtaggtgaccggcggctttctcagttttggtggagacgggcgcatgtgggcgctttgctcgctgctgcggtccgcggccggacgcaccatgtcgcagggacgcaccatatcgcaggcacccgcccgccgcgagcggccgcgcaaggacccgctgcggcacctgcgcacgcgagagaagcgcggaccgtcggggtgctccggcggcccaaacaccgtgtacctgcaggtggtggcagcgggtagccgggactcgggcgccgcgctctacgtcttctccgagttcaaccggtatctcttcaactgtggagaaggcgttcagagactcatgcaggagcacaagttaaaggttgctcgcctggacaacatattcctgacacgaatgcactggtctaatgttgggggcttaagtggaatgattcttactttaaaggaaaccgggcttccaaagtgtgtactttctggacctccacaactggaaaaatacctcgaagcaatcaaaatattttctggtccattgaaaggaatagaactggctgtgcggccccactctgccccagaatacgaggatgaaaccatgacagtttaccagatccccatacacagtgttagccagagaagaggggtcagggactcttccctggtcgtagctttcatctgtaagcttcacttaaagagaggaaacttcttggtgctcaaagcaaaggagatgggcctcccagttgggacagctgccatcgctcccatcattgctgctgtcaaggacgggaaaagcatcactcatgaaggaagagagattttggctgaagagctgtgtactcctccagatcctggtgctgcttttgtggtggtagaatgtccagatgaaagcttcattcaacccatctgtgagaatgccacctttcagaggtaccaaggaaaggcagatgcccccgtggccttggtggttcacatggccccagcatctgtgcttgtggacagcaggtaccagcagtggatggagaggtttgggcctgacacccagcacttggtcctgaatgagaactgtgcctcagttcacaaccttcgcagccacaagattcaaacccagctcaacctcatccacccggacatcttccccctgctcaccagtttccgctgtaagaaggagggccccaccctcagtgtgcccatggttcagggtgaatgcctcctcaagtaccagctccgtcccaggagggagtggcagagggatgccattattacttgcaatcctgaggaattcatagttgaggcgctgcagcttcccaacttccagcagagcgtgcaggagtacaggaggagtgcgcaggacggcccagccccagcagagaaaagaagtcagtacccagaaatcatcttccttggaacagggtctgccatcccgatgaagattcgaaatgtcagtgccacacttgtcaacataagccccgacacgtctctgctactggactgtggtgagggcacatttgggcagctgtgccgtcattacggagaccaggtggacagggtcctgggcaccctggctgctgtgtttgtgtcccacctgcacgcagatcaccacacgggcttgccaagtatcttgctgcagagagaacgcgccttggcatctttgggaaagccgcttcaccctttgctggtggttgcccccaaccagctcaaagcctggctccagcagtaccacaaccagtgccaggaggtcctgcaccacatcagtatgattcctgccaaatgccttcaggaaggggctgagatctccagtcctgcagtggaaagattgatcagttcgctgttgcgaacatgtgatttggaagagtttcagacctgtctggtgcggcactgcaagcatgcgtttggctgtgcgctggtgcacacctctggctggaaagtggtctattccggggacaccatgccctgcgaggctctggtccggatggggaaagatgccaccctcctgatacatgaagccaccctggaagatggtttggaagaggaagcagtggaaaagacacacagcacaacgtcccaagccatcagcgtggggatgcggatgaacgcggagttcattatgctgaaccacttcagccagcgctatgccaaggtccccctcttcagccccaacttcagcgagaaagtgggagttgcctttgaccacatgaaggtctgctttggagactttccaacaatgcccaagctgattcccccactgaaagccctgtttgctggcgacatcgaggagatggaggagcgcagggagaagcgggagctgcggcaggtgcgggcggccctcctgtccagggagctggcaggcggcctggaggatggggagcctcagcagaagcgggcccacacagaggagccacaggccaagaaggtcagagcccagtgaagatctgggagaccctgaactcagaaggctgtgtgtcttctgccccacgcacgcacccgtatctgccctccttgctggtagaagctgaagagcacggtcccccaggaggcagctcaggataggtggtatggagctgtgccgaggcttgggctcccacataagcactagtctatagatgcctcttaggactggtgcctggcacagccgcgggccaggaggctgccacacggaagcaagcagatgaactaatttcatttcaaggcagtttttaaagaagtcttggaaacagacggcggcacctttcctctaatccagcaaagtgattccctgcacaccagagacaagcagagtaacaggatcagtgggtctaagtgtccgagacttaacgaaaatagtatttcagctgcaataaagattgagtttgcaattgtgagttcttttgcttcctcctgctgctgctacagagcagggtctgctgtgcaccaccttggagaaggctctctgtgctgtagtgtggcagctgcctggtacccgggtggcttggaagaagtcagctcccgtcgtagtgagcacctctggaacctgtcctcagagagccacccttattcgccaagtctttttgacaactcgagctgtgccagctcacagcagggcgtgctttctctatcaatcaatcaatcaatcaatcaaatcaatcagtgagagcctggctgggctggtgtcattggtcagggaaatgcaagtcttctggtggttctgggtaaaagtggagacaatagatttgctgtgttgttgcttccatactgagaggagtgaggatcactttgccctcgaaggttttgagaaatggcacacggggctggtttccattgtcctccttgcgggatttacagacgtggattagtgctcgacaaatggagagcattttccaaggaagtaagtaagtaaagtaagtaagtaagtaagtaagttgaatctagtatttattgtgtatattccctacccaggagaatgtaaaaagaagagctttaaaaactcaaaagacaagcaagcgagagatcagccagggacctggctttacacaggtggtgaccttcaggctccatcccggtgtgcatttgagattgacggccatgtccccgcaggtttattaaagcaagaacagatgccaagctcagggataataaatctattttaataacgtt

SEQ ID NO: 9378 - DNA, 858 bp, Homo sapiens
  source 1..858: mol_type = unassigned DNA
tccacatggtgttagccagagaagaggggtcagggactcttccctggtcgtagctttcatctgtaagcttcacttaaagagaggaaacttcttggtgctcaaagcaaaggagatgggcctcccagttgggacagctgccatcgctcccatcattgctgctgtcaaggacgggaaaagcatcactcatgaaggaagagaggttttgcagattttggctgaagagctgtgtactcctccagatcctggtgctgcttttgtggtggtagaatgtccagatgaaagcttcattcaacccatctgtgagaatgccacctttcagaggtaccaaggaaaggcagatgcccccgtggccttggtggttcacatggccccagcatctgtgcttgtggacagcaggtaccagcagtggatggagaggtttgggcctgacacccagcacttggtcctgaatgagaactgtgcctcagttcacaaccttcgcagccacaagattcaaacccagctcaacctcatccacccggacatcttccccctgctcaccagtttccgctgtaagaaggagggccccaccctcagtgtgcccatggttcagggtgaatgcctcctcaagtaccagctccgtcccaggagggagtggcagagggatgccattattacttgcaatcctgaggaattcatagttgaggcgctgcagcttcccaacttccagcagagcgtgcaggagtacaggaggagtgcgcaggacggcccagccccagcagagaaaagaagtcagtacccagaaatcatcttccttggaacagggtctgccatcccgatgaagattcgaaatgtcagtgccacacttgtcaacataag

SEQ ID NO: 9379 - DNA, 835 bp, Homo sapiens
  source 1..835: mol_type = unassigned DNA
attttggctgaagagctgtgtactcctccagatcctggtgctgcttttgtggtggtagaatgtccagatgaaagcttcattcaacccatctgtgagaatgccacctttcagaggtttgggcctgacacccagcacttggtcctgaatgagaactgtgcctcagttcacaaccttcgcagccacaagattcaaacccagctcaacctcatccacccggacatcttccccctgctcaccagtttccgctgtaagaaggagggccccaccctcagtgtgcccatggttcagggtgaatgcctcctcaagtaccagctccgtcccaggagggagtggcagagggatgccattattacttgcaatcctgaggaattcatagttgaggcgctgcagcttcccaacttccagcagagcgtgcaggagtacaggaggagtgcgcaggacggcccagccccagcagagaaaagaagtcagtacccagaaatcatcttccttggaacagggtctgccatcccgatgaagattcgaaatgtcagtgccacacttgtcaacataagccccgacacgtctctgctactggactgtggtgagggcacatttgggcagctgtgccgtcattacggagaccaggtggacagggtcctgggcaccctggctgctgtgtttgtgtcccacctgcacgcagatcaccacacgggcttgccaagtatcttgctgcagagagaacgcgccttggcatctttgggaaagccgcttcaccctttgctggtggttgcccccaaccagctcaaagcctggctccagcagtaccacaaccagtgccaggaggtcctgcacc

SEQ ID NO: 9380 - DNA, 1023 bp, Homo sapiens
  source 1..1023: mol_type = unassigned DNA
tgaccgtgagcctgggtgaaagggagaggaagtggagggcgctggccggccgtggggcaatgcaacggcctcccagcacagggctataagaggagccgggcgggcacggaggggcagagaccccggagccccagccccaccatgaccctcggccgccgactcgcgtgtcttttcctcgcctgtgtcctgccggccttgctgctggggggcaccgcgctggcctcggagattgtggggggccggcgagcgcggccccacgcgtggcccttcatggtgtccctgcagctgcgcggaggccacttctgcggcgccaccctgattgcgcccaacttcgtcatgtcggccgcgcactgcgtggcgaatgtaaacgtccgcgcggtgcgggtggtcctgggagcccataacctctcgcggcgggagcccacccggcaggtgttcgccgtgcagcgcatcttcgaaaacggctacgaccccgtaaacttgctcaacgacatcgtgattctccagctcaacgggtcggccaccatcaacgccaacgtgcaggtggcccagctgccggctcagggacgccgcctgggcaacggggtgcagtgcctggccatgggctggggccttctgggcaggaaccgtgggatcgccagcgtcctgcaggagctcaacgtgacggtggtgacgtccctctgccgtcgcagcaacgtctgcactctcgtgaggggccggcaggccggcgtctgtttcggggactccggcagccccttggtctgcaacgggctaatccacggaattgcctccttcgtccggggaggctgcgcctcagggctctaccccgatgcctttgccccggtggcacagtttgtaaactggatcgactctatcatccaacgctccgaggacaacccctgtccccacccccgggacccggacccggccagcaggacccactgagaagggctgcccgggtcacctcagctgcccacacccacactctccagcatctggcacaataaacattctctgttttgt

SEQ ID NO: 9381 - DNA, 920 bp, Homo sapiens
  source 1..920: mol_type = unassigned DNA
gcacggaggggcagagaccccggagccccagccccaccatgaccctcggccgccgactcgcgtgtcttttcctcgcctgtgtcctgccggccttgctgctggggggcaccgcgctggcctcggagattgtggggggccggcgagcgcggccccacgcgtggcccttcatggtgtccctgcagctgcgcggaggccacttctgcggcgccaccctgattgcgcccaacttcgtcatgtcggccgcgcactgcgtggcgaatgtaaacgtccgcgcggtgcgggtggtcctgggagcccataacctctcgcggcgggagcccacccggcaggtgttcgccgtgcagcgcatcttcgaaaacggctacgaccccgtaaacttgctcaacgacatcgtgattctccagctcaacgggtcggccaccatcaacgccaacgtgcaggtggcccagctgccggctcagggacgccgcctgggcaacggggtgcagtgcctggccatgggctggggccttctgggcaggaaccgtgggatcgccagcgtcctgcaggagctcaacgtgacggtggtgacgtccctctgccgtcgcagcaacgtctgcactctcgtgaggggccggcaggccggcgtctgtttcggggactccggcagccccttggtctgcaacgggctaatccacggaattgcctccttcgtccggggaggctgcgcctcagggctctaccccgatgcctttgccccggtggcacagtttgtaaactggatcgactctatcatccaacgctccgaggacaacccctgtccccacccccgggacccggacccggccagcaggacccactgagaagggctgcccgggtcacctcagctgcccacacccacactctccagcatctggcacaataaacattctctgttttgt

SEQ ID NO: 9382 - DNA, 3938 bp, Homo sapiens
  source 1..3938: mol_type = unassigned DNA
gggaggggagccagcagggaggaggaggccagggcccgccccacagccactctcgcgcctccgaacagccacaggggcaaagccctgtcacccccaggatccggtcatcagggaaagaggacagggagaccagaagagggccagctgggacgagggggcggacgcccaggaggcaacttctgagacgcagctcctgagaggggcagggaccaggcgcgggaggccagagggggcacagagaacaaaccccctcagaagtgaagaggagagcggaaggaaccgagaggggacggacaggagctgaggaggaaagaggaggggagaggggtcaggccaggcagccaaggagaagacgtgtggccgggggctatcagaaggaaactgggacggacgggccgggctcgggctgtcctgtggagcagcagcatccccggggccggcagaggcgccagtggctgggcgggatgagtctctgagggccactgtggagcgccccgccatggccccccgcaccctctggagctgctacctctgctgcctgctgacggcagctgcaggggccgccagctaccctcctcgaggtttcagcctctacacaggttccagtggggccctcagccccggggggccccaggcccagattgccccccggccagccagccgccacaggaactggtgtgcctacgtggtgacccggacagtgagctgtgtccttgaggatggagtggagacatatgtcaagtaccagccttgtgcctggggccagccccagtgtccccaaagcatcatgtaccgccgcttcctccgccctcgctaccgtgtggcctacaagacagtgaccgacatggagtggaggtgctgtcagggttatgggggcgatgactgtgctgagagtcccgctccagcgctggggcctgcgtcttccacaccacggcccctggcccagcctgcccgccccaacctctctggctccagtgcaggcagccccctcagtggactggggggagaaggtcctggggagtcagagaaggtgcagcagctggaggaacaggtgcagagcctgaccaaggagctgcaaggcctgcggggcgtcctgcaaggactgagcgggcgcctggcagaggatgtgcagagggctgtggagacggccttcaacgggaggcagcagccagctgacgcggctgcccgccctggggtgcatgaaaccctcaatgagatccagcaccagctgcagctcctggacacccgcgtctccacccacgaccaggagctgggtcacctcaacaaccatcatggcggcagcagcagcagtgggggcagcagggccccagccccagcctcagcccctccgggccccagtgaggagctgctgcggcagctggagcagcggttgcaggagtcctgctccgtgtgcctggccgggctagatggcttccgccggcagcagcaggaggacagggagcggctgcgagcgatggagaagctgctggcctcggtggaggagcggcaacggcacctcgcagggctggcggtgggccgcaggccccctcaggaatgctgctctccagagctgggccggcgactggcagagctggagcgcaggctggatgtcgtggccggctcagtgacagtgctgagtgggcggcgaggcacagagctgggaggagccgcggggcagggaggccaccccccaggctacaccagcttggcctcccgcctgtctcgcctggaggaccgcttcaactccaccctgggcccttcggaggagcaggaggagagctggcctggggctcctggggggctgagccactggctgcctgctgcccggggccgactagagcagttgggggggctgctggccaatgtgagcggggagctgggggggcggttggatctgttggaggagcaggtggcaggggccatgcaggcatgcgggcagctctgctctggggcccctggggagcaggactctcaagtcagcgagatcctcagtgccttggagcgcagggtgctggacagtgaggggcagctgcggctggtgggctccggcctgcacacggtggaagcagcgggggaggcccggcaggccacgctggagggattacaagaggttgtgggccggctccaggatcgtgtggatgcccaggatgagacagctgcagagttcacactacggctgaatctcactgcggcccggctaggccaactggaggggctgctgcaggcccatggggatgagggctgtggggcctgtggcggagtccaagaggaactaggccgccttcgggatggtgtggagcgctgctcctgccccctgttgcctcctcggggtcctggggctggtccaggtgttgggggcccaagccgtgggcccctggacggcttcagcgtgtttgggggcagctcaggctcagccctgcaggccctgcaaggagagctctctgaggttattctcagcttcagctccctcaatgactcactgaatgagctccagaccactgtggagggccagggcgctgatctggctgacctgggggcaaccaaggaccgtatcatttctgagattaacaggctgcagcaggaggccacagagcatgctacagagagtgaagagcgcttccgaggcctagaggagggacaagcacaggccggccagtgccccagcttagaggggcgattgggccgtcttgagggtgtctgtgaacggttggacactgtggctgggggactgcagggcctgcgcgagggcctttccagacacgtggctgggctctgggctgggctccgggaaaccaacaccaccagccagatgcaggcagccctgctggagaagctggtcgggggacaggcgggcctgggcaggcggctgggtgcccttaacagctccctgcagctcctggaggaccgtctgcaccagctcagcctgaaggacctcactgggcctgcaggagaggctgggcccccagggcctcctgggctgcagggacccccaggccctgctggacctccaggatcaccaggcaaggacgggcaagagggccccatcgggccaccaggtcctcaaggtgaacagggagtggagggggcaccagcagcccctgtgccccaagtggcattttcagctgctctgagtttgccccggtctgaaccaggcacggtccccttcgacagagtcctgctcaatgatggaggctattatgatccagagacaggcgtgttcacagcgccactggctggacgctacttgctgagcgcggtgctgactgggcaccggcacgagaaagtggaggccgtgctgtcccgctccaaccagggcgtggcccgcgtagactccggtggctacgagcctgagggcctggagaataagccggtggccgagagccagcccagcccgggcaccctgggcgtcttcagcctcatcctgccgctgcaggccggggacacggtctgcgtcgacctggtcatggggcagctggcgcactcggaggagccgctcaccatcttcagcggggccctgctctatggggacccagagcttgaacacgcgtagactggggtcccgcccgacgtgtctacgtcggctgaagagacagcgggggcggcgggctcctggggtctcgcctgagacggggcacctagccctgggcgagcgccgcacccgggcccgcagcggcaccgcgcccagagcggcctctccccacgcccggggcgcgccggctcagggaggctcggggccgcccatgcagacttttggcctggcgcgatcccccaagaacccctccagggccggcctgcggaggagccgatcctcgcaccctccgctccctccactggccctccaggtcgattccctgggctccaggctcccccgcgcgggcgccgcccaccgccatactaaacgatcgaggaataaagacacttggtttttctaaaaaaaa

SEQ ID NO: 9383 - DNA, 2389 bp, Homo sapiens
  source 1..2389: mol_type = unassigned DNA
gtcaggccaggcagccaaggagaagacgtgtggccgggggctatcagaaggaaactgggacggacgggccgggctcgggctgtcctgtggagcagcagcatccccggggccggcagaggcgccagtggctgggcgggatgagtctctgagggccactgtggagcgccccgccatggccccccgcaccctctggagctgctacctctgctgcctgctgacggcagctgcaggggccgccagctaccctcctcgaggtttcagcctctacacaggttccagtggggccctcagccccggggggccccaggcccagattgccccccggccagccagccgccacaggaactggtgtgcctacgtggtgacccggacagtgagctgtgtccttgaggatggagtggagacatatgtcaagtaccagccttgtgcctggggccagccccagtgtccccaaagcatcatgtaccgccgcttcctccgccctcgctaccgtgtggcctacaagacagtgaccgacatggagtggaggtgctgtcagggttatgggggcgatgactgtgctgagagtcccgctccagcgctggggcctgcgtcttccacaccacggcccctggcccagcctgcccgccccaacctctctggctccagtgcaggcagccccctcagtggactggggggagaaggtcctggggagtcagagaaggtgcagcagctggaggaacaggtgcagagcctgaccaaggagctgcaaggcctgcggggcgtcctgcaaggactgagcgggcgcctggcagaggatgtgcagagggctgtggagacggccttcaacgggaggcagcagccagctgacgcggctgcccgccctggggtgcatgaaaccctcaatgagatccagcaccagctgcagctcctggacacccgcgtctccacccacgaccaggagctgggtcacctcaacaaccatcatggctgacctgggggcaaccaaggaccgtatcatttctgagattaacaggctgcagcaggaggccacagagcatgctacagagagtgaagagcgcttccgaggcctagaggagggacaagcacaggccggccagtgccccagcttagaggggcgattgggccgtcttgagggtgtctgtgaacggttggacactgtggctgggggactgcagggcctgcgcgagggcctttccagacacgtggctgggctctgggctgggctccgggaaaccaacaccaccagccagatgcaggcagccctgctggagaagctggtcgggggacaggcgggcctgggcaggcggctgggtgcccttaacagctccctgcagctcctggaggaccgtctgcaccagctcagcctgaaggacctcactggtgaggggacaaaagggcctgcaggagaggctgggcccccagggcctcctgggctgcagggacccccaggccctgctggacctccaggatcaccaggcaaggacgggcaagagggccccatcgggccaccaggtcctcaaggtgaacagggagtggagggggcaccagcagcccctgtgccccaagtggcattttcagctgctctgagtttgccccggtctgaaccaggcacggtccccttcgacagagtcctgctcaatgatggaggctattatgatccagagacaggcgtgttcacagcgccactggctggacgctacttgctgagcgcggtgctgactgggcaccggcacgagaaagtggaggccgtgctgtcccgctccaaccagggcgtggcccgcgtagactccggtggctacgagcctgagggcctggagaataagccggtggccgagagccagcccagcccgggcaccctgggcgtcttcagcctcatcctgccgctgcaggccggggacacggtctgcgtcgacctggtcatggggcagctggcgcactcggaggagccgctcaccatcttcagcggggccctgctctatggggacccagagcttgaacacgcgtagactggggtcccgcccgacgtgtctacgtcggctgaagagacagcgggggcggcgggctcctggggtctcgcctgagacggggcacctagccctgggcgagcgccgcacccgggcccgcagcggcaccgcgcccagagcggcctctccccacgcccggggcgcgccggctcagggaggctcggggccgcccatgcagacttttggcctggcgcgatcccccaagaacccctccagggccggcctgcggaggagccgatcctcgcaccctccgctccctccactggccctccaggtcgattccctgggctccaggctcccccgcgcgggcgccgcccaccgccatactaaacgatcgaggaataaagacacttggtttttct

SEQ ID NO: 9384 - DNA, 1473 bp, Homo sapiens
  source 1..1473: mol_type = unassigned DNA
aagcccggaggtgggaacatcgcagtgttcagagaacatcgtgtgttcaaagaaccacgtgggttctttagggacaagaaggctgagatgggtagtggtggcaggagtgctcaggtgtccactgggcagagggcttggctgttaccctgcagatttttgaaaaatacaatgtctaatggttatgaagaccacatggccgaagactgcaggggtgacatcgggagaacgaatttgatcgtcaactacctccctcagaacatgacccaggatgagttacgaagcctgttcagcagcattggtgaagttgaatctgcaaaacttattcgggataaagtagcaggacacagcttgggctatggctttgtgaactacgtgaccgcgaaggatgcagagagagcgatcaacacgctgaacggcttgaggctccagtcaaaaaccattaaggtgtcgtatgctcgcccgagctcagaggtgatcaaagacgccaacttgtacatcagcgggctcccgcggaccatgacccagaaggacgtagaagacatgttctctcggtttgggcggatcatcaactcgcgggtcctcgtggatcagactacaggtttgtccagaggggttgcgtttatccggtttgacaaacggtcggaggcagaagaggcaattaccagtttcaatggtcataaacccccaggttcctctgagcccatcacagtgaagtttgcagccaaccccaaccagaacaaaaacgtggcactcctctcgcagctgtaccactcgccagcgcgacggttcggaggccccgttcaccaccaggcgcagagattcaggttctcccccatgggcgtcgatcacatgagcgggctctctggcgtcaacgtgccaggaaacgcctcctccggctggtgcattttcatctacaacctggggcaggatgccgacgaggggatcctctggcagatgtttgggccgtttggtgccgtcaccaatgtgaaagtgatccgcgacttcaacaccaacaagtgcaaagggtttggctttgtgaccatgacaaactatgaagaagccgcgatggccatagccagcctgaacggctaccgcctgggggacaaaatcttacaggtttccttcaaaaccaacaagtcccacaaataactcgctcatgcttttttttgtacggaatagataattaagagtgaaggagttgaaacttttcttgttagtgtacaactcattttgcgccaattttcacaagtgtttgtctttgtctgaatgagaagtgagaaggtttttatactctgggatgcaaccgacatgttcaaatgtttgaaatcccacaatgttagaccaatcttaagtttcgtaagttatttcctttaagatatatattaaacagaaatctaagtagaactgcattgactaaccagtccctctggatggtggtgaacctgaagcatgctttaacctctaagactgtct

SEQ ID NO: 9385 - DNA, 6057 bp, Homo sapiens
  source 1..6057: mol_type = unassigned DNA
ggtcgtgcgcgctgaggaggagccgctgccgccgtcgccgtcgccgccaccgccgccaccgctaccgaggccgagcggagccgttagcgccgcgccgccgccgcctcccgcccgccccggagcagccccgggcccgcccgcccgcatccagatttttgaaaaatacaatgtctaatggttatgaagaccacatggccgaagactgcaggggtgacatcgggagaacgaatttgatcgtcaactacctccctcagaacatgacccaggatgagttacgaagcctgttcagcagcattggtgaagttgaatctgcaaaacttattcgggataaagtagcaggacacagcttgggctatggctttgtgaactacgtgaccgcgaaggatgcagagagagcgatcaacacgctgaacggcttgaggctccagtcaaaaaccattaaggtgtcgtatgctcgcccgagctcagaggtgatcaaagacgccaacttgtacatcagcgggctcccgcggaccatgacccagaaggacgtagaagacatgttctctcggtttgggcggatcatcaactcgcgggtcctcgtggatcagactacaggtttgtccagaggggttgcgtttatccggtttgacaaacggtcggaggcagaagaggcaattaccagtttcaatggtcataaacccccaggttcctctgagcccatcacagtgaagtttgcagccaaccccaaccagaacaaaaacgtggcactcctctcgcagctgtaccactcgccagcgcgacggttcggaggccccgttcaccaccaggcgcagagattcaggttctcccccatgggcgtcgatcacatgagcgggctctctggcgtcaacgtgccaggaaacgcctcctccggctggtgcattttcatctacaacctggggcaggatgccgacgaggggatcctctggcagatgtttgggccgtttggtgccgtcaccaatgtgaaagtgatccgcgacttcaacaccaacaagtgcaaagggtttggctttgtgaccatgacaaactatgaagaagccgcgatggccatagccagcctgaacggctaccgcctgggggacaaaatcttacaggtttccttcaaaaccaacaagtcccacaaataactcgctcatgcttttttttgtacggaatagataattaagagtgaaggagttgaaacttttcttgttagtgtacaactcattttgcgccaattttcacaagtgtttgtctttgtctgaatgagaagtgagaaggtttttatactctgggatgcaaccgacatgttcaaatgtttgaaatcccacaatgttagaccaatcttaagtttcgtaagttatttcctttaagatatatattaaacagaaatctaagtagaactgcattgactaaccagtccctctggatggtggtgaacctgaagcatgctttaacctctaagactgtctaacacgcgtttcattcaatgtctccacagactgggtagcaaaaaaatcaccttttagttttagtttttaatctaaagatgttagacagatgctgagtgtgcgttttctcaaccgcttcaacattgtaagcgatgtatgctttggttgacaggaagttccttttccaggcaggtcccgttgccacctcctgctcactcagtcccgggctctgccgagtggtcctgggaatggcggcgggcccgtccagcgtgggccaccactggggccgggggccacgggctgcatgctgggcgggccctccagagaaggacacaaacgtgtttcgtaagcccaggcaccaatgggaatggaccaaagagtttcagggaaactccagtatattccagagtcagatctaagctccaggcacgcctgaagatgtgttgctactctgacatcccgagtttctgtccacacattgcatgcacagcgccccacacattggatactgttgttcacgataatttctcccgttttccagagcatttaacatagcttggaggcgtaaaatggctctgtattttaataacacagaaacatttgagcattgtatttctcgcatcccttctcgtgagcgcttagacctttttctattttagtcggattttgttttggaattttgcttttgtatgaacactcagcagaaaagtacttacttcttgccagttatctattaaccaaaacctttgatttgtagttttaaagattaaccctcaaagttctcttcataactgccttgacattttgggttgttctgttctgttaattttcttttgcttttttgtgttttttgtttgtttttacttttgcatttaagaccattaaatttgattttgttttgctcgaattttgttttgttttttattttaccttttctttctttttggctagggaaggtgcaggtggcccagcattcagggaggagtcgtaagatcttaagaaaccaatccttgcctcaagcaaaagcatttctgaatctgtgacgcaagaatgtgcagttacaggctggtggcttttaaaccaggagcccggaggaagggtgaaagagaaagcctgtgaaataggcagggccagatcacccaaaactcctcaggactgggatctggcgtttataaataactagtttacagagagaatcacaaacaggataacttagtaccagcagtttttaaccttgacgtgagactaaaacgtgaccgtaggctgttttttagttattgctctcatgagatgatggctgtatttatctgtttatttatacctatttatgtatttatttattgaagtgtgaaattgagcaataggcaggcaccaccgtccccagagcaggtcagcgtctcgagaggcccctggacaattgaggatgcccatcccctcccctttccctgatcttttactgaggggctgtgtgcgcgatccttgcaaattgatgatgttgccatccgtacccaggctgtgtctcataaaagtcggcctggtgccagagaggacctcctttctcccacagaatcccagatcctcaggaaaagccaaaaccgaggcccattgcccggattcgacacaaaagagggtccctgctctgttgcccgagagcagtctgcatcctgggaccagaatgctttcctggaaaaagaagcctttcaggtttccctgggccagcatcttctgatggaaggtgggagccaacacccttctgatggaaggtgggagccaacacccttctgatggaaggtgggagccaacacccttctgatggaaggtgggagccaacacccttctgatggaaggtgggagccaacacccttctgatggaaggcgggattcccgcttctgaaactccccctggagtctcactcccacacatgcccatagctagcattcaacagagaactctgtcttaagcttcaactgtgaaaatgatgacgggcttgtagcacctcagcttctttcctcgcccccttttatctgaatcctatcaattattctgatgctgggacaggtgagaagaaactgtgaagtatatgagcctttgaaagttccctgaagtttctcagttcaggaacattctcattgtatgtggtctccgctgtttgaacagccttctagctaaaaaattccaaagcctttatttgggagtcttagcttgcaagcttgtggaaggatttagcttaacaactgtcactcctgaaaagcaatctctgttccatcaaggttctagttgctggccctgtgtcctcaaagttcattacatcttatcaaggcctgtttgcaaaggggagatcccttttcttaaaaaaggctcaacccaaaagaaaccatttcttaaaaaattttacatagatcagttgtatttctatttagcaaaaatgagtgctctgcttttatttgggaatttcgatgaaaaagcgttcagagtagataatgttcatttatcaaaaatctggtttgggaaataccaaagaggctttgattgaattcccttttgacccgtgtgtaacttcctctggtagttagaccccaggcagctccgaatttgtgaacctgcttcctgatgaattctcccttgttcccccttggctctgccattatttcgttttcagtgtaatttgccaagccgcagttttctgtgctggctgtgcctctagtcgcagctctgtgactgattccctcccgggtgctgagtcccctccccggccaccatcctgcgtgaatatcctgaaattcatgggcttcctcgggggcccgcccgcaggtggtgctgggtgggttccgccaccttctcctggaaggtgagccttttcctggccaagggcagctgccttaacctctgagagtctgcgcttggccttagtcctggagacccagcctccagggactgaaccgtgctgctgttgggagccaagaccggccctttggagccggcagcccaggggtccctgctggatcagagaaatagaagcacccgaagacggttagtggcaattccttgacccggtttgcttccaaatgaaggccatttgtccaccaggcattgaaaagacatgacttacccagtccggcatcggacttgaaaaatcgaaattgacatcactcagctgttacatttcacatccgattcagcccccttttatttccatgtgcttttcgcagccttcctgtgttggatgaaagagaataagaattcagctgacaggaggcctctatcctgtccctccaccccaccctccacctcaatcccctcccatcttccccagacctacctcacctactaggacctgaggcagctccttagcagagacccctggggtttagctgactctgggggtcaggggttcctgtccccaaacttcgcaagacagccctgaagtcacaagtgctttcttttaagtggcattggcaattggcgtgtaatgatggcagtagaatctgaatctcggatcccaggcagggttcacatttccaaacctttttgatttcccctgacctctaatggctggatcctatttttctacaacctttcagtgacatcgttcaggtttctttcttggccatttaaaaaaacaaattttttttttctcacttgtaagtcaccgccagtacctaagttaggctaacggagactttgacaggactggatttttcttccaccagaagagaagccttttccgttggtttggggccacctctttgaccatgaccatgtgatgttccgtttacagtgacttgctttgggggaggggaggctctcttaaccgattcccatgttgtacagtagatggttagaccttttgtatattagtgtgttttaagttattgatttgttttatataaaataatttatttttcaggtgccatttttcattttaactttgtttttacatgggtttgttttcaataaagtctgacactggtgtccaaaagtcaacaataaaatgaatcccattgtgttcttttgaagatgcctatgtaacttttaagctttttaaattattttcagaaaaaaaaaaagaaaagcccttatcagttttccatcagcccattgcctttttattttttttttttaatccttgtgaataaatgttctttagtgttttaggaggaaaaagcaaacctagattttgataacccagaagacttcagattaataaagaagctttgaaagaagaccatttttcaaaattttagtgaagtgtgaatattttttgtcaatggctttctcaaagagaatgaaacttttgcaccattttcagagtttttatagagatgccaaattgatatatttacatgtaatggaaacatgaaaaagttttattaaacaattgttcatagctgtgtagacattttaattcagtttccaaagctctcaaaaaatcgtatttttgaagtacggagtgatgcggtttggggcgtggcttacagttccaacgactcaattgtcccgatactcagttctttctacaggtatcaggttcgtgttaaacgctgtatgttaactatgactggaattctgtgatattttggtaataaatgaagtgggatcattgcg

SEQ ID NO: 9386 - DNA, 3760 bp, Homo sapiens
  source 1..3760: mol_type = unassigned DNA
agtccgaactctgggcgggaacactggtgggggcggcggaggttgtgcccgcgaagttcctagagctcagcccgttgcggcgggagtagagagaattgggcgcctcgggaggtggcaccgcccctcccgtgggcacaagcaggttgggggcggcgggagccgagcggggacagtcgcgcctggcagcgtgcacgggcgtggacgtgcccgggtgcggccgcgtgtagcgcaagaaggaaactgttgagacgcaggtaattgctgccatggaaacacaactgtctaatgggccaacttgcaataacacagccaatggtccaaccaccataaacaacaactgttcgtcaccagttgactctgggaacacagaagacagcaagaccaacttaatagtcaactaccttcctcagaacatgacacaggaggaactaaagagtctctttgggagcattggtgaaatagagtcctgtaagcttgtaagagacaaaataacagggcagagcttgggatatggctttgtgaactacattgaccccaaggatgcagagaaagctatcaacaccctgaatggattgagacttcaaaccaaaacaataaaagtttcctatgctcgcccaagttcagcttctatcagagatgcaaatttatatgtcagcggacttccaaaaacaatgacccagaaggagttggaacagcttttttcacaatatggacgcattattacttctcgtattcttgtcgaccaggtcactggcatatcaaggggtgtagggtttattcgatttgacaagcgaattgaggcagaagaagctatcaaaggcctaaatggccagaaacctcccggtgccacggagccaatcactgtaaagtttgctaataacccaagccaaaaaaccaatcaggccatcctttcccagctgtaccagtctccaaacagaaggtatccaggaccgctagctcagcaggcacagcgttttaggttttctccaatgaccattgacggaatgaccagtttggctggaattaatatccctgggcaccctggaacagggtggtgtatatttgtgtacaacctggctcctgacgcagatgagagtatcctgtggcaaatgtttgggccttttggagctgtcaccaatgtgaaggtcatccgtgactttaacaccaataaatgcaaaggttttggatttgtgactatgacaaactatgatgaggctgccatggcgatagctagcctcaatggataccgtctgggagacagagtactgcaggtctcctttaagacaaacaaaacgcacaaagcctaatgagctcttgtcctcagtccatttatatatgaaaactatacaacaaaggcaagttaagagaaactttatacattagtaaatgtctttgtaagtcagtgttgagatggggataaaatgactacttagcatcctaagaaatatgtgagattttttattgctagtatttgaattaaaacttcttaaatatcttttatgtttgaatatggacaagaggtacagggtttttacctgtcacattgcattctattgccttctttgaagaaggtggaccttttaaagtgtttcagctaagggaagacatttcttttctttttacataactgccttgaacctgtgagtaaatattgaggctttgtgttgtaattcttcagttggttgtgtcttttttttcccccctttttttcctttttctgattagctttgtgtttggtttacatttaaagcattgctgttatgtctgtttaagaaaagtattttgaagtttacatttttatttatgaagtttaaaacagtatttattttgtaattatgatttgggttggggaagggggggctacattataaacgcttattgtaagaatactggagaacttttcgtaaagcagtaccttgccaaagagataagagcctctttgatgtgggtttaaaaaaagcatctatttttataaaaaagaaaatttggagaaactttttactggtcctggaacaaatattttgacttgaatactttgagaaatctcttcatatgacacctagtgagcttttaaaatttaccaggaaatttgcagcggttggaaaatttagaaagatttatggtgtagaaaatacttttgagatctttgtatgaaaggagtagaatcaatggggggaaacactgctggtttcatttttgtaatcaccagtggagcgtctgatcatcctggttattatgtgataggtggctcacattgatttgtgattttgaaacaaataaaaaaaatttacaaaagaatatataagagcaggcaagaaatttaaattaccgagagatgggggaaaaaatctgttcttcctaaagaaatcccttcagatagagctcatggtgtttagtgatgtacttgcagtattgtttgaagaattgttttgtcttaaggaaaaaagacgttgcacatgatttgtactgcagcaaatcagcaaaagtgatctgagttggatatatttgaaggtattttgaaagttacgttcaaggctaacacctgagctttgtgtaatgtaaataagaccttgtgtttatgaacctttcagctaatttaattttttttcccttacatgccaagtgatgttcaggttttgaatgtttttgtatcagttttttcctttgtaaatggcattaacattgttacttgaggtcttgcttaatcacttttgttgtcctgaggacttgaatttacagtgcatcagatttgttgcaaattttgtctgtagatagtctagcttcagctgtttatggtgatgctacattttggtttataaatatgtttgtggtataaaaaaatgagtataaccataggttttgaacaaatttccttacatttttcatacaaaaatcataaatatctgtatgctattgaaatttaactttgtatgatgcttaaaaaccactatttggggaaataataaaataagtctttaccatgtatgaaagaaattttaaaaaatacaaaatattttctgattagcatctagcttataataaattttcaaaaaagctgaaggcaaaaatgccttcatcaggatgcactgagaactatatagttacgtcctgctttttgtataaactgagatgctcacatgcttccccttagaacaggcaatgtgctatgcataacatagttgtacattatctttgcggttgctttgagttttattttttattatttaaaattgtagttataaaatttttcagtatagtacagtacatatactgtgaggcgcgtgctaaagtgaataagcgagttttcatgctgacccactcaatgctattcagaaatcaattggcttagcactttctcatatccttaggtgcatttagattgccagagttaaccttctgcgtttaaaaaaagaaaaacactaaaaaataaaatacatgtatatacttaaaaaaaaataataaggtttccctcaagggaaaacagcagctacatgcttctttcctatactactgtagcaaaccaaggcattgatgagagggcatgcaaattgtgcttcactttacagtgttttatcagagcacttaataaaatgtaaggctggtatttatttgaagttgtacagtatgacttaattcacatctgttggaatagaaaatatattctgttgagtatttaagaggctgtacatgttttcttttgtgtttggattctttgtactttttcatgttcagtacatcaataaacaaagttgaagggaaa

SEQ ID NO: 9387 - DNA, 1720 bp, Homo sapiens
  source 1..1720: mol_type = unassigned DNA
attgcagacggcaactccaaactaacatggcagtcagactgtgtgatgtggcttctctgcttagaagtggttcgtgggcagcagagccttggaccggggtaattgctgccatggaaacacaactgtctaatgggccaacttgcaataacacagccaatggtccaaccaccataaacaacaactgttcgtcaccagttgactctgggaacacagaagacagcaagaccaacttaatagtcaactaccttcctcagaacatgacacaggaggaactaaagagtctctttgggagcattggtgaaatagagtcctgtaagcttgtaagagacaaaataacagggcagagcttgggatatggctttgtgaactacattgaccccaaggatgcagagaaagctatcaacaccctgaatggattgagacttcaaaccaaaacaataaaagtttcctatgctcgcccaagttcagcttctatcagagatgcaaatttatatgtcagcggacttccaaaaacaatgacccagaaggagttggaacagcttttttcacaatatggacgcattattacttctcgtattcttgtcgaccaggtcactggcatatcaaggggtgtagggtttattcgatttgacaagcgaattgaggcagaagaagctatcaaaggcctaaatggccagaaacctcccggtgccacggagccaatcactgtaaagtttgctaataacccaagccaaaaaaccaatcaggccatcctttcccagctgtaccagtctccaaacagaaggtatccaggaccgctagctcagcaggcacagcgttttaggttggacaatctgctcaatatggcttatggagtaaagaggttttctccaatgaccattgacggaatgaccagtttggctggaattaatatccctgggcaccctggaacagggtggtgtatatttgtgtacaacctggctcctgacgcagatgagagtatcctgtggcaaatgtttgggccttttggagctgtcaccaatgtgaaggtcatccgtgactttaacaccaataaatgcaaaggttttggatttgtgactatgacaaactatgatgaggctgccatggcgatagctagcctcaatggataccgtctgggagacagagtactgcaggtctcctttaagacaaacaaaacgcacaaagcctaatgagctcttgtcctcagtccatttatatatgaaaactatacaacaaaggcaagttaagagaaactttatacattagtaaatgtctttgtaagtcagtgttgagatggggataaaatgactacttagcatcctaagaaatatgtgagattttttattgctagtatttgaattaaaacttcttaaatatcttttatgtttgaatatggacaagaggtacagggtttttacctgtcacattgcattctattgccttctttgaagaaggtggaccttttaaagtgtttcagctaagggaagacatttcttttctttttacataactgccttgaacctgtgagtaaatattgaggctttgtgttgtaattcttcagttggttgtgtcttttttttcccccctttttttcctttttctgattagctttgtgtttggtttacatttaaagcattgctgttatgtctgtttaagaaaagtattttgaagtttacatttttatttatgaagtttaaaacagtatttattttgtaattat

SEQ ID NO: 9388 - DNA, 3760 bp, Homo sapiens
  source 1..3760: mol_type = unassigned DNA
agtccgaactctgggcgggaacactggtgggggcggcggaggttgtgcccgcgaagttcctagagctcagcccgttgcggcgggagtagagagaattgggcgcctcgggaggtggcaccgcccctcccgtgggcacaagcaggttgggggcggcgggagccgagcggggacagtcgcgcctggcagcgtgcacgggcgtggacgtgcccgggtgcggccgcgtgtagcgcaagaaggaaactgttgagacgcagcaggtaattgctgccatggaaacacaactgtctaatgggccaacttgcaataacacagccaatggtccaaccaccataaacaacaactgttcgtcaccagttgactctgggaacacagaagacagcaagaccaacttaatagtcaactaccttcctcagaacatgacacaggaggaactaaagagtctctttgggagcattggtgaaatagagtcctgtaagcttgtaagagacaaaataacagggcagagcttgggatatggctttgtgaactacattgaccccaaggatgcagagaaagctatcaacaccctgaatggattgagacttcaaaccaaaacaataaaagtttcctatgctcgcccaagttcagcttctatcagagatgcaaatttatatgtcagcggacttccaaaaacaatgacccagaaggagttggaacagcttttttcacaatatggacgcattattacttctcgtattcttgtcgaccaggtcactggcatatcaaggggtgtagggtttattcgatttgacaagcgaattgaggcagaagaagctatcaaaggcctaaatggccagaaacctcccggtgccacggagccaatcactgtaaagtttgctaataacccaagccaaaaaaccaatcaggccatcctttcccagctgtaccagtctccaaacagaaggtatccaggaccgctagctcagcaggcacagcgttttaggttttctccaatgaccattgacggaatgaccagtttggctggaattaatatccctgggcaccctggaacagggtggtgtatatttgtgtacaacctggctcctgacgcagatgagagtatcctgtggcaaatgtttgggccttttggagctgtcaccaatgtgaaggtcatccgtgactttaacaccaataaatgcaaaggttttggatttgtgactatgacaaactatgatgaggctgccatggcgatagctagcctcaatggataccgtctgggagacagagtactgcaggtctcctttaagacaaacaaaacgcacaaagcctaatgagctcttgtcctcagtccatttatatatgaaaactatacaacaaaggcaagttaagagaaactttatacattagtaaatgtctttgtaagtcagtgttgagatggggataaaatgactacttagcatcctaagaaatatgtgagattttttattgctagtatttgaattaaaacttcttaaatatcttttatgtttgaatatggacaagaggtacagggtttttacctgtcacattgcattctattgccttctttgaagaaggtggaccttttaaagtgtttcagctaagggaagacatttcttttctttttacataactgccttgaacctgtgagtaaatattgaggctttgtgttgtaattcttcagttggttgtgtcttttttttcccccctttttttcctttttctgattagctttgtgtttggtttacatttaaagcattgctgttatgtctgtttaagaaaagtattttgaagtttacatttttatttatgaagtttaaaacagtatttattttgtaattatgatttgggttggggaagggggggctacattataaacgcttattgtaagaatactggagaacttttcgtaaagcagtaccttgccaaagagataagagcctctttgatgtgggtttaaaaaaagcatctatttttataaaaaagaaaatttggagaaactttttactggtcctggaacaaatattttgacttgaatactttgagaaatctcttcatatgacacctagtgagcttttaaaatttaccaggaaatttgcagcggttggaaaatttagaaagatttatggtgtagaaaatacttttgagatctttgtatgaaaggagtagaatcaatggggggaaacactgctggtttcatttttgtaatcaccagtggagcgtctgatcatcctggttattatgtgataggtggctcacattgatttgtgattttgaaacaaataaaaaaaatttacaaaagaatatataagagcaggcaagaaatttaaattaccgagagatgggggaaaaaatctgttcttcctaaagaaatcccttcagatagagctcatggtgtttagtgatgtacttgcagtattgtttgaagaattgttttgtcttaaggaaaaaagacgttgcacatgatttgtactgcagcaaatcagcaaaagtgatctgagttggatatatttgaaggtattttgaaagttacgttcaaggctaacacctgagctttgtgtaatgtaaataagaccttgtgtttatgaacctttcagctaatttaattttttttcccttacatgccaagtgatgttcaggttttgaatgtttttgtatcagttttttcctttgtaaatggcattaacattgttacttgaggtcttgcttaatcacttttgttgtcctgaggacttgaatttacagtgcatcagatttgttgcaaattttgtctgtagatagtctagcttcagctgtttatggtgatgctacattttggtttataaatatgtttgtggtataaaaaaatgagtataaccataggttttgaacaaatttccttacatttttcatacaaaaatcataaatatctgtatgctattgaaatttaactttgtatgatgcttaaaaaccactatttggggaaataataaaataagtctttaccatgtatgaaagaaattttaaaaaatacaaaatattttctgattagcatctagcttataataaattttcaaaaaagctgaaggcaaaaatgccttcatcaggatgcactgagaactatatagttacgtcctgctttttgtataaactgagatgctcacatgcttccccttagaacaggcaatgtgctatgcataacatagttgtacattatctttgcggttgctttgagttttattttttattatttaaaattgtagttataaaatttttcagtatagtacagtacatatactgtgaggcgcgtgctaaagtgaataagcgagttttcatgctgacccactcaatgctattcagaaatcaattggcttagcactttctcatatccttaggtgcatttagattgccagagttaaccttctgcgtttaaaaaaagaaaaacactaaaaaataaaatacatgtatatacttaaaaaaaaataataaggtttccctcaagggaaaacagcagctacatgcttctttcctatactactgtagcaaaccaaggcattgatgagagggcatgcaaattgtgcttcactttacagtgttttatcagagcacttaataaaatgtaaggctggtatttatttgaagttgtacagtatgacttaattcacatctgttggaatagaaaatatattctgttgagtatttaagaggctgtacatgttttcttttgtgtttggattctttgtactttttcatgttcagtacatcaataaacaaagttgaaggg

SEQ ID NO: 9389 - DNA, 2370 bp, Homo sapiens
  source 1..2370: mol_type = unassigned DNA
gagcctggcagagcagctgcacacacggcagtgcggaggcagagaaggggttggtgatacggtgctataaatctgtggtccagtccacctcccttttaagacgtcctcccccctatttctgttcttagttagagatgcagcagcttactcctgtagcgacctactaaaaagcaacaaggagaaagacatcgtctttttgaaaaaacgttctttcgtctcttttctttgttccttggtttgtttttcttgcccctttttgtttagttgaacggcaataggagggtagtctctccgtctttttaaactcttttttaagtttcccctcccctttcatattttttttcgccatttcttttagcattggactttggggtcgaaagcgtttctttttatttgcttcttttaagccgagcacagtttaggtttcgtgctgtcttaagagaactatccagcagcttcttgctcatccttattgggagaactgcaccgttactttaaaaacacacatacacaaaaaccttaagggagaaaggtaattgctgccatggaaacacaactgtctaatgggccaacttgcaataacacagccaatggtccaaccaccataaacaacaactgttcgtcaccagttgactctgggaacacagaagacagcaagaccaacttaatagtcaactaccttcctcagaacatgacacaggaggaactaaagagtctctttgggagcattggtgaaatagagtcctgtaagcttgtaagagacaaaataacagggcagagcttgggatatggctttgtgaactacattgaccccaaggatgcagagaaagctatcaacaccctgaatggattgagacttcaaaccaaaacaataaaagtttcctatgctcgcccaagttcagcttctatcagagatgcaaatttatatgtcagcggacttccaaaaacaatgacccagaaggagttggaacagcttttttcacaatatggacgcattattacttctcgtattcttgtcgaccaggtcactggcatatcaaggggtgtagggtttattcgatttgacaagcgaattgaggcagaagaagctatcaaaggcctaaatggccagaaacctcccggtgccacggagccaatcactgtaaagtttgctaataacccaagccaaaaaaccaatcaggccatcctttcccagctgtaccagtctccaaacagaaggtatccaggaccgctagctcagcaggcacagcgttttaggttggacaatctgctcaatatggcttatggagtaaagaggttttctccaatgaccattgacggaatgaccagtttggctggaattaatatccctgggcaccctggaacagggtggtgtatatttgtgtacaacctggctcctgacgcagatgagagtatcctgtggcaaatgtttgggccttttggagctgtcaccaatgtgaaggtcatccgtgactttaacaccaataaatgcaaaggttttggatttgtgactatgacaaactatgatgaggctgccatggcgatagctagcctcaatggataccgtctgggagacagagtactgcaggtctcctttaagacaaacaaaacgcacaaagcctaatgagctcttgtcctcagtccatttatatatgaaaactatacaacaaaggcaagttaagagaaactttatacattagtaaatgtctttgtaagtcagtgttgagatggggataaaatgactacttagcatcctaagaaatatgtgagattttttattgctagtatttgaattaaaacttcttaaatatcttttatgtttgaatatggacaagaggtacagggtttttacctgtcacattgcattctattgccttctttgaagaaggtggaccttttaaagtgtttcagctaagggaagacatttcttttctttttacataactgccttgaacctgtgagtaaatattgaggctttgtgttgtaattcttcagttggttgtgtcttttttttcccccctttttttcctttttctgattagctttgtgtttggtttacatttaaagcattgctgttatgtctgtttaagaaaagtattttgaagtttacatttttatttatgaagtttaaaacagtatttattttgtaattatgatttgggttggggaagggggggctacattataaacgcttattgtaagaatactggagaacttttcgtaaagcagtaccttgccaaagagataagagcctctttgatgtgggtttaaaaaaagcatctatttttataaaaaagaaaatttggagaaactttttactggtcctggaacaaatattttgacttgaatactttgagaaatctcttcata

SEQ ID NO: 9390 - DNA, 3805 bp, Homo sapiens
  source 1..3805: mol_type = unassigned DNA
caataggagggtagtctctccgtctttttaaactcttttttaagtttcccctcccctttcatattttttttcgccatttcttttagcattggactttggggtcgaaagcgtttctttttatttgcttcttttaagccgagcacagtttaggtttcgtgctgtcttaagagaactatccagcagcttcttgctcatccttattgggagaactgcaccgttactttaaaaacacacatacacaaaaaccttaagggagaaagcaggtaattgctgccatggaaacacaactgtctaatgggccaacttgcaataacacagccaatggtccaaccaccataaacaacaactgttcgtcaccagttgactctgggaacacagaagacagcaagaccaacttaatagtcaactaccttcctcagaacatgacacaggaggaactaaagagtctctttgggagcattggtgaaatagagtcctgtaagcttgtaagagacaaaataacagggcagagcttgggatatggctttgtgaactacattgaccccaaggatgcagagaaagctatcaacaccctgaatggattgagacttcaaaccaaaacaataaaagtttcctatgctcgcccaagttcagcttctatcagagatgcaaatttatatgtcagcggacttccaaaaacaatgacccagaaggagttggaacagcttttttcacaatatggacgcattattacttctcgtattcttgtcgaccaggtcactggcatatcaaggggtgtagggtttattcgatttgacaagcgaattgaggcagaagaagctatcaaaggcctaaatggccagaaacctcccggtgccacggagccaatcactgtaaagtttgctaataacccaagccaaaaaaccaatcaggccatcctttcccagctgtaccagtctccaaacagaaggtatccaggaccgctagctcagcaggcacagcgttttaggttggacaatctgctcaatatggcttatggagtaaagaggttttctccaatgaccattgacggaatgaccagtttggctggaattaatatccctgggcaccctggaacagggtggtgtatatttgtgtacaacctggctcctgacgcagatgagagtatcctgtggcaaatgtttgggccttttggagctgtcaccaatgtgaaggtcatccgtgactttaacaccaataaatgcaaaggttttggatttgtgactatgacaaactatgatgaggctgccatggcgatagctagcctcaatggataccgtctgggagacagagtactgcaggtctcctttaagacaaacaaaacgcacaaagcctaatgagctcttgtcctcagtccatttatatatgaaaactatacaacaaaggcaagttaagagaaactttatacattagtaaatgtctttgtaagtcagtgttgagatggggataaaatgactacttagcatcctaagaaatatgtgagattttttattgctagtatttgaattaaaacttcttaaatatcttttatgtttgaatatggacaagaggtacagggtttttacctgtcacattgcattctattgccttctttgaagaaggtggaccttttaaagtgtttcagctaagggaagacatttcttttctttttacataactgccttgaacctgtgagtaaatattgaggctttgtgttgtaattcttcagttggttgtgtcttttttttcccccctttttttcctttttctgattagctttgtgtttggtttacatttaaagcattgctgttatgtctgtttaagaaaagtattttgaagtttacatttttatttatgaagtttaaaacagtatttattttgtaattatgatttgggttggggaagggggggctacattataaacgcttattgtaagaatactggagaacttttcgtaaagcagtaccttgccaaagagataagagcctctttgatgtgggtttaaaaaaagcatctatttttataaaaaagaaaatttggagaaactttttactggtcctggaacaaatattttgacttgaatactttgagaaatctcttcatatgacacctagtgagcttttaaaatttaccaggaaatttgcagcggttggaaaatttagaaagatttatggtgtagaaaatacttttgagatctttgtatgaaaggagtagaatcaatggggggaaacactgctggtttcatttttgtaatcaccagtggagcgtctgatcatcctggttattatgtgataggtggctcacattgatttgtgattttgaaacaaataaaaaaaatttacaaaagaatatataagagcaggcaagaaatttaaattaccgagagatgggggaaaaaatctgttcttcctaaagaaatcccttcagatagagctcatggtgtttagtgatgtacttgcagtattgtttgaagaattgttttgtcttaaggaaaaaagacgttgcacatgatttgtactgcagcaaatcagcaaaagtgatctgagttggatatatttgaaggtattttgaaagttacgttcaaggctaacacctgagctttgtgtaatgtaaataagaccttgtgtttatgaacctttcagctaatttaattttttttcccttacatgccaagtgatgttcaggttttgaatgtttttgtatcagttttttcctttgtaaatggcattaacattgttacttgaggtcttgcttaatcacttttgttgtcctgaggacttgaatttacagtgcatcagatttgttgcaaattttgtctgtagatagtctagcttcagctgtttatggtgatgctacattttggtttataaatatgtttgtggtataaaaaaatgagtataaccataggttttgaacaaatttccttacatttttcatacaaaaatcataaatatctgtatgctattgaaatttaactttgtatgatgcttaaaaaccactatttggggaaataataaaataagtctttaccatgtatgaaagaaattttaaaaaatacaaaatattttctgattagcatctagcttataataaattttcaaaaaagctgaaggcaaaaatgccttcatcaggatgcactgagaactatatagttacgtcctgctttttgtataaactgagatgctcacatgcttccccttagaacaggcaatgtgctatgcataacatagttgtacattatctttgcggttgctttgagttttattttttattatttaaaattgtagttataaaatttttcagtatagtacagtacatatactgtgaggcgcgtgctaaagtgaataagcgagttttcatgctgacccactcaatgctattcagaaatcaattggcttagcactttctcatatccttaggtgcatttagattgccagagttaaccttctgcgtttaaaaaaagaaaaacactaaaaaataaaatacatgtatatacttaaaaaaaaataataaggtttccctcaagggaaaacagcagctacatgcttctttcctatactactgtagcaaaccaaggcattgatgagagggcatgcaaattgtgcttcactttacagtgttttatcagagcacttaataaaatgtaaggctggtatttatttgaagttgtacagtatgacttaattcacatctgttggaatagaaaatatattctgttgagtatttaagaggctgtacatgttttcttttgtgtttggattctttgtactttttcatgttcagtacatcaataaacaaagttgaaggg

SEQ ID NO: 9391 - DNA, 777 bp, Homo sapiens
  source 1..777: mol_type = unassigned DNA
ggctcacgcctgtaatcccagcacattgggaggccgaggttggcagatcagttgaagccaggagttcgagacgagcctggccaacgtggcgaaaccctgtctctactaaaaatacaaaaaaatagctgggtgtggtgatgcatgcctgtaatcccagctacttgggaggccgaggcagaagaatcgcttgaacccaggaggtggaagttgcagtgatccgagatcatgcccactgccatccagtctggatgacagagagagagaccttgcctcaaaagaagaaagatttgaattaatggtttgaaaattcttagaacacttgaccacagggcagagcttgggatatggctttgtgaactacattgaccccaaggatgcagagaaagctatcaacaccctgaatggattgagacttcaaaccaaaacaataaaagtttcctatgctcgcccaagttcagcttctatcagagatgcaaatttatatgtcagcggacttccaaaaacaatgacccagaaggagttggaacagcttttttcacaatatggacgcattattacttctcgtattcttgtcgaccaggtcactggcatatcaaggggtgtagggtttattcgatttgacaagcgaattgaggcagaagaagctatcaaaggcctaaatggccagaaacctcccggtgccacggagccaatcactgtaaagtttgctaataacccaagccaaaaaaccaatcaggccatcctttcccagctgtaccagtctccaaacagaaggta

SEQ ID NO: 9392 - DNA, 723 bp, Homo sapiens
  source 1..723: mol_type = unassigned DNA
gctttcttcccttgcctttgaagactttctgcaggccctggaattgcctttgttcctctgtctgcccactttgccagtgtgaagcaggttttcatgggattctactggggtaaaccaaaagcagcagaaaaagtgtgaacaggtaattgctgccatggaaacacaactgtctaatgggccaacttgcaataacacagccaatggtccaaccaccataaacaacaactgttcgtcaccagttgactctgggaacacagaagacagcaagaccaacttaatagtcaactaccttcctcagaacatgacacaggaggaactaaagagtctctttgggagcattggtgaaatagagtcctgtaagcttgtaagagacaaaataacagggcagagcttgggatatggctttgtgaactacattgaccccaaggatgcagagaaagctatcaacaccctgaatggattgagacttcaaaccaaaacaataaaagtttcctatgctcgcccaagttcagcttctatcagagatgcaaatttatatgtcagcggacttccaaaaacaatgacccagaaggagttggaacagcttttttcacaatatggacgcattattacttctcgtattcttgtcgaccaggtcactggcatatcaaggggtgtagggtttattcgatttgacaagcgaattgaggcagaagaagctatcaaaggcctaaatggccagaa

SEQ ID NO: 9393 - DNA, 3789 bp, Homo sapiens
  source 1..3789: mol_type = unassigned DNA
acaaacggcgggaccgcggcgcctgggcgtcactgaggcagtagccggccgggtgaggagggcggttgccggcgcggcgcggcgcggcgcgggtggggcgggggttccgccggcttccagtcccctttcccgccgccgccgccgccaccgcctctccgcggagctcgccccgagcgactcctccgcggcagtgctgacggccagcggcacgagccgtagtagctgcagcttcgagtcacagcagcaggtaattgctgccatggaaacacaactgtctaatgggccaacttgcaataacacagccaatggtccaaccaccataaacaacaactgttcgtcaccagttgactctgggaacacagaagacagcaagaccaacttaatagtcaactaccttcctcagaacatgacacaggaggaactaaagagtctctttgggagcattggtgaaatagagtcctgtaagcttgtaagagacaaaataacagggcagagcttgggatatggctttgtgaactacattgaccccaaggatgcagagaaagctatcaacaccctgaatggattgagacttcaaaccaaaacaataaaagtttcctatgctcgcccaagttcagcttctatcagagatgcaaatttatatgtcagcggacttccaaaaacaatgacccagaaggagttggaacagcttttttcacaatatggacgcattattacttctcgtattcttgtcgaccaggtcactggcatatcaaggggtgtagggtttattcgatttgacaagcgaattgaggcagaagaagctatcaaaggcctaaatggccagaaacctcccggtgccacggagccaatcactgtaaagtttgctaataacccaagccaaaaaaccaatcaggccatcctttcccagctgtaccagtctccaaacagaaggtatccaggaccgctagctcagcaggcacagcgttttaggttggacaatctgctcaatatggcttatggagtaaagaggttttctccaatgaccattgacggaatgaccagtttggctggaattaatatccctgggcaccctggaacagggtggtgtatatttgtgtacaacctggctcctgacgcagatgagagtatcctgtggcaaatgtttgggccttttggagctgtcaccaatgtgaaggtcatccgtgactttaacaccaataaatgcaaaggttttggatttgtgactatgacaaactatgatgaggctgccatggcgatagctagcctcaatggataccgtctgggagacagagtactgcaggtctcctttaagacaaacaaaacgcacaaagcctaatgagctcttgtcctcagtccatttatatatgaaaactatacaacaaaggcaagttaagagaaactttatacattagtaaatgtctttgtaagtcagtgttgagatggggataaaatgactacttagcatcctaagaaatatgtgagattttttattgctagtatttgaattaaaacttcttaaatatcttttatgtttgaatatggacaagaggtacagggtttttacctgtcacattgcattctattgccttctttgaagaaggtggaccttttaaagtgtttcagctaagggaagacatttcttttctttttacataactgccttgaacctgtgagtaaatattgaggctttgtgttgtaattcttcagttggttgtgtcttttttttcccccctttttttcctttttctgattagctttgtgtttggtttacatttaaagcattgctgttatgtctgtttaagaaaagtattttgaagtttacatttttatttatgaagtttaaaacagtatttattttgtaattatgatttgggttggggaagggggggctacattataaacgcttattgtaagaatactggagaacttttcgtaaagcagtaccttgccaaagagataagagcctctttgatgtgggtttaaaaaaagcatctatttttataaaaaagaaaatttggagaaactttttactggtcctggaacaaatattttgacttgaatactttgagaaatctcttcatatgacacctagtgagcttttaaaatttaccaggaaatttgcagcggttggaaaatttagaaagatttatggtgtagaaaatacttttgagatctttgtatgaaaggagtagaatcaatggggggaaacactgctggtttcatttttgtaatcaccagtggagcgtctgatcatcctggttattatgtgataggtggctcacattgatttgtgattttgaaacaaataaaaaaaatttacaaaagaatatataagagcaggcaagaaatttaaattaccgagagatgggggaaaaaatctgttcttcctaaagaaatcccttcagatagagctcatggtgtttagtgatgtacttgcagtattgtttgaagaattgttttgtcttaaggaaaaaagacgttgcacatgatttgtactgcagcaaatcagcaaaagtgatctgagttggatatatttgaaggtattttgaaagttacgttcaaggctaacacctgagctttgtgtaatgtaaataagaccttgtgtttatgaacctttcagctaatttaattttttttcccttacatgccaagtgatgttcaggttttgaatgtttttgtatcagttttttcctttgtaaatggcattaacattgttacttgaggtcttgcttaatcacttttgttgtcctgaggacttgaatttacagtgcatcagatttgttgcaaattttgtctgtagatagtctagcttcagctgtttatggtgatgctacattttggtttataaatatgtttgtggtataaaaaaatgagtataaccataggttttgaacaaatttccttacatttttcatacaaaaatcataaatatctgtatgctattgaaatttaactttgtatgatgcttaaaaaccactatttggggaaataataaaataagtctttaccatgtatgaaagaaattttaaaaaatacaaaatattttctgattagcatctagcttataataaattttcaaaaaagctgaaggcaaaaatgccttcatcaggatgcactgagaactatatagttacgtcctgctttttgtataaactgagatgctcacatgcttccccttagaacaggcaatgtgctatgcataacatagttgtacattatctttgcggttgctttgagttttattttttattatttaaaattgtagttataaaatttttcagtatagtacagtacatatactgtgaggcgcgtgctaaagtgaataagcgagttttcatgctgacccactcaatgctattcagaaatcaattggcttagcactttctcatatccttaggtgcatttagattgccagagttaaccttctgcgtttaaaaaaagaaaaacactaaaaaataaaatacatgtatatacttaaaaaaaaataataaggtttccctcaagggaaaacagcagctacatgcttctttcctatactactgtagcaaaccaaggcattgatgagagggcatgcaaattgtgcttcactttacagtgttttatcagagcacttaataaaatgtaaggctggtatttatttgaagttgtacagtatgacttaattcacatctgttggaatagaaaatatattctgttgagtatttaagaggctgtacatgttttcttttgtgtttggattctttgtactttttcatgttcagtacatcaataaacaaagttgaaggg

SEQ ID NO: 9394 - DNA, 4682 bp, Homo sapiens
  source 1..4682: mol_type = unassigned DNA
ggacttgaacacacgggaccggacaggaccgaccgaggggcggcggcgaaaggcagagcgccgcgatctctgtcgggaagcgcaacctccccgggccccgcggggccgcgcagggggcgtcctcaaccccgcgcccgctccctctttccatcccctgccgcccgcaggccaccccggggcccggccatccgcgcgcgcatccccgggttcgggcccgtccctggccctcgagggagccgccgccttcatcgccacatctgcagcggccgcaccagaggccgcccgggcgggaccccagcgtgagcatcgggcgcccccctaggagtgcaccacccccggagcccccctcaacacggaccgcgcccgccgggcacacaagaatggtcactcagatactgggggccatggagtctcaggtgggggggggcccggccggcccggccctgcccaacgggccactccttggtacaaatggagccactgacgacagcaagaccaacctcatcgtcaactacctgccccagaacatgacccaggatgagttcaagagtctcttcggcagcattggcgacatcgagtcctgcaagttggttcgggacaagatcacagggcagagccttggctacgggtttgtgaactattctgaccccaatgatgcagacaaagccatcaacaccctcaacggcctcaaattacagacgaagaccatcaaggtgtcctatgccagacccagttcagcatccatccgggatgctaacctgtacgtcagcgggctccccaagaccatgagccagaaagagatggagcagctcttctcccagtacggccgcatcatcacgtcccgcatcctggtggaccaggtcacaggtgtctctcggggtgtgggattcatccgctttgacaagaggattgaggccgaagaggctatcaaaggactgaatgggcagaagccgctgggcgcagctgagcccatcacagtcaagttcgcgaacaacccaagtcagaagacggggcaggcgctgctcacccacctctaccagtcatccgcccggcgctacgcaggccccctacaccatcagacccagcgtttccggctggacaatttgctcaacatggcctacggcgtcaagagtcccctgtcgctcatcgccaggttctcgccgatcgccatcgatggtatgagcggcctggcgggcgtgggcctgtcggggggcgcggcgggcgccggctggtgcatcttcgtgtacaacctgtcaccggaggcagacgagagcgtgctgtggcagctgttcgggccttttggggcagtcaccaacgtcaaggtcatccgtgatttcaccaccaacaagtgcaagggtttcggcttcgtgaccatgaccaactatgacgaggcggccatggccatcgccagcctgaacggctatcgcctgggcgagcgcgtgctgcaggtctccttcaagaccagcaaacagcacaaggcgtgagcccaccccgcctgccctcccaccccctccccgggcagcagagagagagagagagaaagagagagagagagagagaaggggcccaagagagacagcacaggcagccccacggacgacgcgagggccccacgtccctgcggaagccacagggtgagcactctggggtgggagggtctgcagggaattgggggggtgcccggggatcccccgccccatcctcctgcccccaccccaggctgggctgttcactctctcgtcttggtttggttcatggtgaaggtttttgtttcttttttcggctaaaaagaatgcagagatgtgcccccacccccaccctcgaccacccccgatgggatggcttggggggctccagggggtgccctcccagacccccttgcccaggcctccccagcacctaggtggggcctggggtaggaggaacaggtttaaaaatccccaaaaaagcgaaccgtgaggaggggtgtgggcacccccggcccagtgccccctggtggaatgcgggggagcaggcagtggggctggaagcagaaacaaaatgaaaaaaaaaggggggtgggaggggaagaaaaactctatttttgtaaaaagggaaaaagacctcgtggagaatttttactggggattcttgaacttgaaaaaaaaaaacacaaaaaaagacaaaaaaaaaaaaagaaaatattttggcaggttatgtttaccaactggggcgggggtggggggggcccagggagcagggcttaggggctagcagcccacggggccacacagagaaacaaccacgcagacagtcacaccacggggacacacggacagacgcagacggacacagcgacatgccccagacacgttaagggactggttggccaaactcagacacgtggacagggatagacagaaagagacagaagctggggctacgtccatgtggacacagaccacagatgtgggcacacgaatccatccacctgtccacgtgcacacgtgaatgtagcgatagatatttggacatcaaatttggacaccaggtcacggagaaacacaaacaccacccaggaacacgcagacatatgcccatagcatcccacaggcccaggcaggaggtcccaccccagaccctgccccagacgctccctcaccctctcggccccctcgccctggcccccaggttctctgcagagatctctcctggacccccagcggtctccttggcgcccacgaacacaggcgtgcacacgcagcgcacatgcattgagacacacgatacctcgttccaccttggcgtcacggtgggctggaggcagcccccccccccacaacacttgaggccaaaggacacccctgtccccggggctcagcctccccctgggccgaggccttggcccacacagctgagggagaggcccagccctgagcctcccccaccaggactgggcctccccggcagcaagaccccggcactccccgccaggcccagggtggggtggatgggcccaaaggcccagccccacactcctttcccgtccacttgtcacctacctatcccctttcggtttgttgggtttttcgtctttccagattgcagtggacacagcccccgatctcgagccccggcccccggcttctgtctggacattgcatcgccctagttttctttctttaaaaaaaaaaaattccaacagaagccacaggccggagcccctgggagccctcgcaccgctccccaccccactcagcggccccatcggaactgagaattgcaaaacccccgactttagctatagttaagttgccttcccccggtgtccccacgtttggtgtctggctatggcgcccccatctgactgtccagctctctctcccccacccctcccggtgttgttattaaacgtctgtggagcttctgctgcaaggaacaaaaaagaaaaaaatcaaaaaagcgacaaaaaaacacaaacagaagaggaaaaaaaagcaacaaaaaaagaaaacacacagaagagatttaaaaaaaaaaaaggaaaaaaaaaaaagacataaactggcaccagttaactttcttgtacttttttgctgaatttagcttcttgtagttttaacttattgctatgttaactatttattctcctcgttgccctgtaaggacatccgtgtatatttctgttacttcatccggtttgcaagttaaaggaacgacaatgttctctttgtttctttaagttttgccgagacatggttatgcctaatttatttataaaaggggaagtggaatcattaaagtaataataattattaataacagtaatggtagccgagtggcacgcgggggcgtgtgctctgcgggacagtccccacggccagcgacgtccaggtcaccaatgggattctttttgctcttgtcttgagaattttttcagtcctatttagctggtgaaatccctagcttgttcttgatacacgaacctatttattctcgtggttttaagtcctccctgccctctctcctctcccctgcagcagggcagggacccctctcccctgctgtctcttggggctctctcccctccgccctctgcattcgggaacacgcacgtccgcgtgggaagcttgcagcagggcgtccgagcaataagggctgggtttgtcccccaccctggggggggccaggctccagagagggggcacctccccacacaccccccccccaccgaggcctaggcccctgccacccccaagactgggaggggacttctttttctaaaacacaaaactcagcccagccaggccccctccctggaggccagcccctccccgcagggggccaggccggggctcccaggcgagggggacttggggcttccacgtccctggggggcaggggccaggccaggggggagggggctcagcccctccacccctcccttcatcctgttatttattcggaaggtttcaaatcacgacagagtccatgttggaggtgataaaaaactgtaaaaaaaaaaaaaaaaaaaaagacaaaacaaaagacaaaaaaaaaaaaaaaacccaacaagaacacttcgcgttgcgtttagactatttattaccgggatcacaggcctggccgcggtaacagacttttacatggaattgtttaattatttgtacttttcatgccagaaaataaaagttcagaatctt

SEQ ID NO: 9395 - DNA, 4661 bp, Homo sapiens
  source 1..4661: mol_type = unassigned DNA
ggacttgaacacacgggaccggacaggaccgaccgaggggcggcggcgaaaggcagagcgccgcgatctctgtcgggaagcgcaacctccccgggccccgcggggccgcgcagggggcgtcctcaaccccgcgcccgctccctctttccatcccctgccgcccgcaggccaccccggggcccggccatccgcgcgcgcatccccgggttcgggcccgtccctggccctcgagggagccgccgccttcatcgccacatctgcagcggccgcaccagaggccgcccgggcgggaccccagcgtgagcatcgggcgcccccctaggagtgcaccacccccggagcccccctcaacacggaccgcgcccgccgggcacacaagaatggtcactcagatactgggggccatggagtctcaggtgggggggggcccggccggcccggccctgcccaacgggccactccttggtacaaatggagccactgacgacagcaagaccaacctcatcgtcaactacctgccccagaacatgacccaggatgagttcaagagtctcttcggcagcattggcgacatcgagtcctgcaagttggttcgggacaagatcacagggcagagccttggctacgggtttgtgaactattctgaccccaatgatgcagacaaagccatcaacaccctcaacggcctcaaattacagacgaagaccatcaaggtgtcctatgccagacccagttcagcatccatccgggatgctaacctgtacgtcagcgggctccccaagaccatgagccagaaagagatggagcagctcttctcccagtacggccgcatcatcacgtcccgcatcctggtggaccaggtcacaggtgtctctcggggtgtgggattcatccgctttgacaagaggattgaggccgaagaggctatcaaaggactgaatgggcagaagccgctgggcgcagctgagcccatcacagtcaagttcgcgaacaacccaagtcagaagacggggcaggcgctgctcacccacctctaccagtcatccgcccggcgctacgcaggccccctacaccatcagacccagcgtttccggctggacaatttgctcaacatggcctacggcgtcaagaggttctcgccgatcgccatcgatggtatgagcggcctggcgggcgtgggcctgtcggggggcgcggcgggcgccggctggtgcatcttcgtgtacaacctgtcaccggaggcagacgagagcgtgctgtggcagctgttcgggccttttggggcagtcaccaacgtcaaggtcatccgtgatttcaccaccaacaagtgcaagggtttcggcttcgtgaccatgaccaactatgacgaggcggccatggccatcgccagcctgaacggctatcgcctgggcgagcgcgtgctgcaggtctccttcaagaccagcaaacagcacaaggcgtgagcccaccccgcctgccctcccaccccctccccgggcagcagagagagagagagagaaagagagagagagagagagaaggggcccaagagagacagcacaggcagccccacggacgacgcgagggccccacgtccctgcggaagccacagggtgagcactctggggtgggagggtctgcagggaattgggggggtgcccggggatcccccgccccatcctcctgcccccaccccaggctgggctgttcactctctcgtcttggtttggttcatggtgaaggtttttgtttcttttttcggctaaaaagaatgcagagatgtgcccccacccccaccctcgaccacccccgatgggatggcttggggggctccagggggtgccctcccagacccccttgcccaggcctccccagcacctaggtggggcctggggtaggaggaacaggtttaaaaatccccaaaaaagcgaaccgtgaggaggggtgtgggcacccccggcccagtgccccctggtggaatgcgggggagcaggcagtggggctggaagcagaaacaaaatgaaaaaaaaaggggggtgggaggggaagaaaaactctatttttgtaaaaagggaaaaagacctcgtggagaatttttactggggattcttgaacttgaaaaaaaaaaacacaaaaaaagacaaaaaaaaaaaaagaaaatattttggcaggttatgtttaccaactggggcgggggtggggggggcccagggagcagggcttaggggctagcagcccacggggccacacagagaaacaaccacgcagacagtcacaccacggggacacacggacagacgcagacggacacagcgacatgccccagacacgttaagggactggttggccaaactcagacacgtggacagggatagacagaaagagacagaagctggggctacgtccatgtggacacagaccacagatgtgggcacacgaatccatccacctgtccacgtgcacacgtgaatgtagcgatagatatttggacatcaaatttggacaccaggtcacggagaaacacaaacaccacccaggaacacgcagacatatgcccatagcatcccacaggcccaggcaggaggtcccaccccagaccctgccccagacgctccctcaccctctcggccccctcgccctggcccccaggttctctgcagagatctctcctggacccccagcggtctccttggcgcccacgaacacaggcgtgcacacgcagcgcacatgcattgagacacacgatacctcgttccaccttggcgtcacggtgggctggaggcagcccccccccccacaacacttgaggccaaaggacacccctgtccccggggctcagcctccccctgggccgaggccttggcccacacagctgagggagaggcccagccctgagcctcccccaccaggactgggcctccccggcagcaagaccccggcactccccgccaggcccagggtggggtggatgggcccaaaggcccagccccacactcctttcccgtccacttgtcacctacctatcccctttcggtttgttgggtttttcgtctttccagattgcagtggacacagcccccgatctcgagccccggcccccggcttctgtctggacattgcatcgccctagttttctttctttaaaaaaaaaaaattccaacagaagccacaggccggagcccctgggagccctcgcaccgctccccaccccactcagcggccccatcggaactgagaattgcaaaacccccgactttagctatagttaagttgccttcccccggtgtccccacgtttggtgtctggctatggcgcccccatctgactgtccagctctctctcccccacccctcccggtgttgttattaaacgtctgtggagcttctgctgcaaggaacaaaaaagaaaaaaatcaaaaaagcgacaaaaaaacacaaacagaagaggaaaaaaaagcaacaaaaaaagaaaacacacagaagagatttaaaaaaaaaaaaggaaaaaaaaaaaagacataaactggcaccagttaactttcttgtacttttttgctgaatttagcttcttgtagttttaacttattgctatgttaactatttattctcctcgttgccctgtaaggacatccgtgtatatttctgttacttcatccggtttgcaagttaaaggaacgacaatgttctctttgtttctttaagttttgccgagacatggttatgcctaatttatttataaaaggggaagtggaatcattaaagtaataataattattaataacagtaatggtagccgagtggcacgcgggggcgtgtgctctgcgggacagtccccacggccagcgacgtccaggtcaccaatgggattctttttgctcttgtcttgagaattttttcagtcctatttagctggtgaaatccctagcttgttcttgatacacgaacctatttattctcgtggttttaagtcctccctgccctctctcctctcccctgcagcagggcagggacccctctcccctgctgtctcttggggctctctcccctccgccctctgcattcgggaacacgcacgtccgcgtgggaagcttgcagcagggcgtccgagcaataagggctgggtttgtcccccaccctggggggggccaggctccagagagggggcacctccccacacaccccccccccaccgaggcctaggcccctgccacccccaagactgggaggggacttctttttctaaaacacaaaactcagcccagccaggccccctccctggaggccagcccctccccgcagggggccaggccggggctcccaggcgagggggacttggggcttccacgtccctggggggcaggggccaggccaggggggagggggctcagcccctccacccctcccttcatcctgttatttattcggaaggtttcaaatcacgacagagtccatgttggaggtgataaaaaactgtaaaaaaaaaaaaaaaaaaaaagacaaaacaaaagacaaaaaaaaaaaaaaaacccaacaagaacacttcgcgttgcgtttagactatttattaccgggatcacaggcctggccgcggtaacagacttttacatggaattgtttaattatttgtacttttcatgccagaaaataaaagttcagaatctt

SEQ ID NO: 9396 - DNA, 1415 bp, Homo sapiens
  source 1..1415: mol_type = unassigned DNA
caacctttgggatgtgtgcatggtggcaaggggctgactgatatgagattacttcttttaagggaaattgtcattaatgagtcaagaaactgctcatttatgataattagcaccatggagcctcaggtgtcaaatggtccgacatccaatacaagcaatggaccctccagcaacaacagaaactgtccttctcccatgcaaacaggggcaaccacagatgacagcaaaaccaacctcatcgtcaactatttaccccagaatatgacccaagaagaattcaggagtctcttcgggagcattggtgaaatagaatcctgcaaacttgtgagagacaaaattacaggacagagtttagggtatggatttgttaactatattgatccaaaggatgcagagaaagccatcaacactttaaatggactcagactccagaccaaaaccataaaggtctcatatgcccgtccgagctctgcctcaatcagggatgctaacctctatgttagcggccttcccaaaaccatgacccagaaggaactggagcaacttttctcgcaatacggccgtatcatcacctcacgaatcctggttgatcaagtcacaggagtgtccagaggggtgggattcatccgctttgataagaggattgaggcagaagaagccatcaaagggctgaatggccagaagcccagcggtgctacggaaccgattactgtgaagtttgccaacaaccccagccagaagtccagccaggccctgctctcccagctctaccagtcccccaaccggcgctacccaggtccacttcaccaccaggctcagaggttcaggctggacaatttgcttaatatggcctatggcgtaaagaggttctccccaattaccattgatggaatgacaagccttgtgggaatgaacatccctggtcacacaggaactgggtggtgcatctttgtctacaacctgtcccccgattccgatgagagtgtcctctggcagctctttggcccctttggagcagtgaacaacgtaaaggtgattcgtgacttcaacaccaacaagtgcaagggattcggctttgtcaccatgaccaactatgatgaggcggccatggccatcgccagcctcaacgggtaccgcctgggagacagagtgttgcaagtttcctttaaaaccaacaaagcccacaagtcctgaatttcccattcttacttactaaaatatatatagaaatatatacgaacaaaacacacgcgcgcacacacacacatacacgaaagagagagaaacaaacttttcaaggcttatattcaaccatggactttataagccagtgttgcctaagtattaaaacattggattatcctgaggtgtaccaggaaaggattttataatgcttagaaaaaaagaaaaaaaaa

SEQ ID NO: 9397 - DNA, 2467 bp, Homo sapiens
  source 1..2467: mol_type = unassigned DNA
aaagagagtgatttatttgggcttcagtaaatgctgcatcttgtatttcaaagagtttcctgtcatgacctcataaaaaagaggaggcggcttgtatgtgtagcagtgcctggcgtgttgagttgttgcttccttctctgggcagcagctctgtaagaaggaatgtcagcttttacataacgttcctttccgcttttgacacactgtgtgagggtccatcttcttctgatcacagatggagtggaatggcttgaagatgataattagcaccatggagcctcaggtgtcaaatggtccgacatccaatacaagcaatggaccctccagcaacaacagaaactgtccttctcccatgcaaacaggggcaaccacagatgacagcaaaaccaacctcatcgtcaactatttaccccagaatatgacccaagaagaattcaggagtctcttcgggagcattggtgaaatagaatcctgcaaacttgtgagagacaaaattacaggacagagtttagggtatggatttgttaactatattgatccaaaggatgcagagaaagccatcaacactttaaatggactcagactccagaccaaaaccataaaggtctcatatgcccgtccgagctctgcctcaatcagggatgctaacctctatgttagcggccttcccaaaaccatgacccagaaggaactggagcaacttttctcgcaatacggccgtatcatcacctcacgaatcctggttgatcaagtcacaggagtgtccagaggggtgggattcatccgctttgataagaggattgaggcagaagaagccatcaaagggctgaatggccagaagcccagcggtgctacggaaccgattactgtgaagtttgccaacaaccccagccagaagtccagccaggccctgctctcccagctctaccagtcccccaaccggcgctacccaggtccacttcaccaccaggctcagaggttcaggctggacaatttgcttaatatggcctatggcgtaaagaggttctccccaattaccattgatggaatgacaagccttgtgggaatgaacatccctggtcacacaggaactgggtggtgcatctttgtctacaacctgtcccccgattccgatgagagtgtcctctggcagctctttggcccctttggagcagtgaacaacgtaaaggtgattcgtgacttcaacaccaacaagtgcaagggattcggctttgtcaccatgaccaactatgatgaggcggccatggccatcgccagcctcaacgggtaccgcctgggagacagagtgttgcaagtttcctttaaaaccaacaaagcccacaagtcctgaatttcccattcttacttactaaaatatatatagaaatatatacgaacaaaacacacgcgcgcacacacacacatacacgaaagagagagaaacaaacttttcaaggcttatattcaaccatggactttataagccagtgttgcctaagtattaaaacattggattatcctgaggtgtaccaggaaaggattttataatgcttagaaaaaaagaaaaaaaaaaaacaaaaaatacctttgatgcattgaatgttctttcatagctgtcgttgttgaatataatatacatagatagcgatgtgcagggatttttacccagccagctaactttactaccttccttgaaggtggatctttttaagatgaccattcgctcatttgaagaagaaaaacaaaaaacaaaaaaaataataaaaataaaacaatttttacaaagtaatgggattcaaagaaaggaaaaaaagatttttcttttttgtcaaaatatcgatccaatcagattggtaaaaacccccacacaaattaaagaggaataataaaaattgcaaaaataaaaaaaaacttttgcaaatttttttatttttccttctttcttttatatcatgtgaactaaaacagtcttctgttaggggatgggggcaagggggatacctgatgacattaacaatttaataacattaacattgttgccaaagaggtggtctctttgctgaaaatgggtttcaagaaaaatctatttttataaaatataaagaatttttacaagagaatctggatttgagaaaaaaatattttgactggctaatttaggggaaattgacaactttgtcgcgttcatactgcactggtaactttttagagatcaagatgtgtgttttaaactggattcgtagactgttttttgaaggatgggctataaacagatgatcttcatatcttttcatagcatgtaataataattaaaaaacaattattaattactaggggaaaggagtgttcgttctacccagggtaccacagttccccacagtcaaaacccaaaagcaaggagatgagttgaaagacagtttttctttaagtcatcagtatgggatgtcagcagaacaaaaattaaaaa

SEQ ID NO: 9398 - DNA, 3349 bp, Homo sapiens
  source 1..3349: mol_type = unassigned DNA
taaacctcgagaggcagctcctggatactgaacactgagatgggcagttgtgtttcgggggactgcgcagtcaaaacggcaaagagagtgatttatttgggcttcagtaaatgctgcatcttgtatttcaaagagtttcctgtcatgacctcataaaaaagaggaggcggcttgtatgtgtagcagtgcctggcgtgttgagttgttgcttccttctctgggcagcagctctgtaagaaggaatgtcagcttttacataacgttcctttccgcttttgacacactgtgtgagggtccatcttcttctgatcacagatggagtggaatggcttgaagatgataattagcaccatggagcctcaggtgtcaaatggtccgacatccaatacaagcaatggaccctccagcaacaacagaaactgtccttctcccatgcaaacaggggcaaccacagatgacagcaaaaccaacctcatcgtcaactatttaccccagaatatgacccaagaagaattcaggagtctcttcgggagcattggtgaaatagaatcctgcaaacttgtgagagacaaaattacaggacagagtttagggtatggatttgttaactatattgatccaaaggatgcagagaaagccatcaacactttaaatggactcagactccagaccaaaaccataaaggtctcatatgcccgtccgagctctgcctcaatcagggatgctaacctctatgttagcggccttcccaaaaccatgacccagaaggaactggagcaacttttctcgcaatacggccgtatcatcacctcacgaatcctggttgatcaagtcacaggagtgtccagaggggtgggattcatccgctttgataagaggattgaggcagaagaagccatcaaagggctgaatggccagaagcccagcggtgctacggaaccgattactgtgaagtttgccaacaaccccagccagaagtccagccaggccctgctctcccagctctaccagtcccccaaccggcgctacccaggtccacttcaccaccaggctcagaggttcaggctggacaatttgcttaatatggcctatggcgtaaagagactgatgtctggaccagtccccccttctgcttgtccccccaggttctccccaattaccattgatggaatgacaagccttgtgggaatgaacatccctggtcacacaggaactgggtggtgcatctttgtctacaacctgtcccccgattccgatgagagtgtcctctggcagctctttggcccctttggagcagtgaacaacgtaaaggtgattcgtgacttcaacaccaacaagtgcaagggattcggctttgtcaccatgaccaactatgatgaggcggccatggccatcgccagcctcaacgggtaccgcctgggagacagagtgttgcaagtttcctttaaaaccaacaaagcccacaagtcctgaatttcccattcttacttactaaaatatatatagaaatatatacgaacaaaacacacgcgcgcacacacacacatacacgaaagagagagaaacaaacttttcaaggcttatattcaaccatggactttataagccagtgttgcctaagtattaaaacattggattatcctgaggtgtaccaggaaaggattttataatgcttagaaaaaaagaaaaaaaaaaaacaaaaaatacctttgatgcattgaatgttctttcatagctgtcgttgttgaatataatatacatagatagcgatgtgcagggatttttacccagccagctaactttactaccttccttgaaggtggatctttttaagatgaccattcgctcatttgaagaagaaaaacaaaaaacaaaaaaaataataaaaataaaacaatttttacaaagtaatgggattcaaagaaaggaaaaaaagatttttcttttttgtcaaaatatcgatccaatcagattggtaaaaacccccacacaaattaaagaggaataataaaaattgcaaaaataaaaaaaaacttttgcaaatttttttatttttccttctttcttttatatcatgtgaactaaaacagtcttctgttaggggatgggggcaagggggatacctgatgacattaacaatttaataacattaacattgttgccaaagaggtggtctctttgctgaaaatgggtttcaagaaaaatctatttttataaaatataaagaatttttacaagagaatctggatttgagaaaaaaatattttgactggctaatttaggggaaattgacaactttgtcgcgttcatactgcactggtaactttttagagatcaagatgtgtgttttaaactggattcgtagactgttttttgaaggatgggctataaacagatgatcttcatatcttttcatagcatgtaataataattaaaaaacaattattaattactaggggaaaggagtgttcgttctacccagggtaccacagttccccacagtcaaaacccaaaagcaaggagatgagttgaaagacagtttttctttaagtcatcagtatgggatgtcagcagaacaaaaattaaaaagattaattttccttttgatctaaaacttccttagtttgagcagtaggtgctacaaaattatttacatatcttagtatcatagttaaatgtaatgtgtttaggagaggaaaacaaaagatacatttgctttaaattcattaagaaattttcaaattcactttgtagcccatgctgatagaattgggctgtgttggtacatttgaaacactgtttatgttgcttgaaacacttatttatttaatcgccgatgtgatgatgcctatggccgagatcaaatatagctagattggctagactacttatttgtttacttaaactatgggaagaagcatattattgtgtcattctgttgtgtgtgtatgtgtatatacaatataaatatatatatataaagttattttttctttgggttaatttattataagttgtaacacttggctagttttgtttgtatatgtcttaaaatgttttcttatgatatttaagtgacagttaaagaggtatcaaggtaacttgtgtagaactattctttgatatattgtcatgtttgttgtgaatattttttcttactgcacagtagaaaaataaaaacaactgagtctttattttaatgtaactcagattggggaaaacaaaacagagctaagggaacaaaatgactgagggagcactctcccacgtccagtgcactgatcattttagtatgtttgtgctttgtacggttatatatttaaaacgaaaacaaaacaaaaaaatacaa

SEQ ID NO: 9399 - DNA, 1591 bp, Homo sapiens
  source 1..1591: mol_type = unassigned DNA
tagaatcgggggtttcagctcactgctccttttcttttttttctttctctcccccgcccacccccccaaaaataattgatttgctttacaatcatccacactgtgttttgtggatctttaattatatataacaatagtagtcattttaaatatatattctgaaatctttgcaaattttaacagaagagtcgaagctctgcgagacccaatatttgccaataagaatggttatgataattagcaccatggagcctcaggtgtcaaatggtccgacatccaatacaagcaatggaccctccagcaacaacagaaactgtccttctcccatgcaaacaggggcaaccacagatgacagcaaaaccaacctcatcgtcaactatttaccccagaatatgacccaagaagaattcaggagtctcttcgggagcattggtgaaatagaatcctgcaaacttgtgagagacaaaattacaggacagagtttagggtatggatttgttaactatattgatccaaaggatgcagagaaagccatcaacactttaaatggactcagactccagaccaaaaccataaaggtctcatatgcccgtccgagctctgcctcaatcagggatgctaacctctatgttagcggccttcccaaaaccatgacccagaaggaactggagcaacttttctcgcaatacggccgtatcatcacctcacgaatcctggttgatcaagtcacaggagtgtccagaggggtgggattcatccgctttgataagaggattgaggcagaagaagccatcaaagggctgaatggccagaagcccagcggtgctacggaaccgattactgtgaagtttgccaacaaccccagccagaagtccagccaggccctgctctcccagctctaccagtcccccaaccggcgctacccaggtccacttcaccaccaggctcagaggttcaggctggacaatttgcttaatatggcctatggcgtaaagagactgatgtctggaccagtccccccttctgcttgtccccccaggttctccccaattaccattgatggaatgacaagccttgtgggaatgaacatccctggtcacacaggaactgggtggtgcatctttgtctacaacctgtcccccgattccgatgagagtgtcctctggcagctctttggcccctttggagcagtgaacaacgtaaaggtgattcgtgacttcaacaccaacaagtgcaagggattcggctttgtcaccatgaccaactatgatgaggcggccatggccatcgccagcctcaacgggtaccgcctgggagacagagtgttgcaagtttcctttaaaaccaacaaagcccacaagtcctgaatttcccattcttacttactaaaatatatatagaaatatatacgaacaaaacacacgcgcgcacacacacacatacacgaaagagagagaaacaaacttttcaaggcttatattcaaccatggactttataagccagtgttgcctaagtattaaaacattggattatcctgaggtgtaccaggaaaggattttataatgcttagaaaaaaagaaaaaaaaaaaa

SEQ ID NO: 9400 - DNA, 3966 bp, Homo sapiens
  source 1..3966: mol_type = unassigned DNA
caaggctctgttcagttgttcttatctacatcctagaatcgggggtttcagctcactgctccttttcttttttttctttctctcccccgcccacccccccaaaaataattgatttgctttacaatcatccacactgtgttttgtggatctttaattatatataacaatagtagtcattttaaatatatattctgaaatctttgcaaattttaacagaagagtcgaagctctgcgagacccaatatttgccaataagaatggttatgataattagcaccatggagcctcaggtgtcaaatggtccgacatccaatacaagcaatggaccctccagcaacaacagaaactgtccttctcccatgcaaacaggggcaaccacagatgacagcaaaaccaacctcatcgtcaactatttaccccagaatatgacccaagaagaattcaggagtctcttcgggagcattggtgaaatagaatcctgcaaacttgtgagagacaaaattacaggacagagtttagggtatggatttgttaactatattgatccaaaggatgcagagaaagccatcaacactttaaatggactcagactccagaccaaaaccataaaggtctcatatgcccgtccgagctctgcctcaatcagggatgctaacctctatgttagcggccttcccaaaaccatgacccagaaggaactggagcaacttttctcgcaatacggccgtatcatcacctcacgaatcctggttgatcaagtcacaggagtgtccagaggggtgggattcatccgctttgataagaggattgaggcagaagaagccatcaaagggctgaatggccagaagcccagcggtgctacggaaccgattactgtgaagtttgccaacaaccccagccagaagtccagccaggccctgctctcccagctctaccagtcccccaaccggcgctacccaggtccacttcaccaccaggctcagaggttcaggctggacaatttgcttaatatggcctatggcgtaaagaggttctccccaattaccattgatggaatgacaagccttgtgggaatgaacatccctggtcacacaggaactgggtggtgcatctttgtctacaacctgtcccccgattccgatgagagtgtcctctggcagctctttggcccctttggagcagtgaacaacgtaaaggtgattcgtgacttcaacaccaacaagtgcaagggattcggctttgtcaccatgaccaactatgatgaggcggccatggccatcgccagcctcaacgggtaccgcctgggagacagagtgttgcaagtttcctttaaaaccaacaaagcccacaagtcctgaatttcccattcttacttactaaaatatatatagaaatatatacgaacaaaacacacgcgcgcacacacacacatacacgaaagagagagaaacaaacttttcaaggcttatattcaaccatggactttataagccagtgttgcctaagtattaaaacattggattatcctgaggtgtaccaggaaaggattttataatgcttagaaaaaaagaaaaaaaaaaaacaaaaaatacctttgatgcattgaatgttctttcatagctgtcgttgttgaatataatatacatagatagcgatgtgcagggatttttacccagccagctaactttactaccttccttgaaggtggatctttttaagatgaccattcgctcatttgaagaagaaaaacaaaaaacaaaaaaaataataaaaataaaacaatttttacaaagtaatgggattcaaagaaaggaaaaaaagatttttcttttttgtcaaaatatcgatccaatcagattggtaaaaacccccacacaaattaaagaggaataataaaaattgcaaaaataaaaaaaaacttttgcaaatttttttatttttccttctttcttttatatcatgtgaactaaaacagtcttctgttaggggatgggggcaagggggatacctgatgacattaacaatttaataacattaacattgttgccaaagaggtggtctctttgctgaaaatgggtttcaagaaaaatctatttttataaaatataaagaatttttacaagagaatctggatttgagaaaaaaatattttgactggctaatttaggggaaattgacaactttgtcgcgttcatactgcactggtaactttttagagatcaagatgtgtgttttaaactggattcgtagactgttttttgaaggatgggctataaacagatgatcttcatatcttttcatagcatgtaataataattaaaaaacaattattaattactaggggaaaggagtgttcgttctacccagggtaccacagttccccacagtcaaaacccaaaagcaaggagatgagttgaaagacagtttttctttaagtcatcagtatgggatgtcagcagaacaaaaattaaaaagattaattttccttttgatctaaaacttccttagtttgagcagtaggtgctacaaaattatttacatatcttagtatcatagttaaatgtaatgtgtttaggagaggaaaacaaaagatacatttgctttaaattcattaagaaattttcaaattcactttgtagcccatgctgatagaattgggctgtgttggtacatttgaaacactgtttatgttgcttgaaacacttatttatttaatcgccgatgtgatgatgcctatggccgagatcaaatatagctagattggctagactacttatttgtttacttaaactatgggaagaagcatattattgtgtcattctgttgtgtgtgtatgtgtatatacaatataaatatatatatataaagttattttttctttgggttaatttattataagttgtaacacttggctagttttgtttgtatatgtcttaaaatgttttcttatgatatttaagtgacagttaaagaggtatcaaggtaacttgtgtagaactattctttgatatattgtcatgtttgttgtgaatattttttcttactgcacagtagaaaaataaaaacaactgagtctttattttaatgtaactcagattggggaaaacaaaacagagctaagggaacaaaatgactgagggagcactctcccacgtccagtgcactgatcattttagtatgtttgtgctttgtacggttatatatttaaaacgaaaacaaaacaaaaaaatacaagggttcatgctcttccctgggtaatagaaacagttactcgctatgcataatctagttgatagttaaatttgctattgcttttcttgtcttgttatataaaatcttttcaatacaagtttagtcttaatggtaataaaacgttatggttatttataacttgtgcttattttgtgcattttttcccatgctgaacccactaagtgcatgtagacaggactgttgttttcacactgaaaaggcaaactttgtagtagtcgttgtagtggtagacagataacgaataccaaggctgcatcatagactcctcctttaaattttttttctgtttttttttcctcttttcggttttggatataacaccagatttcagttcagagaacactcgttcaacattcagggaaagctttttacgtcacctgctatgaatgaacgtagtttgctggcaaagttttgatgcatttgctaagcattagtgggaaaggcatgccaaaatcttctctataatgtgttcaatcttgggggaaaaaaaaaggaaaaaaaatcttaggaccaggcagttgtatactttagttattaatgaatgacttcatgttaatcttgctagtttagatgatttccaagggaaagtattgtaaatgtttttttttcataatcttgttgtgtttgaattatttgtactttatctgtccagacaataaatgaaagtgtgtagaatggatttgacttcccaaa

SEQ ID NO: 9401 - DNA, 3775 bp, Homo sapiens
  source 1..3775: mol_type = unassigned DNA
gtctgacttggagttttgtgctgttgcacgtgaatgctctggaactgccctaatcgactgaaaatgagccggctacagtcatatggaacagataattagcaccatggagcctcaggtgtcaaatggtccgacatccaatacaagcaatggaccctccagcaacaacagaaactgtccttctcccatgcaaacaggggcaaccacagatgacagcaaaaccaacctcatcgtcaactatttaccccagaatatgacccaagaagaattcaggagtctcttcgggagcattggtgaaatagaatcctgcaaacttgtgagagacaaaattacaggacagagtttagggtatggatttgttaactatattgatccaaaggatgcagagaaagccatcaacactttaaatggactcagactccagaccaaaaccataaaggtctcatatgcccgtccgagctctgcctcaatcagggatgctaacctctatgttagcggccttcccaaaaccatgacccagaaggaactggagcaacttttctcgcaatacggccgtatcatcacctcacgaatcctggttgatcaagtcacaggagtgtccagaggggtgggattcatccgctttgataagaggattgaggcagaagaagccatcaaagggctgaatggccagaagcccagcggtgctacggaaccgattactgtgaagtttgccaacaaccccagccagaagtccagccaggccctgctctcccagctctaccagtcccccaaccggcgctacccaggtccacttcaccaccaggctcagaggttcaggctggacaatttgcttaatatggcctatggcgtaaagaggttctccccaattaccattgatggaatgacaagccttgtgggaatgaacatccctggtcacacaggaactgggtggtgcatctttgtctacaacctgtcccccgattccgatgagagtgtcctctggcagctctttggcccctttggagcagtgaacaacgtaaaggtgattcgtgacttcaacaccaacaagtgcaagggattcggctttgtcaccatgaccaactatgatgaggcggccatggccatcgccagcctcaacgggtaccgcctgggagacagagtgttgcaagtttcctttaaaaccaacaaagcccacaagtcctgaatttcccattcttacttactaaaatatatatagaaatatatacgaacaaaacacacgcgcgcacacacacacatacacgaaagagagagaaacaaacttttcaaggcttatattcaaccatggactttataagccagtgttgcctaagtattaaaacattggattatcctgaggtgtaccaggaaaggattttataatgcttagaaaaaaagaaaaaaaaaaaacaaaaaatacctttgatgcattgaatgttctttcatagctgtcgttgttgaatataatatacatagatagcgatgtgcagggatttttacccagccagctaactttactaccttccttgaaggtggatctttttaagatgaccattcgctcatttgaagaagaaaaacaaaaaacaaaaaaaataataaaaataaaacaatttttacaaagtaatgggattcaaagaaaggaaaaaaagatttttcttttttgtcaaaatatcgatccaatcagattggtaaaaacccccacacaaattaaagaggaataataaaaattgcaaaaataaaaaaaaacttttgcaaatttttttatttttccttctttcttttatatcatgtgaactaaaacagtcttctgttaggggatgggggcaagggggatacctgatgacattaacaatttaataacattaacattgttgccaaagaggtggtctctttgctgaaaatgggtttcaagaaaaatctatttttataaaatataaagaatttttacaagagaatctggatttgagaaaaaaatattttgactggctaatttaggggaaattgacaactttgtcgcgttcatactgcactggtaactttttagagatcaagatgtgtgttttaaactggattcgtagactgttttttgaaggatgggctataaacagatgatcttcatatcttttcatagcatgtaataataattaaaaaacaattattaattactaggggaaaggagtgttcgttctacccagggtaccacagttccccacagtcaaaacccaaaagcaaggagatgagttgaaagacagtttttctttaagtcatcagtatgggatgtcagcagaacaaaaattaaaaagattaattttccttttgatctaaaacttccttagtttgagcagtaggtgctacaaaattatttacatatcttagtatcatagttaaatgtaatgtgtttaggagaggaaaacaaaagatacatttgctttaaattcattaagaaattttcaaattcactttgtagcccatgctgatagaattgggctgtgttggtacatttgaaacactgtttatgttgcttgaaacacttatttatttaatcgccgatgtgatgatgcctatggccgagatcaaatatagctagattggctagactacttatttgtttacttaaactatgggaagaagcatattattgtgtcattctgttgtgtgtgtatgtgtatatacaatataaatatatatatataaagttattttttctttgggttaatttattataagttgtaacacttggctagttttgtttgtatatgtcttaaaatgttttcttatgatatttaagtgacagttaaagaggtatcaaggtaacttgtgtagaactattctttgatatattgtcatgtttgttgtgaatattttttcttactgcacagtagaaaaataaaaacaactgagtctttattttaatgtaactcagattggggaaaacaaaacagagctaagggaacaaaatgactgagggagcactctcccacgtccagtgcactgatcattttagtatgtttgtgctttgtacggttatatatttaaaacgaaaacaaaacaaaaaaatacaagggttcatgctcttccctgggtaatagaaacagttactcgctatgcataatctagttgatagttaaatttgctattgcttttcttgtcttgttatataaaatcttttcaatacaagtttagtcttaatggtaataaaacgttatggttatttataacttgtgcttattttgtgcattttttcccatgctgaacccactaagtgcatgtagacaggactgttgttttcacactgaaaaggcaaactttgtagtagtcgttgtagtggtagacagataacgaataccaaggctgcatcatagactcctcctttaaattttttttctgtttttttttcctcttttcggttttggatataacaccagatttcagttcagagaacactcgttcaacattcagggaaagctttttacgtcacctgctatgaatgaacgtagtttgctggcaaagttttgatgcatttgctaagcattagtgggaaaggcatgccaaaatcttctctataatgtgttcaatcttgggggaaaaaaaaaggaaaaaaaatcttaggaccaggcagttgtatactttagttattaatgaatgacttcatgttaatcttgctagtttagatgatttccaagggaaagtattgtaaatgtttttttttcataatcttgttgtgtttgaattatttgtactttatctgtccagacaataaatgaaagtgtgtagaatg

SEQ ID NO: 9402 - DNA, 1951 bp, Homo sapiens
  source 1..1951: mol_type = unassigned DNA
aggtgggcagggggtggcggcggcgacggtggcggagccgcagagcgagctagagagcgagagcggtgagactctgcggacgtcttcccgcccgccgcgctccgccccacccagcctccgcagcctcgggccggatcgcccggcggggaagatgcgcctcaagaaccagataattagcaccatggagcctcaggtgtcaaatggtccgacatccaatacaagcaatggaccctccagcaacaacagaaactgtccttctcccatgcaaacaggggcaaccacagatgacagcaaaaccaacctcatcgtcaactatttaccccagaatatgacccaagaagaattcaggagtctcttcgggagcattggtgaaatagaatcctgcaaacttgtgagagacaaaattacaggacagagtttagggtatggatttgttaactatattgatccaaaggatgcagagaaagccatcaacactttaaatggactcagactccagaccaaaaccataaaggtctcatatgcccgtccgagctctgcctcaatcagggatgctaacctctatgttagcggccttcccaaaaccatgacccagaaggaactggagcaacttttctcgcaatacggccgtatcatcacctcacgaatcctggttgatcaagtcacaggagtgtccagaggggtgggattcatccgctttgataagaggattgaggcagaagaagccatcaaagggctgaatggccagaagcccagcggtgctacggaaccgattactgtgaagtttgccaacaaccccagccagaagtccagccaggccctgctctcccagctctaccagtcccccaaccggcgctacccaggtccacttcaccaccaggctcagaggttcaggctggacaatttgcttaatatggcctatggcgtaaagaggttctccccaattaccattgatggaatgacaagccttgtgggaatgaacatccctggtcacacaggaactgggtggtgcatctttgtctacaacctgtcccccgattccgatgagagtgtcctctggcagctctttggcccctttggagcagtgaacaacgtaaaggtgattcgtgacttcaacaccaacaagtgcaagggattcggctttgtcaccatgaccaactatgatgaggcggccatggccatcgccagcctcaacgggtaccgcctgggagacagagtgttgcaagtttcctttaaaaccaacaaagcccacaagtcctgaatttcccattcttacttactaaaatatatatagaaatatatacgaacaaaacacacgcgcgcacacacacacatacacgaaagagagagaaacaaacttttcaaggcttatattcaaccatggactttataagccagtgttgcctaagtattaaaacattggattatcctgaggtgtaccaggaaaggattttataatgcttagaaaaaaagaaaaaaaaaaaacaaaaaatacctttgatgcattgaatgttctttcatagctgtcgttgttgaatataatatacatagatagcgatgtgcagggatttttacccagccagctaactttactaccttccttgaaggtggatctttttaagatgaccattcgctcatttgaagaagaaaaacaaaaaacaaaaaaaataataaaaataaaacaatttttacaaagtaatgggattcaaagaaaggaaaaaaagatttttcttttttgtcaaaatatcgatccaatcagattggtaaaaacccccacacaaattaaagaggaataataaaaattgcaaaaataaaaaaaaacttttgcaaatttttttatttttccttctttcttttatatcatgtgaactaaaacagtcttctgttaggggatgggggcaagggggatacctgatgacattaacaatttaataacattaacattgttgcc

SEQ ID NO: 9403 - DNA, 1346 bp, Homo sapiens
  source 1..1346: mol_type = unassigned DNA
ggcggaagcggagaccatgttccgagcggcggctccggggcagctccggcgggcggtggcacaagatctctgtaaagtagcaggcatagcaaaagttctggtggctcagcatgatgtgtacaaaggcctacttccagaggaactgacaccattgattttggcaactcagaagcagttcaattacacacacatctgtgctggagcatctgccttcggaaagaaccttttgcccagagtagcagccaaacttgaggttgccccgatttctgacatcattgcaatcaagtcacctgacacatttgtgagaactatttatgcaggaaatgctctatgtacagtgaagtgtgatgagaaagtgaaagtgttttctgtccgtggaacatcctttgatgctgcagcaacaagtggcggtagtgccagttcagaaaaggcatcaagtacttcaccagtggaaatatcagagtggcttgaccagaaattaacaaaaagtgatcgaccagagctaacaggtgccaaagtggtggtatctggtggtcgaggcttgaagagtggagagaactttaagttgttatatgacttggcagatcaactacatgctgcagttggtgcttcccgtgctgctgttgatgctggctttgttcccaatgacatgcaagttggacagacgggaaaaatagtagcaccagaactttatattgctgttggaatatctggagccatccaacatttagctgggatgaaagacagcaagacaattgtggcaattaataaagacccagaagctccaattttccaagtggcagattatggaatagttgcagatttatttaaggtagttcctgaaatgactgagatattgaagaaaaaatgaatcaggatcatgccttaaaaagaaaacttttgttaaagtattccactgaaatcacagatatttgtgggtattataacaatcattggaaagcatggagagctacatttcataatttgagggaaaatttctaacagatgccagaatgcttgtttatgggattgctgtgtttccttttaattatttgtggttccaaacaattattgtttgaactttttaaattctgtactaaaatctataataaagcttttccacagctttaaaactatcagaaatatgcctagcctctagagaaaattgaagaaaaggagtaaaaattttgtttatttatttatttttttgcctttcttgttcatggagagctctatgttttaggaagattgtaaacatgattgtctccaccagcctaatcaacctactaatctcattgttgaagggcaaacttcataggagaaggtaactgaattggcaagtgcag

SEQ ID NO: 9404 - DNA, 2287 bp, Homo sapiens
  source 1..2287: mol_type = unassigned DNA
attaggtgactggctgaggcggcgccagttggccgggcacggggctgctgtaaggccgaggttgcggcggaagcggagaccatgttccgagcggcggctccggggcagctccggcgggcggcctcattgctacgatttcagagtaccctggtaatagctgagcatgcaaatgattccctagcacccattactttaaataccattactgcagccacacgccttggaggtgaagtgtcctgcttagtagctggaaccaaatgtgacaaggtggcacaagatctctgtaaagtagcaggcatagcaaaagttctggtggctcagcatgatgtgtacaaaggcctacttccagaggaactgacaccattgattttggcaactcagaagcagttcaattacacacacatctgtgctggagcatctgccttcggaaagaaccttttgcccagagtagcagccaaacttgaggttgccccgatttctgacatcattgcaatcaagtcacctgacacatttgtgagaactatttatgcaggaaatgctctatgtacagtgaagtgtgatgagaaagtgaaagtgttttctgtccgtggaacatcctttgatgctgcagcaacaagtggcggtagtgccagttcagaaaaggcatcaagtacttcaccagtggaaatatcagagtggcttgaccagaaattaacaaaaagtgatcgaccagagctaacaggtgccaaagtggtggtatctggtggtcgaggcttgaagagtggagagaactttaagttgttatatgacttggcagatcaactacatgctgcagttggtgcttcccgtgctgctgttgatgctggctttgttcccaatgacatgcaagttggacagacgggaaaaatagtagcaccagaactttatattgctgttggaatatctggagccatccaacatttagctgggatgaaagacagcaagacaattgtggcaattaataaagacccagaagctccaattttccaagtggcagattatggaatagttgcagatttatttaaggtagttcctgaaatgactgagatattgaagaaaaaatgaatcaggatcatgccttaaaaagaaaacttttgttaaagtattccactgaaatcacagatatttgtgggtattataacaatcattggaaagcatggagagctacatttcataatttgagggaaaatttctaacagatgccagaatgcttgtttatgggattgctgtgtttccttttaattatttgtggttccaaacaattattgtttgaactttttaaattctgtactaaaatctataataaagcttttccacagctttaaaactatcagaaatatgcctagcctctagagaaaattgaagaaaaggagtaaaaattttgtttatttatttatttttttgcctttcttgttcatggagagctctatgttttaggaagattgtaaacatgattgtctccaccagcctaatcaacctactaatctcattgttgaagggcaaacttcataggagaaggtaactgaattggcaagtgcagagttaaaaaagcacggctataaagcatgaatattatcttaaacatactccagtcttcagaagaccatagctaatgtgacaaaagcagacctgacttaaacctgacccagctccatgtatttagttggcttaaggtaaatttcattttccgtttaattttaaggttttgtcagtttataggacttttgtctgtaaaggagggagagtggaggaggggctgctttgagacagcatggcctctgatgcaagcagatagtttgatgttattataaacattcaaaatcctgtgcagagaatgctctagcctttcttttgccttctgttggcttcttttgggctctcttaggaagcacccaggcctgtgtagtcacctctggcactctcattctgctgcccagggcacagctgaggtccaagagtgtcaccagggctgcagctggtgtggatgcaggcccaagagcagaggctggtgaggctttgaacaggcctgcaggaaggcgtgggtaggtaggtgagtagaacaaagagggctgccctcctgaatcagatctgcagaagtaggagtagtgacctggatcaagcagacagtagggaagagaagggaagtgataagtgatggaggtggctagagtgcctttgtgtgaccagcctggggcccttccccagctgactagtgaaccctttctgatttgtgtcacaatcagttgctataaaacacttttaaaagttg

SEQ ID NO: 9405 - DNA, 915 bp, Homo sapiens
  source 1..915: mol_type = unassigned DNA
gcagagaggggcgcggggggcgggggtggtggggcttctggactgagccgctgagggtgcgggctgaccctgtaagtggctgcggcgggaagatggcggagctgcgcgtgctcgtagctgtcaagagggtcatcgactacgccgtgaagatccgagtgaagcctgacaggaccggtgtggtcacggatggtgtgaagcactccatgaaccccttctgtgagatcgcggtggaggaggctgtgcggctcaaggagaagaagctggtgaaggaggtcatcgccgtcagctgtgggcctgcacagtgccaggagacgattcgtaccgccctggccatgggtgcagaccgaggtatccacgtggaggtgcccccagcagaagcagaacgcttgggtcccctgcaggtggctcgggtcctggccaagctggcagagaaggagaaggtggacctggtgctgctgggcaaacaggccatcgatgatgactgtaaccagacagggcagatgacagctggatttcttgactggccacagggcacattcgcctcccaggtgacgctggagggggacaagttgaaagtggagcgggagatcgatgggggcctggagaccctgcgcctgaagctgccagctgtggtgacagctgacctgaggctcaacgagccccgctacgccacgctgcccaacatcatgaaagccaagaagaagaagatcgaggtgatcaagcctggggacctgggtgtggacctgacctccaagctctctgtgatcagtgtggaggacccgccccagcgcacggccggcgtcaaggtggagaccactgaggacctggtggccaagctgaaggagattgggcggatttgagcccctcccagagatggcaataaaactgactctcaacatctatctctgttaactt

SEQ ID NO: 9406 - DNA, 1300 bp, Homo sapiens
  source 1..1300: mol_type = unassigned DNA
aaagaacaaaaggcttctgtgctgggcagcttgagttttccccaggctgctctattgttgcctgtagctgtgatttttcaggcaggctgctcctctgaggaccacccttaactgtctacctaactggtttttccttttcttctcctcatttgtatttatgtatcagtgtattatgtatttatatacacttggagatacagtaaaatgtacctctcactgtgggttaccataaatactgtaaatttgagaaacactctttcaggcctgagaggagcagtgacaacagtagggatgatcaagtcagatgtccctggtacccaggaatggctggatgagagaaggagacagggtgacctgcccctgcctacaaactctaacccagttctgtccctggagctgtgtgaccccggacaaggccctgcccctttccaggctgtcgttgtcctcatccagcctgggagagggttggcgctgaggcccccaccttcttgcctgtttcctcctgaccccaccccttcccctcctgctgggcagatccgagtgaagcctgacaggaccggtgtggtcacggatggtgtgaagcactccatgaaccccttctgtgagatcgcggtggaggaggctgtgcggctcaaggagaagaagctggtgaaggaggtcatcgccgtcagctgtgggcctgcacagtgccaggagacgattcgtaccgccctggccatgggtgcagaccgaggtatccacgtggaggtgcccccagcagaagcagaacgcttgggtcccctgcaggtggctcgggtcctggccaagctggcagagaaggagaaggtggacctggtgctgctgggcaaacaggccatcgatgatgactgtaaccagacagggcagatgacagctggatttcttgactggccacagggcacattcgcctcccaggtgacgctggagggggacaagttgaaagtggagcgggagatcgatgggggcctggagaccctgcgcctgaagctgccagctgtggtgacagctgacctgaggctcaacgagccccgctacgccacgctgcccaacatcatgaaagccaagaagaagaagatcgaggtgatcaagcctggggacctgggtgtggacctgacctccaagctctctgtgatcagtgtggaggacccgccccagcgcacggccggcgtcaaggtggagaccactgaggacctggtggccaagctgaaggagattgggcggatttgagcccctcccagagatggcaataaaactgactctcaacatctatctctgttaactt

SEQ ID NO: 9407 - DNA, 1903 bp, Homo sapiens
  source 1..1903: mol_type = unassigned DNA
agagttcttgctttccggcaggtgatggcgccccccgcggcctagaggtccagcgcccgccgcgagcagcggacagtcctcctgttgtgtccgaccgagagtcctggtgactttgaacatgctggtgccgctagccaagctgtcctgcctgggagtgaacatggaaaggtttgcagaagaagcagatgttgtaatagttggtgcaggccctgcagggctctctgcagctgttcgtctaaaacagttggctgtggcacatgaaaaggacatccgtgtgtgtctagtggagaaagctgcccagataggagctcatactctctcaggggcttgccttgatccaggtgcttttaaagaactcttcccagactggaaagagaagggggctccacttaacactcctgtaacagaagacagatttggaattttaacagagaaatacagaattcctgtgccaattcttccagggcttccaatgaataatcatggcaattacattgtacgcttgggacatttagtgagctggatgggcgaacaagcagaagcccttggtgttgaagtataccctggttatgcagctgctgaggtcctttttcatgatgatggtagtgtaaaaggaattgccactaacgatgtagggatacaaaaggatggtgcaccaaaggcaacatttgagagaggactggaactacatgctaaagtcacaatttttgcagaaggttgccatggacatctagccaagcaactatataagaagtttgatttgagagcaaattgtgaacctcaaacctacgggattggactgaaggagttatgggttattgatgaaaagaactggaaacctgggagagtagatcacactgttggttggcccttggacagacatacctatggaggatctttcctctatcatttgaatgaaggtgaacccctagtagctcttggtcttgtggttggtctagactatcagaatccatacctgagtccatttagagagttccaaaggtggaaacaccatcctagcattcggccaaccttggaaggtggaaaaaggattgcatacggagccagagctctcaatgaaggtggctttcagtctataccaaaactcacctttcctggtggtttactaattggttgtagtcctggttttatgaatgttcccaagatcaaaggtactcacacagcaatgaaaagtggaattttagcagcagaatctatttttaatcaactaactagtgaaaatctccaatcaaagacaataggactccatgtaactgaatatgaggacaatttgaagaactcatgggtatggaaagagctatattctgttagaaatataagaccgtcctgccacggagtactgggtgtatatggagggatgatttacactggaatcttttactggatattgagaggaatggagccgtggactctgaaacataaaggttctgactttgaacggctcaagccagccaaggattgcacacctattgagtatccaaaacccgatggacagatcagttttgacctcttgtcatctgtggctctgagtggtactaatcatgaacatgaccagccggcacacttaaccttaagggatgacagtatacctgtaaatagaaatctgtcgatatatgatgggcccgagcagcgattctgtcctgcaggagtttatgaatttgtacctgtggaacaaggtgatggatttcggttacagataaatgctcagaactgtgtacattgtaaaacatgtgatattaaagatccaagtcagaatattaactgggtggtacctgaaggtggaggaggacctgcttacaatggaatgtaaactgcagctagccagtttctttcaagtatggcaagctaacgttaaaatgtttagagattaacagatttcaga

SEQ ID NO: 9408 - DNA, 3282 bp, Homo sapiens
  source 1..3282: mol_type = unassigned DNA
gtgctgtgggattcgcggacccctctggccgcgctgtggctgtttcaccgctccccggctgggacttggagtcccttatctttccctggtttggtacatgacccggaagcctcggctggccgttgcgtcatccatggcgccggcgcagagcgagaaggaggtgggaacgccgtgaagcaagagcggtcggcagagcggggaggcgaactgcagcagagttcttgctttccggcaggtgatggcgccccccgcggcctagaggtccagcgcccgccgcgagcagcggacagtcctcctgttgtgtccgaccgagagtcctggtgactttgaacatgctggtgccgctagccaagctgtcctgcctggcatatcagtgctttcatgccttaaaaattaagaaaaattatctacctctatgtgctacaagatggtcttcaacttctactgtgcctcgaattactacccattatactatttatccccgggataaggacaagagatgggaaggagtgaacatggaaaggtttgcagaagaagcagatgttgtaatagttggtgcaggccctgcagggctctctgcagctgttcgtctaaaacagttggctgtggcacatgaaaaggacatccgtgtgtgtctagtggagaaagctgcccagataggagctcatactctctcaggggcttgccttgatccaggtgcttttaaagaactcttcccagactggaaagagaagggggctccacttaacactcctgtaacagaagacagatttggaattttaacagagaaatacagaattcctgtgccaattcttccagggcttccaatgaataatcatggcaattacattgtacgcttgggacatttagtgagctggatgggcgaacaagcagaagcccttggtgttgaagtataccctggttatgcagctgctgaggtcctttttcatgatgatggtagtgtaaaaggaattgccactaacgatgtagggatacaaaaggatggtgcaccaaaggcaacatttgagagaggactggaactacatgctaaagtcacaatttttgcagaaggttgccatggacatctagccaagcaactatataagaagtttgatttgagagcaaattgtgaacctcaaacctacgggattggactgaaggagttatgggttattgatgaaaagaactggaaacctgggagagtagatcacactgttggttggcccttggacagacatacctatggaggatctttcctctatcatttgaatgaaggtgaacccctagtagctcttggtcttgtggttggtctagactatcagaatccatacctgagtccatttagagagttccaaaggtggaaacaccatcctagcattcggccaaccttggaaggtggaaaaaggattgcatacggagccagagctctcaatgaaggtggctttcagtctataccaaaactcacctttcctggtggtttactaattggttgtagtcctggttttatgaatgttcccaagatcaaaggtactcacacagcaatgaaaagtggaattttagcagcagaatctatttttaatcaactaactagtgaaaatctccaatcaaagacaataggactccatgtaactgaatatgaggacaatttgaagaactcatgggtatggaaagagctatattctgttagaaatataagaccgtcctgccacggagtactgggtgtatatggagggatgatttacactggaatcttttactggatattgagaggaatggagccgtggactctgaaacataaaggttctgactttgaacggctcaagccagccaaggattgcacacctattgagtatccaaaacccgatggacagatcagttttgacctcttgtcatctgtggctctgagtggtactaatcatgaacatgaccagccggcacacttaaccttaagggatgacagtatacctgtaaatagaaatctgtcgatatatgatgggcccgagcagcgattctgtcctgcaggagtttatgaatttgtacctgtggaacaaggtgatggatttcggttacagataaatgctcagaactgtgtacattgtaaaacatgtgatattaaagatccaagtcagaatattaactgggtggtacctgaaggtggaggaggacctgcttacaatggaatgtaaactgcagctagccagtttctttcaagtatggcaagctaacgttaaaatgtttagagattaacagatttcagaatgtctttctgcatattactgaacagaatagtcacaaaatgattatcaaataaaaattttatactatatgtaagattgtcccataaagaaattacgggtattgcttttaaataacctttataagaatgcagcatcttcctacctcttcagttcttcagagattcagtaccaagagcaaaattcactactggactttacatttgacttgccaaagttaagtaatcaaatataaaaatgaatatatattctagactaaagttttattgaaacacagccatacccattggttacacattgtctatggctaattttgaattacaactgtgcaggtgagtgggtgtgacattacatggtctacaaagcctaaaaactttatgatctggcccttgcagaagaagtatgcccatccctgaacaagtttgtgtgtgtgtgtgtgtgtgtgtgtgtgtgtgtgtgtgtattatctataagtatgaaaacctagcatcatccaccatggatacatcaaagaatcgaaggaaacaatatacaaacttaagctctcatctctttattcaataagatgtgtctttacaagtttaaaaagactggacaccattattttttatgaataatgcacataaccattttaaaaaacattttacttggccgggcacggtggctcacacctgtaatcccagcactttgggaggccaaggcggggtggatcacaaggtcaggagttcaagaccaacgtgacgtgaccaatatggtgaaaccccatctctactaaaaatacaaaaattagctgggcgtggtggcacgtgcctgtaatcccagctacttgggaagctgaggcaggagaattgcttgaacccgggaggcagaggatgcagtgagccgagattgcgccaccgcactccagcctgggtgacagagcaagactccatctcaaagaaacaaacaaaaccactttacttactgtattgtgacatgtttattaagcatgaacccctatcagtactcctaaactgtaaacagtaag

SEQ ID NO: 9409 - DNA, 2258 bp, Homo sapiens
  source 1..2258: mol_type = unassigned DNA
gagctgtagggaaacgcaggggcggcttctaggtgctgccgccgccaccgccaccaccacctccaccgccgcctcggaacccaggcctggggggcggtggggccgcgtatggagcccccgccccccggagctgccaacattgccaacgccaccgccacgctacacacagcctcaactttcaggagacccgtccgtggccttatttattccacccttcctgtacatcgtagcgaatcaatccgtggcgccgcactcctccgcatccctctttaacagtacccctgggatggcgtgagcactcccccagcgatggacccatctgtgacgctgtggcagtttctgctgcagctgctgagagagcaaggcaatggccacatcatctcctggacttcacgggatggtggtgaattcaagctggtggatgcagaggaggtggcccggctgtgggggctacgcaagaacaagaccaacatgaattacgacaagctcagccgggccttgcggtactactatgacaagaacatcatccgcaaggtgagcggccagaagttcgtctacaagtttgtgtcctaccctgaggtcgcagggtgctccactgaggactgcccgccccagccagaggtgtctgttacctccaccatgccaaatgtggcccctgctgctatacatgccgccccaggggacactgtctctggaaagccaggcacacccaagggtgcaggaatggcaggcccaggcggtttggcacgcagcagccggaacgagtacatgcgctcgggcctctattccaccttcaccatccagtctctgcagccgcagccaccccctcatcctcggcctgctgtggtgctccccagtgcagctcctgcaggggcagcagcgcccccctcggggagcaggagcaccagtccaagccccttggaggcctgtctggaggctgaagaggccggcttgcctctgcaggtcatcctgaccccgcccgaggccccaaacctgaaatcggaagagcttaatgtggagccgggtttgggccgggctttgcccccagaagtgaaagtagaagggcccaaggaagagttggaagttgcgggggagagagggtttgtgccagaaaccaccaaggccgagccagaagtccctccacaggagggcgtgccagcccggctgcccgcggttgttatggacaccgcagggcaggcgggcggccatgcggcttccagccctgagatctcccagccgcagaagggccggaagccccgggacctagagcttccactcagcccgagcctgctaggtgggccgggacccgaacggaccccaggatcgggaagtggctccggcctccaggctccggggccggcgctgaccccatccctgcttcctacgcatacattgaccccggtgctgctgacacccagctcgctgcctcctagcattcacttctggagcaccctgagtcccattgcgccccgtagcccggccaagctctccttccagtttccatccagtggcagcgcccaggtgcacatcccttctatcagcgtggatggcctctcgacccccgtggtgctctccccagggccccagaagccatgactactaccaccaccaccaccaccccttctggggtcactccatccatgctctctccagccagccatctcaaggagaaacatagttcaactgaaagactcatgctctgattgtggtggggtggggatccttgggaagaattactcccaagagtaactctcattatctcctccacagaaaacacacagcttccacaacttctctgttttctgtcagtcccccagtggccgcccttacacgtctcctacttcaatggtaggggcggtttatttatttattttttgaaggccactgggaggagcctgacctaaccttttagggtggttaggacatctcccccacctccccacttttttccccaagacaagacaatcgaggtctggcttgagaacgacctttctttctttatttctcagcctgcccttggggagatgagggagccctgtctgcgtttttggatgtgagtagaagagttagtttgttttgttttattattcctggccatactcaggggtccaggaagaatttgtaccatttaatgggttgggagtcttggccaaggaagaatcacacccttggaatagaaatttccacctccccaacctttctctcagacagcttatccttttcaaccaactttttggccagggaggaatgtccctttt

SEQ ID NO: 9410 - DNA, 4205 bp, Homo sapiens
  source 1..4205: mol_type = unassigned DNA
tgggcggccagccccggcgcacagccgcggccggggcgcgcggcgcggggcggaaaagcctgtttacacagactgcacaccgcctggggaataatgcagtaaaggaagtgagccggctcggcctgactgctccaacttcctgctctcacacacaccagaggggaaaaaaaaagaggagcgagagaaagaaaaaaagggggaaaaatcaggatctcattacaagagccacagaccgtctgcagacgcctgtcagcatggaaagtcgggggctttcgcccgggtcctcctagaaattccccccgaagaagactcccccacatctgggtatggagagtgcaatcacgctgtggcagttcctgttgcagttgctgctggatcagaaacatgagcatttgatctgctggacctcgaacgatggtgaattcaagctcctcaaagcagaagaagtggccaagctgtggggactccgaaaaaacaaaacaaatatgaactatgataagctgagcagagccctgcgatactattatgacaagaacatcatcaagaaggtgatcgggcagaagtttgtgtacaagtttgtctctttcccggagatcctgaagatggatcctcacgcggtggagatcagccgggagagccttctgctgcaggacagcgactgcaaggcgtctccggagggccgcgaggcccacaaacacggcctggccgccctcagaagcacgagccgcaacgaatacatccactcaggcctgtactcgtccttcaccattaattccctgcagaacccaccagacgccttcaaggccatcaagacggagaagctggaggagccgcccgaagacagcccccccgtggaagaagtcaggactgtgatcaggtttgtgaccaataaaaccgacaagcacgtcaccaggccggtggtgtccctgccttccacgtcagaggctgcggcggcgtccgccttcctggcctcgtccgtctcggccaagatctcctctttaatgttgccaaacgctgccagtatttcatccgcctcacccttctcatctcggtccccgtccctgtcccccaactcacccctcccttctgaacacagaagcctcttcctggaggccgcctgccatgactccgattccctggagcccttgaacctgtcatcgggctccaagaccaagtctccatctcttcccccaaaggccaaaaaacccaaaggcttggaaatctcagcgcccccgctggtgctctccggcaccgacatcggctccatcgccctcaacagcccagccctcccctcgggatccctcaccccagccttcttcaccgcacagacaccaaatggattgcttctgactccgagtccactgctctccagcatacatttctggagcagccttagtccagttgctccgctgagtcctgccaggctgcaagggccaagcacgctgttccagttccccacactgcttaatggccacatgccagtgccaatccccagtctggacagagctgcttctccagtactgctttcttcaaactctcagaaatcctgatgacgtctggccacaattaaggactcattaactgatgaaacaaatttgtccccacgggctagtttacctgtgtcgtgagaaggacattgtgaaactcttgttaatttggtttgcacttttcataacatggatagtctagatttatgttagcattttaaaaactgtttttgatatattcaagtatatatgaaaatctgtttggcattaagtgaattttaatgtttttgtttttatatccttttagctcttaagtgttgaacactgttgacagtgaagaacttttcttaatggttttcagtataactaataaggatgtgaagcttttttctctttagttctgagtatgctaaactgtgtgcttatatagactataaccagttgtgccttccttcgcatttaatgtaaatgaatgatttatatattttttagtattaagaggaaatgtttgaaagatgaaaattagtatcaaacagctctctagtagaatttcattatttttcaccagtgggcaatatgaaagcatatatcacgttttgttttactttcaattgtataagaattgccttagaacctcttttgaactgaaattcagtaaatgtccaagtaatgtttttataataaactaagccatatttagacaataaacattgataaaagaaaatgttctaaagtacattttcaaaagaatggaccttgaaaggctagcctccttagctgtttacagtatcttatcttttagatgcctcccagacaaaaatctgagatggaaaagctacatcaagttcatgctattccaggcccaagaatatctcctaggttagcatattcttatttcaaaaaattagccctggttttctcagttttccatagggaatcccgaccatctgatatatttactgtgtcagtataagtaagttggggttcccctggaactataattaacatttaaaaaatctaatgctttagaagaagctcacagagtggtgatgaacccaaacaacaaagaaaccatttttaacactaggtatcttcatcagtataggtaggtgttcacaatttttgatggatcaaaaacttgctgtaatacaaatagagagtggaggtactaaaggccttgcttgtggaaactgagagaggatacactgctttatgtattactaaagttaggggagaatgaaggaaatctgacagatgaaaaattctacaggaacctcatcatcgtggaactgaactgatgataacttggaacactccagtaaattctgttgtgtaatgtaatttggagcagtgataatacagacatattttctgttccatcagaaaatcagcaggcaccagtccaaaggtaccacacctgtacatgaagaaggaaagttctaatacaagaaaactgaaaagcaccaagctttaaattcaagattaattacaatccttaactataagtgatgataaaaactaacttgaaatgtgactaaataactgatccaaactgggcattaagtggcaggattatgagaaaggataaaaaaagagatttgagaaaacacatttcttgaattttcagaaaaaaatctagactattgctttgacacttagaaattctgaggtttttcaattggaattgagcatctctgtatgtggggatgtgggcccttatcaagggataaaaatccaaacactctaacatgcctccttgactgtaaagtaatgacactggttccaaaattcacaaataatagacactactgtccccccacccccaccccataggctaagaataattctgtaccagaataaaaggagctggtccagggaactgatatttactgaacatacaaagttagtgctagaaggggcctttgagaatgcttcccgccacctgtttccagctcaagacaggtgcacagcagaagctgggagttgcctatggctgcacagctcactgaaggtagaacaatgattggtgctcagtccaattctgtctcccccatgcctagctgttaagtaattactggttcaaaactacgtgttattagtaaaacaaacaaaacagataaagacagcatttaaaactgtgttgtcagataagagaacacatccaaaatgcatgattcttacaaactaaaggaagttaatgtgcaaaaatctcaaccaaaactactatttttagtatacttgtttacgtaaatgctgattggaaatatttaaatgactatagatctgattctttcttttcctttggaaactgggattaatgtatgctctagatccatttattagaaatgcaaaaatactacaattttttgatggatgaaaatactcctgtaacacaaacagagaactggaggaactgaagaataactcactcatatagctctgcctcattctgtgtgtgtgtgcatgtgtgtgttagcagaggtattttactcagaaaataggtttcaaagaacattaatgactttcttttcccttttatgtctgcttaatcagtgttaaactgctatgggaaaagttttatagaactatataacctgaatgttggtctctttgtacacatcttttctatgactgcaaatcttcactttatgtatcatttttactgtcatattatttttgttcaataaaaactttgtgataaaaggtgtttagaggtaa

SEQ ID NO: 9411 - DNA, 539 bp, Homo sapiens
  source 1..539: mol_type = unassigned DNA
acagccgcggccggggcgcgcggcgcggggcggaaaagcctgtttacacagactgcacaccgcctggggaataatgcagtaaaggaagtgagccggctcggcctgactgctccaacttcctgctctcacacacaccagaggggaaaaaaaaagaggagcgagagaaagaaaaaaagggggaaaaatcaggatctcattacaagagccacagaccgtctgcagacgcctgtcagcatggaaagtcgggggctttcgcccgggtcctcctagaaattccccccgaagaagactcccccacatctggaagaccagtatggtgctgtgaaatgttgcaaaacatgacctgatgacaacccaaaacacttcatagaaaactatccaagaatgtgacttcctggagtagagtcttttttcactgagggtatggagagtgcaatcacgctgtggcagttcctgttgcagttgctgctggatcagaaacatgagcatttgatctgctggacctcgaacgatggtgaattcaagctcctcaaagcaga

SEQ ID NO: 9412 - DNA, 808 bp, Homo sapiens
  source 1..808: mol_type = unassigned DNA
ccgtctgcagacgcctgtcagcatggaaagtcgggggctttcgcccgggtcctcctagaaattccccccgaagaagactcccccacatctggaagagattaaatgaagatgtgtgtgtgttgaagactgcatagtgcacactctgtgtggctaccggtgagccacgtggcgggatacaggactcaaagaagatcacactggagaagggagttcatgctctgttgcccaggctggggtgcagtgatgtgatcacagctcactgcagcctcaaactcctgggcttaagtgatcctcctgcctcagctccccaagtagctgggactacaggtatggagagtgcaatcacgctgtggcagttcctgttgcagttgctgctggatcagaaacatgagcatttgatctgctggacctcgaacgatggtgaattcaagctcctcaaagcagaagaagtggccaagctgtggggactccgaaaaaacaaaacaaatatgaactatgataagctgagcagagccctgcgatactattatgacaagaacatcatcaagaaggtgatcgggcagaagtttgtgtacaagtttgtctctttcccggagatcctgaagatggatcctcacgcggtggagatcagccgggagagccttctgctgcaggacagcgactgcaaggcgtctccggagggccgcgaggcccacaaacacggcctggccgccctcagaagcacgagccgcaacgaatacatccactcaggcctgtactcgtccttcaccattaattccctgcagaacccaccagacgccttcaaggc

SEQ ID NO: 9413 - DNA, 2118 bp, Homo sapiens
  source 1..2118: mol_type = unassigned DNA
gcggccgcggagggcctggcaggccccgccgctgcaaggaacgccccgaacgcgcgcgcccggcgtgtagcggccccaagacccgcgccgccgctgccgcgtgcgggggcggggagggcggggcgccaggagccgcggcggcgggagatgcgggcggctgcgggcacccggcgggctcggcttggccgccgccgccttctacggctccgccgcgggggtcgcagcggctgccgcgccgtcctcgagtttccagcgtgaggaggaggctgagggcggagaggcgcatcgtgttcgaggcggagaccgagggggagccccgcgcgcggcgtcgctcattgctatggacagtgctatcaccctgtggcagttccttcttcagctcctgcagaagcctcagaacaagcacatgatctgttggacctctaatgatgggcagtttaagcttttgcaggcagaagaggtggctcgtctctgggggattcgcaagaacaagcctaacatgaattatgacaaactcagccgagccctcagatactattatgtaaagaatatcatcaaaaaagtgaatggtcagaagtttgtgtacaagtttgtctcttatccagagattttgaacatggatccaatgacagtgggcaggattgagggtgactgtgaaagtttaaacttcagtgaagtcagcagcagttccaaagatgtggagaatggagggaaagataaaccacctcagcctggtgccaagacctctagccgcaatgactacatacactctggcttatattcttcatttactctcaactctttgaactcctccaatgtaaagcttttcaaattgataaagactgagaatccagccgagaaactggcagagaaaaaatctcctcaggagcccacaccatctgtcatcaaatttgtcacgacaccttccaaaaagccaccggttgaacctgttgctgccaccatttcaattggcccaagtatttctccatcttcagaagaaactatccaagctttggagacattggtttccccaaaactgccttccctggaagccccaacctctgcctctaacgtaatgactgcttttgccaccacaccacccatttcgtccataccccctttgcaggaacctcccagaacaccttcaccaccactgagttctcacccagacatcgacacagacattgattcagtggcttctcagccaatggaacttccagagaatttgtcactggagcctaaagaccaggattcagtcttgctagaaaaggacaaagtaaataattcatcaagatccaagaaacccaaagggttagaactggcacccacccttgtgatcacgagcagtgatccaagcccactgggaatactgagcccatctctccctacagcttctcttacaccagcatttttttcacaggtagcttgctcgctctttatggtgtcaccattgctttcatttatttgcccttttaagcaaatccagaatttatacactcaagtttgctttctgttacttaggtttgtcttagaaaggttatgtgtgactgtcatgtgaaagttaccccatttctcatcttaattaggattgctaaaatagaaagtttggagtattttcttaaaaaattcattgttctacaagtaaataaatattttgatttttctatttcctcctaaagaaagtacacacactctctcgctctctctcggtcttataaaactcgttggtgtcttataaaacaaacagtgataatctcaagttagaaaacagtaggtcctgagaaccataagaaaaatgactggtgtgatgttgagtaacaagttggtacagttactttagctatttattaacttgctcatctcatagaacattttagtagatttttcacacacctcattattaaaaaaaaacaaacatgctggtgtcttggttacccattattcctctgtacctgaattcaggttggtttttctatttggaaaagactttataaatgttggcttaaaaagaggttgagcaccagaatctcagaatttaccaccaaagaactcatccatgtaaccaaaaaccacttgtacccccaaaaactattgaaataaaaatttaaaaaattttaa

SEQ ID NO: 9414 - DNA, 10239 bp, Homo sapiens
  source 1..10239: mol_type = unassigned DNA
gcggccgcggagggcctggcaggccccgccgctgcaaggaacgccccgaacgcgcgcgcccggcgtgtagcggccccaagacccgcgccgccgctgccgcgtgcgggggcggggagggcggggcgccaggagccgcggcggcgggagatgcgggcggctgcgggcacccggcgggctcggcttggccgccgccgccttctacggctccgccgcgggggtcgcagcggctgccgcgccgtcctcgagtttccagcgtgaggaggaggctgagggcggagaggcgcatcgtgttcgaggcggagaccgagggggagccccgcgcgcggcgtcgctcattgctatggacagtgctatcaccctgtggcagttccttcttcagctcctgcagaagcctcagaacaagcacatgatctgttggacctctaatgatgggcagtttaagcttttgcaggcagaagaggtggctcgtctctgggggattcgcaagaacaagcctaacatgaattatgacaaactcagccgagccctcagatactattatgtaaagaatatcatcaaaaaagtgaatggtcagaagtttgtgtacaagtttgtctcttatccagagattttgaacatggatccaatgacagtgggcaggattgagggtgactgtgaaagtttaaacttcagtgaagtcagcagcagttccaaagatgtggagaatggagggaaagataaaccacctcagcctggtgccaagacctctagccgcaatgactacatacactctggcttatattcttcatttactctcaactctttgaactcctccaatgtaaagcttttcaaattgataaagactgagaatccagccgagaaactggcagagaaaaaatctcctcaggagcccacaccatctgtcatcaaatttgtcacgacaccttccaaaaagccaccggttgaacctgttgctgccaccatttcaattggcccaagtatttctccatcttcagaagaaactatccaagctttggagacattggtttccccaaaactgccttccctggaagccccaacctctgcctctaacgtaatgactgcttttgccaccacaccacccatttcgtccataccccctttgcaggaacctcccagaacaccttcaccaccactgagttctcacccagacatcgacacagacattgattcagtggcttctcagccaatggaacttccagagaatttgtcactggagcctaaagaccaggattcagtcttgctagaaaaggacaaagtaaataattcatcaagatccaagaaacccaaagggttagaactggcacccacccttgtgatcacgagcagtgatccaagcccactgggaatactgagcccatctctccctacagcttctcttacaccagcatttttttcacagacacccatcatactgactccaagccccttgctctccagtatccacttctggagtactctcagtcctgttgctcccctaagtccagccagactgcaaggtgctaacacacttttccagtttccttctgtactgaacagtcatgggccattcactctgtctgggctggatggaccttccacccctggcccattttccccagacctacagaagacataacctatgcacttgtggaatgagagaaccgaggaacgaagaaacagacattcaacatgattgcatttgaagtgagcaattgatagttctacaatgctgataatagactattgtgatttttgccattccccattgaaaacatctttttaggattctctttgaataggactcaagttggactatatgtataaaaatgccttaattggagtctaaactccacctccctctgtcttttccttttctttttctttccttccttccttttcttttctcctttaaaaatattttgagctttgtgctgaagaagtttttggtgggctttagtgactgtgctttgcaaaagcaattaagaacaaagttactccttctggctattgggaccctttggccaggaaaaattatgcttagaatctattatttaaagaaatatttgtgaaatgaattggcatctttaggactaagtgtgctctgttgaatgacttaaagtgagctgttcctaagcagtggaagaagaagaatcattcctattcatacaaagtaagattggagcagtcatactggggagattgttttgtgtgaactataacgtgtaagcaactccatgaaaaggcatcttgtttacctttattcagggtggatctcttagccatatgtatgatcctgtctgaacctgtcaacagagcatggagctagtctatttcactatagaaagatttttagacctggggtttaagacagtttttggaacacctagtaagaatatgggacctcacatctagcacagaaatgctctttgccctctgggtggtatgattatatgcccatggaatacagcatgggaaatgatcacttttaggaggatgaacttggattttgaatatttgaaacatctctgagtaaaagattcgatcagataacttgaaacaacatgtagtggttttctcaattagaagataaccaagtgaaggacctgtctttttcctgttcattttacctcattttctactatacatttatcacctttcctttatgtttaaggttgttagaggttatgatagttttaaagatgcagttaggaaggtagaattcaaagtgaagcctccccagtcaggagcgaagatgtgcttatttcctttttttttttttttttttttttttgagacagagtcttgctctatcacccaggctggagtgcagtggcgcgatctcagctcactgtaagctccgcctcccgggttcaagcaattctcctgcctcagcctcctgagtagctgggactacaggcatgcgccactacgcctggctaatttttgtatttttagtagagacggggtttcaccatgttggccaggatggtcttgatctcttgaccttgtgatccgcccacctcagcctcccaaaggcgcaggctcagatgtgcttatttctttcaactttttttttttaaatggggaagagcagagttcatttgggaatgcttatacatagggattggattgttcatattagtagtaaaaaatgtaggccttattctctacattaccaaatttttaaaatattactatatggtaatcaatgccaggtacagatttgttggttccccaaactgaattgatatcagtatcacagtggagtcttttgaaaattaaagtccaggattaaattatatgttgtcaccattcaccaccactaccaccctcccccaccaatctctcccaccggttaaactcgtcttctaatcctgtagaatcacatgaactaaatgaagaagtaagaacttgaaggctcagactgacactgttacaaactagcatcttcagatgcatggtatttactttaaatgtgcttatatacagtgtagagaagctcttgtataagaagacatctatgctagctaacttagtagtagtagagggaacatattcagtgagctgcctttatatctgtagtgtcggagacttgttactggttcatttgtggttatcagttgaaggttctgttcctgagatgtgcaatagtagtgttgaaaggtattgtttaatagtgatggggaacagacatattggacttttttttccatattaaattatttagtttgcatgcctgtttgaaattggacctctcagcagcactttgaaatagttttaattaggttaacattttgtacattaaataagtagatatagatggttgatttaactagatgtgttaaattttgaaagcacaaaggtattttatctttttgaattaaaggagaaaagccattgatttgttttcacagacagtatttttaataattaactgtctcagcacagaggtaccttggaaccaagggcaccattgaaactcagttgaagcaacttcctagtaaaccattttagtgagtcctttttgcataaatctatagcctctcagaggtgtgaggctgtcacagattggtgatctgctatctctttgagatcaactaatttggagaagtgtgtgtgtgcgtatccttttttaagtcaaagtttacaaccttactgcaggtgtatgaggcagacagttctgtttatagactacctccttcctggaaaagtctcagcttcatattctgttgaatatatgcagaattcttagtgtgaaaggtgatgtaccacttcagatcagttttcactggagagacttgtaattggtagctgtagctcgtatccatccctagtcactttgccaggatgaatgctgttgggcagcagtagcctaagttacggaaggggagcagattgaatggggttttgagacatcttctctgataccttagctttccttctgctctggtcgctatccactcagtcgtgtgctagaaatgtttaacaaccaggatctctggggtgggggtgggggggagcgctgaatttgtagcatttgctgcaaatataaattataaataaaattctaatataaattagaattttatatcaaattctttgatataaattagttactcctcctgtggctgatttcaagctaccaccttagagttcagaaaggatgtgcacagttggctcagagccagtgctggcaaaccattgcatttactccacccaagagtggattttcacataatttctaaaataattttttcttatttatatactgacttttcaaaatacaaaattaaaatatcatgtctgacttcagtgatctttttctttttctttttttagaaatgagatctttcagtaatcctttaatttaattttttagagatggagtcttggtgtgttacccagggtggactcaaactcccgggctcaagtgatcctcctgcctcagcctcctgcatagctgggctacaggcatgcaccaccacacctggcttagtaatccttctttattaatggtttgtcacagtacgtttgtgatgttatattgctcatggcatactttatgtgttcgaacaaaggtggaaatttccattgatttttttttttttaaatgtatgcacaaacaatctggattttgaggagtacggtcaggaaaaaaaaaaaagaattagaggcccttgaaaggtcaaccgtaagcttcttagagttaaaatatgagtttaattttttcccacattttgacagttgaaattttgatagggacagtaaacctatgagcctctattaggctactggattttttttaactggaaaattccttgaagatttacatactatattacagattttaaaagtcaagactgacttaagtaaatcagaggtttggaattctggagctgtaactccaggctgttgatagtatcacttcagttccattcacccctgcattgtgtgacgtccagtctgacaacattgtttcatcctgatctgactttctactatgattcttaagttcttaaaggtgtccttttatgtttttggtgaatgtaagcacatttagagccactcagtaccacttctcaatacctctgaagcagtggttcagaaaaggagtgtccagcctttttgaacacacaaattgatcagtaagagttattgaacataaaaactttccctattaaaaattcatatgggtatatgttaaattatataccgctataccaaagtaatatgtgtgttataaaaaaatacacaaaaattgaagtgaaggatggcataaaaagtaattcttgagtagcagttatagtattttcttcccacaccccagttggttgtcttgtgcaccctccagaagcacacgcttttcctaaagactgctgactcaggatattctcattctaatctccaaacatatatgatgctctcttatgatatatggagaaatcctagagatttggagtttttcaggagagcttattgtcaacttttgaaatttcacattaattctttttgataaattcccaaataataatccattaccacatgttttccacagctttattcctattactttcgtcagcctgttgtctcttatcttcatgttaggtatgactctatttttattttactagtctgctcacagacttctttgggacttatgttatattttaccaacaaatttagaattatttcaagttgctttatgttaaaatatataacaagttacattttcttgctgcattaataagtttttgatttttaaaatctgatatttcagcaactaaaggaatacttttctttataggtctgttctgtttttaacctcattgactgtatatgttttatttacccgtgccaggagtctagaatcgtgcttaggtgccattcttaggtatgaaaacaagtttggagaccaatgcaggtctctgtgcagaaatctggggctctaaatgaattaccaaaccaataggaaagttaaaatactactcatgatgtagtgtgtcatctgaagctatgatagaatatattatttctaaaatagtattgagaagttaattgttcagtccatagtagtgtaagtgaagtgtggaggtcagccatagttgtctttcttcagcaggtactctaaccagagactgggttctgtggaaaatagaattatattcttggtttgggatcaacaaatgttttgttattgttttaatgttgctggcattgcctgaaacaaagtgccctgttattcctcttatgtcatcagaactctgcttactgaagttgaagtttaatcttaggatctagaattcttgtggttggtcgtgtattaagaaaagaaggtggtttgattttatttcttgtacttggtggaacctgttactatacaagtcatgttttgacctgtaagccgagcaaatctgaaaggtgaatcgttaatggtagtataattgtttcatttgaaactgtcagtttcttcaagtcacttctctgaaaaaaattatgatagattgatagcctgccagaaaatagcaatttctaaggtgctgccatccacacttacttattgtgaaatatgaaaatccagagtggtttgtatgagaggggaaatactggctctaagctttctacagaaaacaggaaattcatgctgttgttgacataattttaaaggaaacttttaacaagaaaattcatgagggatacaatcaaacatagttaatctcttgagtgctaatcatttgagtatagtccacatcaggaagttttatgaggttgaaaactttactttgaaatatttaattgggagactagaccatttctttttccaagtcattctgatttattgtcctagtaaatgtatgtgtatgcatatatactgatgtattgactgaatgtgtgtgtgtgtgtgtgtgcgcgtgtaaatctgttttcatagggaacatacattgatggctcctagtctattttatactaaaacttaaaaaaatttgctgcactttgcagttgccactttttaaaagattaatgctttgcacatttcagtaggccttaaagatgaattgctcaccaacattttagaaatacactgcttacatgtgacatactctaaacaaagtcatagtaaactgttctcttaggttcatgtattattgagcaaataaggatgtcctttcttaaaatttctacatttatgtttgcttttgtgtaaaatctttattagtttgtaagtttctcaaagaggaggtttatactggaagcagtatttctaaagtacagagattcgaccatggattgaatacagtagtggaggaatgctggtattgtggcctaatttatccttttaaactgtatgtcattagtattagccaaaacctcagagtggagtgtcttgggctgaatgatcttctcaactttgccttgtttcccatctcataaaggctccttctggttcttttcccttccaaggattgtgagtcatgctcacataggcctgggatcttctggatggggtcggggaggaggtgggggtttcctgtggctggcccagagttctagccaatggaatcattcaagaatgcctaaagttcaggggtgggaatgccatatattggtgttaatcacttggcactttcttgggcaccaatattagcactgtttcatttttaataactggaagcacttaatgattattttgtttgtttaatttcaacttaaggatattgagggtcagagaagtaaggtttatttcttgtttatgttttctggaatttatagggtgtttgtagaagggataaatgggttacctaatgagccattcttctaggctctgtaaggtatgcccttttggctaggatattttaaaataatttgcaagcttttaatattgtgctttgtagaaatttacgatttttaaaaataatttgcaattgatagattacacttaaatttataaagtatccaattttaagtttcttttctgtttggtcattgttgcttattgtctattgtgtaggggacacaatcctgacatttcattgttttgttacttggggcagtattaaccagtggcctttgtatgtacattcattgcttacatttattgtttaagtggtagagtagcatttttatgaacttccctgttcagtattagtgaaattgacagatgcgtatatgtaaagatagaaaagaaacgaatacaattaattttttattccttgaggcctatttatttgttttggccctggatcttttctaatcacaattatatttctttatttttgcctttgagcagtttcatttatctttgtgggcagggaagattaaatatgaaattcagtccagtcattttgctactggttagctttagtttgaggcaagtaaaaatttttgattaaaattagtttcttaaaattatgcccttgctttaccaaataatcaaattggctaaaaaataagggtatgtaactttgcattttgaagaacaaaccaataatttttcatgagccctactcgatcttctttaaagaagaccttcctaagagacaattagggatgagtttgattaatgggaaatagctctaggttagattattttaaattccatacaccaagtgatttaaccacagtggcagtggcagtttctgaaccgtcaagtatgaacatcacttaaaaattaaaagatgcttaataataaactcttaattttcattaagccaatctgtaattcagaagaaaagcatatgtctgccatgggactattgcagtgcgtctccatcagtgttaacacaggagagatatgttattttatgtgtatgtcttagtttgggatatgtggtagtaagaacatgtcaagagtgctttcttcaaacctgtcagctcaactgagaagacagttacttcattgcttattttttcccttgttttattgaaatctgtatctcatatccagtatctaacactttgtagagatacttacatataatgtaagtgcacacctacccagaggaatggataactgttaaagtgttaataatagctcgtcttagttgatttcagcataatttacattagggagacctaaaaagcaccttcaaagtattaaaagcaccttttttttttctttttcctaaaaaagcaattaaaatggtcactgctaacatttattaaacttcatgttagttgatgaaacagctggagggaagctgccacatctcctagctaagcagtctgacttacctgttgggaaacaaagggatattgctctaagattgattaggatgattgtagctagagtcttgaattctatctgtatacggcagagaaactttatagagtgtagagaggtgagcgaaaggatgcaaaagcactttgagggctttataataatatgctgcttgaaaaaaaaaatgtgtagttgatactcagtgcatctccagacatagtaaggggttgctctgaccaatcaggtgatcattttttctatcacttcccaggttttatgcaaaaattttgttaaattctataatggtgatatgcatcttttaggaaagatatacatttttaaaaatctattttatgtaagaactgacagaggaatttgctttgtataatgcaggctggctttacaaaagcactgtagcaaatttactacaagtctaaaagtatacatatatgttaatagatatatgtgcaactagatatggacagcagttgtatttttttaaataaatatttttaacaaaatga

SEQ ID NO: 9415 - DNA, 2512 bp, Homo sapiens
  source 1..2512: mol_type = unassigned DNA
gcggccccaagacccgcgccgccgctgccgcgtgcgggggcggggagggcggggcgccaggagccgcggcggcgggagatgcgggcggctgcgggcacccggcgggctcggcttggccgccgccgccttctacggctccgccgcgggggtcgcagcggctgccgcgccgtcctcgagtttccagcgtgaggaggaggctgagggcggagaggcgcatcgtgttcgaggcggagaccgagggggagccccgcgcgcggcgtcgctcattgctatggacagtgctatcaccctgtggcagttccttcttcagctcctgcagaagcctcagaacaagcacatgatctgttggacctctaatgatgggcagtttaagcttttgcaggcagaagaggtggctcgtctctgggggattcgcaagaacaagcctaacatgaattatgacaaactcagccgagccctcagatactattatgtaaagaatatcatcaaaaaagtgaatggtcagaagtttgtgtacaagtttgtctcttatccagagattttgaacatggatccaatgacagtgggcaggattgagggtgactgtgaaagtttaaacttcagtgaagtcagcagcagttccaaagatgtggagaatggagggaaagataaaccacctcagcctggtgccaagacctctagccgcaatgactacatacactctggcttatattcttcatttactctcaactctttgaactcctccaatgtaaagcttttcaaattgataaagactgagaatccagccgagaaactggcagagaaaaaatctcctcaggagcccacaccatctgtcatcaaatttgtcacgacaccttccaaaaagccaccggttgaacctgttgctgccaccatttcaattggcccaagtatttctccatcttcagaagaaactatccaagctttggagacattggtttccccaaaactgccttccctggaagccccaacctctgcctctaacgtaatgactgcttttgccaccacaccacccatttcgtccataccccctttgcaggaacctcccagaacaccttcaccaccactgagttctcacccagacatcgacacagacattgattcagtggcttctcagccaatggaacttccagagaatttgtcactggagcctaaagaccaggattcagtcttgctagaaaaggacaaagtaaataattcatcaagatccaagaaacccaaagggttagaactggcacccacccttgtgatcacgagcagtgatccaagcccactgggaatactgagcccatctctccctacagcttctcttacaccagcatttttttcacagacacccatcatactgactccaagccccttgctctccagtatccacttctggagtactctcagtcctgttgctcccctaagtccagccagactgcaaggtgctaacacacttttccagtttccttctgtactgaacagtcatgggccattcactctgtctgggctggatggaccttccacccctggcccattttccccagacctacagaagacataacctatgcacttgtggaatgagagaaccgaggaacgaagaaacagacattcaacatgattgcatttgaatgaatccgatgtgcctgatgggttagatttccatatacaagtagcagaggaaaatctgggaacagggtgattccacaggattctgaaatgtccaaattcctgaaaggaagatgaggaagaaagtcctacttgtgtaactgagaagcgtgtggtaatgatctcaaacccagagtatggtccatgcatgaggtgacaaatggagtgaagcgcgcggctgtctccttccttcccatctgggtatctggacagctcttaccaacagtctgaaccagggaagaagataacttgagaagccagggaggacagagtctccgcctgggcaccttctcttaagaactggctttgcacacagccgatgcagtccctgggcactttgaaagcagtgggcaaaagggcaggttacactaaagcaagtcccagatgtcacatcatttcaatgaggagggtatggtgagatgcagctcttcccctccctccagcagggcaaaagaggaggaaaggagaatggagtcacaatgagggagattttggaggccggaagatctagatgtgaggtcctctctgtcagtttctggaagtgtgactgacctagggtccccacataccgaaccaaccagcatctgcagcaccatctcgccaactcctgcccctgtcaccagcactgtggttgcacagcctaacaaaaagagaaggtttggtttggtaaaagcaagttaaggagacagaagccagcattacaatccaggttgctggccaggcacagtggcatatgcatttcggaaggcacatcccagtactttaggagtcagaagtgggaggatctcttgaggccaggagttcaagaccagtctgggcaatatcacaagacttggtctct

SEQ ID NO: 9416 - DNA, 4690 bp, Homo sapiens
  source 1..4690: mol_type = unassigned DNA
catcagttcctaaattcacctgcagggctagggccaggcgcactcaccccacagccagccccactgggcctcggaggcagaatacgggaagaaccgcgaaacaaccctaaaccaattctgaggaccacgaattcggattatccgggagttcttttgccatggcaccgcccccgccacttccgctaggaacccggaagttcctacccgacgccggaagtcccacggccttgcctcctcagattcctctctcacccccacgcagaggagagaacttgcttctggacccgggtgggtgccggctcggctctccttgtcttccagagcggtggcccggaagcacagtcctcccagacgccagcgccagaagctcggatcgcggctgcaccgggagagcgccgatctgggtgcgaggcaggtgcggggccatgaatgggaccgcaaacccgctgctggaccgcgaggaacattgcctgaggctcggggagagcttcgagaagcggccgcgggcctccttccacactattcgttatgattttaaaccagcatctatagacacttcctgtgaaggagagcttcaagttggcaaaggagatgaagtcacaattacactgccacatatccctggatccacaccacccatgactgtgttcaaggggaacaaacggccttaccagaaagactgtgtgcttattattaatcatgacactggtgaatatgtgctggaaaaactcagtagcagcattcaggtgaagaaaacaagagctgagggcagcagtaaaatccaggcccgaatggaacagcagcccactcgtcctccacagacgtcacagccaccaccacctccaccacctatgccattcagagctccaacgaagcctccagttggacccaaaacttctcccttgaaagataacccctcacctgaacctcagttggatgacatcaaaagagagctgagggctgaagttgacattattgaacaaatgagcagcagcagtgggagcagctcttcagactctgagagctcttcgggaagtgatgacgatagctccagcagtggaggcgaggacaatggcccagcctctcctccgcagccttcacaccagcagccctacaacagtaggcctgccgttgccaatggaaccagccggccacaaggaagcaaccagctcatgaacaccctcagaaatgacttgcagttgagtgagtctggcagtgacagtgatgactagtgctggatctttcgaaacctactttttggtgcacaaacatgccgcaagactgagctactttggcgtggagtccattgcaagaggaaaatgttatggatcagtgactgtagtaggagtttgaggctctggaactctcacatattcaagtctttaacttagtggtgatgggtgattttctcgtgtcatttttgaacaatctcatctttcaaagtttaagtagacctgtagaagagctaacagaattatatttctatttagttaaaattgttaatgaaaaacagataaatgtgccctggtctaagttactcaaaggccatatcttcaccaggccagagattcagttttaaacctcagcagccatcagtttggccaagtggttggtaccagtggaatgaagtctttgatgggtaggagagagagggaaaacctcaaactacatcatagaagtatgttaaaaccactttaaattgttgacacaaagtggtaaggaagttttgtctgactcagcctgacaagcctggatagaaatggacctcagaatacagaatggagtccttgagtgtcagttggtgaggaccatggagtcctgccagctcaacctgtcatttacagactaagaaagggaagtacacacctggcttgtggccagtctcctgccccctctctgggctttcctcactgttctctcccttgaatctcatttgtaggaatcaagagattcctatacatgggacttttagatgtacattggcacttggattagattccaaaagacaaaagtgttgggtgcttctagcttgaattcagtccctaaatacatgaggctgggtgagcagatgaaaccggtagccactgtgctgatgcatgtgactccattcagttggggattttggttccatgtggatccatactaagtattcttcagtcagtggattttagcaaggggaggtaggagtggaagagaggtgtgaagaaacctctccgaacaaatgaaccagcagtaagtttctaaaaatcagaatctagatagaagttctgcaatatgaaatgagcacattctttgataaggcgtatctattcatgcttttgtaccactgttttgtacctgactccctgaccgatttgtattttttatatacaactagaaggaagtcacaagattgccttctacagtgtgccatttccaaatggatctgttgttggaggaaactggttgctagtcaatgttctatatttaatgaatgtgtgataaatcatcctgtaatcagtatggagtaacctgtttttgtagtttggatgaatatgtcctgagaaatttccatccactttggttcagcggacatcaaggtagtaataataatttttcctccacaggtccctccactcatatggcctctccctccccagctagtggaggggaagcagtctggacttagaaaggaaataggtggtctgtcataggggctttcattagagttaaacttcatagagtcaactgtttcatcatcatagtgagcccagagagccactgcccagcagcatgctcacaccacctaccctagtgtaggtaataggtctacgctaggaccccgtgctgggctctcagcccatcatgagattttggtggatttaatggcaggtaggaacttatttatagtggattgataattgctttataattccttggtaatgacagctcagggaaggtttcacaaggtcatgatcaggagacttgaattgttactggatgtaggaattgtttcactgctcttaacttgctcaaactggggcaggttccaggaacttgaactaaaaatatctatttaagcctctctctctttctctcctccccaacttttttctgaaagccttgatttctgtagacagaactatggtttttggcatgttgggtcaagacgtgtttctataggaaatgcttgcacgtggcactggcttggtgagtcaagcttcctgagcttcagaccgtttgtcctgtcatctgtcctgcccaacactgtatggtttttctctagcacggcttcaattttgttctctgcacaaagcctttggtggttctgccctctgccctccagctttacccaccagagtaagcaatcttttctttttagaaatcaagaatttggcttcacagatggcttctcacagatgccctcctgccagccaaaccggacttgttcttcctgcctctgtgccttctctcattctccttctctccctccataccccacttttgaggttctgtgggtaccatctttgtggactcttgtcttttttttcaacccacatggagtgccctgtgtgtacatactgaccttttttttttttttttttttttgcttgaactctggtcggtatgagctccttaaaagcaggtactgggctggctgtggtgactcatgcctgtaatcccagcactttgggaggctgaggtgggaggattgcttgagtccaggagtttgagaccagcctgggcaacatggcgagaccctgtttctacaaaaagaaaaagggaaaaaaaaagcagggactgtcattctcatctcctccctggggtatccacaggaatggacattcaaatggttgtagcctggtggggtagaaggcagagaagactacccagccagtgaagtgcagaggatagacataggaaaacattccaggcatttggagacagctgaaagtatccatgctgactttcatgatttagaagtctttaactgaattattaaaattgccttttttttgtgctgtacaatgtctactgtactgtgggtcatttagatgagatgaaaaacttaattaaatctgaagtgtcagaggcgcttagtaagccttagtaaagttgtgattgaagaaacttaatacaaatgaactagaggtttgtaatcatgccactcactaacgattttatttctgtagcagaatcattttttctatgtaaggtgttaatgtgtgtgtatgtgctttggttgtaggaaaacttgaaaattccaaaatccttattttcctatttgagaggctggttcagcagggtgtgtgtgtgtgtgtgtgtgtgtgtgtatgaatggtatatttattacattattttgaaagagaattagtgtgttatgtggataatgttatatacagccaaagtggatgtttctatttggcaaggaaggtaggatttctgaaactcaggccttaaccaataggttggaagacaagaccaattgaagagttaggaaatgtgagtttttgttacttctgttattccagtcttggtttcattgtctcattctttatttttaaaatcttgtgcctaaaagtttttttgcttaattatgaagtagacatgcatgtttacatttatgtaaaatatttgctgtgtaaagtattttttgtttattctcttaaaagatcactatatttaaataaaagtgaaggtcagcaacaca

SEQ ID NO: 9417 - DNA, 1037 bp, Homo sapiens
  source 1..1037: mol_type = unassigned DNA
ctctctcacccccacgcagaggagagaacttgcttctggacccgggtgggtgccggctcggctctccttgtcttccagagcggtggcccggaagcacagtcctcccagacgccagcgccagaagctcggatcgcggctgcaccgggagagcgccgatctgggtgcgaggcaggtgcggggccatgaatgggaccgcaaacccgctgctggaccgcgaggaacattgcctgaggctcggggagagcttcgagaagcggccgcgggcctccttccacactattcgttatgattttaaaccagcatctatagacacttcctgtgaaggagagcttcaagttggcaaaggagatgaagtcacaattacactgccacatatccctagctgagggcagcagtaaaatccaggcccgaatggaacagcagcccactcgtcctccacagacgtcacagccaccaccacctccaccacctatgccattcagagctccaacgaagcctccagttggacccaaaacttctcccttgaaagataacccctcacctgaacctcagttggatgacatcaaaagagagctgagggctgaagttgacattattgaacaaatgagcagcagcagtgggagcagctcttcagactctgagagctcttcgggaagtgatgacgatagctccagcagtggaggcgaggacaatggcccagcctctcctccgcagccttcacaccagcagccctacaacagtaggcctgccgttgccaatggaaccagccggccacaaggaagcaaccagctcatgaacaccctcagaaatgacttgcagttgagtgagtctggcagtgacagtgatgactagtgctggatctttcgaaacctactttttggtgcacaaacatgccgcaagactgagctactttggcgtggagtccattgcaagaggaaaatgttatggatcagtgactgtagtaggagtttgaggctctggaactctcacatattcaagtctttaacttagtggtgatgggtgattttctcgtgtca

SEQ ID NO: 9418 - DNA, 6431 bp, Homo sapiens
  source 1..6431: mol_type = unassigned DNA
ccctccggctcggcgaagcagggaaggggagagaagcaggagtcgggagactgcacaggccagaaagtctgcggagcgggccgcgcccctggcccgcccgggctccaagtcccgcgtcgccgccctggcggggacggtgcagcaggcggcgggatgcggcggggcggcagcctgagcgccccggatggcccgcggcggggcggcctgcaagagcgacgcgcggctgctgctggggcgggacgcgctgcggccggcgcccgccctgctggcccccgccgtgctgctgggcgccgcgctcggcctcggcctcggcctttggcttggctgccgcgcgggccgccagcgcacgcgacaccagaaagacgacactcaaaatctgctcaagaatttggagtctaatgcgcagaccccctcggaaactggctccccatcaaggaggaggaagagagaagtgcagatgtcgaaggacaaggaagctgttgatgaatgtgagccgccttccaacagcaatatcacagcattcgccctgaaggccaaagtcatctaccccatcaatcagaagttccggcctctggccgatggctcctccaacccgtctctgcatgaaaacttaaagcaggctgttttgccacaccagccggtagaggcctctccttccagcagtctggggagcctgagccagggtgagaaggacgactgcagctcctcatccagcgtccactcggccaccagcgatgacaggtttctcagccgcaccttcctccgggtgaacgccttccctgaagtgctggcctgcgagagtgtagacgttgacctgtgtatctacagccttcacttaaaagacctgctgcatttggacacggcactgaggcaggaaaagcatatgatgtttattcagatttttaaaatgtgcctccttgaccttcttcctaaaaagaagtcagatgatgaactataccagaagatcctttcaaaacaagaaaaagatttggaggaactagaaaagggacttcaggtcaaactgtcaaacacagaaatgtcgggggctggtgactctgagtacatcaccctggctgatgtggaaaagaaggagagagaatactctgaacagctaatcgataatatggaagctttctggaaacagatggcaaatatccagcactttcttgtggaccagtttaagtgttccagctccaaagcccgacagctgatgatgactctgacggaaagaatgattgcagccgaagggctattgtgcgattctcaggagctgcaggctctggacgccctggagaggacgatggggcgggcgcacatggcaaaagtgattgagtttctgaagctgcaagtccaggaggagaccaggtgccggctggctgccatctcccacggcctggagctgctggctggtgaggggaagctgtccgggcggcagaaggaggagctgctcacgcagcagcacaaggccttctggcaggaggcagagcgcttcagccgggagtttgtccagcgaggcaaagacctggtcacggcgtctctggctcaccaggtggagggaacggcaaaactcacgctggcccaagaggaggaacagagaagcttcctggctgaggcccagccgactgctgacccggaaaagtttctcgaggcttttcatgaggtcctggagaggcagaggctgatgcagtgtgacctggaggaagaggagaatgtcagagccaccgaggctgtggttgcactctgccaggagctgtacttcagcaccgtggacactttccagaagttcgtggatgccctgttccttcagacgctccctggcatgactggcctccccccggaagagtgtgactacttgaggcaggaagtccaggagaacgctgcctggcagctggggaagtcaaatcgcttccggaggcagcagtggaaactcttccaggagctcctagagcaagaccagcaggtgtggatggaggagtgtgcgctgtccagcgtgctgcagacacacctgcgggaggaccacgagggcaccatccgcggcgtcttgggccgactgggcggcctcactgaagagtccacgcggtgtgtcctgcaggggcatgacctgctgttgcgctcagccctccggaggctggcactccgcggcaacgccctggccaccctgacgcagatgcggctatcggggaagaagcacctcctgcaggagctgcgggaacagcgtgcactggagcaggggtcctcccagtgcctggacgagcatcagtggcagctgctcagggccctggaggcgcgtgtgctggaggaggccagccggctagaggaggaagcacagcagacacggctgcagctccagcagcggctcctggccgaggcccaggaggtggggcagcttctgcagcagcacatggagtgcgccattgggcaggcgctgctggtgcatgcacggaatgcagccaccaagagccgggccaaggacagggatgacttcaagaggacactgatggaggcggcagtggagagcgtctacgtgaccagcgctggtgtcagccgcctggtgcaggcgtattaccagcaaatcggaaggatcatggaggaccacgaggagagaaaactgcagcacctgaagaccctgcagggtgagaggatggaaaattacaaactgcggaaaaagcaagaactcagcaacccttcgtcgggcagcaggacggcaggtggcgctcatgagacctcccaggcggtccaccagaggatgctgtcccagcagaagaggttcctggcccagttcccagtgcaccagcagatgcgtctgcacgcccagcagcagcaggcaggagtcatggaccttctggaagcccagctggagacccagctacaggaagctgaacagaacttcatctccgagctggcagccttggcccgagtgccccttgctgaaagcaaactgttgcctgctaagcgtgggctgctagagaagcccctaaggactaaaaggaagaagcccctgccccaggaaagaggggacctgggggtgcccaacaatgaggaccttgcctccggggaccagacctcaggctcactcagcagcaaaaggctgagtcagcaagaaagtgaagctggggacagtgggaactcaaagaagatgctaaagagaagaagcaacttgtagtttaagaccagtcggtgggacaagacctgaagccctgggtctgggtgtgaattccaccttccctcctgcagtgctgagaggcagcgaggacggagaggacagcggcatctctaggctcttctgagagggacagagaaagaatagaaatgtgccctaaaagcataaatgagtatcacctgagaaaattaggcattcccgtcttggaaacacgtctctgtgagtttgcatttcatttggcttggagccctggctcgatgcctcatggatctttctccccaaggagggacgtcttgaggggtccgagcctcaggccaaggacccctgatgcagactctggaatccctggcccaaaggcctgtctgggcccatctggggctgaggacacacagatacataatgacacctgcagaaatgtattctctgaggacacttagaatatgaggaagagggtgtggcccaaccctcacttcacctggggaggggcttcttccggacagtagacaccctgcccgtgcagagagatgtcatgggggcacctgctctccctgatagatgctgagagcatccagaaacttccagaccagccctctcaccacacccagaagaggcctttcccatctggagagaagcttccagaccagcccttcacacaccacagccaggaggggcctttcccacctggagagaaacttccagaccagcccctcataccacagccaagaggggcctttctcacctggagagaaatttccagaccatcccctctcaccacagccaggagaggcctttcccaccggtagagaaacttccagaccagcccctcacaccacagccaagagaagcctttccagcctggagagaaacttccagaccagccctctcactacagccaggagaggcctttcccgcctggaaacttccggacaagcctctcacacaccacagccaggagaggcctttcccacctggacagaaacttccagaccagcccctctcaccacagccaggagaggcctttaccacctggagagaagcttccagaccagcccctcacaccacagccaggagaggcctttcccacctggagagaaacttccagaccagcccctcataccacagccaagaggggcctttctcacctggagagaaacttccagaccagcccctcacaccaccgccaggagaggcctttcccaccgggagagaaacttccagaccagcccctcacaccacagccaggagaggcctttcccaccgggagagaaacttccagaccagccctctcactacagccagaagaggcctttcccaccgggagaggaacttccagaccagcccctcacaccacagccaggagaggcctttcccgcctggagagaagcttcaggccagctcctcacaccacagccaggagagaccttttctgcctggagagaaactttcagaccagccccacacaccacagccaggagaggccgttcctgcctggagagaagcttccagaccagcccttcacaccacagccaggagaggcctttcccacctggagagaaacttccagaccagcccctctcaccacagccaggagaggccgttcccacctggagggaaaattgctcctttgatggaggttagggactgtcaccctcagcactgtgaacataccgggcgagatcattcttcaggggaaggagctgcccagagcatcacaggatgttccagtgtccctggtctctgcccaccagatgccagcactcccaccattcgtggcaaccaaggatgtctccagacactgccccgtgtccatggggttatcacccactgtgctgagtcaaagggtgccttgccctggtctaatccaggacatagccgtggatacgtccaaaaatccccagaacctagtgagccctctggctctgggagcccctatctcaggaattttcagggtcatttgtgacttttcatttcttaaaacctgaaatagactctcttagaaacaagtgactccttcccagtggccaaaacttaatcatcagagcgcttccttcagttcctcacccatcagccagtgggctctccaaagttaaccaacagctccctcttgtggttcactaaaaaacttggttattccatggagttgtgcaaagctatggcttccttggtgcaatattcttaaaacctgctttgcatagaaatcacttttgcccaggctggagtgcagtggcgtgatctcggctcatggcaatctccatctcccgggttcaagcgattttcctgcctcagcctccccagtagctgggactacagacgtgtgccaccacgcctggctaaatcttttttgtattttattttagtagagacggggtttcaccatactggccaggctgctctcgaactcctgacctcatcgtccacctgcctcggcctccccaaagtgctgagattaggcgttagccaccgcgcccggccagaaatcacttttatattgtcacatgggccctctgcacagagtccgatggctcctcccggggaagcctgattttgtgacgtgtgtatagtaaatgcaggccctctggcagcaccataattggtcggttaccctgagcccagagctctgaaagcatctgtggaatgatcacgggacccttctcctctgagaaggctcccggctgcctccccgccaccgagcttgtagcctgaatgcctggctgtcgcatggagcattttgcttctggggtgtcttccttagccaaagggaacgtgtcatttgctcgaccctggcccacccttgccgcccagctgttgtgctgggcacagtctggggcacaggcctccatgatgaagacgcgtgggctgtcggtgctttcatccgtcacaaactggcacctgtacctgccagcaggagcatgatggggacttccatgctggaattgctccctgattaaaatgagatatggctatttggaagacactgcattttagccagtgtacctgggcacagactcggggctgccctgaagctgatgaaggcttgaaggacggaagggctgagccacatgaaggcagcactcagggccaggggagagagaagaggatcagcagtgcagccccaggatgcctcgcaggtaccctgcctccattttggttaccatccccacttattatgggctgtgggctgttatggtgatggatggatgtggatttggaaggggaccatgagagatgatgtattatgatgaactcatgatttaattctttggtgaaaata

SEQ ID NO: 9419 - DNA, 7063 bp, Homo sapiens
  source 1..7063: mol_type = unassigned DNA
ccctccggctcggcgaagcagggaaggggagagaagcaggagtcgggagactgcacaggccagaaagtctgcggagcgggccgcgcccctggcccgcccgggctccaagtcccgcgtcgccgccctggcggggacggtgcagcaggcggcgggatgcggcggggcggcagcctgagcgccccggatggcccgcggcggggcggcctgcaagagcgacgcgcggctgctgctggggcgggacgcgctgcggccggcgcccgccctgctggcccccgccgtgctgctgggcgccgcgctcggcctcggcctcggcctttggcttggctgccgcgcgggccgccagcgcacgcgacaccagaaagacgacactcaaaatctgctcaagaatttggagtctaatgcgcagaccccctcggaaactggctccccatcaaggaggaggaagagagaagtgcagatgtcgaaggacaaggaagctgttgatgaatgtgagccgccttccaacagcaatatcacagcattcgccctgaaggccaaagtcatctaccccatcaatcagaagttccggcctctggccgatggctcctccaacccgtctctgcatgaaaacttaaagcaggctgttttgccacaccagccggtagaggcctctccttccagcagtctggggagcctgagccagggtgagaaggacgactgcagctcctcatccagcgtccactcggccaccagcgatgacaggtttctcagccgcaccttcctccgggtgaacgccttccctgaagtgctggcctgcgagagtgtagacgttgacctgtgtatctacagccttcacttaaaagacctgctgcatttggacacggcactgaggcaggaaaagcatatgatgtttattcagatttttaaaatgtgcctccttgaccttcttcctaaaaagaagtcagatgatgaactataccagaagatcctttcaaaacaagaaaaagatttggaggaactagaaaagggacttcaggtcaaactgtcaaacacagaaatgtcgggggctggtgactctgagtacatcaccctggctgatgtggaaaagaaggagagagaatactctgaacagctaatcgataatatggaagctttctggaaacagatggcaaatatccagcactttcttgtggaccagtttaagtgttccagctccaaagcccgacagctgatgatgactctgacggaaagaatgattgcagccgaagggctattgtgcgattctcaggagctgcaggctctggacgccctggagaggacgatggggcgggcgcacatggcaaaagtgattgagtttctgaagctgcaagtccaggaggagaccaggtgccggctggctgccatctcccacggcctggagctgctggctggtgaggggaagctgtccgggcggcagaaggaggagctgctcacgcagcagcacaaggccttctggcaggaggcagagcgcttcagccgggagtttgtccagcgaggcaaagacctggtcacggcgtctctggctcaccaggtggagggaacggcaaaactcacgctggcccaagaggaggaacagagaagcttcctggctgaggcccagccgactgctgacccggaaaagtttctcgaggcttttcatgaggtcctggagaggcagaggctgatgcagtgtgacctggaggaagaggagaatgtcagagccaccgaggctgtggttgcactctgccaggagctgtacttcagcaccgtggacactttccagaagttcgtggatgccctgttccttcagacgctccctggcatgactggcctccccccggaagagtgtgactacttgaggcaggaagtccaggagaacgctgcctggcagctggggaagtcaaatcgcttccggaggcagcagtggaaactcttccaggagctcctagagcaagaccagcaggtgtggatggaggagtgtgcgctgtccagcgtgctgcagacacacctgcgggaggaccacgagggcaccatccgcggcgtcttgggccgactgggcggcctcactgaagagtccacgcggtgtgtcctgcaggggcatgacctgctgttgcgctcagccctccggaggctggcactccgcggcaacgccctggccaccctgacgcagatgcggctatcggggaagaagcacctcctgcaggagctgcgggaacagcgtgcactggagcaggggtcctcccagtgcctggacgagcatcagtggcagctgctcagggccctggaggcgcgtgtgctggaggaggccagccggctagaggaggaagcacagcagacacggctgcagctccagcagcggctcctggccgaggcccaggaggtggggcagcttctgcagcagcacatggagtgcgccattgggcaggcgctgctggtgcatgcacggaatgcagccaccaagagccgggccaaggacagggatgacttcaagaggacactgatggaggcggcagtggagagcgtctacgtgaccagcgctggtgtcagccgcctggtgcaggcgtattaccagcaaatcggaaggatcatggaggaccacgaggagagaaaactgcagcacctgaagaccctgcagggtgagaggatggaaaattacaaactgcggaaaaagcaagaactcagcaacccttcgtcgggcagcaggacggcaggtggcgctcatgagacctcccaggcggtccaccagaggatgctgtcccagcagaagaggttcctggcccagttcccagtgcaccagcagatgcgtctgcacgcccagcagcagcaggcaggagtcatggaccttctggaagcccagctggagacccagctacaggaagctgaacagaacttcatctccgagctggcagccttggcccgagtgccccttgctgaaagcaaactgttgcctgctaagcgtgggctgctagagaagcccctaaggactaaaaggaagaagcccctgccccaggaaagaggggacctgggggtgcccaacaatgaggaccttgcctccggggaccagacctcaggctcactcagcagcaaaaggctgagtcagcaagaaagtgaagctggggacagtgggaactcaaagaagatgctaaagagaagaagcaacttgtagtttaagaccagtcggtgggacaagacctgaagccctgggtctgggtgtgaattccaccttccctcctgcagtgctgagaggcagcgaggacggagaggacagcggcatctctaggctcttctgagagggacagagaaagaatagaaatgtgccctaaaagcataaatgagtatcacctgagaaaattaggcattcccgtcttggaaacacgtctctgtgagtttgcatttcatttggcttggagccctggctcgatgcctcatggatctttctccccaaggagggacgtcttgaggggtccgagcctcaggccaaggacccctgatgcagactctggaatccctggcccaaaggcctgtctgggcccatctggggctgaggacacacagatacataatgacacctgcagaaatgtattctctgaggacacttagaatatgaggaagagggtgtggcccaaccctcacttcacctggggaggggcttcttccggacagtagacaccctgcccgtgcagagagatgtcatgggggcacctgctctccctgatagatgctgagagcatccagaaacttccagaccagccctctcaccacacccagaagaggcctttcccatctggagagaagcttccagaccagcccttcacacaccacagccaggaggggcctttcccacctggagagaaacttccagaccagcccctcataccacagccaagaggggcctttctcacctggagagaaatttccagaccatcccctctcaccacagccaggagaggcctttcccaccggtagagaaacttccagaccagcccctcacaccacagccaagagaagcctttccagcctggagagaaacttccagaccagccctctcactacagccaggagaggcctttcccgcctggaaacttccggacaagcctctcacacaccacagccaggagaggcctttcccacctggacagaaacttccagaccagcccctctcaccacagccaggagaggcctttaccacctggagagaagcttccagaccagcccctcacaccacagccaggagaggcctttcccacctggagagaaacttccagaccagcccctcataccacagccaagaggggcctttctcacctggagagaaacttccagaccagcccctcacaccaccgccaggagaggcctttcccaccgggagagaaacttccagaccagcccctcacaccacagccaggagaggcctttcccaccgggagagaaacttccagaccagccctctcactacagccagaagaggcctttcccaccgggagaggaacttccagaccagcccctcacaccacagccaggagaggcctttcccgcctggagagaagcttcaggccagctcctcacaccacagccaggagagaccttttctgcctggagagaaactttcagaccagccccacacaccacagccaggagaggccgttcctgcctggagagaagcttccagaccagcccttcacaccacagccaggagaggcctttcccacctggagagaaacttccagaccagcccctctcaccacagccaggagaggccgttcccacctggagggaaaattgctcctttgatggaggttagggactgtcaccctcagcactgtgaacataccgggcgagatcattcttcaggggaaggagctgcccagagcatcacaggatgttccagtgtccctggtctctgcccaccagatgccagcactcccaccattcgtggcaaccaaggatgtctccagacactgccccgtgtccatggggttatcacccactgtgctgagtcaaagggtgccttgccctggtctaatccaggacatagccgtggatacgtccaaaaatccccagaacctagtgagccctctggctctgggagcccctatctcaggaattttcagggtcatttgtgacttttcatttcttaaaacctgaaatagactctcttagaaacaagtgactccttcccagtggccaaaacttaatcatcagagcgcttccttcagttcctcacccatcagccagtgggctctccaaagttaaccaacagctccctcttgtggttcactaaaaaacttggttattccatggagttgtgcaaagctatggcttccttggtgcaatattcttaaaacctgctttgcatagaaatcacttttgcccaggctggagtgcagtggcgtgatctcggctcatggcaatctccatctcccgggttcaagcgattttcctgcctcagcctccccagtagctgggactacagacgtgtgccaccacgcctggctaaatcttttttgtattttattttagtagagacggggtttcaccatactggccaggctgctctcgaactcctgacctcatcgtccacctgcctcggcctccccaaagtgctgagattaggcgttagccaccgcgcccggccagaaatcacttttatattgtcacatgggccctctgcacagagtccgatggctcctcccggggaagcctgattttgtgacgtgtgtatagtaaatgcaggccctctggcagcaccataattggtcggttaccctgagcccagagctctgaaagcatctgtggaatgatcacgggacccttctcctctgagaaggctcccggctgcctccccgccaccgagcttgtagcctgaatgcctggctgtcgcatggagcattttgcttctggggtgtcttccttagccaaagggaacgtgtcatttgctcgaccctggcccacccttgccgcccagctgttgtgctgggcacagtctggggcacaggcctccatgatgaagacgcgtgggctgtcggtgctttcatccgtcacaaactggcacctgtacctgccagcaggagcatgatggggacttccatgctggaattgctccctgattaaaatgagatatggctatttggaagacactgcattttagccagtgtacctgggcacagactcggggctgccctgaagctgatgaaggcttgaaggacggaagggctgagccacatgaaggcagcactcagggccaggggagagagaagaggatcagcagtgcagccccaggatgcctcgcagacgtgccttctgccatgattgtgaagttctagccacgtggaactctctcggaagaactggttgttaaagagcacctctgccttcttcctctgttgccatgtgatctctgcacacgctagctctccttcgccttctgccatgctggaagtagcctgaggccctcaccagaagcagacgctggcaccgtgctgcttgtacagcctgcagagccgtgagccaagtaaacctctttaattacccagcctcaggtgctccgggaacgccttccgcggaatgaagcggcccatgcccttgttgacgttgatgtttccgtcttcaaagacgatcttgccctggctgatgaccactagtggggagccgtggcactccataccctcgaagatgttgtactccaccgcctgcaccaacagcctcagtgttacttcccaggatttgctctgccccaaacgagctgttcataacagcgattttgcctaacattatatcataagcgtgttccaatgtttttttttctctctaaaaataccttttattgactgtaatattccactgtatggtccacagtgtatataaccaacaactcaccgttgcgcatgtaggctgccggtggctttctataatcaaatcaatattgttctggggcatcacaaagaggaagggggtcccccggggttatgcaatgtggctgctttgactgtactggacataaaaataagtaaaatgttcttcattttacttaaaatgtgtctttaaataaaatttttttctctaggtt

SEQ ID NO: 9420 - DNA, 4828 bp, Homo sapiens
  source 1..4828: mol_type = unassigned DNA
ttataaattctcagcttctcgaaccccatggccttgtccatgttaggtcaggaaaggcctgtccttggatggtctgggttatggggagagaggctgccaggggccaggctcgctggcctgagactttatagacagcctaacagcctgccccgcaggaaggctggcgggagtggagccctcccccgtcaacaggtgtcagctgtcacccaggacctaggcagggatgaggaagcacacaaaaggctccaccagtccccctttttgtgtctttctcctcctcctcctcctgcgtcccttggcaaagcaaatccctgtcccctcggagagttcagggagagcttgcttagggctgcgacttcagacaccagctcccctctttctaggtccccagagaggtggcccagcggctggcctgtttcccactgggaatgcgaggggcacccgggccggcccagggctgacccacagcaggctcgggcagtgggtgctcagctggtctgcactgaacgcaaccggaagtgagggtccttttccttctctgcggccaccccctcctccccgagctttcctgaaccttctgggtgctccaggactcccggccccgcgctccaaatgcttctccgttttctaagcggggatggggaaactctggattcacatccgtgtgtcaggaaaccgttcccaggggaagtgcgtctgagctgaggcttacagacccaggacttgccctgtatgatttggcccaaagtggaatgctgtcactttaagactgcagtggaagcaccacttggaatgaaattggacaagaaaatggaagtcttcatcccactctcaacttctgcagcctctagtgggccatgggctcattccttatttgcttttataccctcctggcctaagaagaacttatttaaaagagagtctcctataacacaccgcctgtatggggacatttcaagagaagttcaagggacttctgaaaatggagtaatttttcagaaatgtgcactggtgtctgggtcgagtgaagcacagacagcccgcatatggctgcttgttaacaacaccaagacaacctcgtcagccaacctctcggagctgctcttgctggacagcattgctggtctcaccatttgggactctgtgggaaacaggacctcggaaggattccaggcttttagcaagaagtttctgcaagtgggagatgcctttgctgtcagctacgcagccacgctccaggctggagacctcgggaacggggagagcctcaagcttcctgcccaactcacctttcagagctcgtcacggaacagaacacagctgaaagtgcttttttccataacagcagaagaaaacgtaacggttctgccgcaccacggcctccacgcagcagggttcttcattgccttcctcctctcccttgtgctgacctgggctgccctcttcctcatggttcgctatcagtgtctgaagggaaacatgctcaccagacatcgggtttggcagtatgagagcaagctggaacccttgccgttcacctcagctgatggcgtgaatgaggacctttcccttaacgaccaaatgatagacattctgtcttccgaggaccctgggagcatgcttcaagccttagaagagttggagattgcaaccctgaatcgggcagatgcagatctggaggcttgtcgaacacaaatcagcaaggatatcattgcccttctgctgaaaaatctcaccagcagtggccacctctcaccccaagtagagagaaaaatgagtgctgttttcaaaaagcagtttctattgctggaaaatgaaatacaagaggagtacgatcggaagatggtggcattgacagctgaatgtgacctggaaacaagaaagaagatggaaaaccagtaccagagagagatgatggcaatggaggaagcagaagagttgctgaaacgtgctggtgagaggtctgctgtagagtgcagcaaccttctgcggaccctccatggcctggaacaggagcacttgaggaagtctctcgctttgcaacaagaagaagactttgccaaagctcacagacagctggctgttttccagagaaatgaactgcacagtatcttttttacccagataaaaagtgctattttcaaaggggaattgaaaccagaggcagctaaaatgctgctgcaaaattattctaaaatacaggagaatgtagaagagttaatggactttttccaggctagtaagaggtatcatctaagtaaaagatttggccacagggaatatctggtccagaacctccagtcatcagagacccgtgtgcagggccttctgagcaccgctgcagcccagctgactcacctcattcagaagcacgagagagcagggtacctggatgaagaccaaatggaaatgctattggagcgggctcagacagaagtcttttcaatcaagcagaagttggacaatgacttaaagcaggaaaagaaaaagctccaccaaaaattaataactaagagaagacgagagttgctacaaaagcacagggagcagcgtagggagcaggcgtccgtcggcgaggccttccgaacggttgaggatgccggccagtacctgcaccagaagaggagcctgatggaggagcacggtgccaccctggaggagctgcaggagcgtctggaccaggccgccctggacgatctcaggaccctgaccctttcgctgtttgaaaaggccaccgacgagctgcggcgcctgcagaactcagccatgacccaggagctgctcaagcgtggggtgccctggctcttcctgcagcagatcctggaggagcacggcaaggagatggctgcacgggccgagcagctggagggggaggagagggacagggaccaggagggtgtccagagcgtgaggcagagactgaaggatgacgctcctgaggccgtgacagaggagcaggcagagctgcgacgctgggagcacctgatcttcatgaagctctgctcctcagtcttctccctgtctgaagaggagctgctcaggatgaggcaggaggtccatggctgctttgctcagatggacaggagcttggccctccccaagatccgggcccgagttctgctgcagcaatttcagactgcgtggcgagaagcagagttcgtgaagctggaccaggccgtggctgcccctgagctgcagcaacagtccaaggtgagaaagtcacggtccaagagtaaaagcaagggagagcttctgaagaagtgcatcgaagacaaaattcacctctgtgaggaacaggcctctgaagacctggtggaaaaggttcgaggtgaattgctgcgggagagagtgcagcggatggaggcacaggagggaggctttgcacagtcgcttgttgctctgcagttccagaaggcgtcccgggtgaccgagactctgtcggcctacaccgccctcctcagcatccaggacttgctcctggaagagctgagtgcatctgagatgctgaccaagtcggcctgcacacagatcctggagtcgcacagccgggagctccaggagttggagaggaagctggaggaccagctggtgcagcaggaggcagcccagcagcagcaggccctggcgagctggcagcagtgggtggccgatgggcccgggattctgaacgaacctggggaggtggattctgaaaggcaggtctctactgtcctgcaccaagccctgagcaagagccagacattactggagcaacatcagcagtgtttgagagaggaacaacagaacagtgtcgtgctagaagacttgttggaaaacatggaggcagacacctttgcaaccctgtgcagccaggagctgagactggcatcgtacctggcgaggatggccatggtgcccggggccacgcttcgccggctcctgagtgtggtactgcccacagcctcacagcctcagctgctggccctgctggattcggccaccgagagacatgtggaccacgcagctgagagcgatggcggagcggagcaggccgacgtgggcaggcggaggaaacaccagagctggtggcaagccttagatggcaaactgcgaggagatctgataagcagaggattagaaaagatgctgtgggcccgcaagagaaagcagagcatattaaagaagacatgtctccctctcagagagaggatgatattctctggaaaaggaagttggccacacctgtcactggagcccattggcgaactggcccctgtacccattgtaggggcagaaaccattgatctattaaacacaggagagaagctctttatattcagaaatccaaaggagccagagatctcactgcacgttcctcccaggaaaaagaagaactttttgaatgccaaaaaggccatgagggccttgggcatggactagcccaagggaaagacctgcgggagcatctgaagagagaagggatgattttctcctgcccgccggtgtttgtgtgtttataatgcacaactcgcaaatataaattgcacatgcagaaggcacagaccccgtagcgcatgccaacttgcagggactcggtttaatcttgtctcatgaatttccagatggcccactctcttccatatcacaaggacataaacactccttctttcagccccacctccccagggccctggaggagacccccaccctgcaatccacaccccatcctctgctgcagaagctatggtctgtgtggtgacagccagattctctactcttatgttttgtatttgttacatattctatttttataaagggaattttaaaaaataaatgtgttttgcacaaa

SEQ ID NO: 9421 - DNA, 4390 bp, Homo sapiens
  source 1..4390: mol_type = unassigned DNA
gctccagcgactcggcggcacccgccgctttgaggtagcgggtcccgacaggcgatggacccctcgggctcccgggggcgccccacgtgggtgctggccgggggtctcctggcagtggccctggcgctggggggccgaggctgtctcggcgccagctcacgtccccgctggcgccccctcggcgcgcagccaccccgggatccccaggtggctcctaggtctgggcccggcctgaggatccctccggggcggagcggggcggggcccgagagcagcacgcaggacttgccctgtatgatttggcccaaagtggaatgctgtcactttaagactgcagtggaagcaccacttggaatgaaattggacaagaaaatggaagtcttcatcccactctcaacttctgcagcctctagtgggccatgggctcattccttatttgcttttataccctcctggcctaagaagaacttatttaaaagagagtctcctataacacaccgcctgtatggggacatttcaagagaagttcaagggacttctgaaaatggagtaatttttcagaaatgtgcactggtgtctgggtcgagtgaagcacagacagcccgcatatggctgcttgttaacaacaccaagacaacctcgtcagccaacctctcggagctgctcttgctggacagcattgctggtctcaccatttgggactctgtgggaaacaggacctcggaaggattccaggcttttagcaagaagtttctgcaagtgggagatgcctttgctgtcagctacgcagccacgctccaggctggagacctcgggaacggggagagcctcaagcttcctgcccaactcacctttcagagctcgtcacggaacagaacacagctgaaagtgcttttttccataacagcagaagaaaacgtaacggttctgccgcaccacggcctccacgcagcagggttcttcattgccttcctcctctcccttgtgctgacctgggctgccctcttcctcatggttcgctatcagtgtctgaagggaaacatgctcaccagacatcgggtttggcagtatgagagcaagctggaacccttgccgttcacctcagctgatggcgtgaatgaggacctttcccttaacgaccaaatgatagacattctgtcttccgaggaccctgggagcatgcttcaagccttagaagagttggagattgcaaccctgaatcgggcagatgcagatctggaggcttgtcgaacacaaatcagcaaggatatcattgcccttctgctgaaaaatctcaccagcagtggccacctctcaccccaagtagagagaaaaatgagtgctgttttcaaaaagcagtttctattgctggaaaatgaaatacaagaggagtacgatcggaagatggtggcattgacagctgaatgtgacctggaaacaagaaagaagatggaaaaccagtaccagagagagatgatggcaatggaggaagcagaagagttgctgaaacgtgctggtgagaggtctgctgtagagtgcagcaaccttctgcggaccctccatggcctggaacaggagcacttgaggaagtctctcgctttgcaacaagaagaagactttgccaaagctcacagacagctggctgttttccagagaaatgaactgcacagtatcttttttacccagataaaaagtgctattttcaaaggggaattgaaaccagaggcagctaaaatgctgctgcaaaattattctaaaatacaggagaatgtagaagagttaatggactttttccaggctagtaagaggtatcatctaagtaaaagatttggccacagggaatatctggtccagaacctccagtcatcagagacccgtgtgcagggccttctgagcaccgctgcagcccagctgactcacctcattcagaagcacgagagagcagggtacctggatgaagaccaaatggaaatgctattggagcgggctcagacagaagtcttttcaatcaagcagaagttggacaatgacttaaagcaggaaaagaaaaagctccaccaaaaattaataactaagagaagacgagagttgctacaaaagcacagggagcagcgtagggagcaggcgtccgtcggcgaggccttccgaacggttgaggatgccggccagtacctgcaccagaagaggagcctgatggaggagcacggtgccaccctggaggagctgcaggagcgtctggaccaggccgccctggacgatctcaggaccctgaccctttcgctgtttgaaaaggccaccgacgagctgcggcgcctgcagaactcagccatgacccaggagctgctcaagcgtggggtgccctggctcttcctgcagcagatcctggaggagcacggcaaggagatggctgcacgggccgagcagctggagggggaggagagggacagggaccaggagggtgtccagagcgtgaggcagagactgaaggatgacgctcctgaggccgtgacagaggagcaggcagagctgcgacgctgggagcacctgatcttcatgaagctctgctcctcagtcttctccctgtctgaagaggagctgctcaggatgaggcaggaggtccatggctgctttgctcagatggacaggagcttggccctccccaagatccgggcccgagttctgctgcagcaatttcagactgcgtggcgagaagcagagttcgtgaagctggaccaggccgtggctgcccctgagctgcagcaacagtccaaggtgagaaagtcacggtccaagagtaaaagcaagggagagcttctgaagaagtgcatcgaagacaaaattcacctctgtgaggaacaggcctctgaagacctggtggaaaaggttcgaggtgaattgctgcgggagagagtgcagcggatggaggcacaggagggaggctttgcacagtcgcttgttgctctgcagttccagaaggcgtcccgggtgaccgagactctgtcggcctacaccgccctcctcagcatccaggacttgctcctggaagagctgagtgcatctgagatgctgaccaagtcggcctgcacacagatcctggagtcgcacagccgggagctccaggagttggagaggaagctggaggaccagctggtgcagcaggaggcagcccagcagcagcaggccctggcgagctggcagcagtgggtggccgatgggcccgggattctgaacgaacctggggaggtggattctgaaaggcaggtctctactgtcctgcaccaagccctgagcaagagccagacattactggagcaacatcagcagtgtttgagagaggaacaacagaacagtgtcgtgctagaagacttgttggaaaacatggaggcagacacctttgcaaccctgtgcagccaggagctgagactggcatcgtacctggcgaggatggccatggtgcccggggccacgcttcgccggctcctgagtgtggtactgcccacagcctcacagcctcagctgctggccctgctggattcggccaccgagagacatgtggaccacgcagctgagagcgatggcggagcggagcaggccgacgtgggcaggcggaggaaacaccagagctggtggcaagccttagatggcaaactgcgaggagatctgataagcagaggattagaaaagatgctgtgggcccgcaagagaaagcagagcatattaaagaagacatgtctccctctcagagagaggatgatattctctggaaaaggaagttggccacacctgtcactggagcccattggcgaactggcccctgtacccattgtaggggcagaaaccattgatctattaaacacaggagagaagctctttatattcagaaatccaaaggagccagagatctcactgcacgttcctcccaggaaaaagaagaactttttgaatgccaaaaaggccatgagggccttgggcatggactagcccaagggaaagacctgcgggagcatctgaagagagaagggatgattttctcctgcccgccggtgtttgtgtgtttataatgcacaactcgcaaatataaattgcacatgcagaaggcacagaccccgtagcgcatgccaacttgcagggactcggtttaatcttgtctcatgaatttccagatggcccactctcttccatatcacaaggacataaacactccttctttcagccccacctccccagggccctggaggagacccccaccctgcaatccacaccccatcctctgctgcagaagctatggtctgtgtggtgacagccagattctctactcttatgttttgtatttgttacatattctatttttataaagggaattttaaaaaataaatgtgttttgcacaaa

SEQ ID NO: 9422 - DNA, 3795 bp, Homo sapiens
  source 1..3795: mol_type = unassigned DNA
gctccagcgactcggcggcacccgccgctttgaggtagcgggtcccgacaggcgatggacccctcgggctcccgggggcgccccacgtgggtgctggccgggggtctcctggcagtggccctggcgctggggggccgaggctgtctcggcgccagctcacgtccccgctggcgccccctcggcgcgcagccaccccgggatccccaggtggctcctaggtctgggcccggcctgaggatccctccggggcggagcggggcggggcccgagagcagcacgcaggacttgccctgtatgatttggcccaaagtggaatgctgtcactttaagactgcagtggaagcaccacttggaatgaaattggacaagaaaatggaagtcttcatcccactctcaacttctgcagcctctagtgggccatgggctcattccttatttgcttttataccctcctggcctaagaagaacttatttaaaagagagtctcctataacacaccgcctgtatggggacatttcaagagaagttcaagggacttctgaaaatggagtaatttttcagaaatgtgcactggtgtctgggtcgagtgaagcacagacagcccgcatatggctgcttgttaacaacaccaagacaacctcgtcagccaacctctcggagctgctcttgctggacagcattgctggtctcaccatttgggactctgtgggaaacaggacctcggaaggattccaggcttttagcaagaagtttctgcaagtgggagatgcctttgctgtcagctacgcagccacgctccaggctggagacctcgggaacggggagagcctcaagcttcctgcccaactcacctttcagagctcgtcacggaacagaacacagctgaaagtgcttttttccataacagcagaagaaaacgtaacggttctgccgcaccacggcctccacgcagcagggttcttcattgccttcctcctctcccttgtgctgacctgggctgccctcttcctcatggttcgctatcagtgtctgaagggaaacatgctcaccagacatcgggtttggcagtatgagagcaagctggaacccttgccgttcacctcagctgatggcgtgaatgaggacctttcccttaacgaccaaatgatagacattctgtcttccgaggaccctgggagcatgcttcaagccttagaagagttggagattgcaaccctgaatcgggcagatgcagatctggaggcttgtcgaacacaaatcagcaaggatatcattgcccttctgctgaaaaatctcaccagcagtggccacctctcaccccaagtagagagaaaaatgagtgctgttttcaaaaagcagtttctattgctggaaaatgaaatacaagaggagtacgatcggaagatggtggcattgacagctgaatgtgacctggaaacaagaaagaagatggaaaaccagtaccagagagagatgatggcaatggaggaagcagaagagttgctgaaacgtgctggtgagaggtctgctgtagagtgcagcaaccttctgcggaccctccatggcctggaacaggagcacttgaggaagtctctcgctttgcaacaagaagaagactttgccaaagctcacagacagctggctgttttccagagaaatgaactgcacagtatcttttttacccagataaaaagtgctattttcaaaggggaattgaaaccagaggcagctaaaatgctgctgcaaaattattctaaaatacaggagaatgtagaagagttaatggactttttccaggctagtaagaggtatcatctaagtaaaagatttggccacagggaatatctggtccagaacctccagtcatcagagacccgtgtgcagggccttctgagcaccgctgcagcccagctgactcacctcattcagaagcacgagagagcagggtacctggatgaagaccaaatggaaatgctattggagcgggctcagacagaagtcttttcaatcaagcagaagttggacaatgacttaaagcaggaaaagaaaaagctccaccaaaaattaataactaagagaagacgagagttgctacaaaagcacagggagcagcgtagggagcaggcgtccgtcggcgaggccttccgaacggttgaggatgccggccagtacctgcaccagaagaggagcctgatggaggagcacggtgccaccctggaggagctgcaggagcgtctggaccaggccgccctggacgatctcaggaccctgaccctttcgctgtttgaaaaggccaccgacgagctgcggcgcctgcagaactcagccatgacccaggagctgctcaagcgtggggtgccctggctcttcctgcagcagatcctggaggagcacggcaaggagatggctgcacgggccgagcagctggagggggaggagagggacagggaccaggagggtgtccagagcgtgaggcagagactgaaggatgacgctcctgaggccgtgacagaggagcaggcagagctgcgacgctgggagcacctgatcttcatgaagctctgctcctcagtcttctccctgtctgaagaggagctgctcaggatgaggcaggaggtccatggctgctttgctcagatggacaggagcttggccctccccaagatccgggcccgagttctgctgcagcaatttcagactgcgtggcgagaagcagagttcgtgaagctggaccaggccgtggctgcccctgagctgcagcaacagtccaaggtgagaaagtcacggtccaagagtaaaagcaagggagagcttctgaagaagtgcatcgaagacaaaattcacctctgtgaggaacaggcctctgaagacctggtggaaaaggttcgaggtgaattgctgcgggagagagtgcagcggatggaggcacaggagggaggctttgcacagtcgcttgttgctctgcagttccagaaggcgtcccgggtgaccgagactctgtcggcctacaccgccctcctcagcatccaggacttgctcctggaagagctgagtgcatctgagatgctgaccaagtcggcctgcacacagatcctggagtcgcacagccgggagctccaggagttggagaggaagctggaggaccagctggtgcagcaggaggcagcccagcagcagcaggccctggcgagctggcagcagtgggtggccgatgggcccgggattctgaacgaacctggggaggtggattctgaaaggcaggtctctactgtcctgcaccaagccctgagcaagagccagacattactggagcaacatcagcagtgtttgagagaggaacaacagaacagtgtcgtgctagaagacttgttggaaaacatggaggcagacacctttgcaaccctgtgcagccaggagctgagactggcatcgtacctggcgaggatggccatggtgcccggggccacgcttcgccggctcctgagtgtggtactgcccacagcctcacagcctcagctgctggccctgctggattcggccaccgagagacatgtggaccacgcagctgagagcgatggcggagcggagcaggccgacgtgggcaggcggaggaaacaccagagctggtggcaagccttagatggcaaactgcgaggagatctgataagcagaggattagaaaagatgctgtgggcccgcaagagaaagcagaggtcagggaaccaagagagcttctggcagtacctggtagggactccagagattgggttaattgagtggatgtctgaaaaatga

SEQ ID NO: 9423 - DNA, 4409 bp, Homo sapiens
  source 1..4409: mol_type = unassigned DNA
ctcgctccctgacttccgggtcgcggtgcttgaagggagtgttccgtcgtttccgttgccggctgtttgcagtggggaaaccgaggcagctcctgctccccctagttcttccgctcctgtgaggaaaaaaaaatgtttatttctttgtgggagttcttctatgggcacttttttcgattttggatgaaatggctattacgacagatgactgggaagtgtgaattgcagcgaatatttgatacctatgtaggtgcacaaaggacacacaggatagaaaattccttgacatactccaagaataaggttttacagaaggcgacacatgttgttcagagtgaagtggacaaatatgtagatgatattatgaaggaaaagaatattaaccctgagaaggatgccagttttaaaatatgcatgaagatgtgcttactgcagataactggttataaacagctgtatttggatgtagaaagtgtgaggaaaaggccatatgattctgataacctacagcatgaagagctactcatgaagctttggaatcttctaatgcccacgaagaagttaaacgctagaatctccaagcagtgggctgaaattggttttcagggtgatgatcccaagacagacttcagaggcatgggcatacttgggttaatcaatcttgtgtatttcagtgaaaattacactagtgaagctcatcagattctttcccgttcaaatcatccaaaattagggtattcttatgcaatagttggaatcaatcttacagagatggcttatagcttactgaagagtgaagctttgaagtttcatctctataaccttgttcctggtataccaacaatggaacactttcatcagttttactgttatcttgtctatgaatttgacaagttttggtttgaagaagaaccagaaagcattatgtatttcaatttgtatagagagaagtttcatgaaaagattaaaggacttttactggattgtaatgtagcacttactttaaaagtataaatcatccactgtatcttctatttctaccacattttgcacattcaacagaatttatatgttgtaataggaattatctgatcaattacactcttatatataatttcctacaaaaatatttcagaaattctatttaagaaagctagtggacaatcagtgtatgtttacaattgtttatacactgttctccaaaggtaccttatccttccaaagatcccctctgtagagtcatgcgaactacagtttggaacttgggacttagcccgttggtgtaaaagtataaatcaggtatttgtattaaattgattaaaatgtgtaaaatcaattttcgtttttatgtgttatagggtcaagttggtatctttttcaaagctctttaagatttttttggtttttagtttggaaatggctgtttttaattttgtctgatttttatttctaggttaattaacagcaagtgtttctttatggttttctttgtttgcatcttaattacatgtcataacgttgcttcattagtagcaaatagagcagagatacagcagagagaataaagaattagggcctccttttgggtttctgtgattattgagcataactgatgagagaatgacagtattggtgactagcttttttgtttttaaataacacactttaaaatgccacagtgttatttgaaagcttaaaggcattttctcatcttcagtatttgctttttatcagttgtagaaaagaaccttagtgttttcttctctacctatgtatgcttatgaaaccgctctacctacatatgaaacttctctacctatgtatgtttacgaaaagagatgtatttgccaagaaaatcttgattatataaaagacaaaaagattataaaagacagtttctgtttaagtaaaactgtctttgaaacttaagaaagcttaagttttaaaaaaatctcagttaaacatcattggtttatttgacttactgttaactcttgcttctctttgactccatggtgtttttagataaccatgtatgaactttatgttaatggtttgtgggatactaaaatagcttgaagatgacttgatgactgtgcattttatatagttttattctcctaaaatctcaggagggcagcaagtgctgtcaacgattatatagtgatgagatttttatgggaatgatttcttcttggtgcgttttacacatttgtactgatagcaaaactaaagtttaaagcagcaaagtttaagttctccttaaatcctacagaaaccaaccttttaaggacataatttcatctaaaacatgacgatatttagcacaccttttaatgtgggtatatatcaagtgtttaaggactggctagtatgtgatagagcaagacctgagactttataagtatttgctcgtgtctgttgacagacctctttctttcaaacttgttagaagagtggtaagacatatccaattggaaaataagatgcagtgttgtatagcacatacatttaaagtgcttgcgttaaaattagtttctcaataagataaaattattttaaaaatttggttcactttattacaatagtggcaatttagcttttcagtattacaggaatttaaaaattggtttcttgtaggggacatctcaactttgggaatatcttcacttaatttttaaaaaatattttcatgctttattgtccagctatacaatatgtcgcaaaatcctgacaagttcattgtattaaggtattaactattacatggaaagcaattctgttcatcttttgatgtttgtgttgaaaatgcttatctttgtgttttgatcttccaacagctgagagcttgaactgatttaaacatttgtcaatatacttaagaatgctttaagtaaagaaggggaaaattttaagtaagttttttcccttctaggaagaaaaactatgatgatgttaagaaaatgtcattatagagcttgctcaataatatgttctttaaatccacctccatttgtacattataggtatcattctgtttttgcttaaaataatctgcaaccatttcagatagttttacagcaaattgatctaaaagccactaataaattctagggtttgagtctagaagccaagcaaactgtcaccaatgtcagttgtaaattagaatgcaacatgaggcttcagactcatgacaatgatatacatgaaaacaaaaatataattgtgtctaccttcctactttcccttttgacatatgtagttggaattttacatagtcttaaaatccatatttagaatcttacctgtttctataataattagtaaaatgccaaagtagtgatagaatattgtggcattgaagtagccgaaaaattgttagttttagcatcaaaaaagtaaatagatgttgaaatgaatttttgtatgtgccaggttgaagagagtgtgccagtgacaggaagtagtctaaaaaattaacagttatggttttaataggatctgaaagacaatctttaaagaaatgggagaaattgggggtatcagtgaacctataccaacctctctttgtacataaatatggtgatgtagctagatataaaaatcagtgtcttactggcaccatttacagtttagaaaacaatctttttcttaaaaatgcccatctgatttctatttttaggagctacttggatttgtatgtattttttctacgtgaaaatatatgtactcttcacttttgttccagtactataattgctcatgcactctttctcccctttgagaacattcagtgaaatacaacttcatcaaagatttgctcaaaggagaagaatcgcatgagtgtgaaaagtagatgctcgtagccagaacagaaaaggttacacatgatcatggcacagaagataggaggtttgacttggtgggccataatgtttattatcctttttgaaataacagggaccagcagcagttttctcaggataaatgctctaccccacttctctatgaacaggtgtggggaggcttactttccattttcatatttatacacctctctacaaaagcaatttttaatgaaggttagtggaattgttaaaaatctgagaggaatgatgactggaggtgtttggggtttttttctgtattcattttttaatgagaaaagttttaaatgtagtacaggttagacccaactactaccttactattataggacgattctatgtttctgttaaagtattcaagtagctttctctgggggaaaaagtaccacttggacacttaaaggaattgggatttttgtctactttggataaggcagttgacttcttaagtaaaagcaatagtgtaaaatgtcattttgtttggaatgttaagtgagcaaataaaaaacatgttgaaattgt

SEQ ID NO: 9424 - DNA, 738 bp, Homo sapiens
  source 1..738: mol_type = unassigned DNA
gcgcgaggggggtcggcgcagagacgcccagagccctggggtgctcaggcgccgctacgcgtgcatcccctctgctcggcagttctgcgcttttgtcctaatgagcgcggactagatggcttgattttcaagataatgatcaacccagctgtgctatgcgctctttctgcactgacctgcgggtacttcgaacttcgacagtccctcctcaggccctagtccagaggaaaaaaaaatgtttatttctttgtgggagttcttctatgggcacttttttcgattttggatgaaatggctattacgacagatgactgggaagtgtgaattgcagcgaatatttgatacctatgtaggtgcacaaaggacacacaggatagaaaattccttgacatactccaagaataaggttttacagaaggcgacacatgttgttcagagtgaagtggacaaatatgtagatgatattatgaaggaaaagaatattaaccctgagaaggatgccagttttaaaatatgcatgaagatgtgcttactgcagataactggttataaacagctgtatttggatgtagaaagtgtgaggaaaaggccatatgattctgataacctacagcatgaagagctactcatgaagctttggaatcttctaatgcccacgaagaagttaaacgctagaatctccaagcagtgggctgaaattggttttcagggtgatgatcccaagacagacttcagagg

SEQ ID NO: 9425 - DNA, 594 bp, Homo sapiens
  source 1..594: mol_type = unassigned DNA
ggtgcttgaagggagtgttccgtcgtttccgttgccggctgtttgcagtggggaaaccgaggcagctcctgctccccctagttcttccgctcctgtgaggtggctgctgtttcttttcctcttgccccggatgcctcggtgcggctgcactgagagcgcgcgggctcgcgagccccgcggggttctgcgggaacccgggggcgcctgggccggcgggtctttgtgcgagccctgccctcccattcgcgggcggcgcgcgaggggggtcggcgcagagacgcccagagccctggggtgctcaggcgccgctacgcgtgcatcccctctgctcggcagttctgcgcttttgtcctaatgagcgcggactagatggcttgattttcaagataatgatcaacccagctgtgctatgcgctctttctgcactgacctgcgggtacttcgaacttcgacagtccctcctcaggccctagtccagaggaaaaaaaaatgtttatttctttgtgggagttcttctatgggcacttttttcgattttggatgaaatggctattacgacagatgactgggaagtgtgaattgcagcgaatattt

SEQ ID NO: 9426 - DNA, 4025 bp, Homo sapiens
  source 1..4025: mol_type = unassigned DNA
ggcggggcggggcgtggccggcgtggcggcgctggagccgggaagggggcgcgggggagagatggtcgcaagatggcggcgctgaaggaggataggagctacgggctgtcgtgcgggcgggttagcgacggcagcaaggtgtcggtgttccacgtgaagctcaccgacagtgccctgagggccttcgagagctaccgcgccagacaggattctgtttcactgaggccatctatccgatttcaaggaagccaagggcacatctccatcccccagcctgactgccccgcagaggcgcggacgttctccttctacctctccaacatcggccgcgacaacccccagggcagcttcgactgcatccagcagtatgtctccagtcatggggaagttcacctggactgcctgggcagcatacaggacaagatcacggtgtgtgccaccgacgactcctaccagaaggcgcggcagagcatggcccaggcggaggaggagacgcggagccgaagtgccattgtcatcaaggctggaggccgctacctgggcaagaaggttcagtttcggaaaccagccccaggtgcaacagacgcggtgccctcccggaagcgggcaacccccatcaacttggcgagtgccatcaggaagagtggtgccagtgccgtgagtgggggcagcggggtgtcccagaggcccttccgtgaccgagtgctgcacctcctggcactacggccctaccgcaaggctgagctgctgctgcgactgcagaaggacggcctgacgcaggcggacaaggacgcgctggatggcctcctccagcaggtggccaacatgagtgctaaggacggcacgtgtacactgcaggactgcatgtacaaggatgtgcagaaggactggcctggctactcggagggggaccagcagctgctgaagcgggtgctcgtccggaagctgtgccagccacagagcactggcagcctccttggagaccctgctgcctccagccccccaggcgagcgtgggcgctcggcctcgcccccacagaagcggctgcagcctcctgatttcatcgaccccctagccaacaagaaaccccggatatcgcacttcactcagagagctcagcctgccgtcaacgggaagctgggcgtgcccaatggccgtgaggccttgctgcccaccccgggcccaccagccagcacggacaccctcagctccagcactcacctgcccccgcggctggagcccccgagggcccacgaccccctggccgatgtcagcaatgacctgggccacagcggccgagactgtgagcacggagaggcggctgccccagcccccactgtgcgcctcggcctgcccctgctgacggactgtgcccagcccagcaggccacacggcagcccctcgcgcagcaagcccaagaagaagtccaagaagcacaaagacaaggagagggcggctgaggacaagccccgggcccagcttccagactgtgcacctgccacccatgccacccccggagccccagcagacaccccaggtttaaacggaacctgcagcgtttccagtgttcccacgtccacgtcggagacgcctgactacttgctgaagtacgcagccatctcctcttcggagcagcgccagagctacaagaacgacttcaatgccgagtacagcgagtaccgcgacctgcacgcccgcattgagcgcatcacgcggcggttcacccagctcgacgcccagctccggcagctctcccagggctccgaggagtatgagactactcgagggcagattttgcaggaatatcgaaaaatcaaaaagaccaacaccaactacagccaggagaagcaccgctgcgagtacctgcacagcaagctggcccacatcaagaggctcatcgccgagtacgaccagcggcagctgcaggcttggccctagccgccctccccgatggcggggatctgggagggtcgggggagcaaaaggcggtgagagaggatttatttaaaaaaataaacccgaggaagatgctcatctgagccagcaccgccggctttcagggcagcccctgcagacgtctggccctggcgggtggctgcaagcccacctcggccctccctgcgcttcctgagcagtccctgcttatgatgggctccccaggaagcccactgcctcctccctggctgcagcctccggggttcagcctcctgtctcgccagaagactcctaggcccttggggtggcgcgcctgccttttctagttttatacaaagacagccacttttagctactgctaatgagacttgagtctatttttgtacaaaagagaagcaaaatcttttttctaaacctgtgcctccctctcctcggacacccagggtctagccgctgccctgggtcctgcctgcagtattacagaggtcgtcgaaaggtgcagctgcgttctgagggcgtggggaatgggcaggtggcctctgctggtctctggctctacgtttaggcacccctttccccagcctctcctccttgggcagggtctctgctccagcaagcaaacagggtggcccaggtggctattttgagaactccagctggtgcccccagacagctgctcagagccaagggggcagagggctttcagcgcccccaggcctgccctgctatttcaggccctcagctgtcgggggccactgtgtttctgtgctccaagttgagactcggccgcagcggcgtcagacttttctttgcgatgtcctcggtttcccatttgttgctgctgctgctcattccacactgttgagaccttgtggtctcgatgctgctggcctccctccgtccctctgtccacttgtgggtcctggggtcgtcttagcagagccaccgccaaggtttgcactcagggaggggctgatggagggctgggcgccatggggtcagggaggccccagggacccatgggcagagctggggagccaggaggatgggtctgcctgctctgggggtgcaggctctgcagacaccccaattgctgctctgttgctgtgcctagtctagtgtcccccaaagcatcggggggccacgcaagtgtgggtgtgtgagtgtgcgtatgtggggaccccccagggcatggtggggtctgaggcgtgtgttcccatttagggctgaatgaagccatgacttggaaaggtggtggggggtggatggcggctgtgactcagggcccagggatcacatgggggtcactgctgccatcagcagtcaggcagggagaacagaaatgcaaaaatacagatgtctatttttctaaactggggggtggaggggtgcctcctgacagcttccaaagagctgactgtggagggcccacagtgtatcccacccctgcccgagagtctctctcctttgggacccccgggttcccagagctccgaggaaactgatccttcatgtttcaatagctgttgttgtttttctctttgggccgggccgggccggggaagggccgagcaggctccaggaggcctccagagtcagctggaccttgctgtgtcgcccgcaggcagccctgcagacaccggtgaggtgggatgatttcaggaggtcccagcccgggactgcccgcccctctgccctgggaaccagtccaaggggctgtcagttgaatttgcctttttgttgttgttgttgtttttgttgtttatttgttctccttttaaggaattatgaagctaagaaaagttttgtgttttgggggttggtggacaaagttctagctgattaaatatggtctaacttattgatactatttttttttcttttaatgttgtactgtggagaaaaactattttgagccatggggttggtgtttacaagaactttccacttttgccaaaatgttacaattgaaaggcatctatctgcgtcttcagtttcctgatattttcttaaaagatctagtgtcctttttgtacactaaacaggtgaatgctgacttttttcattctccaataaatttcactgaactg

SEQ ID NO: 9427 - DNA, 87 bp, Homo sapiens
  source 1..87: mol_type = unassigned DNA
attcacaggctggtggtggctttccaagattctgtttcactgaggccatctatccgatttcaaggaagccaaggggagatgagtctc

SEQ ID NO: 9428 - DNA, 2352 bp, Homo sapiens
  source 1..2352: mol_type = unassigned DNA
aactttcactgctgccaccacaaccgcagggccccaattacctctctgttagaaatcggtttcagagcggtggaaccgcgggcgggaaaaagcccaggcgctgtctcgggtgccccttcgtgtcagccatcctctggtctctcgggtctccgaagctcggggctaactgggcgcgaaccgctgagcccgcctaccaaccaggccctttctcccgcccctctgcggctgaaaccctcaaggggttgcaggttcagctttcacttagagacagcaactccaaattcagggtcgctggggaaactaaggcaggactggggactctgagtgagaggtcagacgctggtcgcggactctttctcccgagaactggggatagctcttccgatagcccaaagcgattcatgcggatcctagaagaaagcgccgaggtccgggcggttggccggggagagcgaagcgccgcccacgcggctgggaaagcttggggtggcgctggcgggaggtggggccgggggcgggttcctggcggagggtggggcagacgtgggttaccgggtgtgccaaccaaaccctgaacagaggaggtggcggtggtggccctcgcctgtggcccccgtgctgcttgcactcgaactcgtcgccatggaggagctccaggagcctctgagaggacagctccggctctgcttcacgcaagctgcccggactagcctcttactgctcaggctcaacgacgctgccctgcgggcgctgcaagagtgtcagcggcaacaggtacggccggtgattgctttccaaggccaccgagggtatctgagactcccaggccctggttggtcctgcctcttctccttcatagtgtcccagtgttgtcaggagggcgctggtggtagcttggaccttgtgtgccaacgcttcctcaggtctgggcctaacagcctccactgcctgggctcactcagggagcgcctcattatttgggcagccatggattctatcccagccccatcatcagttcagggacacaacctgactgaagatgccagacatcctgagagttggcagaacacaggaggctattctgaaggagatgcagtatcacagccacagatggcactagaggaggtgtcagtgtcagatccactggcaagcaaccaaggacagtcactcccaggatcctcaagggagcacatggcacagtgggaagtgagaagccagacccatgttccaaacagagaacctgttcaggcactgccttcctctgccagccggaaacgtctggacaagaaacgttcagtgcctgtagccactgtagaactggaagaaaagaggttcagaactctgcctttagtgccaagccccctacaaggcctgaccaatcaggatttacaagagggagaagattgggagcaagaagatgaggacatggaccccagattagaacacagttcctcagttcaagaagattctgaatccccaagtcctgaagatataccagactacctcctgcaatacagggccatccacagtgcagaacagcaacatgcctatgagcaggactttgagacagattatgctgaataccgcatcctgcatgcccgtgttgggactgcaagccaaaggttcatagagctgggagcagagattaaaagagttcggcgaggaactccagaatacaaggtcctggaagacaagataatccaggaatataaaaagttcaggaagcagtacccaagttacagagaagaaaagcgtcgctgtgagtaccttcaccagaaattgtcccacattaaaggtctcatcctggagtttgaggaaaagaacaggggcagctgaagttatcaagggaatttttgagcctctgcttagtgaaacacaaaggaacaaagcagctataaactaaatagaatgcaactatctgcttttcttatgctgaccactggagtccatggtggcaagtagagagctgctctaggttcttgaggtttggttttcattattaatttttagggtatgggcactgtgcaaagactccatagctgtgcctaggagtctaggaaaagtgacagaggcttggcttttttacctttagttcagccaagtcattttcaagtcctgagaaatgacatcatcttcaggataaaataatgaggacattagacaaaccaaactaagtgaattttagcctggtagcctctctaaggaaacagtaataataacttctgataagagttaaaagaacttgtagcatacctggatataatgggaaagggcctgggtgttacccatgtactgaaaatgaacttttaccaacatggctaaaaaattaaaactgactgcttctgtgtcctt

SEQ ID NO: 9429 - DNA, 3973 bp, Homo sapiens
  source 1..3973: mol_type = unassigned DNA
cttcctggcggcgggcgcaggcgtttcctcggcgtggggcggaagcacgatctccggcagcggcctgggaactcttagctgagcaggcgagagcatcatggataccgacttatatgatgagtttgggaattatattggaccagagcttgattctgatgaagatgatgatgaattgggtagagagaccaaagatcttgatgagatggatgatgatgacgacgacgatgacgtaggagatcatgacgatgaccaccctgggatggaggtggtgctgcatgaggtgtatggtcctgaggtggagaccatagttcaagaggaagacactcagcctctcacagaacccattattaagccagtgaaaaccaagaaattcactctgatggagcagacattacctgttacggtgtatgagatggatttcttggcggatctgatggataactcagagctcatcagaaatgtgaccctttgtggacatctccaccatggcaagacatgttttgtggattgtttaattgaacagactcacccggaaatcagaaagcgctatgaccaagatctgtgctatactgacatcctcttcacagagcaagagagaggtgtaggcatcaaaagcactcctgtgacagtggtcttgccagacaccaaaggaaaatcttatctcttcaatatcatggacactccaggacatgtgaatttctctgatgaggtcacagctggcttgcgcatctcagatggagtggtccttttcattgatgctgctgagggggtgatgctgaacacagagcggctgatcaagcatgcggtgcaggagaggctggcagtcactgtgtgcatcaacaagattgaccggctgatcctggagctgaagctgcctccaactgatgcttattacaagctgcgccacattgtggatgaggtcaatggattaataagcatgtattccactgatgagaacctgatcctttccccactcctgggtaacgtctgcttctccagctcccagtacagcatctgcttcacgctgggctcctttgccaagatctatgccgacacctttggtgacattaattaccaagaatttgctaaaagactctggggtgacatctacttcaaccctaagacgcgaaagttcaccaaaaaggccccaactagcagctcccagagaagtttcgtggagtttatcttggagcctctttataagatcctcgcccaggttgtaggtgacgtggacaccagcctcccacggaccctagacgagcttggcatccacctgacgaaggaggagctgaagctgaacatccgccccttgctcaggctggtctgcaaaaagttctttggcgagttcacaggctttgtggacatgtgtgtgcagcatatcccttctccaaaggtgggcgccaagcccaagattgagcacacctacaccggtggtgtggactccgacctcggcgaggctatgagtgactgtgaccctgatggccccctgatgtgccacactactaagatgtacagcacagatgatggagtccagtttcacgcctttggccgggtgctgagtggcaccattcatgctgggcagcctgtgaaggtactgggggagaactacaccctggaggatgaggaagactcccagatatgcaccgtgggccgcctttggatctctgtggccaggtaccacatcgaggtgaaccgtgttcctgctggcaactgggttctgattgaaggtgttgatcaaccaattgtgaagacagcaaccataaccgaaccccgaggcaatgaggaggctcagattttccgacccttgaagttcaataccacatctgttatcaagattgctgtggagccagtcaacccctcagagctgcccaagatgcttgatggcctgcgcaaggtcaacaagagctatccatccctcaccaccaaggtggaggagtctggcgagcatgtgatcctgggcactggggagctctacctggactgtgtgatgcatgatttgcggaagatgtactcagagatagacatcaaggtggctgacccagttgtcacgttttgtgagacggtggtggaaacatcctccctcaagtgctttgctgaaacgcctaataagaagaacaagatcaccatgattgctgagcctcttgagaagggcctggcagaggacatagagaatgaggtggtccagattacgtggaacaggaagaagctgggagagttcttccagaccaagtacgattgggatctgctggctgcccgttccatctgggcttttggccctgatgcgactggccccaacattctggtggatgatactctgccctctgaggtggacaaggctcttcttggttcagtgaaggacagcatcgttcaaggtttccagtggggaaccagggagggccccctctgtgatgaattgattcggaatgtcaagtttaagatcctggatgcggtggttgcccaggagcccctgcaccggggcgggggccagatcatccccacagccaggagagtcgtctactctgccttcctcatggctactcctcgtctgatggagccttactactttgtagaggtccaggcccctgcagattgcgtctctgcagtttataccgtcctggccaggcgcagggggcacgtgactcaggatgcacccatcccaggctcccctctgtacaccatcaaagcttttatcccggccatcgactcttttggctttgagactgatctccggactcacacccagggacaagccttttctctgtctgtcttccaccactggcagattgtgcctggtgatcccctggacaagagcattgtcatccgccccttggagccacagccagctcctcacctggcccgggaattcatgatcaaaacccgccgtaggaagggcctcagtgaagatgtgagcatcagcaaattcttcgatgatcctatgttgctggaacttgccaaacaggatgttgtgctcaattaccccatgtgagtgcgtggactcctgggagctcctgctccctacagtgggctgcaactcctgtacttgaagctgagacctcatatgacgtggccttcgtgttgtcagagagtgtctggaagctgctgttgccatcttgaacaactcaccaacctccaacccagagccccagtgagagaggagcatttggcctcctgcttccttctgtggcctctgccgggctccattcccaaggaaaagagaggagcttgggctcacagaaagagaaggggatgaaaccccaaggggccctatctttgggatttacatggaattttattttctacaagtttgaccttagccatggtttgcaagtgaacagaacattctgacctctgtcttgctctgctcctttcatcctcgtctcccctgccccgtctggtgcttacattctgaatatatgtcatctcccaagaggcttcactgcctctgcttccagctgcagcctccttcctgcctgggtccccagggaagccgcctgccttttaattcagtgttcccatgagcgccaaggccccattattgcccccttgctcccactccatgctgcttctgggtggaacctaagatggcttgggagttgttgggttcctgcgatcagaagtctaccccaccacctcctcaggaaactgctgcctcccctaagaatcttccttgccctggagtagggggccagagcactttgatttccagccatttactccaagtcctctccccagctaccaccagtcccttactctgttctcccccagtgaaaaagagtctgttgattttcctcaaaactgctttattaggaatgtaccagggattgagttaggggagttggacagccccggctcctataggagtcctacttctctccagcatcctgtgccatcctcttgacgtaatcgctgtacattgtgtacacagcacctgtgtgagagaaaagaaataatgccccttggcatcaaacccttc

SEQ ID NO: 9430 - DNA, 4058 bp, Homo sapiens
  source 1..4058: mol_type = unassigned DNA
atcctcagctctcaccctctttggagcagcccacgtcttgggctactcgtcttggggacccgctactccgccttgccagtccgcggcgggcatacctcggaactggtcctcaggcagagggttgtcctcccgggcagaaaggcgacagcggcgtctgcggggtccttcctggcggcgggcgcaggcgtttcctcggcgtggggcggaagcacgatctccggcagcggcctgggaactcttagctgagcaggcgagagatggatgatgatgacgacgacgatgacgtaggagatcatgacgatgaccaccctgggatggaggtggtgctgcatgaggacaagaagtactacccaacagccgaggaggtgtatggtcctgaggtggagaccatagttcaagaggaagacactcagcctctcacagaacccattattaagccagtgaaaaccaagaaattcactctgatggagcagacattacctgttacggtgtatgagatggatttcttggcggatctgatggataactcagagctcatcagaaatgtgaccctttgtggacatctccaccatggcaagacatgttttgtggattgtttaattgaacagactcacccggaaatcagaaagcgctatgaccaagatctgtgctatactgacatcctcttcacagagcaagagagaggtgtaggcatcaaaagcactcctgtgacagtggtcttgccagacaccaaaggaaaatcttatctcttcaatatcatggacactccaggacatgtgaatttctctgatgaggtcacagctggcttgcgcatctcagatggagtggtccttttcattgatgctgctgagggggtgatgctgaacacagagcggctgatcaagcatgcggtgcaggagaggctggcagtcactgtgtgcatcaacaagattgaccggctgatcctggagctgaagctgcctccaactgatgcttattacaagctgcgccacattgtggatgaggtcaatggattaataagcatgtattccactgatgagaacctgatcctttccccactcctgggtaacgtctgcttctccagctcccagtacagcatctgcttcacgctgggctcctttgccaagatctatgccgacacctttggtgacattaattaccaagaatttgctaaaagactctggggtgacatctacttcaaccctaagacgcgaaagttcaccaaaaaggccccaactagcagctcccagagaagtttcgtggagtttatcttggagcctctttataagatcctcgcccaggttgtaggtgacgtggacaccagcctcccacggaccctagacgagcttggcatccacctgacgaaggaggagctgaagctgaacatccgccccttgctcaggctggtctgcaaaaagttctttggcgagttcacaggctttgtggacatgtgtgtgcagcatatcccttctccaaaggtgggcgccaagcccaagattgagcacacctacaccggtggtgtggactccgacctcggcgaggctatgagtgactgtgaccctgatggccccctgatgtgccacactactaagatgtacagcacagatgatggagtccagtttcacgcctttggccgggtgctgagtggcaccattcatgctgggcagcctgtgaaggtactgggggagaactacaccctggaggatgaggaagactcccagatatgcaccgtgggccgcctttggatctctgtggccaggtaccacatcgaggtgaaccgtgttcctgctggcaactgggttctgattgaaggtgttgatcaaccaattgtgaagacagcaaccataaccgaaccccgaggcaatgaggaggctcagattttccgacccttgaagttcaataccacatctgttatcaagattgctgtggagccagtcaacccctcagagctgcccaagatgcttgatggcctgcgcaaggtcaacaagagctatccatccctcaccaccaaggtggaggagtctggcgagcatgtgatcctgggcactggggagctctacctggactgtgtgatgcatgatttgcggaagatgtactcagagatagacatcaaggtggctgacccagttgtcacgttttgtgagacggtggtggaaacatcctccctcaagtgctttgctgaaacgcctaataagaagaacaagatcaccatgattgctgagcctcttgagaagggcctggcagaggacatagagaatgaggtggtccagattacgtggaacaggaagaagctgggagagttcttccagaccaagtacgattgggatctgctggctgcccgttccatctgggcttttggccctgatgcgactggccccaacattctggtggatgatactctgccctctgaggtggacaaggctcttcttggttcagtgaaggacagcatcgttcaaggtttccagtggggaaccagggagggccccctctgtgatgaattgattcggaatgtcaagtttaagatcctggatgcggtggttgcccaggagcccctgcaccggggcgggggccagatcatccccacagccaggagagtcgtctactctgccttcctcatggctactcctcgtctgatggagccttactactttgtagaggtccaggcccctgcagattgcgtctctgcagtttataccgtcctggccaggcgcagggggcacgtgactcaggatgcacccatcccaggctcccctctgtacaccatcaaagcttttatcccggccatcgactcttttggctttgagactgatctccggactcacacccagggacaagccttttctctgtctgtcttccaccactggcagattgtgcctggtgatcccctggacaagagcattgtcatccgccccttggagccacagccagctcctcacctggcccgggaattcatgatcaaaacccgccgtaggaagggcctcagtgaagatgtgagcatcagcaaattcttcgatgatcctatgttgctggaacttgccaaacaggatgttgtgctcaattaccccatgtgagtgcgtggactcctgggagctcctgctccctacagtgggctgcaactcctgtacttgaagctgagacctcatatgacgtggccttcgtgttgtcagagagtgtctggaagctgctgttgccatcttgaacaactcaccaacctccaacccagagccccagtgagagaggagcatttggcctcctgcttccttctgtggcctctgccgggctccattcccaaggaaaagagaggagcttgggctcacagaaagagaaggggatgaaaccccaaggggccctatctttgggatttacatggaattttattttctacaagtttgaccttagccatggtttgcaagtgaacagaacattctgacctctgtcttgctctgctcctttcatcctcgtctcccctgccccgtctggtgcttacattctgaatatatgtcatctcccaagaggcttcactgcctctgcttccagctgcagcctccttcctgcctgggtccccagggaagccgcctgccttttaattcagtgttcccatgagcgccaaggccccattattgcccccttgctcccactccatgctgcttctgggtggaacctaagatggcttgggagttgttgggttcctgcgatcagaagtctaccccaccacctcctcaggaaactgctgcctcccctaagaatcttccttgccctggagtagggggccagagcactttgatttccagccatttactccaagtcctctccccagctaccaccagtcccttactctgttctcccccagtgaaaaagagtctgttgattttcctcaaaactgctttattaggaatgtaccagggattgagttaggggagttggacagccccggctcctataggagtcctacttctctccagcatcctgtgccatcctcttgacgtaatcgctgtacattgtgtacacagcacctgtgtgagagaaaagaaataatgccccttggcatcaaacccttc

SEQ ID NO: 9431 - DNA, 4167 bp, Homo sapiens
  source 1..4167: mol_type = unassigned DNA
atcctcagctctcaccctctttggagcagcccacgtcttgggctactcgtcttggggacccgctactccgccttgccagtccgcggcgggcatacctcggaactggtcctcaggcagagggttgtcctcccgggcagaaaggcgacagcggcgtctgcggggtccttcctggcggcgggcgcaggcgtttcctcggcgtggggcggaagcacgatctccggcagcggcctgggaactcttagctgagcaggcgagagcatcatggataccgacttatatgatgagtttgggaattatattggaccagagcttgattctgatgaagatgatgatgaattgggtagagagaccaaagatcttgatgagatggatgatgatgacgacgacgatgacgtaggagatcatgacgatgaccaccctgggatggaggtggtgctgcatgaggacaagaagtactacccaacagccgaggaggtgtatggtcctgaggtggagaccatagttcaagaggaagacactcagcctctcacagaacccattattaagccagtgaaaaccaagaaattcactctgatggagcagacattacctgttacggtgtatgagatggatttcttggcggatctgatggataactcagagctcatcagaaatgtgaccctttgtggacatctccaccatggcaagacatgttttgtggattgtttaattgaacagactcacccggaaatcagaaagcgctatgaccaagatctgtgctatactgacatcctcttcacagagcaagagagaggtgtaggcatcaaaagcactcctgtgacagtggtcttgccagacaccaaaggaaaatcttatctcttcaatatcatggacactccaggacatgtgaatttctctgatgaggtcacagctggcttgcgcatctcagatggagtggtccttttcattgatgctgctgagggggtgatgctgaacacagagcggctgatcaagcatgcggtgcaggagaggctggcagtcactgtgtgcatcaacaagattgaccggctgatcctggagctgaagctgcctccaactgatgcttattacaagctgcgccacattgtggatgaggtcaatggattaataagcatgtattccactgatgagaacctgatcctttccccactcctgggtaacgtctgcttctccagctcccagtacagcatctgcttcacgctgggctcctttgccaagatctatgccgacacctttggtgacattaattaccaagaatttgctaaaagactctggggtgacatctacttcaaccctaagacgcgaaagttcaccaaaaaggccccaactagcagctcccagagaagtttcgtggagtttatcttggagcctctttataagatcctcgcccaggttgtaggtgacgtggacaccagcctcccacggaccctagacgagcttggcatccacctgacgaaggaggagctgaagctgaacatccgccccttgctcaggctggtctgcaaaaagttctttggcgagttcacaggctttgtggacatgtgtgtgcagcatatcccttctccaaaggtgggcgccaagcccaagattgagcacacctacaccggtggtgtggactccgacctcggcgaggctatgagtgactgtgaccctgatggccccctgatgtgccacactactaagatgtacagcacagatgatggagtccagtttcacgcctttggccgggtgctgagtggcaccattcatgctgggcagcctgtgaaggtactgggggagaactacaccctggaggatgaggaagactcccagatatgcaccgtgggccgcctttggatctctgtggccaggtaccacatcgaggtgaaccgtgttcctgctggcaactgggttctgattgaaggtgttgatcaaccaattgtgaagacagcaaccataaccgaaccccgaggcaatgaggaggctcagattttccgacccttgaagttcaataccacatctgttatcaagattgctgtggagccagtcaacccctcagagctgcccaagatgcttgatggcctgcgcaaggtcaacaagagctatccatccctcaccaccaaggtggaggagtctggcgagcatgtgatcctgggcactggggagctctacctggactgtgtgatgcatgatttgcggaagatgtactcagagatagacatcaaggtggctgacccagttgtcacgttttgtgagacggtggtggaaacatcctccctcaagtgctttgctgaaacgcctaataagaagaacaagatcaccatgattgctgagcctcttgagaagggcctggcagaggacatagagaatgaggtggtccagattacgtggaacaggaagaagctgggagagttcttccagaccaagtacgattgggatctgctggctgcccgttccatctgggcttttggccctgatgcgactggccccaacattctggtggatgatactctgccctctgaggtggacaaggctcttcttggttcagtgaaggacagcatcgttcaaggtttccagtggggaaccagggagggccccctctgtgatgaattgattcggaatgtcaagtttaagatcctggatgcggtggttgcccaggagcccctgcaccggggcgggggccagatcatccccacagccaggagagtcgtctactctgccttcctcatggctactcctcgtctgatggagccttactactttgtagaggtccaggcccctgcagattgcgtctctgcagtttataccgtcctggccaggcgcagggggcacgtgactcaggatgcacccatcccaggctcccctctgtacaccatcaaagcttttatcccggccatcgactcttttggctttgagactgatctccggactcacacccagggacaagccttttctctgtctgtcttccaccactggcagattgtgcctggtgatcccctggacaagagcattgtcatccgccccttggagccacagccagctcctcacctggcccgggaattcatgatcaaaacccgccgtaggaagggcctcagtgaagatgtgagcatcagcaaattcttcgatgatcctatgttgctggaacttgccaaacaggatgttgtgctcaattaccccatgtgagtgcgtggactcctgggagctcctgctccctacagtgggctgcaactcctgtacttgaagctgagacctcatatgacgtggccttcgtgttgtcagagagtgtctggaagctgctgttgccatcttgaacaactcaccaacctccaacccagagccccagtgagagaggagcatttggcctcctgcttccttctgtggcctctgccgggctccattcccaaggaaaagagaggagcttgggctcacagaaagagaaggggatgaaaccccaaggggccctatctttgggatttacatggaattttattttctacaagtttgaccttagccatggtttgcaagtgaacagaacattctgacctctgtcttgctctgctcctttcatcctcgtctcccctgccccgtctggtgcttacattctgaatatatgtcatctcccaagaggcttcactgcctctgcttccagctgcagcctccttcctgcctgggtccccagggaagccgcctgccttttaattcagtgttcccatgagcgccaaggccccattattgcccccttgctcccactccatgctgcttctgggtggaacctaagatggcttgggagttgttgggttcctgcgatcagaagtctaccccaccacctcctcaggaaactgctgcctcccctaagaatcttccttgccctggagtagggggccagagcactttgatttccagccatttactccaagtcctctccccagctaccaccagtcccttactctgttctcccccagtgaaaaagagtctgttgattttcctcaaaactgctttattaggaatgtaccagggattgagttaggggagttggacagccccggctcctataggagtcctacttctctccagcatcctgtgccatcctcttgacgtaatcgctgtacattgtgtacacagcacctgtgtgagagaaaagaaataatgccccttggcatcaaacccttc

SEQ ID NO: 9432 - DNA, 6046 bp, Homo sapiens
  source 1..6046: mol_type = unassigned DNA
taagttggcgcgtcacctagacgtcagcctcttacctctcggacgtcccgtcccaggagcaaaactctagtgactttgggcccgcccccgtgagagtggagggcggccgatgagggcggttctgaagggaacaagaccaatgagacgagcccggggcggggcgcggggccggagggtggggcgggtggcggcggtggcagtccgaggtctggctccgcgcagtatatgacagtacgtcagcagcgggatggccctagcagtggcggcggctgcagaagcccaagcagccgcggccgcagtggaggctagagccggagcggcggcggcggcggcaccccggggagtttaagatggcggcgggggggacagggggcctgcgggaggagcagcgctatgggctgtcgtgcggacggctggggcaggacaacatcaccgtactgcatgtgaagctcaccgagacggcgatccgggcgctcgagacttaccagagccacaagaatttaattccttttcgaccttcaatccagttccaaggactccacgggcttgtcaaaattcccaaaaatgatcccctcaatgaagttcataactttaacttttatttgtcaaatgtgggcaaagacaaccctcagggcagctttgactgcatccagcaaacattctccagctctggagcctcccagctcaattgcctgggatttatacaagataaaattacagtgtgtgcaacaaacgactcgtatcagatgacacgagaaagaatgacccaggcagaggaggaatcccgcaaccgaagcacaaaagttatcaaacccggtggaccatatgtagggaaaagagtgcaaattcggaaagcacctcaagctgtttcagatacagttcctgagaggaaaaggtcaacccccatgaaccctgcaaatacaattcgaaagacacatagcagcagcaccatctctcagaggccatacagggacagggtgattcacttactggccctgaaggcctacaagaaaccggagctacttgctagactccagaaagatggtgtcaatcaaaaagacaagaactccctgggagcaattctgcaacaggtagccaatctgaattctaaggacctctcatataccttaaaggattatgtttttaaagagcttcaaagagactggcctggatacagtgaaatagacagacggtcattggagtcagtgctctctagaaaactaaatccgtctcagaatgctgcaggcaccagccgttcagaatctcctgtatgttctagtagagacgctgtatcttctcctcagaaacggcttttggattcagagtttattgatcctttaatgaataaaaaagcccgaatatctcacctgacgaacagagtaccaccaacactaaatggtcatttgaatcccaccagtgaaaaatctgctgcaggcctcccgctgccccctgcggctgctgccatccctacccctccaccgctgccttcaacctatctgcccatctcacatcctcctcagattgtaaattctaactccaactcccctagcactccagaaggccgggggactcaagacctacctgttgacagttttagtcaaaacgatagtatctatgaggaccagcaagacaaatatacctctaggacttctctggaaaccttaccccctggttccgttctactaaagtgtccaaagcctatggaagaaaaccattcaatgtctcacaaaaagtccaaaaagaagtctaaaaaacataaggaaaaggaccaaataaaaaagcacgacattgagactattgaggaaaaggaggaagatcttaagagagaagaggaaattgccaagctaaataactccagtccaaattccagtggaggagttaaagaggattgcactgcctccatggaaccttcagcaattgaactcccagattatttgataaaatatatcgctatcgtctcctatgagcaacgccagaattataaggatgacttcaatgcagagtatgatgagtacagagctttgcatgccaggatggagactgtagctagaagatttatcaaactagatgcacaaagaaagcgcctttctccaggctcaaaagagtatcagaatgttcatgaagaagtcttacaagaatatcagaagataaagcagtctagtcccaattaccatgaagaaaaatacagatgtgaatatcttcataacaagctggctcacatcaaaaggctaataggtgaatttgaccaacagcaagcagagtcatggtcctagaactctgcttggaccagaagatgtgaataaacttaagcttatttatttaaaattccaaatgagttgctctagattctaaaaaggtgaaactttggctgttgaaagtttcagtattagtaaacttgagttactttttcttttccattttactttgcttccctgcatttcgaagctgctctttctggtcctccccaccaccccacccccaagacttgtgtttgttaatagaaataatttttttaggtattggggatccattgtctatatttcaaatcagttttttttcctcaaaaacttgtgtttgttattagaaatgattttttagatattggggatccagtgtccacacttaaaagttgtatgtgtttaaaaaacaacaacagtaatgtgcaaggtgaaatgcttttggataaacgtaagcctattttctgacgtttcttaatgcaaactctttgccttaaatggtagaatatttagaaatttgcacaaaattaaaaaaataaacattgtcttggagggttaaaaaatagaaaggtgtatgtgtatagattcacatacacatatgtatatacaggctgacttgatctagaacattaaatccgccctgcaagttaaccccccattgcaatggttgccttaaggtgtttgctagttgtgtacatagtgtggttaatcattagctacactgcttcccacttgattagagcaatgggaagcatactgtggcctaccagcatctggaagtgtgtgctcgatctgtatgtgtgcagaggtggtgtggatgtgagcgtgcatgaaggaaaaaaagctgctactcctagtaggccaaacgctcaggttaaacaactgacgagtgttactgtagggtgtttttttgtttttttgttttttttcttctatcaaattgctacttttgttgtggaagacaaaagcatttccatttcaacgagtttgtcagctttattaatgttgggcaaaaattgatatgtcatgaaaatgaaacagatctatagttttgggacaaaattataaaatgaaatgtgtaggtaacctatttatatactgctataaagtattttttgaagagagatatgcaaagaagctattacctacataagaggtatatttaaagattttttttttcatcctggtgccaggaatataaaaaagagtggatatatttaaccataacatactgtgattcatcaaacagcacaaactttcatttcatggagtttatctgttgacattgatttaaactgtcacttgttttatcatgtgggaacataagttatgtggtcaaaaatataaggattttgaattaatgttgattcaagttgtattgtcttattgtattgtcttttcaaagtgctgccagttgaaaagggaagcattatgtttacaaatctgttttgaaatgtttgccaaaattttggtagtgtctttaataaagatgtttgtctccagcatccagaaaaataaatgaataactttgttgtgtatcactgtaaaccagaaaaatgttggttatctagaaaacttgagagagcatgtagattaacttttctctttggagttctaaaacattaactggaaagattagataatatactaaatgtatacagaagtatacagactatacaaagactgaaacaagtcccttttgcactacaactctataacattaccgcagaaattttggttctatgtagcatggacctcctaaggaattctgtttcttttagcattgagatccctggtgctctttttttacctcagaattggtacaatcattattaaacgttaatttatttcaaactttttaattgaaaaaaggaaagggaaacttaattggggataaattcaggcatcatattattatgatagagtctcctgagtggttcgtctataggtaatgaactcattggtgttatttcttggacatcttggccttttaatcaaagactgtgtgctgctatttgctatgagcaaggtttctcaaaagcaaaaggtgcttggaccatttggatcacctgagttagaatctctaggtatagggcccaagtatctgcattttcacaggtttcttgtaggtgactttctgcaagctaaagtatgagaaccattggcttggatgtagttctaaacttttaggtctgtaaatcttgaaatcttgaactgaaggtcaactattggcttttttttttttttaatgtccatcatgtcagcaggtgcaaatcacttttcccctttgcatgatctgaggcacctcctcagttgtttcactgccaactcttgtttcagaacctgtttacaaacaagccttccagttggtgaatggttagccattggagctcctaccctgtacatcagcacatcttctggtttacaagttgggtaacaatgaaagctggagatgctaaatggaaatccagcattgcatacccttagacctgatcacataccagtaaaagccttaatttagatgttagttgtatgtgttggacagatccttgcaaaagtgtgtctgtctattagttgtaaatttgaaaattataaatctctgaatctgctactatccaagtttcatcccttttgaagatgaggcatgagcctattaaaatatttataatcatttttcgtcccctactgcaagacttttagattcttacaaatgattactacaggaatagtggccacttaatgtcagttactccggtggaagaatttatctagttttttttcttttcttttttggaaggatggtgtgaaaaatagcaagattagagaatgagttgtatagttttttctatcacatttcatctaaaatgatttgaaggacttttgaagatttttaccaacatccttaaatcaactccaggttggatgaacaactgatttaaaacaaactaagagaacattaactagatgtgggctttttaaaatatataggtattgcatttcctaccttgttatttattccactttgaatactttagagggcttaactttcaactctttaaggtagtaatggatagttttatacttgttctcacaaaattgttatggtcagtttatatcattgctccatgcattgattataaaaattcagtattaattttttctgatcttataagctttataggagttttcttttctcttataaagtgtttcaccttatgtaaaacaaatgcctgcttgcatattggaagatgttgaaattagttttagacaaaagtggtccatcaattcagacactctgcttggatgccttacccttttcattagtgcattctttgcttctgaaacttggcagaaactcgttagccagtccactgcctttctgacaatgtgtggagtcacgtatgcttggtatatgcctttactacttttaaagttctacagtttattacttgcccaagtgttactaaatccttttcttatgtgtactggatggagaaaaaattatagccagcactttgagaggaaagttttcagaaacaatattaactggcactactaactgaaggccacaggagatgctatcaatgttatttgtaatctgaagattgaacaaggctgtgaggctcatttcaaactattttgaggtgttaaaatatatatatgctgtttctcagctgttccactcaaaccgtgttaggactctcaaaggtaaaatgtcacaggggcttttcagttgttacagagctcagcagctgtggttgcccctgttctacaccaatttcagttcaataaaaatgttaactttgcaa

SEQ ID NO: 9433 - DNA, 1508 bp, Homo sapiens
  source 1..1508: mol_type = unassigned DNA
tatatgacagtacgtcagcagcgggatggccctagcagtggcggcggctgcagaagcccaagcagccgcggccgcagtggaggctagagccggagcggcggcggcggcggcaccccggggagtttaagatggcggcgggggggacagggggcctgcgggaggagcagcgctatgggctgtcgtgcggacggctggggcaggacaacatcaccgtactgcatgtgaagctcaccgagacggcgatccgggcgctcgagacttaccagagccacaagaatttaattccttttcgaccttcaatccagttccaaggactccacgggcttgtcaaaattcccaaaaatgatcccctcaatgaagttcataactttaacttttatttgtcaaatgtgggcaaagacaaccctcagggcagctttgactgcatccagcaaacattctccagctctggagcctcccagctcaattgcctgggatttatacaagataaaattacagtgtgtgcaacaaacgactcgtatcagatgacacgagaaagaatgacccagattgtaaattctaactccaactcccctagcactccagaaggccgggggactcaagacctacctgttgacagttttagtcaaaacgatagtatctatgaggaccagcaagacaaatatacctctaggacttctctggaaaccttaccccctggttccgttctactaaagtgtccaaagcctatggaagaaaaccattcaatgtctcacaaaaagtccaaaaagaagtctaaaaaacataaggaaaaggaccaaataaaaaagcacgacattgagactattgaggaaaaggaggaagatcttaagagagaagaggaaattgccaagctaaataactccagtccaaattccagtggaggagttaaagaggattgcactgcctccatggaaccttcagcaattgaactcccagattatttgataaaatatatcgctatcgtctcctatgagcaacgccagaattataaggatgacttcaatgcagagtatgatgagtacagagctttgcatgccaggatggagactgtagctagaagatttatcaaactagatgcacaaagaaagcgcctttctccaggctcaaaagagtatcagaatgttcatgaagaagtcttacaagaatatcagaagataaagcagtctagtcccaattaccatgaagaaaaatacagatgtgaatatcttcataacaagctggctcacatcaaaaggctaataggtgaatttgaccaacagcaagcagagtcatggtcctagaactctgcttggaccagaagatgtgaataaacttaagcttatttatttaaaattccaaatgagttgctctagattctaaaaaggtgaaactttggctgttgaaagtttcagtattagtaaacttgagttactttttcttttccattttactttgcttccctgcatttcgaagctgctctttctggtcctccccaccaccccaccccc

SEQ ID NO: 9434 - DNA, 3452 bp, Homo sapiens
  source 1..3452: mol_type = unassigned DNA
gagagaccatccacttccaccctttcacttaggcttcctggcgcagcctctatccaggaactctgtcccatagctgtactgcccaggtcgagctttctaaccccaagatgccactccgttcagacgttcccatcctccatccctgagacccggggcaggatcgcagcctaggggcctcacgggccgcctgctaccctgttagttgcaacacggggcggggcgtggctttgtgcacgtcggcttccgggaagagctttacgatacattgaccgacattttacgacaggcgggattgttttgtggctgtcagctttccccgtggtctgagtttgtggctgcatttttatctctggtggctctgctacggcggcgcagaaatgaggcagaagcggaaaggagatctcagccctgctgagctgatgatgctgactataggagatgttattaaacaactgattgaagcccacgagcaggggaaagacatcgatctaaataaggtgaaaaccaagacagctgccaaatatggcctttctgcccagccccgcctggtggatatcattgctgccgtccctcctcagtatcgcaaggtcttgatgcccaagttaaaggcgaaacccatcagaactgctagtgggattgctgtcgtggctgtgatgtgcaaaccccacagatgtccacacatcagttttacaggaaatatatgtgtatactgccctggtggacctgattctgattttgagtattccacccagtcttacactggctatgagccaacctccatgagagctatccgtgccagatatgaccctttcctacagacaagacaccgaatagaacagttaaaacaacttggtcatagtgtggataaagtggagtttattgtgatgggtggaacgtttatggcccttccagaagaatacagagattattttattcgaaatttacatgatgccttatcaggacatacttccaacaatatttacgaggcagtcaagtattctgagagaagcctcacaaagtgtattggaattactattgaaaccagaccagattactgcatgaagcgacatttaagtgacatgttgacctatggctgcacaaggctggagattggggtgcagagtgtttatgaagatgtggctagagacaccaacaggggccacactgtgaaggcagtgtgtgagtcatttcacctggccaaagattccggttttaaagtggtggcccatatgatgcctgacctgccaaacgtgggactagaaagagacattgaacagttcacagagttttttgagaaccctgcttttcgtcccgatgggctgaaactctatcctaccctggtgattcgtgggaccgggctttatgagctttggaaatcaggaagatataagagttactctcctagtgacctggttgaattggtggctcggatcctagccctcgtgcctccatggactcgagtgtaccgagtacagagggatattccaatgcctttagttagctcaggagtagagcatggtaacctgagagagctggcacttgcaagaatgaaagacctcggaatacagtgtcgagatgtgagaaccagagaagttggaatccaagaaattcatcacaaagtacggccataccaggttgaattggtaaggagagattatgttgcaaatggtggctgggaaacattcttgtcatacgaagacccagatcaagacattttgattggcctcctacgattacgcaagtgttcagaagaaactttccgtttcgaattgggtggaggtgtctccatagtacgagagctgcatgtgtatgggagtgtggtccctgtgagcagccgggatcctactaaatttcagcatcagggatttggcatgctgctgatggaggaagcagaaagaatagctagagaagaacatgggtctgggaaaatcgctgtgatatcaggggtcggcaccaggaattattatagaaagatcggctacagattacaaggcccgtacatggtgaagatgctgaaataatggccacaccagtccactcttctgcagtatcctccctggcagaacacggagaatcaggatttcttaaatactcaacagagaggctgagcagagcaaatggggggcttcaccctcatcccgcagctgcagagactggaaactgccttcaaggccacggctggtcatctgctgaccacaccccagatccgccctctcctgcgtgcaccccaaaaaatcacttgcgtttttgaggcttaaatcatctatccagtttctacattttgcatgaggcctgcaggtggcctattttgactcagacggtgaaaaaagcaaattaactcatttggacaccataactcatgcaataaaactgattgtcattcgaggagcaaacttaagagtagtttatttatataccctggggacagaaagtcaggttgaaacaggaaaaccaccagactctaatctcagccctttaacgacatacgcattggagcgcaagttaggaaaatgagcttttgttttcatggaaatcattctgattacagtgctgatgtttagaaataaatagcagtgtgactgggaaagaggaattgcagttgtgggggtgtgagcctggcagcagccagccagcagcctctcccaggcgggagtctaccatccgagacggcgatgacaaagagcttcattccacattctttgttatctctacttcccaccctcttggcaactacagagcagtgtgggcagccccaagtgtggtccccagagagcgtttggctttcctgtctgtctatcctgagcgggtggagtctcaggttgtgtgcccctaaatcaagatttgcttccacagaagccattacttgcaattttttttttttttctgagaaagtctcgctgtgtcacccaggctggagtgcagtggcgcaatctcactgcatcctccgcctcccgggttcaagcgattctcccgcctcagcctcctgagtagctgggattacaggcacccgccgctgctaatttttgtatttttagtagagatgggggtttcaccatattggtcaggctggtctcgaactcctgacctcaggtgatcaacccaccttggcctccctaaatgccgggattacaggcatgagccaccgctcccagcctttgattttttaaggtggattttggttgttataaatggagaaaggtaagagttcaagttcaacccgtgtgtgaaagcaaaacaatggaaaacaggattggcttcttcaaaggctcctcttgtagaactgcctctttgaaatttcgaggtaatctactttggagactctgcctggagagggtcagttcctaagttaaaagcatcgcttaaccttggctcctgtggcattttacaaaggtttaaaggaattgattcctctgaaagggcctgaaaataaaaagtctttaacatacaaagaa

SEQ ID NO: 9435 - DNA, 2019 bp, Homo sapiens
  source 1..2019: mol_type = unassigned DNA
ctctggtggctctgctacggcggcgcagaaatgaggcagaagcggaaaggagatctcagccctgctgagctgatgatgctgactataggagatgttattaaacaactgattgaagcccacgagcaggggaaagacatcgatctaaataaattgctgtcgtggctgtgatgtgcaaaccccacagatgtccacacatcagttttacaggaaatatatgtgtatactgccctggtggacctgattctgattttgagtattccacccagtcttacactggctatgagccaacctccatgagagctatccgtgccagatatgaccctttcctacagacaagacaccgaatagaacagttaaaacaacttggtcatagtgtggataaagtggagtttattgtgatgggtggaacgtttatggcccttccagaagaatacagagattattttattcgaaatttacatgatgccttatcaggacatacttccaacaatatttacgaggcagtcaagtattctgagagaagcctcacaaagtgtattggaattactattgaaaccagaccagattactgcatgaagcgacatttaagtgacatgttgacctatggctgcacaaggctggagattggggtgcagagtgtttatgaagatgtggctagagacaccaacaggggccacactgtgaaggcagtgtgtgagtcatttcacctggccaaagattccggttttaaagtggtggcccatatgatgcctgacctgccaaacgtgggactagaaagagacattgaacagttcacagagttttttgagaaccctgcttttcgtcccgatgggctgaaactctatcctaccctggtgattcgtgggaccgggctttatgagctttggaaatcaggaagatataagagttactctcctagtgacctggttgaattggtggctcggatcctagccctcgtgcctccatggactcgagtgtaccgagtacagagggatattccaatgcctttagttagctcaggagtagagcatggtaacctgagagagctggcacttgcaagaatgaaagacctcggaatacagtgtcgagatgtgagaaccagagaagttggaatccaagaaattcatcacaaagtacggccataccaggttgaattggtaaggagagattatgttgcaaatggtggctgggaaacattcttgtcatacgaagacccagatcaagacattttgattggcctcctacgattacgcaagtgttcagaagaaactttccgtttcgaattgggtggaggtgtctccatagtacgagagctgcatgtgtatgggagtgtggtccctgtgagcagccgggatcctactaaatttcagcatcagggatttggcatgctgctgatggaggaagcagaaagaatagctagagaagaacatgggtctgggaaaatcgctgtgatatcaggggtcggcaccaggaattattatagaaagatcggctacagattacaaggcccgtacatggtgaagatgctgaaataatggccacaccagtccactcttctgcagtatcctccctggcagaacacggagaatcaggatttcttaaatactcaacagagaggctgagcagagcaaatggggggcttcaccctcatcccgcagctgcagagactggaaactgccttcaaggccacggctggtcatctgctgaccacaccccagatccgccctctcctgcgtgcaccccaaaaaatcacttgcgtttttgaggcttaaatcatctatccagtttctacattttgcatgaggcctgcaggtggcctattttgactcagacggtgaaaaaagcaaattaactcatttggacaccataactcatgcaataaaactgattgtcattcgaggagcaaacttaagagtagtttatttatataccctggggacagaaagtcaggttgaaacaggaaaaccaccagactctaatctcagccctttaacgacatacgcattggagcgcaagtta

SEQ ID NO: 9436 - DNA, 545 bp, Homo sapiens
  source 1..545: mol_type = unassigned DNA
aatagtaaactgacatggcatactggtgggcatcttatggaaagttgcttccacccctgccctgtttcagctagtcctcaacttgatccagtgtccaaactctgcctccagaacagagtcccacttcctacctcacatggtctgtgacagagccccaggggatcctgagaacatgtgtccaaggagatctcagccctgctgagctgatgatgctgactataggagatgttattaaacaactgattgaagcccacgagcaggggaaagacatcgatctaaataaggtgaaaaccaagacagctgccaaatatggcctttctgcccagccccgcctggtggatatcattgctgccgtccctcctcagtatcgcaaggtcttgatgcccaagttaaaggcgaaacccatcagaactgctagtgggattgctgtcgtggctgtgatgtgcaaaccccacagatgtccacacatcagttttacaggaaatatatgtgtatactgccctggtggacctgattctgattttgagtattccacccagtcttac

SEQ ID NO: 9437 - DNA, 3158 bp, Homo sapiens
  source 1..3158: mol_type = unassigned DNA
cgaagcttcaggagacctatcctcatctgtgcaaggaggagtggccaactctggagcccaggctgttgcttcctggtctggtggtgaatcctccatagtctggagatctcagccctgctgagctgatgatgctgactataggagatgttattaaacaactgattgaagcccacgagcaggggaaagacatcgatctaaataaggtgaaaaccaagacagctgccaaatatggcctttctgcccagccccgcctggtggatatcattgctgccgtccctcctcagtatcgcaaggtcttgatgcccaagttaaaggcgaaacccatcagaactgctagtgggattgctgtcgtggctgtgatgtgcaaaccccacagatgtccacacatcagttttacaggaaatatatgtgtatactgccctggtggacctgattctgattttgagtattccacccagtcttacactggctatgagccaacctccatgagagctatccgtgccagatatgaccctttcctacagacaagacaccgaatagaacagttaaaacaacttggtcatagtgtggataaagtggagtttattgtgatgggtggaacgtttatggcccttccagaagaatacagagattattttattcgaaatttacatgatgccttatcaggacatacttccaacaatatttacgaggcagtcaagtattctgagagaagcctcacaaagtgtattggaattactattgaaaccagaccagattactgcatgaagcgacatttaagtgacatgttgacctatggctgcacaaggctggagattggggtgcagagtgtttatgaagatgtggctagagacaccaacaggggccacactgtgaaggcagtgtgtgagtcatttcacctggccaaagattccggttttaaagtggtggcccatatgatgcctgacctgccaaacgtgggactagaaagagacattgaacagttcacagagttttttgagaaccctgcttttcgtcccgatgggctgaaactctatcctaccctggtgattcgtgggaccgggctttatgagctttggaaatcaggaagatataagagttactctcctagtgacctggttgaattggtggctcggatcctagccctcgtgcctccatggactcgagtgtaccgagtacagagggatattccaatgcctttagttagctcaggagtagagcatggtaacctgagagagctggcacttgcaagaatgaaagacctcggaatacagtgtcgagatgtgagaaccagagaagttggaatccaagaaattcatcacaaagtacggccataccaggttgaattggtaaggagagattatgttgcaaatggtggctgggaaacattcttgtcatacgaagacccagatcaagacattttgattggcctcctacgattacgcaagtgttcagaagaaactttccgtttcgaattgggtggaggtgtctccatagtacgagagctgcatgtgtatgggagtgtggtccctgtgagcagccgggatcctactaaatttcagcatcagggatttggcatgctgctgatggaggaagcagaaagaatagctagagaagaacatgggtctgggaaaatcgctgtgatatcaggggtcggcaccaggaattattatagaaagatcggctacagattacaaggcccgtacatggtgaagatgctgaaataatggccacaccagtccactcttctgcagtatcctccctggcagaacacggagaatcaggatttcttaaatactcaacagagaggctgagcagagcaaatggggggcttcaccctcatcccgcagctgcagagactggaaactgccttcaaggccacggctggtcatctgctgaccacaccccagatccgccctctcctgcgtgcaccccaaaaaatcacttgcgtttttgaggcttaaatcatctatccagtttctacattttgcatgaggcctgcaggtggcctattttgactcagacggtgaaaaaagcaaattaactcatttggacaccataactcatgcaataaaactgattgtcattcgaggagcaaacttaagagtagtttatttatataccctggggacagaaagtcaggttgaaacaggaaaaccaccagactctaatctcagccctttaacgacatacgcattggagcgcaagttaggaaaatgagcttttgttttcatggaaatcattctgattacagtgctgatgtttagaaataaatagcagtgtgactgggaaagaggaattgcagttgtgggggtgtgagcctggcagcagccagccagcagcctctcccaggcgggagtctaccatccgagacggcgatgacaaagagcttcattccacattctttgttatctctacttcccaccctcttggcaactacagagcagtgtgggcagccccaagtgtggtccccagagagcgtttggctttcctgtctgtctatcctgagcgggtggagtctcaggttgtgtgcccctaaatcaagatttgcttccacagaagccattacttgcaattttttttttttttctgagaaagtctcgctgtgtcacccaggctggagtgcagtggcgcaatctcactgcatcctccgcctcccgggttcaagcgattctcccgcctcagcctcctgagtagctgggattacaggcacccgccgctgctaatttttgtatttttagtagagatgggggtttcaccatattggtcaggctggtctcgaactcctgacctcaggtgatcaacccaccttggcctccctaaatgccgggattacaggcatgagccaccgctcccagcctttgattttttaaggtggattttggttgttataaatggagaaaggtaagagttcaagttcaacccgtgtgtgaaagcaaaacaatggaaaacaggattggcttcttcaaaggctcctcttgtagaactgcctctttgaaatttcgaggtaatctactttggagactctgcctggagagggtcagttcctaagttaaaagcatcgcttaaccttggctcctgtggcattttacaaaggtttaaaggaattgattcctctgaaagggcctgaaaataaaaagtctttaacatacaaagaa

SEQ ID NO: 9438 - DNA, 656 bp, Homo sapiens
  source 1..656: mol_type = unassigned DNA
ccaactctggagcccaggatgttgcttcccggtctggtggtgaatcctccatagtctggagatctcagccctgctgagctgatgatgctgactataggagatgttattaaacaactgattgaagcccacgagcaggggaaagacatcgatctaaataaggtgaaaaccaagacagctgccaaatatggcctttctgcccagccccgcctggtggatatcattgctgccgtccctcctcagtatcgcaaggtcttgatgcccaagttaaaggcgaaacccatcagaactgctagtgggattgctgtcgtggctgtgatgtgcaaaccccacagatgtccacacatcagttttacaggaaatatatgtgtatactgccctggtggacctgattctgattttgagtattccacccagtcttacactggctatgagccaacctccatgagagctatccgtgccagatatgaccctttcctacagacaagacaccgaatagaacagttaaaacaacttggtcatagtgtggataaagtggagtttattgtgatgggtggaacgtttatggcccttccagaagaatacagagattattttattcgaaatttacatgatgccttatcaggacatacttccaacaatatttacgaggcagtcaa

SEQ ID NO: 9439 - DNA, 1779 bp, Homo sapiens
  source 1..1779: mol_type = unassigned DNA
gagtttgtggctgcatttttatctctggtggctctgctacggcggcgcagaaatgaggcagaagcggaaagggtgaaaaccaagacagctgccaaatatggcctttctgcccagccccgcctggtggatatcattgctgccgtccctcctcagtatcgcaaggtcttgatgcccaagttaaaggcgaaacccatcagaactgctagtgggattgctgtcgtggctgtgatgtgcaaaccccacagatgtccacacatcagttttacaggaaatatatgtgtccaacctccatgagagctatccgtgccagatatgaccctttcctacagacaagacaccgaatagaacagttaaaacaacttggtcatagtgtggataaagtggagtttattgtgatgggtggaacgtttatggcccttccagaagaatacagagattattttattcgaaatttacatgatgccttatcaggacatacttccaacaatatttacgaggcagtcaagtattctgagagaagcctcacaaagtgtattggaattactattgaaaccagaccagattactgcatgaagcgacatttaagtgacatgttgacctatggctgcacaaggctggagattggggtgcagagtgtttatgaagatgtggctagagacaccaacaggggccacactgtgaaggcagtgtgtgagtcatttcacctggccaaagattccggttttaaagtggtggcccatatgatgcctgacctgccaaacgtgggactagaaagagacattgaacagttcacagagttttttgagaaccctgcttttcgtcccgatgggctgaaactctatcctaccctggtgattcgtgggaccgggctttatgagctttggaaatcaggaagatataagagttactctcctagtgacctggttgaattggtggctcggatcctagccctcgtgcctccatggactcgagtgtaccgagtacagagggatattccaatgcctttagttagctcaggagtagagcatggtaacctgagagagctggcacttgcaagaatgaaagacctcggaatacagtgtcgagatgtgagaaccagagaagttggaatccaagaaattcatcacaaagtacggccataccaggttgaattggtaaggagagattatgttgcaaatggtggctgggaaacattcttgtcatacgaagacccagatcaagacattttgattggcctcctacgattacgcaagtgttcagaagaaactttccgtttcgaattgggtggaggtgtctccatagtacgagagctgcatgtgtatgggagtgtggtccctgtgagcagccgggatcctactaaatttcagcatcagggatttggcatgctgctgatggaggaagcagaaagaatagctagagaagaacatgggtctgggaaaatcgctgtgatatcaggggtcggcaccaggaattattatagaaagatcggctacagattacaaggcccgtacatggtgaagatgctgaaataatggccacaccagtccactcttctgcagtatcctccctggcagaacacggagaatcaggatttcttaaatactcaacagagaggctgagcagagcaaatggggggcttcaccctcatcccgcagctgcagagactggaaactgccttcaaggccacggctggtcatctgctgaccacaccccagatccgccctctcctgcgtgcaccccaaaaaatcacttgcgtttttgaggcttaaatcatctatc

SEQ ID NO: 9440 - DNA, 1923 bp, Homo sapiens
  source 1..1923: mol_type = unassigned DNA
attgaccgacattttacgacaggcgggattgttttgtggctgtcagctttccccgtggtctgagtttgtggctgcatttttatctctggtggctctgctacggcggcgcagaaatgaggcagaagcggaaaggagatctcagccctgctgagctgatgatgctgactataggagatgttattaaacaactgattgaagcccacgagcaggggaaagacatcgatctaaataaattgctgtcgtggctgtgatgtgcaaaccccacagatgtccacacatcagttttacaggaaatatatgtgtccaacctccatgagagctatccgtgccagatatgaccctttcctacagacaagacaccgaatagaacagttaaaacaacttggtcatagtgtggataaagtggagtttattgtgatgggtggaacgtttatggcccttccagaagaatacagagattattttattcgaaatttacatgatgccttatcaggacatacttccaacaatatttacgaggcagtcaagtattctgagagaagcctcacaaagtgtattggaattactattgaaaccagaccagattactgcatgaagcgacatttaagtgacatgttgacctatggctgcacaaggctggagattggggtgcagagtgtttatgaagatgtggctagagacaccaacaggggccacactgtgaaggcagtgtgtgagtcatttcacctggccaaagattccggttttaaagtggtggcccatatgatgcctgacctgccaaacgtgggactagaaagagacattgaacagttcacagagttttttgagaaccctgcttttcgtcccgatgggctgaaactctatcctaccctggtgattcgtgggaccgggctttatgagctttggaaatcaggaagatataagagttactctcctagtgacctggttgaattggtggctcggatcctagccctcgtgcctccatggactcgagtgtaccgagtacagagggatattccaatgcctttagttagctcaggagtagagcatggtaacctgagagagctggcacttgcaagaatgaaagacctcggaatacagtgtcgagatgtgagaaccagagaagttggaatccaagaaattcatcacaaagtacggccataccaggttgaattggtaaggagagattatgttgcaaatggtggctgggaaacattcttgtcatacgaagacccagatcaagacattttgattggcctcctacgattacgcaagtgttcagaagaaactttccgtttcgaattgggtggaggtgtctccatagtacgagagctgcatgtgtatgggagtgtggtccctgtgagcagccgggatcctactaaatttcagcatcagggatttggcatgctgctgatggaggaagcagaaagaatagctagagaagaacatgggtctgggaaaatcgctgtgatatcaggggtcggcaccaggaattattatagaaagatcggctacagattacaaggcccgtacatggtgaagatgctgaaataatggccacaccagtccactcttctgcagtatcctccctggcagaacacggagaatcaggatttcttaaatactcaacagagaggctgagcagagcaaatggggggcttcaccctcatcccgcagctgcagagactggaaactgccttcaaggccacggctggtcatctgctgaccacaccccagatccgccctctcctgcgtgcaccccaaaaaatcacttgcgtttttgaggcttaaatcatctatccagtttctacattttgcatgaggcctgcaggtggcctattttgactcagacggtgaaaaaagcaaattaactcatttggacaccataactcatgcaataaaactgattgtcattcgaggagc

SEQ ID NO: 9441 - DNA, 1784 bp, Homo sapiens
  source 1..1784: mol_type = unassigned DNA
agagttcctattgggttaacactggaggctctaagatggcggcagtggcaacctgcggtagtgttgccgcgagtactgggtctgcagtggcgacagccagcaagagcaacgtcaccagtttccagaggaggggtcctagagccagcgtgaccaacgacagcggccctcgactggtgtccattgcgggcacgcgaccgtcggtgcggaatggacagctgctggtatcaaccgggctcccagccctagaccagctcttaggtggaggtttagccgttggaacagttcttctaattgaggaggataaatataatatttactcacctttgctcttcaagtatttcctggcagaaggaattgtcaatgggcatactttgttggttgcatctgctaaagaggatcctgccaacattttacaggaacttccagcaccattacttgatgataaatgtaaaaaggaatttgatgaagatgtatacaatcataaaacaccagaatctaatattaagatgaaaatagcttggcgttaccagttattacccaagatggagattggaccagtatcatcttcaagatttggtcactattatgatgcatcaaaaagaatgccacaagaactaattgaggcttcaaattggcatggattttttcttccagagaaaatatcttcaactctcaaagtagaaccctgttctttgacccctggctacacaaagctgcttcagtttatccagaacatcatttatgaggaaggatttgatggatccaatcctcagaaaaaacagagaaacattttaagaataggaattcagaatcttggctcacctttatggggagacgatatttgctgtgcagaaaatggtggcaacagtcacagccttaccaagttcctctatgttctccgtggtcttctgagaacctctctttcagcctgcatcatcacaatgccaacacatctgatccagaataaagccattattgcccgtgtcacaaccttgtcagatgtagtagttggtctggaatcatttattggttctgagagagaaactaacccattgtataaggattatcatggattgattcatatacggcagattcctcggcttaataacttgatctgtgatgaatcagatgtcaaagacttagcttttaaattaaaaaggaagctattcaccattgagcgactgcatttgcctccagacttgtcagacacagtgagccgctcaagcaaaatggatctggcagaatccgccaagcggctgggcccaggctgtggcatgatggccggaggcaagaagcacctggacttctagggattcctccttagtcgctgcatgcagaattctatgacactctaattatgattgctaatagcttatgtaaatatttttcttaacaatttgaccctccactccttgaaaaacacaggattataaaatggtgccgccatttctcattttttaactttttacagaactagcacagcagaaatacttttaaatttttccttcatgctctagagaaaataattttatttttaaataaacgccaaaaaatgtcaaaatctcaagattcctgacagtggtcattcgtgtgtgtactaaggcatttagtgtcatggtaaagtgcatgtcacagcaggtagcatacaaaacatgatgaaattcaagattgtatgtgaaaacatactttctctttattacagaaacagtcacttgccaccaaaaatgctgttttttaaatgaaaatgtgtttactaatatataaaataaatttgcatttatgta

SEQ ID NO: 9442 - DNA, 1679 bp, Homo sapiens
  source 1..1679: mol_type = unassigned DNA
actggaggctctaagatggcggcagtggcaacctgcggtagtgttgccgcgagtactgggtctgcagtggcgacagccagcaagagcaacgtcaccagtttccagaggaggggtcctagagccagcgtgaccaacgacagcggccctcgactggtgtccattgcgggcacgcgaccgtcggtgcggaatggacagctgctggtatcaaccgggctcccagccctagaccagctcttaggtggaggtttagccgttggaacagttcttctaattgaggaggataaatataatatttactcacctttgctcttcaagtatttcctggcagaaggaattgtcaatgggcatactttgttggttgcatctgctaaagaggatcctgccaacattttacaggaacttccagcaccattacttgatgataaatgtaaaaaggaatttgatgaagatgtatacaatcataaaacaccagaatctaatattaagatgaaaatagcttggcgttaccagttattacccaagatggagcagattggaccagtatcatcttcaagatttggtcactattatgatgcatcaaaaagaatgccacaagaactaattgaggcttcaaattggcatggattttttcttccagagaaaatatcttcaactctcaaagtagaaccctgttctttgacccctggctacacaaagctgcttcagtttatccagaacatcatttatgaggaaggatttgatggatccaatcctcagaaaaaacagagaaacattttaagaataggaattcagaatcttggctcacctttatggggagacgatatttgctgtgcagaaaatggtggcaacagtcacagccttaccaagttcctctatgttctccgtggtcttctgagaacctctctttcagcctgcatcatcacaatgccaacacatctgatccagaataaagccattattgcccgtgtcacaaccttgtcagatgtagtagttggtctggaatcatttattggttctgagagagaaactaacccattgtataaggattatcatggattgattcatatacggcagattcctcggcttaataacttgatctgtgatgaatcagatgtcaaagacttagcttttaaattaaaaaggaagctattcaccattgagtgggtgcaagacaactacttgagacaagagaggaacatttatcctccaggcttctcatacttactcaagcagaaagactctgcatggggagaaggttctttacagcattccacatttttaatgagcttccttgcaaaggcgactgcatttgcctccagacttgtcagacacagtgagccgctcaagcaaaatggatctggcagaatccgccaagcggctgggcccaggctgtggcatgatggccggaggcaagaagcacctggacttctagggattcctccttagtcgctgcatgcagaattctatgacactctaattatgattgctaatagcttatgtaaatatttttcttaacaatttgaccctccactccttgaaaaacacaggattataaaatggtgccgccatttctcattttttaactttttacagaactagcacagcagaaatacttttaaatttttccttcatgctctagagaaaataattttatttttaaataaacgccaaaaaatgtc

SEQ ID NO: 9443 - DNA, 1961 bp, Homo sapiens
  source 1..1961: mol_type = unassigned DNA
ctctaagatggcggcagtggcaacctgcggtagtgttgccgcgagtactgggtctgcagtggcgacagccagcaagagcaacgtcaccagtttccagaggaggggtcctagagccagcgtgaccaacgacagcggccctcgactggtgtccattgcgggcacgcgaccgtcggtgcggaatggacagctgctggtatcaaccgggctcccagccctagaccagctcttaggtggaggtttagccgttggaacagttcttctaattgaggaggataaatataatatttactcacctttgctcttcaagtatttcctggcagaaggaattgtcaatgggcatactttgttggttgcatctgctaaagaggatcctgccaacattttacaggaacttccagcaccattacttgatgataaatgtaaaaaggaatttgatgaagatgtatacaatcataaaacaccagaatctaatattaagatgaaaatagcttggcgttaccagttattacccaagatggagattggaccagtatcatcttcaagatttggtcactattatgatgcatcaaaaagaatgccacaagaactaattgaggcttcaaattggcatggattttttcttccagagaaaatatcttcaactctcaaagtagaaccctgttctttgacccctggctacacaaagctgcttcagtttatccagaacatcatttatgaggaaggatttgatggatccaatcctcagaaaaaacagagaaacattttaagaataggaattcagaatcttggctcacctttatggggagacgatatttgctgtgcagaaaatggtggcaacagtcacagccttaccaagttcctctatgttctccgtggtcttctgagaacctctctttcagcctgcatcatcacaatgccaacacatctgatccagaataaagccattattgcccgtgtcacaaccttgtcagatgtagtagttggtctggaatcatttattggttctgagagagaaactaacccattgtataaggattatcatggattgattcatatacggcagattcctcggcttaataacttgatctgtgatgaatcagatgtcaaagacttagcttttaaattaaaaaggaagctattcaccattgaggctggagtgcagtggcacgatctcggctcacggcaacctcgcctcctgggttcaagcaattctcccgcctcagcctccctagtagctgggattacaggcgcccaccaccacacccagctaatttttgtatttttagtagagatggggttccaccatgttggccaggctggtctcgaactcctgacctcaggtgattcatccgcctcagcctcccaaagtgctggaattacaggcatgagctaccgcgcccggcctagggctttgtatttcaaagagaacaagtctaaagtgggtgcaagacaactacttgagacaagagaggaacatttatcctccaggcttctcatacttactcaagcagaaagactctgcatggggagaaggttctttacagcattccacatttttaatgagcttccttgcaaaggcgactgcatttgcctccagacttgtcagacacagtgagccgctcaagcaaaatggatctggcagaatccgccaagcggctgggcccaggctgtggcatgatggccggaggcaagaagcacctggacttctagggattcctccttagtcgctgcatgcagaattctatgacactctaattatgattgctaatagcttatgtaaatatttttcttaacaatttgaccctccactccttgaaaaacacaggattataaaatggtgccgccatttctcattttttaactttttacagaactagcacagcagaaatacttttaaatttttccttcatgctctagagaaaataattttatttttaaataaacgccaaaaaatgtcaaaa

SEQ ID NO: 9444 - DNA, 1477 bp, Homo sapiens
  source 1..1477: mol_type = unassigned DNA
gcccagcagatgaggaagtggcaggcaggcaggctggccccggggacttctctctggccctgctccctccgagcgctccgccgttgcccgcctggcccctacggagtccttagccaggatggaggctgttgtgaacttgtaccaagaggtgatgaagcacgcagatccccggatccagggctaccctctgatggggtcccccttgctaatgacctccattctcctgacctacgtgtacttcgttctctcacttgggcctcgcatcatggctaatcggaagcccttccagctccgtggcttcatgattgtctacaacttctcactggtggcactctccctctacattgtctatgagttcctgatgtcgggctggctgagcacctatacctggcgctgtgaccctgtggactattccaacagccctgaggcacttaggatggttcgggtggcctggctcttcctcttctccaagttcattgagctgatggacacagtgatctttattctccgaaagaaagacgggcaggtgaccttcctacatgtcttccatcactctgtgcttccctggagctggtggtggggggtaaagattgccccgggaggaatgggctctttccatgccatgataaactcttccgtgcatgtcataatgtacctgtactacggattatctgcctttggccctgtggcacaaccctacctttggtggaaaaagcacatgacagccattcagctgatccagtttgtcctggtctcactgcacatctcccagtactactttatgtccagctgtaactaccagtacccagtcattattcacctcatctggatgtatggcaccatcttcttcatgctgttctccaacttctggtatcactcttataccaagggcaagcggctgccccgtgcacttcagcaaaatggagctccaggtattgccaaggtcaaggccaactgagaagcatggcctagataggcgcccacctaagtgcctcaggactgcaccttagggcagtgtccgtcagtgccctctccacctacacctgtgaccaaggcttatgtggtcaggactgagcaggggactggccctcccctccccacagctgctctacagggaccacggctttggttcctcacccacttcccccgggcagctccagggatgtggcctcattgctgtctgccactccagagctgggggctaaaagggctgtacagttatttccccctccctgccttaaaacttgggagaggagcactcagggctggccccacaaagggtctcgtggcctttttcctcacacagaagaggtcagcaataatgtcactgtggacccagtctcactcctccaccccacacactgaagcagtagcttctgggccaaaggtcagggtgggcgggggcctgggaatacagcctgtggaggctgcttactcaacttgtgtcttaattaaaagtgacagaggaaaccacgga

SEQ ID NO: 9445 - DNA, 1384 bp, Homo sapiens
  source 1..1384: mol_type = unassigned DNA
agatgaggaagtggcaggcaggcaggctggccccggggacttctctctggccctgctccctccgagcgctccgccgttgcccgcctggcccctacggagtccttagccaggatggaggctgttgtgaacttgtaccaagaggtgatgaagcacgcagatccccggatccagggctaccctctgatggggtcccccttgctaatgacctccattctcctgacctacgtgtacttcgttctctcacttgggcctcgcatcatggctaatcggaagcccttccagctccgtggcttcatgattgtctacaacttctcactggtggcactctccctctacattgtctatgagatggttcgggtggcctggctcttcctcttctccaagttcattgagctgatggacacagtgatctttattctccgaaagaaagacgggcaggtgaccttcctacatgtcttccatcactctgtgcttccctggagctggtggtggggggtaaagattgccccgggaggaatgggctctttccatgccatgataaactcttccgtgcatgtcataatgtacctgtactacggattatctgcctttggccctgtggcacaaccctacctttggtggaaaaagcacatgacagccattcagctgatccagtttgtcctggtctcactgcacatctcccagtactactttatgtccagctgtaactaccagtacccagtcattattcacctcatctggatgtatggcaccatcttcttcatgctgttctccaacttctggtatcactcttataccaagggcaagcggctgccccgtgcacttcagcaaaatggagctccaggtattgccaaggtcaaggccaactgagaagcatggcctagataggcgcccacctaagtgcctcaggactgcaccttagggcagtgtccgtcagtgccctctccacctacacctgtgaccaaggcttatgtggtcaggactgagcaggggactggccctcccctccccacagctgctctacagggaccacggctttggttcctcacccacttcccccgggcagctccagggatgtggcctcattgctgtctgccactccagagctgggggctaaaagggctgtacagttatttccccctccctgccttaaaacttgggagaggagcactcagggctggccccacaaagggtctcgtggcctttttcctcacacagaagaggtcagcaataatgtcactgtggacccagtctcactcctccaccccacacactgaagcagtagcttctgggccaaaggtcagggtgggcgggggcctgggaatacagcctgtggaggctgcttactcaacttgtgtcttaattaaaagtgacagaggaaacc

SEQ ID NO: 9446 - DNA, 3997 bp, Homo sapiens
  source 1..3997: mol_type = unassigned DNA
gatagcgccgggcagagggacccggctaccctggacagcgcatcgccgcccgcccgggtcgccgcgccacagccgctgcggatcatggaacatctaaaggcctttgatgatgaaatcaatgcttttttggacaatatgtttggaccgcgagattctcgagtcagagggtggttcatgttggactcttaccttcctaccttttttcttactgtcatgtatctgctctcaatatggctgggtaacaagtatatgaagaacagacctgctctttctctcaggggtatcctcaccttgtataatcttggaatcacacttctctccgcgtacatgctggcagagctcattctctccacttgggaaggaggctacaacttacagtgtcaagatcttaccagcgcaggggaagctgacatccgggtagccaaggtgctttggtggtactatttctccaaatcagtagagttcctggacacaattttcttcgttttgcggaaaaaaacgagtcagattacttttcttcatgtatatcatcatgcttctatgtttaacatctggtggtgtgtcttgaactggataccttgtggacaaagtttctttggaccaacactgaacagttttatccacattcttatgtactcctactatggactttctgtgtttccatctatgcacaagtatctttggtggaagaaatatctcacacaggctcagctggtgcagttcgtgctcaccatcacgcacaccatgagcgccgtcgtgaaaccgtgtggcttccccttcggttgtctcatcttccagtcatcttatatgctaacgttagtcatcctcttcttaaatttttacgttcagacataccgaaaaaagccaatgaagaaagatatgcaagagccacctgcagggaaagaagtgaagaatggtttttccaaagcctacttcactgcagcaaatggagtgatgaacaagaaagcacaataaaaatgagtaacagaaaaagcacatatactagcctaacagattggcttgttttaaagcaaagactgaattgaaggttacatgttttaggataaactaatttcttttgagttcataaatcatttgtacccagaatgtattaatatattgctattaggttaatctgttaactgaatgctttgatcagcattgaggtgatgctcacctccgaggacctcagaactggtgcagcttctctctccctccctcccacagactgaacctttcgccagaagctgtccttataacgccttatacgcatacacagccaggaaacgtggagcattgtttctcacagagagtctccaaataaaaagggttttgttcagattaaaatgtttacaacaaaatgttaattatattctaaatacagggtatgttctaatctatattaagcaataatgccagtgcataatcattccatttgttcctttagcaatcaaccccagaaaatattaaaatgggatcatacacagaagatagaaaaatctagcaaaacttctctttctgtaagccagagtcttgtctatcagattcccacaaccactcctgattctaaatttagtgatatggtaatgaaattggtatttattttaaatattagttattctaaggagaaaaaaatgcttctgcaagattttcataattcaggggctgtggataggattgttcctctgtttccctaatcattcatctgttcatgtctccctcttgtgccagtcagcctaggttatacagatgccatgctccacaccacgagcagtgtacaaatctggctgcccgtttactttctgagcaagcactggagtccactccgacctttttctttgaacatgcatgctgctggaatatgtataaatcagaactagcagaagtagcagagtgatgggagcaaaataggcactgaattcgtcaactcttttttgtgagcctacttgtgaatattacctcagatacctgttgtcactcttcacaggttatttaagtttttgaagctgggaggaaaaagatggagtagcttggaaagattccagcactgagccgtgggccggtcatgagccacgataaaaaatgccagtttggcaaactcagcactcctgttccctgctcaggtatatgcgatctctaccgagaagcaagcacaaaagtagacaaaagtattaatgagtatttcctttctccataagtgcaggactgttactcactactaaactctaccaagaatggaaacaaagaatattttctgaagatttttttgaagattaatttataccctataaaataaaacttgttagcttcgatgaagtcacttcatcttctctcctgccttatttttttaaataagtttttaggtcctgacactgacatcaaatacatgcacaccagaaaggcatttccaccaccgtccccactcattagcgtccagagtgcctttctctctcggctttttttcccccctgagctctagttttaaactttctcctgttaaaaaaattgtacttttatttcatgtaaactgcccctctgaggatttgggcatattttttggaaggtgcctaatgcttaggatagtctctagggtgatgcactgcacctgcttccttcccttcagtgcggccgacccatttctgttgaacagatgtctcctgtgtgatgcccctgactcttacatttatctttctaaatcattttctgaagctgacttgctctagggtgcttcatcaccacttccatcttgcatcaccttataactgttctgtcttgttctctcccagcaatttattttaaaacaagggctagcttcaagcatgactgttaatggctcctctgtgacaaaacacaagttggaccaaggagaaagccctttggagaaactggaccctagttcagtttagatctcaaatataggctgaaatctcttaccaaagtgcgttccagataaaaatgagacttagaagacagactggtctaatatgctcactggtcatcacattcagcttattcttacgtgccagtgaggccctaaggtctcagtgcatagcatacctgccactctggatgttttcctgggcttcatatctgtatggcaaggagggagctgtccttcagcagacaaagtcaagcagctttaagtacaaggcagcttgaaacctctctgatgaaagtgaaaaatgtgggtagcttatactttcaaactaatgccagtgactagagagaggtttcattcatgatgtgtatttccaatttggtcttcaattcaagagatgcttcataaaacacttatagccttaaaccattcaagggctaattaaaaaaatagttatgaaatcttagccacaaaaaataaatcaggtaaacattttaacctgtcgttaagtgttgtaacttcaaaaaaccaaaatgcttattttaatgtgatttttctaaaactattgaaaaattaatatttctataatctattaaaaaaaatggagaatgttttctctcaaatttcctctgacccatgggaatgaaaatacttaaatactgtaaagcatatctattaataattcccccaattttttaaactaacaaaatggaatgttaactgaatggaattaaacatagcaattgtcaagccatcaaaattatatatcgaaccacttaggcatgttacggggtaaagtcctcacccctgcatttgagaaatattttattatttttattttaaggcaaaacagtgtttactgtgatgggcagaacagccttttgtatctaggagtccatttgagttctttccaatatttccatatcgttcataaatgtgtctgggggcttccttgtttggaaaatatggatatcgctttgttttcctttgaaagtaattatatcttaagaacatagtatcatgaatggagtagacagggaggctgcagaagccatttctctttgtagataaaaagcattatctatgattgttgtataataaattgatttttacattaaa

SEQ ID NO: 9447 - DNA, 1371 bp, Homo sapiens
  source 1..1371: mol_type = unassigned DNA
ggcagctttgcaagtccgcgttatatatcgcagtggctgcgcccgggatagctggctgcgccgccgcgcacatgcctaggttcgacgccctcctccctttgcccaggagttccttctgtcccggctctgttccgtctcgccccgaggttcacgccatcctcggagccccagcctttcacccagcgcctccaagctttggaccttgacttctgcaaaactagatggtcacagccatgaatgtctcacatgaagtaaatcagctgttccagccctataacttcgagctgtccaaggacatgaggccctttttcgaggagtattgggcaacctcattccccatagccctgatctacctggttctcatcgctgtggggcagaactacatgaaggaacgcaagggcttcaacctgcaagggcctctcatcctctggtccttctgccttgcaatcttcagtatcctgggggcagtgaggatgtggggcattatggggactgtgctacttaccgggggcctaaagcaaaccgtgtgcttcatcaacttcatcgataattccacagtcaaattctggtcctgggtctttcttctcagcaaggtcatagaactcggagacacagccttcatcatcctgcgtaagcggccactcatctttattcactggtaccaccacagcacagtgctcgtgtacacaagctttggatacaagaacaaagtgcctgcaggaggctggttcgtcaccatgaactttggtgttcatgccatcatgtacacctactacactctgaaggctgccaacgtgaagccccccaagatgctgcccatgctcatcaccagcctgcagatcttgcagatgtttgtaggagccatcgtcagcatcctcacgtacatctggaggcaggatcagggatgccacaccacgatggaacacttattctggtccttcatcttgtatatgacctatttcatcctctttgcccacttcttctgccagacctacatcaggcccaaggtcaaagccaagaccaagagccagtgaaggtttggagagaacaatgaagctccaggctctctcttctccagggcaccaagaggctgggcttagttttgggagaatgattaggttgccttacctgcatggtttccccagaggatgtgtgccccaaggtggctggaatttttgacagacaagaagggtgaccttgggatgggggtgtggtctgttactttaatgtttctgtttttaatgtgaaggccaagcaggccctgggatgggagtggggcggaggagggtcctaagagctgattatttaatttctatccagaaatctttcttcttcttgctctgtttttttaaattaaagatttcaacaaaa

SEQ ID NO: 9448 - DNA, 3042 bp, Homo sapiens
  source 1..3042: mol_type = unassigned DNA
agattggaggggcggctgcgcgaggctgcagactggtgcagcgcactgtgctggcggctgggcctcctccacctcctcgtctttctcccgggaaccttgacgacgccttccgcttggccctgccttctgccgcatccccgccgccgcggcgccttgaggagcaggagaagacgcagccgggccgccgccgttagaggggttcccggccgccgctcgccccgtcggccgccaccgcctccggggtcagccctctctctgggtctccgctttctcctgccgccagcgcccgctcatcgccgcgatggggctcctggactcggagccgggtagtgtcctaaacgtagtgtccacggcactcaacgacacggtagagttctaccgctggacctggtccatcgcagataagcgtgtggaaaattggcctctgatgcagtctccttggcctacactaagtataagcactctttatctcctgtttgtgtggctgggtccaaaatggatgaaggaccgagaaccttttcagatgcgtctagtgctcattatctataattttgggatggttttgcttaacctctttatcttcagagagttattcatgggatcatataatgcgggatatagctatatttgccagagtgtggattattctaataatgttcatgaagtcaggatagctgctgctctgtggtggtactttgtatctaaaggagttgagtatttggacacagtgttttttattctgagaaagaaaaacaaccaagtttctttccttcatgtgtatcatcactgtacgatgtttaccttgtggtggattggaattaagtgggttgcaggaggacaagcattttttggagcccagttgaattcctttatccatgtgattatgtactcatactatgggttaactgcatttggcccatggattcagaaatatctttggtggaaacgatacctgactatgttgcaactgattcaattccatgtgaccattgggcacacggcactgtctctttacactgactgccccttccccaaatggatgcactgggctctaattgcctatgcaatcagcttcatatttctctttcttaacttctacattcggacatacaaagagcctaagaaaccaaaagctggaaaaacagccatgaatggtatttcagcaaatggtgtgagcaaatcagaaaaacaactcatgatagaaaatggaaaaaagcagaaaaatggaaaagcaaaaggagattaaattgaactgggccttaactgttgttgacagtgaggaaaaactcccatatcatataaaatttcagggaaaacagaagcaaaggagagcttgggggtggggagaaaagacaaatgtgctctatgtcctagtaactcttagactgagtaaagtgttaataccatacccagatgttttatttatgaagtttttattttaaacattttttttaaaaattagccttgatattctccagaccaaagcaatcattaagtgactttggggattctccccctgttcacatccagttgtctaaaggatgagatttttcatgtatcttatagtcactcattcttcggtctgaattttagacgatcacagaaacggtctttatgaattattttgataaattactaattatcttatctactgactgaaatcagtggtgttacattttcttgtccaaagctgaaaatgtgtatacacttaaacttgcacatttgaattcatttgctgaccggaatggtcaaatctctccacctctagtcagagtataattttggttgtaattaaatttttaaaatctgctgatctctgtagaatcttagaggcttgatgatgatggtgttggtgaaaataagaaagaattgcagtaaagtcttgtctggtgacccagagatcaccatgacttgaggcacaaatcactgtggggaaacaattttttgtgatgaaaaggcagcatttgaatactcctgttagtagcagaaatatattatgaaaattaagattattgtctgattgaaacatgaaacaactcatgtctttattagtaacatcataagatagttacatttatgtgctgttagaatatgttgatttttatcaggctttccttgttttgatttatggctgttcctgatttttcatatgtggaaatatacctacctcttccgttggaaagaacatttaaaattaaataaattttaattaaaaaatcaaggagtcttctaatgtaaattttaatgttaactttcaaatccactagtattttttttgcttttatgacaaatagcatacaccaaacatttctgtgaaactatccttctctttcaatgtgtttaattttggagtaacgttttccttgtgactaagttgcaagatcttatttattaactaggtatgaagtataaacccattttggtgcaatattcttgactccttggtgctaaagattgttaaattcaatgcttgatgttacaaggtgttgttaaaacacaaaatgaataaaagtgagagtagtcagaactataacattcaatttgctatttacaaatgaagtatttcatgtaatataagtgaacaactggaaataaagtaggaaagaatttgtatcatgttttactacataggttaattttttaagggatgttgcaaagggattactagagaaagacaaaatgtgaccaaaaaaaagcatgaatatttcttaagtatctcaacaacatgtcaaagctgcatgtgtaggatgtatgctgtttgtacaaactatttcagaatattttgtaagctataacatatttattgtgcattaaaattaaatactttttccccaaaggcatgcagtcatgagaattacagaaaatttgcaacatataaagtagtttgatctaagaggattcaacacctttgttttgttgctcagtgtgtaatgactgagatttgtaaatctttgtgaacattctgtactggttcccaagagctattcattccctgctacctgatttcagcacaataaatatacttctgctgtgggaaaaata

SEQ ID NO: 9449 - DNA, 2827 bp, Homo sapiens
  source 1..2827: mol_type = unassigned DNA
gcgccattgtgacgtcacggtcagcccacgttctgattgtagatagccggcgccttcctcttcccatcgcgcgggtcctagccaccggtgtctccttctacatccgcctctgcgccggctgccacccgcgctccctccgccgccgccgccttgctgctgctcaaagctgctgccgccccttgggctaaaaggttttcaaatggaacattttgatgcatcacttagtacctatttcaaggcattgctaggccctcgagatactagagtaaaaggatggtttcttctggacaattatatacccacatttatctgctctgtcatatatttactaattgtatggctgggaccaaaatacatgaggaataaacagccattctcttgccgggggattttagtggtgtataaccttggactcacactgctgtctctgtatatgttctgtgagttagtaacaggagtatgggaaggcaaatacaacttcttctgtcagggcacacgcaccgcaggagaatcagatatgaagattatccgtgtcctctggtggtactacttctccaaactcatagaatttatggacactttcttcttcatcctgcgcaagaacaaccaccagatcacggtcctgcacgtctaccaccatgcctcgatgctgaacatctggtggtttgtgatgaactgggtcccctgcggccactcttattttggtgccacacttaatagcttcatccacgtcctcatgtactcttactatggtttgtcgtcagtcccttccatgcgtccatacctctggtggaagaagtacatcactcaggggcagctgcttcagtttgtgctgacaatcatccagaccagctgcggggtcatctggccgtgcacattccctcttggttggttgtatttccagattggatacatgatttccctgattgctctcttcacaaacttctacattcagacctacaacaagaaaggggcctcccgaaggaaagaccacctgaaggaccaccagaatgggtccatggctgctgtgaatggacacaccaacagcttttcacccctggaaaacaatgtgaagccaaggaagctgcggaaggattgaagtcaaagaattgaaaccctccaaaccacgtcatctgattgtaagcacaatatgagttgtgccccaatgctcgttaacagctgctgtaactagtctggcctacaatagtgtgattcatgtaggacttctttcatcaattcaaaacccctagaaaacgtatacagattatataagtagggataagatttctaacatttctgggctctctgacccctgcgctagactgtggaaagggagtattattatagtatacaacactgctgttgccttattagttataacatgataggtgctgaattgtgattcacaatttaaaaacactgtaatccaaacttttttttttaactgtagatcatgcatgtgattgtaaatgtaaatttgtacaatgttgttatggtagagaaacacacatgccttaaaatttaaaaagcagggcccaaagcttattagtttaaattagggtatgtttcaagtttgtattaatttgtaatagctctgtttagaaaaaatcaaagaccatgatttatgaaactaatgtgacataatttccagtgacttgttgatgtgaaatcagacacggcaccttcagttttgtactattggctttgaatcaagcaggctcaaatctagtggaacagtcagtttaactttttaacagatcttatttttttattttgagtgccactattaatgtaaaaaggggggggctctacagcagtcgtgatgaaacttaaatatatattctttgtcctcgagattttaggaagggtgtagggtgagtaggccatttttaatttctgaagtgctaagtgtttttatacagcaaacaaaaagtcaattttgctttccaccagtgcgagagaggatgtatacttttcaagagagatgattgcctatttaccgtttgacagagtcccgtagatgagcaatggggaactggttgccagggtctaaatttggattgatttatgcactgttatctgttttgacacagatttccttgtaaaatgtgcctagtttaccaaaattaacaaagggggggaaaggaccttagaactttttaaggtaaaatcaaatatagctacagcataagagaatcgagaaatttgatagaggtaacttgtttaatgtaaatctaatagtacttgtaatttctttctgcttagaatctaaagatgtgtttagaacctcttgtttaaaaataatagactgcttatcataaaatcacatctcacacatttgaggcagtggtcaaacaggtaaagcctatgatgtgtgtcattttaaagtgtcggaatttagcctctgaataccttctccattgggggaaagatattcttggaaccactcatgacatatcttagaaggtcattgacaatgtataaactaattgttggtttgatatttatgtaaatatcagtttaccatgctttaattttgcacattcgtactatagggagcctattggttctctattagtcttgtgggttttctgtttgaaaaggagtcatggcatctgtttacatttaccttatcaaacctagaatgtgtatatttataaatgtatgtcttcattgctaggtactaatttgcagatgtctttacatatttcaatacagaaactataacattcaatagtgtgctgtcaaagtgtgcttagctcacctggatatacctacattgttaaatgtctaaacagtaatcattaaaacatttttgattacctgt

SEQ ID NO: 9450 - DNA, 580 bp, Homo sapiens
  source 1..580: mol_type = unassigned DNA
ccaccggtgtctccttctacatccgcctctgcgccggctgccacccgcgctccctccgccgccgccgccttgctgctgctcaaagctgctgccgccccttgggctaaaaggttttcaaatggaacattttgatgcatcacttagtacctatttcaaggcattgctaggccctcgaggtatcagcagctctgtcctcagaatgggtcccccacttcacacagttgtaggatggctacagcagctccaagcagcacattcagaggaagaagaaaaaatgtttcatttgtgtggttttaagcataaagaagttgtttcccagagctctttgccagctgtcatccctcaaaactcactggccacaattgcttcacatgcccctgcctgaaccagccaccagagggggttaggaccaccacagattgactagatcctaaggattctctacctggggctggagttcgggtcaggtgcccgggaagcactgtgcggtgtgggaggatgaatatgtgccaatttggaaagatgagtatttgtgggaaaatgaataaagcaaagtgtaaatcagaggtttaagttaaaa

SEQ ID NO: 9451 - DNA, 2940 bp, Homo sapiens
  source 1..2940: mol_type = unassigned DNA
aggggccaaccccggcctaggctctccaccgcatcggattctggaatttacgatcacgaaagttctattgtcccgcgattggctcccgggccgcatgacatcatagcgcttgattcatccttcgggtcccgattggctggccgcgccattgtgacgtcacggtcagcccacgttctgattgtagatagccggcgccttcctcttcccatcgcgcgggtcctagccaccggtgtctccttctacatccgcctctgcgccggctgccacccgcgctccctccgccgccgccgccttgctgctgctcaaagctgctgccgccccttgggctaaaaggttttcaaatggaacattttgatgcatcacttagtacctatttcaaggcattgctaggccctcgagatactagagtaaaaggatggtttcttctggacaattatatacccacatttatctgctctgtcatatatttactaattgtatggctgggaccaaaatacatgaggaataaacagccattctcttgccgggggattttagtggtgtataagttctgtgagttagtaacaggagtatgggaaggcaaatacaacttcttctgtcagggcacacgcaccgcaggagaatcagatatgaagattatccgtgtcctctggtggtactacttctccaaactcatagaatttatggacactttcttcttcatcctgcgcaagaacaaccaccagatcacggtcctgcacgtctaccaccatgcctcgatgctgaacatctggtggtttgtgatgaactgggtcccctgcggccactcttattttggtgccacacttaatagcttcatccacgtcctcatgtactcttactatggtttgtcgtcagtcccttccatgcgtccatacctctggtggaagaagtacatcactcaggggcagctgcttcagtttgtgctgacaatcatccagaccagctgcggggtcatctggccgtgcacattccctcttggttggttgtatttccagattggatacatgatttccctgattgctctcttcacaaacttctacattcagacctacaacaagaaaggggcctcccgaaggaaagaccacctgaaggaccaccagaatgggtccatggctgctgtgaatggacacaccaacagcttttcacccctggaaaacaatgtgaagccaaggaagctgcggaaggattgaagtcaaagaattgaaaccctccaaaccacgtcatctgattgtaagcacaatatgagttgtgccccaatgctcgttaacagctgctgtaactagtctggcctacaatagtgtgattcatgtaggacttctttcatcaattcaaaacccctagaaaacgtatacagattatataagtagggataagatttctaacatttctgggctctctgacccctgcgctagactgtggaaagggagtattattatagtatacaacactgctgttgccttattagttataacatgataggtgctgaattgtgattcacaatttaaaaacactgtaatccaaacttttttttttaactgtagatcatgcatgtgattgtaaatgtaaatttgtacaatgttgttatggtagagaaacacacatgccttaaaatttaaaaagcagggcccaaagcttattagtttaaattagggtatgtttcaagtttgtattaatttgtaatagctctgtttagaaaaaatcaaagaccatgatttatgaaactaatgtgacataatttccagtgacttgttgatgtgaaatcagacacggcaccttcagttttgtactattggctttgaatcaagcaggctcaaatctagtggaacagtcagtttaactttttaacagatcttatttttttattttgagtgccactattaatgtaaaaaggggggggctctacagcagtcgtgatgaaacttaaatatatattctttgtcctcgagattttaggaagggtgtagggtgagtaggccatttttaatttctgaagtgctaagtgtttttatacagcaaacaaaaagtcaattttgctttccaccagtgcgagagaggatgtatacttttcaagagagatgattgcctatttaccgtttgacagagtcccgtagatgagcaatggggaactggttgccagggtctaaatttggattgatttatgcactgttatctgttttgacacagatttccttgtaaaatgtgcctagtttaccaaaattaacaaagggggggaaaggaccttagaactttttaaggtaaaatcaaatatagctacagcataagagaatcgagaaatttgatagaggtaacttgtttaatgtaaatctaatagtacttgtaatttctttctgcttagaatctaaagatgtgtttagaacctcttgtttaaaaataatagactgcttatcataaaatcacatctcacacatttgaggcagtggtcaaacaggtaaagcctatgatgtgtgtcattttaaagtgtcggaatttagcctctgaataccttctccattgggggaaagatattcttggaaccactcatgacatatcttagaaggtcattgacaatgtataaactaattgttggtttgatatttatgtaaatatcagtttaccatgctttaattttgcacattcgtactatagggagcctattggttctctattagtcttgtgggttttctgtttgaaaaggagtcatggcatctgtttacatttaccttatcaaacctagaatgtgtatatttataaatgtatgtcttcattgctaggtactaatttgcagatgtctttacatatttcaatacagaaactataacattcaatagtgtgctgtcaaagtgtgcttagctcacctggatatacctacattgttaaatgtctaaacagtaatcattaaaacatttttgattacctgtg

SEQ ID NO: 9452 - DNA, 1491 bp, Homo sapiens
  source 1..1491: mol_type = unassigned DNA
ctcttcccatcgcgcgggtcctagccaccggtgtctccttctacatccgcctctgcgccggctgccacccgcgctccctccgccgccgccgccttgctgctgctcaaagctgctgccgccccttgggctaaaaggttttcaaatggaacattttgatgcatcacttagtacctatttcaaggcattgctaggccctcgagatactagagtaaaaggatggtttcttctggacaattatatacccacatttatctgctctgtcatatatttactaattgtatggctgggaccaaaatacatgaggaataaacagccattctcttgccgggggattttagtggtgtataaccttggactcacactgctgtctctgtatatgttctgtgagtccaaaagggagcaaccccgtcgatctgcctgtgcctcacgaactgatccttcgactcagcagcagctgccagaaaacaggttagtaacaggagtatgggaaggcaaatacaacttcttctgtcagggcacacgcaccgcaggagaatcagatatgaagattatccgtgtcctctggtggtactacttctccaaactcatagaatttatggacactttcttcttcatcctgcgcaagaacaaccaccagatcacggtcctgcacgtctaccaccatgcctcgatgctgaacatctggtggtttgtgatgaactgggtcccctgcggccactcttattttggtgccacacttaatagcttcatccacgtcctcatgtactcttactatggtttgtcgtcagtcccttccatgcgtccatacctctggtggaagaagtacatcactcaggggcagctgcttcagtttgtgctgacaatcatccagaccagctgcggggtcatctggccgtgcacattccctcttggttggttgtatttccagattggatacatgatttccctgattgctctcttcacaaacttctacattcagacctacaacaagaaaggggcctcccgaaggaaagaccacctgaaggaccaccagaatgggtccatggctgctgtgaatggacacaccaacagcttttcacccctggaaaacaatgtgaagccaaggaagctgcggaaggattgaagtcaaagaattgaaaccctccaaaccacgtcatctgattgtaagcacaatatgagttgtgccccaatgctcgttaacagctgctgtaactagtctggcctacaatagtgtgattcatgtaggacttctttcatcaattcaaaacccctagaaaacgtatacagattatataagtagggataagatttctaacatttctgggctctctgacccctgcgctagactgtggaaagggagtattattatagtatacaacactgctgttgccttattagttataacatgataggtgctgaattgtgattcacaatttaaaaacactgtaatccaaacttttttttttaactgtagatcatgcatgtgattgt

SEQ ID NO: 9453 - DNA, 3070 bp, Homo sapiens
  source 1..3070: mol_type = unassigned DNA
gtcgggggccgccgctcggccatgacacccgcgcgagcgcgcggccgggaagcggtcagagagaactgccgttaggtctcggacctggtgccgagaaagagctgccggggcaacccgcgctccgcccgcggcctccagctccgccggctccggggtacagcccggctcctcgggcgcggggaaaggggtgcgggtgcgggcgcgggcggctcgccccacgccgaggctgaggcagggcgctcgggagcgttctctgtgctgcggtcccacctgtgcgcgctgacaggcgccgcggggcacgacaccgtgcccacaccagacgcggagggatggatctgtccgcctgggtcctcccgccctgcgggccggagcgcgcggcgggagagccgggggagcgctctcggagggagcgcgctttctttggagtcggcgaaacccgggttttcaaatggaacattttgatgcatcacttagtacctatttcaaggcattgctaggccctcgagatactagagtaaaaggatggtttcttctggacaattatatacccacatttatctgctctgtcatatatttactaattgtatggctgggaccaaaatacatgaggaataaacagccattctcttgccgggggattttagtggtgtataaccttggactcacactgctgtctctgtatatgttctgtgagttagtaacaggagtatgggaaggcaaatacaacttcttctgtcagggcacacgcaccgcaggagaatcagatatgaagattatccgtgtcctctggtggtactacttctccaaactcatagaatttatggacactttcttcttcatcctgcgcaagaacaaccaccagatcacggtcctgcacgtctaccaccatgcctcgatgctgaacatctggtggtttgtgatgaactgggtcccctgcggccactcttattttggtgccacacttaatagcttcatccacgtcctcatgtactcttactatggtttgtcgtcagtcccttccatgcgtccatacctctggtggaagaagtacatcactcaggggcagctgcttcagtttgtgctgacaatcatccagaccagctgcggggtcatctggccgtgcacattccctcttggttggttgtatttccagattggatacatgatttccctgattgctctcttcacaaacttctacattcagacctacaacaagaaaggggcctcccgaaggaaagaccacctgaaggaccaccagaatgggtccatggctgctgtgaatggacacaccaacagcttttcacccctggaaaacaatgtgaagccaaggaagctgcggaaggattgaagtcaaagaattgaaaccctccaaaccacgtcatctgattgtaagcacaatatgagttgtgccccaatgctcgttaacagctgctgtaactagtctggcctacaatagtgtgattcatgtaggacttctttcatcaattcaaaacccctagaaaacgtatacagattatataagtagggataagatttctaacatttctgggctctctgacccctgcgctagactgtggaaagggagtattattatagtatacaacactgctgttgccttattagttataacatgataggtgctgaattgtgattcacaatttaaaaacactgtaatccaaacttttttttttaactgtagatcatgcatgtgattgtaaatgtaaatttgtacaatgttgttatggtagagaaacacacatgccttaaaatttaaaaagcagggcccaaagcttattagtttaaattagggtatgtttcaagtttgtattaatttgtaatagctctgtttagaaaaaatcaaagaccatgatttatgaaactaatgtgacataatttccagtgacttgttgatgtgaaatcagacacggcaccttcagttttgtactattggctttgaatcaagcaggctcaaatctagtggaacagtcagtttaactttttaacagatcttatttttttattttgagtgccactattaatgtaaaaaggggggggctctacagcagtcgtgatgaaacttaaatatatattctttgtcctcgagattttaggaagggtgtagggtgagtaggccatttttaatttctgaagtgctaagtgtttttatacagcaaacaaaaagtcaattttgctttccaccagtgcgagagaggatgtatacttttcaagagagatgattgcctatttaccgtttgacagagtcccgtagatgagcaatggggaactggttgccagggtctaaatttggattgatttatgcactgttatctgttttgacacagatttccttgtaaaatgtgcctagtttaccaaaattaacaaagggggggaaaggaccttagaactttttaaggtaaaatcaaatatagctacagcataagagaatcgagaaatttgatagaggtaacttgtttaatgtaaatctaatagtacttgtaatttctttctgcttagaatctaaagatgtgtttagaacctcttgtttaaaaataatagactgcttatcataaaatcacatctcacacatttgaggcagtggtcaaacaggtaaagcctatgatgtgtgtcattttaaagtgtcggaatttagcctctgaataccttctccattgggggaaagatattcttggaaccactcatgacatatcttagaaggtcattgacaatgtataaactaattgttggtttgatatttatgtaaatatcagtttaccatgctttaattttgcacattcgtactatagggagcctattggttctctattagtcttgtgggttttctgtttgaaaaggagtcatggcatctgtttacatttaccttatcaaacctagaatgtgtatatttataaatgtatgtcttcattgctaggtactaatttgcagatgtctttacatatttcaatacagaaactataacattcaatagtgtgctgtcaaagtgtgcttagctcacctggatatacctacattgttaaatgtctaaacagtaatcattaaaacatttttgatt

SEQ ID NO: 9454 - DNA, 3090 bp, Homo sapiens
  source 1..3090: mol_type = unassigned DNA
cacgagggggaggagatttccctgtagacgagtaaaaagggtgatggacaaacgtgcgggcactaagaccgcaaggcattcatttcctcctacggtggatgcggacgccgggaggaggagagccccagagagaggagctgggagcggaggcgcaggcaatgctcagccctggatgtagctgagaggctgggagaagagacgaccgctggagaccgagcggcgtggggaagacctaggggggtgggtgggggaagcagacaggagaacactcgaaatcaagcgctttacagattattttattttgtatagagaacacgtagcgactccgaagatcagccccaatgaacatgtcagtgttgactttacaagaatatgaattcgaaaagcagttcaacgagaatgaagccatccaatggatgcaggaaaactggaagaaatctttcctgttttctgctctgtatgctgcctttatattcggtggtcggcacctaatgaataaacgagcaaagtttgaactgaggaagccattagtgctctggtctctgacccttgcagtcttcagtatattcggtgctcttcgaactggtgcttatatggtgtacattttgatgaccaaaggcctgaagcagtcagtttgtgaccagggtttttacaatggacctgtcagcaaattctgggcttatgcatttgtgctaagcaaagcacccgaactaggagatacaatattcattattctgaggaagcagaagctgatcttcctgcactggtatcaccacatcactgtgctcctgtactcttggtactcctacaaagacatggttgccgggggaggttggttcatgactatgaactatggcgtgcacgccgtgatgtactcttactatgccttgcgggcggcaggtttccgagtctcccggaagtttgccatgttcatcaccttgtcccagatcactcagatgctgatgggctgtgtggttaactacctggtcttctgctggatgcagcatgaccagtgtcactctcactttcagaacatcttctggtcctcactcatgtacctcagctaccttgtgctcttctgccatttcttctttgaggcctacatcggcaaaatgaggaaaacaacgaaagctgaatagtgttggaactgaggaggaagccatagctcagggtcatcaagaaaaataatagacaaaagaaaatggcacaaggaatcacacgtggtgcagctaaaacaaaacaaaacatgagcaaacacaaaacccaaggcagcttagggataattaggttgatttaacccagtaagtttatgatccttttagggtgaggactcactgagtgcacctccatctccaagcactgctgctggaagaccccattccctctttatctatcaactctaggacaagggagaacaaaagcaagccagaagcagaggagactaatcaaaggcaaacaaaggctattaacacataggaaaaaatgtatttactaagtgtcacatttctctaagatgaaagatttttactctagaaactgtgcgagcacaacacacacaatcctttctaactttatggacactaaactggagccaatagaaaagacaaaaatgaaagagacacagggtgtatatctagaacgataatgcttttgcagaaactaaagcctttttaagaaatgccagctgctgtagaccccatgagaaaagatgtcttaatcatccttatgaaaacagatgtaaacaactatatttcaactaacttcatcttcactgcatagcctcaggctagtgagtttgccaaaaccaaagggggtgaatacttccccaagattcttcctgggaggatggaaacagtgcagcccaggtcccatgggggcagctccatcccagagcatttctgatagttgaactgtaatttctactcttaagtgagatatgaagcattatccttttgttcagttgccccgggcttttgaacagaagagtaaatacagaattgaaaaagataaacactcaaccaaacaatgtgaaaacgggttctgtagtatttgtaaaaaggcccggcccaggaccactgtgagctggaaaagggagaaaggcagtgggaaaagaggtgagccgaagatcaattcgacagacagatggtgtgtatgcccctccctgtttgacttcacacacactcataactttccaaatgaaaccccacagtatagcgcatattttcgatatttttgtgaattccaaaaggaaatcacagggctgttcgaaatattgggggaacactgtgtttctgcatcatctgcatttgctccccaagcaatgtagaggtgtttaaagggccctctgctggctgagtggcaatactacaacaaacttcaaggcaagtttggctgaaaacagttgacaacaaagggcccccatacacttatccctcaaattttaagtgatatgaaatacttgtcatgtctttggccaaatcagaagatattcatcctgcttcaagtcagcttcagaaatgttttaaaagggactttagctctggaactcaaaatcaatttattaagagccatattctttaaaaaaaaaaagctggataatattctctgtaatatttcagtcctttacaagccaaatacatgtgtcaatgtttctagtatttcaaagaagcaattatgtaaagttgttcaatgtgacataatagtattataattggttaagtagcttaatgattaggcaaactagatgaaaagattaggggcttccacactgcatagattacacgcacatagccacgcatacacacacagacacacagatgtggggtacactgaacttcaaagcccaaatgaatagaaacacattttctggctagcagaaaaaaacaaaacaaaactgttgtttctctttcttgctttgagagtgtacagtaaaagggattttttcgaattatttttatattattttagctttaattgtgctgtcgttcatgaaacagagctgctctgcttttctgtcagagatggcaagggctttttcagcatctcgtttatgtgtggaatttaaaaagaataaagttttattccattctg

SEQ ID NO: 9455 - DNA, 6454 bp, Homo sapiens
  source 1..6454: mol_type = unassigned DNA
gtagacgagtaaaaagggtgatggacaaacgtgcgggcactaagaccgcaaggcattcatttcctcctacggtggatgcggacgccgggaggaggagagccccagagagaggagctgggagcggaggcgcagagaacacgtagcgactccgaagatcagccccaatgaacatgtcagtgttgactttacaagaatatgaattcgaaaagcagttcaacgagaatgaagccatccaatggatgcaggaaaactggaagaaatctttcctgttttctgctctgtatgctgcctttatattcggtggtcggcacctaatgaataaacgagcaaagtttgaactgaggaagccattagtgctctggtctctgacccttgcagtcttcagtatattcggtgctcttcgaactggtgcttatatggtgtacattttgatgaccaaaggcctgaagcagtcagtttgtgaccagggtttttacaatggacctgtcagcaaattctgggcttatgcatttgtgctaagcaaagcacccgaactaggagatacaatattcattattctgaggaagcagaagctgatcttcctgcactggtatcaccacatcactgtgctcctgtactcttggtactcctacaaagacatggttgccgggggaggttggttcatgactatgaactatggcgtgcacgccgtgatgtactcttactatgccttgcgggcggcaggtttccgagtctcccggaagtttgccatgttcatcaccttgtcccagatcactcagatgctgatgggctgtgtggttaactacctggtcttctgctggatgcagcatgaccagtgtcactctcactttcagaacatcttctggtcctcactcatgtacctcagctaccttgtgctcttctgccatttcttctttgaggcctacatcggcaaaatgaggaaaacaacgaaagctgaatagtgttggaactgaggaggaagccatagctcagggtcatcaagaaaaataatagacaaaagaaaatggcacaaggaatcacacgtggtgcagctaaaacaaaacaaaacatgagcaaacacaaaacccaaggcagcttagggataattaggttgatttaacccagtaagtttatgatccttttagggtgaggactcactgagtgcacctccatctccaagcactgctgctggaagaccccattccctctttatctatcaactctaggacaagggagaacaaaagcaagccagaagcagaggagactaatcaaaggcaaacaaaggctattaacacataggaaaaaatgtatttactaagtgtcacatttctctaagatgaaagatttttactctagaaactgtgcgagcacaacacacacaatcctttctaactttatggacactaaactggagccaatagaaaagacaaaaatgaaagagacacagggtgtatatctagaacgataatgcttttgcagaaactaaagcctttttaagaaatgccagctgctgtagaccccatgagaaaagatgtcttaatcatccttatgaaaacagatgtaaacaactatatttcaactaacttcatcttcactgcatagcctcaggctagtgagtttgccaaaaccaaagggggtgaatacttccccaagattcttcctgggaggatggaaacagtgcagcccaggtcccatgggggcagctccatcccagagcatttctgatagttgaactgtaatttctactcttaagtgagatatgaagcattatccttttgttcagttgccccgggcttttgaacagaagagtaaatacagaattgaaaaagataaacactcaaccaaacaatgtgaaaacgggttctgtagtatttgtaaaaaggcccggcccaggaccactgtgagctggaaaagggagaaaggcagtgggaaaagaggtgagccgaagatcaattcgacagacagatggtgtgtatgcccctccctgtttgacttcacacacactcataactttccaaatgaaaccccacagtatagcgcatattttcgatatttttgtgaattccaaaaggaaatcacagggctgttcgaaatattgggggaacactgtgtttctgcatcatctgcatttgctccccaagcaatgtagaggtgtttaaagggccctctgctggctgagtggcaatactacaacaaacttcaaggcaagtttggctgaaaacagttgacaacaaagggcccccatacacttatccctcaaattttaagtgatatgaaatacttgtcatgtctttggccaaatcagaagatattcatcctgcttcaagtcagcttcagaaatgttttaaaagggactttagctctggaactcaaaatcaatttattaagagccatattctttaaaaaaaaaaagctggataatattctctgtaatatttcagtcctttacaagccaaatacatgtgtcaatgtttctagtatttcaaagaagcaattatgtaaagttgttcaatgtgacataatagtattataattggttaagtagcttaatgattaggcaaactagatgaaaagattaggggcttccacactgcatagattacacgcacatagccacgcatacacacacagacacacagatgtggggtacactgaacttcaaagcccaaatgaatagaaacacattttctggctagcagaaaaaaacaaaacaaaactgttgtttctctttcttgctttgagagtgtacagtaaaagggattttttcgaattatttttatattattttagctttaattgtgctgtcgttcatgaaacagagctgctctgcttttctgtcagagatggcaagggctttttcagcatctcgtttatgtgtggaatttaaaaagaataaagttttattccattctgtgtgaatggtttgagcagtgaacaaagaatccatgcaaaccaagtcatgactggaagaaatggggagtgggggacagtgcaggggaggaaagctgttacatctatgttaaatgattgtgagcagtctataatgtcttgatgttggttcataggtgagacacaactgatggaggaatgtattataaattatgcaaaatctgacatgagctgaaaagacaggtccttttataagagctaatagatgcttaggatgcaaatgttattttgagcttcgcaaatacatgataccgtgcaataagccttttttccttataacagaaaatgagaataattaaaatgaggagaaggccacataacagttgacttgaatttaattgaaggacccattggaggctcatctggttgatttaattatttaattgagtgatttattgcagatctcttaatgcaggttagaaacggaagtgagcataaaccttaaaaagactctaaatgatgcttccaaagcactttcattttggtattaggttcatgtttgtttgtctttacttgtaaaataatttggaatttttgtttacagggtgaatgtcttaatagttttaaaattagctaaatatatctaaaggcatttccaatgtttatcatgggaggaaaaaagccacattttttttaaaacaaaacaaaacaaaacaaaattttggtaatataggttcaatacactgtttttaacatctcagcttagccgctttaatcatatcaagatatgaggctggatcactggcccatgacaaatctgaaacctaccagagaattgactgctgcatagataatcctgctgccagttaacattccagaaaaacttgggcaggcaagtttttatagctgccccactatgctgcaatagagtatctttctattgaagattttccactgcatcccgatcctactatggtgaaagcattgttcttgggctaaaaaaaaatcctttatttcatacacacatgatttcatacactaggtctgagcatcaagccaagtccatgagtttgcaatgaagttctagtgagaaatgctctattcataaagcagggggtttacgtggaccttctagtgttgcttatgggaaaagagtaactaccatattacatctaacgcaaggccaaagtaccaaattaaaaccatggattgaggtggttattcgaagtcacttactcccatccttctaattatgctccactacaaaagtaaggggagaagagggaatactttacatgtacattgctagagggaaaagaaaggcttgattatatcccctcgcttctccacctctctgctcatgtaaagaaactgatgagaaaagagactaatatgtctagactgagttagaaacttcatatgagtgggttttgtagaattgatgggaaagacagtgggaacctagaagaacagaaagagacccacagaatgtctttctttttttttttttttttttttttgaggtggattcttgctgttgttgcccaggctggagtgcagtggcgcgatctagactcactgcaacctccgcctcccaggttccagcaattctcctgcctcagcctcccaaatagctgaggttacaggcgcccgccaccacacccagctaatttttgtatttttagtagagacagggtttcaccatgttggccaggctggtctcgagctcctgacctcaggggatccacccgccttggtctcccaaagtgctgggattataggcgtgagccaccgtgcctggcccagaatgtttttttaaatcagatgtagcatcttcataaggtaaagcctgtcacatcagagtaacaaagctcctggagtacagtgatgctagagtagaatgttccagaagtctggccatagccccagcttctgaattacctgggagagacaagatgctcaggttactattttttctttattctgatagtacagcctctactcagagaccacggtgtgtgtcacacaaccgaggcagctagggcatattctgagggcttttttttttttttggtttccttaatgattctttaacagagtaactggattggccaaggtctgattcaagaggctgtgaggagagtagagaacaaatagactttgcctctcagagttcagagctttaagttgtataagcatggtccatgtccacctcttgtagacacttattccttaaaagtttccatcatgaaaaataatatcatgtcaaaattttataagcacccagaatgtcccagtagtcaaatgtagtgtctttctccagtctctgttttcgataataaataccttgctctcaatttaggatgatcgtaaagcctatgttcatgctgtgagtcattgtctcccacagcttttgaaacatcgttctttgtcttttctatacaacacctgattctttgtgcctcagactcattgctatcaggaagagactttgccaagatccaccaccacatttggccagtagtgtatacacattaaagtgagagctgatgaaatcacaatgctctattttgttccgacaatcagtatgaaggggtaggtcccagtttgccaatgagcaacagcctctgtatgctggtgtccaagacttacacaaaacaagtgtcagtgcagtcacagcattttcttgaatgctgttgtgacagactccagttataaacatctgcgagccatatggcacaactcatagctaaagaggccggtacagggcacatgcacagagctttgaagaacatacacaaacctgttgaatcaagttactttcctcatcctcagagactttgacaattcagagctcacagatggcagggggaattctcaggcttcccttcctcctgattgacactttttaaaggaagtgatgtggaagttgttctagaagttagatggacagtgggagcacattcgtgagtggggcttgggagagctcaaaagtggcactttgattttaggctgggcaggcagaagtctcacagtaaaatatatttcactagacgtccaaaccaacactgcattgtagtaacctcttctgaagtaactggttaaattaataactggtcccataagtcagggtcaagccacatttataacccattcgggccggccatgaagggttctgactcgacattggtatttaaatgctgttactttcccaatgcttagtagcacttgagactttatttccatcgacaaaaactaagaaggccacagaagtagcctaacagtcctccctggtcatactcgtttcaaacaggtctgcctgtctagacatattcaggcaggaggttgcttgctgctatcttgaaaaccactggaagattcagcttcttggggacctcagagcccatattcatatggaagcccacccatataagcctcacagagcaaatcacagcaatgttgaagttgttattttcaagtgcttatttcacgacattaaaaaaaatattttttcctggtgtattaaaattaaaaataaaatcataacttttgatttaaaatcaaa

SEQ ID NO: 9456 - DNA, 458 bp, Homo sapiens
  source 1..458: mol_type = unassigned DNA
ccacttccggctactagcctctctcgcctatccactatcctcacactcagcatcccctgtctgtacgagattaaggagctctgccgtccgcagggcctggagaacacgtagcgactccgaagatcagccccaatgaacatgtcagtgttgactttacaagaatatgaattcgaaaagcagttcaacgagaatgaagccatccaatggatgcaggaaaactggaagaaatctttcctgttttctgctctgtatgctgcctttatattcggtggtcggcacctaatgaataaacgagcaaagtttgaactgaggaagccattagtgctctggtctctgacccttgcagtcttcagtatattcggtgctcttcgaactggtgcttatatggtgtacattttgatgaccaaaggcctgaagcagtcagtttgtgaccagggtttttacaatggacctgtcag

SEQ ID NO: 9457 - DNA, 610 bp, Homo sapiens
  source 1..610: mol_type = unassigned DNA
attcccttcactggtgatctcaacgtagatttgcccggagttctcttgcaagagagctggcaggttttactatttcccaatcgtttactcgccaagctctcgggtccacgcgccgcggggatgcgccctgcaagctgaaacttcattcaaagcaaggcggcccacgagagaacacgtagcgactccgaagatcagccccaatgaacatgtcagtgttgactttacaagaatatgaattcgaaaagcagttcaacgagaatgaagccatccaatggatgcaggaaaactggaagaaatctttcctgttttctgctctgtatgctgcctttatattcggtggtcggcacctaatgaataaacgagcaaagtttgaactgaggaagccattagtgctctggtctctgacccttgcagtcttcagtatattcggtgctcttcgaactggtgcttatatggtgtacattttgatgaccaaaggcctgaagcagtcagtttgtgaccagggtttttacaatggacctgtcagcaaattctgggcttatgcatttgtgctaagcaaagcacccgaactaggagatacaatattcattattctgaggaagcagaagct

SEQ ID NO: 9458 - DNA, 3827 bp, Homo sapiens
  source 1..3827: mol_type = unassigned DNA
aacccagtcggcggccgggacagcgggggccgctgtgaggagctccgcgctcgcgctgccagtcgccgccctctctcccgcgcgcgcccggcgcttcggctccgctccctgtgcgaacccattaaaagagccagtaaatcctgtggaaaatggccttcagtgatcttacatcgaggactgtgcatctttatgataattggatcaaagatgctgatccaagagttgaagattggctcctcatgtcctcgcctctgccacaaaccatcctcctaggattctatgtctattttgtcacttccttgggaccaaagctcatggaaaatcgcaagccctttgaactcaagaaagcaatgataacgtacaattttttcatagtactcttttctgtgtatatgtgttatgagtttgtgatgtctggctggggtataggttattcatttcgatgtgacattgttgactattcacggtcacccacagctttgaggatggcacgtacctgctggctttattacttctccaaatttattgagctattagatacgatcttttttgttctgcgcaagaaaaatagccaagtgactttccttcatgtattccatcataccatcatgccgtggacctggtggtttggagtcaaatttgctgcaggtggtttgggaacattccatgcccttctaaatacagctgtacatgtagtcatgtattcctactatggactttctgcattggggccagcctaccagaagtatttgtggtggaaaaaatatttgacatcattacagcttgtccagtttgttattgtcgccatccacataagccagttctttttcatggaggattgcaagtatcagtttccagtctttgcgtgcatcattatgagttacagtttcatgtttctgctgctctttctccatttttggtaccgtgcttacaccaaaggtcagaggttgcccaaaactgtgaaaaatggaacttgcaaaaacaaagataattgaagcccaacataagtctatgatcgaaactgatacattgtcttccttgacaatcaagagatatttacctatgcagtgcattttgtatatttttcaaaactaagagcttgtatttttatggtaagttattgggatgtctgatatttgagagcccgaagcttccagataacagtcttctgataattagagcctacagcagccagaatttgtttttgtttttgtttttgtttttttagctgcttttaaacctaatccaaaggttttgtttaaaacattttgttgcagtgaaaaaaagatatgaagcaatacagtactcttcaaagaagtccaataaagatgaaaaatatcattaggtattttgagcacagacggagatccatgtgataaaatagattccttctgctgggtctggaaagtctggaaaccacctgtaggccctggctttgtcatttattgactgtattcagaagatactatatttgctctagagttaactcccattttagcaagctagcacaggtgaaaattgagtgagtttttgataacttgtcatttaaaatcattaatgataattttcaatggatcttttcagtagccatcaccagttttgctgataagacttcctcacaacccatttgttgtacaaactgtttcaaagtagcaatcctttgggttagtacacttgataccaagtttcattcagttgattattttcaaaacaaggtgatttgttttaatgggttaatgaatactttgctattactgttttacaattaactttgtatatctctggaaagaggtgaatttgtcaatgaaaaaagtattgtgtagttcagtgggaaaaacctgttgtctgttatagtatcacatcactttcttacattgtcatggtttaaattattatcttggtgaaatatataggttagatacttaaatgttcatattattagcacactacaggtactacccttaaatcataaataatattacccattgtacacagtttccagatatgagttagagtggctgtgaagcaactagaggcaaattgtggcacagagaatatccaggggaaaattgattatgtaagcaagggctgttctactttgagagagagacagacagactacataatagtaatatattatataattaatgttatagatacactgaacaataaaacattttctggaattatgaattaattaacaacctggatttctgtttccagacctataaaccatgtaatgaaggactgaaattcgtttggcatacactttgtttctttaaaattgctagtttctttctgttatttttacattttcttgtcagagaatcaaaactattagtcagtagagttttgtccatgaaataatatttggacatttgtgaatttttccctattttttttcttcttttatttatactcaattttgaagcactgtttatgtttgtaggactttaaacaattagtacttaaagccccagttaattttgaacacacagagatacttattgtactctgtgtacagtaagtatttttatgtttacacttaccagattcataaggttatttgcctttaagtgatcttttgtgattttacttgattacagcatgagaaggtaaaggttgataaatgggagtaattacatatatatatataatttattatttttttttctgaagcagagttttactcttgttgcccaggctagagtgcaatggcacaatctcggttcactgcaacctctgcctcccaggttcaagtgattctcctgtctcagcctcccaagtagctgggattacaggtgcccgccaccatgctcagctaatttttgtatttttagtagagacagggttggccaggctggtctcgagctcctgacctcaggtgatcctcccacctcggcctcccaaagttctgggattacaggggtgagccactgtgcccggccataattttatatttttagaaaataaagaatgaaggacaaaagagcacagctaaatgaaactgctgctctaatttattccactggaaaggtctcaggactccttaactgttttccaggtttggctcttcatatctaacctgtgctaaaatgagaaggtatgctaggtgctgttagaaatcacaccatttccaaagaacccaagtagtatagagaccaaaatgaggcaaaaataaaagagatgaaacaggagagtttatttcttgcatactttccgaccttcatcatacaacctctcctaacctccctgtagtctttaaaatgtttaacttgcctataagctaacatgtaataaaacacatactcaattatatgaatagaagtggagagccagaatgctacaaaagaaatcacagctgctagaagtatcctccatagaaacatcaacatgattgtggatcaaaatgattttcactggatatggaatttgtatgggccatatttattaaaagagttctgtgtggtcacatagagttcctttgggatttcatcccacttttcaggacttaatttgtttgggtttgcttacctaacaagcaacaacaacaacaaaataaatagttccaaaatctagtttattacataaatctctatgaatccttgagggcctatatctatattataaataaatacaaatatagatttttaaatatctatgggactttgccatttacagccttaagtataaaattacgagattatattctttccattaccctttatttctgctaactttttaaagactggaacattctgtggatgttgtcaaagtttgagtttgtttttccctgtgtattataataaatttgtggtattgcatgt

SEQ ID NO: 9459 - DNA, 3871 bp, Homo sapiens
  source 1..3871: mol_type = unassigned DNA
aacccagtcggcggccgggacagcgggggccgctgtgaggagctccgcgctcgcgctgccagtcgccgccctctctcccgcgcgcgcccggcgcttcggctccgctccctgtgcggcatttatagattataaactcatttctgttttattttactgaagaacccattaaaagagccagtaaatcctgtggaaaatggccttcagtgatcttacatcgaggactgtgcatctttatgataattggatcaaagatgctgatccaagagttgaagattggctcctcatgtcctcgcctctgccacaaaccatcctcctaggattctatgtctattttgtcacttccttgggaccaaagctcatggaaaatcgcaagccctttgaactcaagaaagcaatgataacgtacaattttttcatagtactcttttctgtgtatatgtgttatgagtttgtgatgtctggctggggtataggttattcatttcgatgtgacattgttgactattcacggtcacccacagctttgaggatggcacgtacctgctggctttattacttctccaaatttattgagctattagatacgatcttttttgttctgcgcaagaaaaatagccaagtgactttccttcatgtattccatcataccatcatgccgtggacctggtggtttggagtcaaatttgctgcaggtggtttgggaacattccatgcccttctaaatacagctgtacatgtagtcatgtattcctactatggactttctgcattggggccagcctaccagaagtatttgtggtggaaaaaatatttgacatcattacagcttgtccagtttgttattgtcgccatccacataagccagttctttttcatggaggattgcaagtatcagtttccagtctttgcgtgcatcattatgagttacagtttcatgtttctgctgctctttctccatttttggtaccgtgcttacaccaaaggtcagaggttgcccaaaactgtgaaaaatggaacttgcaaaaacaaagataattgaagcccaacataagtctatgatcgaaactgatacattgtcttccttgacaatcaagagatatttacctatgcagtgcattttgtatatttttcaaaactaagagcttgtatttttatggtaagttattgggatgtctgatatttgagagcccgaagcttccagataacagtcttctgataattagagcctacagcagccagaatttgtttttgtttttgtttttgtttttttagctgcttttaaacctaatccaaaggttttgtttaaaacattttgttgcagtgaaaaaaagatatgaagcaatacagtactcttcaaagaagtccaataaagatgaaaaatatcattaggtattttgagcacagacggagatccatgtgataaaatagattccttctgctgggtctggaaagtctggaaaccacctgtaggccctggctttgtcatttattgactgtattcagaagatactatatttgctctagagttaactcccattttagcaagctagcacaggtgaaaattgagtgagtttttgataacttgtcatttaaaatcattaatgataattttcaatggatcttttcagtagccatcaccagttttgctgataagacttcctcacaacccatttgttgtacaaactgtttcaaagtagcaatcctttgggttagtacacttgataccaagtttcattcagttgattattttcaaaacaaggtgatttgttttaatgggttaatgaatactttgctattactgttttacaattaactttgtatatctctggaaagaggtgaatttgtcaatgaaaaaagtattgtgtagttcagtgggaaaaacctgttgtctgttatagtatcacatcactttcttacattgtcatggtttaaattattatcttggtgaaatatataggttagatacttaaatgttcatattattagcacactacaggtactacccttaaatcataaataatattacccattgtacacagtttccagatatgagttagagtggctgtgaagcaactagaggcaaattgtggcacagagaatatccaggggaaaattgattatgtaagcaagggctgttctactttgagagagagacagacagactacataatagtaatatattatataattaatgttatagatacactgaacaataaaacattttctggaattatgaattaattaacaacctggatttctgtttccagacctataaaccatgtaatgaaggactgaaattcgtttggcatacactttgtttctttaaaattgctagtttctttctgttatttttacattttcttgtcagagaatcaaaactattagtcagtagagttttgtccatgaaataatatttggacatttgtgaatttttccctattttttttcttcttttatttatactcaattttgaagcactgtttatgtttgtaggactttaaacaattagtacttaaagccccagttaattttgaacacacagagatacttattgtactctgtgtacagtaagtatttttatgtttacacttaccagattcataaggttatttgcctttaagtgatcttttgtgattttacttgattacagcatgagaaggtaaaggttgataaatgggagtaattacatatatatatataatttattatttttttttctgaagcagagttttactcttgttgcccaggctagagtgcaatggcacaatctcggttcactgcaacctctgcctcccaggttcaagtgattctcctgtctcagcctcccaagtagctgggattacaggtgcccgccaccatgctcagctaatttttgtatttttagtagagacagggttggccaggctggtctcgagctcctgacctcaggtgatcctcccacctcggcctcccaaagttctgggattacaggggtgagccactgtgcccggccataattttatatttttagaaaataaagaatgaaggacaaaagagcacagctaaatgaaactgctgctctaatttattccactggaaaggtctcaggactccttaactgttttccaggtttggctcttcatatctaacctgtgctaaaatgagaaggtatgctaggtgctgttagaaatcacaccatttccaaagaacccaagtagtatagagaccaaaatgaggcaaaaataaaagagatgaaacaggagagtttatttcttgcatactttccgaccttcatcatacaacctctcctaacctccctgtagtctttaaaatgtttaacttgcctataagctaacatgtaataaaacacatactcaattatatgaatagaagtggagagccagaatgctacaaaagaaatcacagctgctagaagtatcctccatagaaacatcaacatgattgtggatcaaaatgattttcactggatatggaatttgtatgggccatatttattaaaagagttctgtgtggtcacatagagttcctttgggatttcatcccacttttcaggacttaatttgtttgggtttgcttacctaacaagcaacaacaacaacaaaataaatagttccaaaatctagtttattacataaatctctatgaatccttgagggcctatatctatattataaataaatacaaatatagatttttaaatatctatgggactttgccatttacagccttaagtataaaattacgagattatattctttccattaccctttatttctgctaactttttaaagactggaacattctgtggatgttgtcaaagtttgagtttgtttttccctgtgtattataataaatttgtggtattgcatgt

SEQ ID NO: 9460 - DNA, 730 bp, Homo sapiens
  source 1..730: mol_type = unassigned DNA
agtcggcggccgggacagcgggggccgctgtgaggagctccgcgctcgcgctgccagtcgccgccctctctcccgcgcgcgcccggcgcttcggctccgctccctgtgcgatacttaggaacttcaagcagtcgtcccagatataaaaggcatttaaacttccctcttagaactgcttttgtggcatcccataagttttgaacccattaaaagagccagtaaatcctgtggaaaatggccttcagtgatcttacatcgaggactgtgcatctttatgataattggatcaaagatgctgatccaagagttgaagattggctcctcatgtcctcgcctctgccacaaaccatcctcctaggattctatgtctattttgtcacttccttgggaccaaagctcatggaaaatcgcaagccctttgaactcaagaaagcaatgataacgtacaattttttcatagtactcttttctgtgtatatgtgttatgagtttgtgatgtctggctggggtataggttattcatttcgatgtgacattgttgactattcacggtcacccacagctttgaggatggcacgtacctgctggctttattacttctccaaatttattgagctattagatacgatcttttttgttctgcgcaagaaaaatagccaagtgactttccttcatgtattccatcataccatcatgccgtggacctggtggtttggagtcaaatttgctg

SEQ ID NO: 9461 - DNA, 3994 bp, Homo sapiens
  source 1..3994: mol_type = unassigned DNA
tccctccggccctcggcgggcacctggcggcggcgggcagggggcggcgctgcgcgcgtcacgcggctgggtgggatagcgggcaggtgacacccggcggcctcctcccctttccaacccagtcggcggccgggacagcgggggccgctgtgaggagctccgcgctcgcgctgccagtcgccgccctctctcccgcgcgcgcccggcgcttcggctccgctccctgtgcggcatttaaacttccctcttagaactgcttttgtggcatcccataagttttgaacccattaaaagagccagtaaatcctgtggaaaatggccttcagtgatcttacatcgaggactgtgcatctttatgataattggatcaaagatgctgatccaagagttgaagattggctcctcatgtcctcgcctctgccacaaaccatcctcctaggattctatgtctattttgtcacttccttgggaccaaagctcatggaaaatcgcaagccctttgaactcaagaaagcaatgataacgtacaattttttcatagtactcttttctgtgtatatgtgttatgagtttgtgatgtctggctggggtataggttattcatttcgatgtgacattgttgactattcacggtcacccacagctttgaggatggcacgtacctgctggctttattacttctccaaatttattgagctattagatacgatcttttttgttctgcgcaagaaaaatagccaagtgactttccttcatgtattccatcataccatcatgccgtggacctggtggtttggagtcaaatttgctgcaggtggtttgggaacattccatgcccttctaaatacagctgtacatgtagtcatgtattcctactatggactttctgcattggggccagcctaccagaagtatttgtggtggaaaaaatatttgacatcattacagcttgtccagtttgttattgtcgccatccacataagccagttctttttcatggaggattgcaagtatcagtttccagtctttgcgtgcatcattatgagttacagtttcatgtttctgctgctctttctccatttttggtaccgtgcttacaccaaaggtcagaggttgcccaaaactgtgaaaaatggaacttgcaaaaacaaagataattgaagcccaacataagtctatgatcgaaactgatacattgtcttccttgacaatcaagagatatttacctatgcagtgcattttgtatatttttcaaaactaagagcttgtatttttatggtaagttattgggatgtctgatatttgagagcccgaagcttccagataacagtcttctgataattagagcctacagcagccagaatttgtttttgtttttgtttttgtttttttagctgcttttaaacctaatccaaaggttttgtttaaaacattttgttgcagtgaaaaaaagatatgaagcaatacagtactcttcaaagaagtccaataaagatgaaaaatatcattaggtattttgagcacagacggagatccatgtgataaaatagattccttctgctgggtctggaaagtctggaaaccacctgtaggccctggctttgtcatttattgactgtattcagaagatactatatttgctctagagttaactcccattttagcaagctagcacaggtgaaaattgagtgagtttttgataacttgtcatttaaaatcattaatgataattttcaatggatcttttcagtagccatcaccagttttgctgataagacttcctcacaacccatttgttgtacaaactgtttcaaagtagcaatcctttgggttagtacacttgataccaagtttcattcagttgattattttcaaaacaaggtgatttgttttaatgggttaatgaatactttgctattactgttttacaattaactttgtatatctctggaaagaggtgaatttgtcaatgaaaaaagtattgtgtagttcagtgggaaaaacctgttgtctgttatagtatcacatcactttcttacattgtcatggtttaaattattatcttggtgaaatatataggttagatacttaaatgttcatattattagcacactacaggtactacccttaaatcataaataatattacccattgtacacagtttccagatatgagttagagtggctgtgaagcaactagaggcaaattgtggcacagagaatatccaggggaaaattgattatgtaagcaagggctgttctactttgagagagagacagacagactacataatagtaatatattatataattaatgttatagatacactgaacaataaaacattttctggaattatgaattaattaacaacctggatttctgtttccagacctataaaccatgtaatgaaggactgaaattcgtttggcatacactttgtttctttaaaattgctagtttctttctgttatttttacattttcttgtcagagaatcaaaactattagtcagtagagttttgtccatgaaataatatttggacatttgtgaatttttccctattttttttcttcttttatttatactcaattttgaagcactgtttatgtttgtaggactttaaacaattagtacttaaagccccagttaattttgaacacacagagatacttattgtactctgtgtacagtaagtatttttatgtttacacttaccagattcataaggttatttgcctttaagtgatcttttgtgattttacttgattacagcatgagaaggtaaaggttgataaatgggagtaattacatatatatatataatttattatttttttttctgaagcagagttttactcttgttgcccaggctagagtgcaatggcacaatctcggttcactgcaacctctgcctcccaggttcaagtgattctcctgtctcagcctcccaagtagctgggattacaggtgcccgccaccatgctcagctaatttttgtatttttagtagagacagggttggccaggctggtctcgagctcctgacctcaggtgatcctcccacctcggcctcccaaagttctgggattacaggggtgagccactgtgcccggccataattttatatttttagaaaataaagaatgaaggacaaaagagcacagctaaatgaaactgctgctctaatttattccactggaaaggtctcaggactccttaactgttttccaggtttggctcttcatatctaacctgtgctaaaatgagaaggtatgctaggtgctgttagaaatcacaccatttccaaagaacccaagtagtatagagaccaaaatgaggcaaaaataaaagagatgaaacaggagagtttatttcttgcatactttccgaccttcatcatacaacctctcctaacctccctgtagtctttaaaatgtttaacttgcctataagctaacatgtaataaaacacatactcaattatatgaatagaagtggagagccagaatgctacaaaagaaatcacagctgctagaagtatcctccatagaaacatcaacatgattgtggatcaaaatgattttcactggatatggaatttgtatgggccatatttattaaaagagttctgtgtggtcacatagagttcctttgggatttcatcccacttttcaggacttaatttgtttgggtttgcttacctaacaagcaacaacaacaacaaaataaatagttccaaaatctagtttattacataaatctctatgaatccttgagggcctatatctatattataaataaatacaaatatagatttttaaatatctatgggactttgccatttacagccttaagtataaaattacgagattatattctttccattaccctttatttctgctaactttttaaagactggaacattctgtggatgttgtcaaagtttgagtttgtttttccctgtgtattataataaatttgtggtattgcatgta

SEQ ID NO: 9462 - DNA, 737 bp, Homo sapiens
  source 1..737: mol_type = unassigned DNA
gagccgcatcctgtcttggtggctgctgctggccgggaggaggctgatgaatacagagccgtggaacaggtcgtgccggagatggaaacaggaaagcctgttgttttgtcgtcccagatacttaggaacttcaagcagtcgtcccagatataaaaggcatttaaacttccctcttagaactgcttttgtggcatcccataagttttgaacccattaaaagagccagtaaatcctgtggaaaatggccttcagtgatcttacatcgaggactgtgcatctttatgataattggatcaaagatgctgatccaagagttgaagattggctcctcatgtcctcgcctctgccacaaaccatcctcctaggattctatgtctattttgtcacttccttgggaccaaagctcatggaaaatcgcaagccctttgaactcaagaaagcaatgataacgtacaattttttcatagtactcttttctgtgtatatgtgttatgagtttgtgatgtctggctggggtataggttattcatttcgatgtgacattgttgactattcacggtcacccacagctttgaggatggcacgtacctgctggctttattacttctccaaatttattgagctattagatacgatcttttttgttctgcgcaagaaaaatagccaagtgactttccttcatgtattccatcataccatcatgccgtggacctggtggtttggagtcaaatttgctg

SEQ ID NO: 9463 - DNA, 3118 bp, Homo sapiens
  source 1..3118: mol_type = unassigned DNA
ctccaggcaacttggggcaagcgtctcagttctcgctctcccttcctcccagcggggtcgccgcagaccccagccctgggagcaccgctctgcagcgcggccggcgggtggagacggttggcccctaaactcgctcgtccagcccaaccgccccggcggcttctcccagccctcgaggctctcctgagcggcctggagaggcgtcgagcgcagcccagcgcccgcctgctcacccgccccggcccgggaagggaattttcggatcctgcgagcccggggcgcccccgcggcctagggcgggcagctcccggggcctggccgagccggtggcgcccgggaggccgcggggacagcacgcagcgcgcgcccttggatgccgtcccgcagcgacgccccggcccgccccgctcctcctcctgcctggctagcctgcctctcatttgggaagttttgtgggttttctttctcctcctccaaccttggcggaggccacgactcaggcgccacagctgggggctagaggccgcggaccatggtgcggggcagccaccgctgaagtcagcaaaaccgagcctggcctgaggcaggctgcgcgggaggccaaagccatggccattgccacgtcgacccagctggcccgggcactgtatgacaacaccgctgagtccccccaggagctgtccttccgccgaggggatgtcctacgggtcctgcagagagagggcgctggtggactggacggctggtgcctctgctccctacacggccagcagggcattgtgcccgccaacagggtgaagctcttgcctgctggcccagcacccaagcccagcctctctcctgcgtccccagcccagcctggctcaccatatccagccccagatcacagcaatgaggaccaggaggtgtatgtggtgccgcccccagctcggccctgtccaacctcaggacctccagctggaccttgcccaccctctcctgacctcatctacaaaatccccagagctagtgggacccagctggctgctcccagagatgccttggaggtctacgatgtgccccccaccgccctccgggtgccctccagtggcccctatgactgccctgcctccttttcccaccctctgacccgggttgccccgcagccccctggagaggatgatgctccctatgatgtgcctctgaccccaaagccacctgcagagctggaaccagatctggagtgggaaggaggccgggagccggggccccccatctatgctgccccctccaacctgaaacgagcgtcagccttactcaatttgtatgaagcacccgaggaactgctggcagacggggagggcgggggcactgatgaggggatctacgatgtgcctctgctggggccagaggctcccccttctccagagccccctggagccttggcctcccatgaccaggacaccctggcccagcttctggccagaagccccccacccccacacaggccccggctcccctcagctgagagcctgtcccgccgccctctgcctgccctgcctgtccctgaggcccccagcccctccccagtgccctctcctgccccaggccggaagggcagcatccaggaccggcctctgcccccacccccaccccgcctgcctggttatggaggccccaaggtcgagggggatccagagggcagggagatggaggatgacccagcaggacaccacaatgagtacgagggcattccgatggccgaggagtatgactatgtccacctgaagggcatggacaaagctcagggatctaggcccccggatcaggcctgcacaggggatcctgaactgcccgagagggggatgccggcgccgcaggaggccctgtccccaggggagccactggttgtgtccaccggagatctgcagctcctgtacttctatgctgggcaatgccagagccactactcagccctgcaggcagccgtggcagccctgatgtccagtacccaggctaatcagcccccgcgccttttcgtgccccacagcaagagggtggtggtggctgctcatcgcctggtgtttgttggggacaccctgggccggctggcagcctctgcccctctgagagcacaggtcagggctgcaggtacagcactgggccaggcattgcgggccactgtgctggctgtcaagggagctgccctgggctacccatccagccctgccatccaagagatggtgcagtgtgtaacagaactggcagggcaggccctgcaattcactaccctgctcactagcctggctccatgaaggtcctttggcacagctctgctcctcccctgcctgccaaagcccccctttaggccttgggtggctggaaggctttgttaagggactaggagaaatgggggtatctttcccctttcctgccctttctgctcatctcaacctctcacagaggtgtcttctccccctaacctacagctttttgtacaagccattttgtgtaaattatttatatttaatattattccctgctttgtcaggagcaggtactaggctctggggcagtgaggaactagatccttctctcctcagcctagggtggaggtcactgcactaccacccacctctggaagactggctgtgaaaagtcaggtggcagaaacctggggccacatagagcctctctcttttcctgtttcttggctctagaagatcagcactgcactgttagctgagagtgcgggcaagacataaactgtccagagtttgaaggttctcggaaagaccggagggcttctccccacagaaggcggagagagctggggctcagacatgggtgtgcaccttaataaaccctgctgtctgcctccctgactctgcttcttgggagcatggtgagcagccctggtgctcagcagccatacctatgggacacacactacgaaaaggatgcctttagggtttgggggagattttactcctttcttcaacaactattcactggacaagttctctgctcccatgacgcgccaggcacagttctgcaagtatattgtgaatgtattgttctagtgggatacacaaataagtcagttaaaatacataaataaaaacataaacctgccata

SEQ ID NO: 9464 - DNA, 2704 bp, Homo sapiens
  source 1..2704: mol_type = unassigned DNA
cgggcgcgctgagtgagtgcgcgcgtgaaaaccgccgcaccgccgggggtgcgagtgtctgggccgaagcggccactccagcgacccagccccacggccacgctctcgggggcctttggctccaggcaacttggggcaagcgtctcagttctcgctctcccttcctcccagcggggtcgccgcagaccccagccctgggagcaccgctctgcagcgcggccggcgggtggagacggttggcccctaaactcgctcgtccagcccaaccgccccggcggcttctcccagccctcgaggctctcctgagcggcctggagaggcgtcgagcgcagcccagcgcccgcctgctcacccgccccggcccgggaagggaattttcggatcctgcgagcccggggcgcccccgcggcctagggcgggcagctcccggggcctggccgagccggtggcgcccgggaggccgcggggacagcacgcagcgcgcgcccttggatgccgtcccgcagcgacgccccggcccgccccgctcctcctcctgcctggctagcctgcctctcatttgggaagttttgtgggttttctttctcctcctccaaccttggcggaggccacgactcaggcgccacagctgggggctagaggccgcggaccatggtgcggggcagccaccgctgaagtcagcaaaaccgagcctggcctgaggcaggctgcgcgggaggccaaagccatggccattgccacgtcggtgtatgtggtgccgcccccagctcggccctgtccaacctcaggacctccagctggaccttgcccaccctctcctgacctcatctacaaaatccccagagctagtgggacccagctggctgctcccagagatgccttggaggtctacgatgtgccccccaccgccctccgggtgccctccagtggcccctatgactgccctgcctccttttcccaccctctgacccgggttgccccgcagccccctggagaggatgatgctccctatgatgtgcctctgaccccaaagccacctgcagagctggaaccagatctggagtgggaaggaggccgggagccggggccccccatctatgctgccccctccaacctgaaacgagcgtcagccttactcaatttgtatgaagcacccgaggaactgctggcagacggggagggcgggggcactgatgaggggatctacgatgtgcctctgctggggccagaggctcccccttctccagagccccctggagccttggcctcccatgaccaggacaccctggcccagcttctggccagaagccccccacccccacacaggccccggctcccctcagctgagagcctgtcccgccgccctctgcctgccctgcctgtccctgaggcccccagcccctccccagtgccctctcctgccccaggccggaagggcagcatccaggaccggcctctgcccccacccccaccccgcctgcctggttatggaggccccaaggtcgagggggatccagagggcagggagatggaggatgacccagcaggacaccacaatgagtacgagggcattccgatggccgaggagtatgactatgtccacctgaagggcatggacaaagctcagggatctaggcccccggatcaggcctgcacaggggatcctgaactgcccgagagggggatgccggcgccgcaggaggccctgtccccaggggagccactggttgtgtccaccggagatctgcagctcctgtacttctatgctgggcaatgccagagccactactcagccctgcaggcagccgtggcagccctgatgtccagtacccaggctaatcagcccccgcgccttttcgtgccccacagcaagagggtggtggtggctgctcatcgcctggtgtttgttggggacaccctgggccggctggcagcctctgcccctctgagagcacaggtcagggctgcaggtacagcactgggccaggcattgcgggccactgtgctggctgtcaagggagctgccctgggctacccatccagccctgccatccaagagatggtgcagtgtgtaacagaactggcagggcaggccctgcaattcactaccctgctcactagcctggctccatgaaggtcctttggcacagctctgctcctcccctgcctgccaaagcccccctttaggccttgggtggctggaaggctttgttaagggactaggagaaatgggggtatctttcccctttcctgccctttctgctcatctcaacctctcacagaggtgtcttctccccctaacctacagctttttgtacaagccattttgtgtaaattatttatatttaatattattccctgctttgtcaggagcaggtactaggctctggggcagtgaggaactagatccttctctcctcagcctagggtggaggtcactgcactaccacccacctctggaagactggctgtgaaaagtcaggtggcagaaacctggggccacatagagcctctctcttttcctgtttcttggctctagaagatcagcactgcactgttagctgagagtgcgggcaagacataaactgtccagagtttgaaggttctcggaaagaccggagggcttctccccacagaaggcggagagagctggggctcagacatgggtgtgcaccttaataaaccctgctgtctgcctccctga

SEQ ID NO: 9465 - DNA, 1706 bp, Homo sapiens
  source 1..1706: mol_type = unassigned DNA
gctagcctgcctctcatttgggaagttttgtgggttttctttctcctcctccaaccttggcggaggccacgactcaggcgccacagctgggggctagaggccgcggaccatggtgcggggcagccaccgctgaagtcagcaaaaccgagcctggcctgaggcaggctgcgcgggaggccaaagccatggccattgccacgtcggtgtatgtggtgccgcccccagctcggccctgtccaacctcaggacctccagctggaccttgcccaccctctcctgacctcatctacaaaatccccagagctagtgggacccagctggctgctcccagagatgccttggaggtctacgatgtgccccccaccgccctccgggtgccctccagtggcccctatgactgccctgcctccttttcccaccctctgacccgggttgccccgcagccccctggagaggatgatgctcccccttctccagagccccctggagccttggcctcccatgaccaggacaccctggcccagcttctggccagaagccccccacccccacacaggccccggctcccctcagctgagagcctgtcccgccgccctctgcctgccctgcctgtccctgaggcccccagcccctccccagtgccctctcctgccccaggccggaagggcagcatccaggaccggcctctgcccccacccccaccccgcctgcctggttatggaggccccaaggtcgagggggatccagagggcagggagatggaggatgacccagcaggacaccacaatgagtacgagggcattccgatggccgaggagtatgactatgtccacctgaagggcatggacaaagctcagggatctaggcccccggatcaggcctgcacaggggatcctgaactgcccgagagggggatgccggcgccgcaggaggccctgtccccaggggagccactggttgtgtccaccggagatctgcagctcctgtacttctatgctgggcaatgccagagccactactcagccctgcaggcagccgtggcagccctgatgtccagtacccaggctaatcagcccccgcgccttttcgtgccccacagcaagagggtggtggtggctgctcatcgcctggtgtttgttggggacaccctgggccggctggcagcctctgcccctctgagagcacaggtcagggctgcaggtacagcactgggccaggcattgcgggccactgtgctggctgtcaagggagctgccctgggctacccatccagccctgccatccaagagatggtgcagtgtgtaacagaactggcagggcaggccctgcaattcactaccctgctcactagcctggctccatgaaggtcctttggcacagctctgctcctcccctgcctgccaaagcccccctttaggccttgggtggctggaaggctttgttaagggactaggagaaatgggggtatctttcccctttcctgccctttctgctcatctcaacctctcacagaggtgtcttctccccctaacctacagctttttgtacaagccattttgtgtaaattatttatatttaatattattccctgctttgtcaggagcaggtactaggctctggggcagtgaggaactagatccttctctcctcagcctagggtggaggtcactgcactaccacccacctctggaagactggctgtgaaa

SEQ ID NO: 9466 - DNA, 2223 bp, Homo sapiens
  source 1..2223: mol_type = unassigned DNA
attcgccagatgggggaagccagggggaagcaggttactgtttttgcatttctatcttcaaggaagaattaggttatgaatagttccgtgaatagtcaggaagcgctgtcctccaagttcaagattaaggaaacgtggcatgcacagctaaagcaagaggtgacgtcttgtatcttcccccgtttcctgggacattggtggtgtagcccattccacagactttcgctccctagcagcgggtcggagatcgaaggaacgggccaattgcggctgaaacgtctttggaaggaggaagggggtgagggagcatccctttgagtttcgcctcttctcgaggcggtggtgggaagggagacatacttaatactgccctcttaatccaacggaccttacatcgtgtagactgccgggagggcggcgggaaaagggcaagacgggagttggggaagggaaggagccaggaagccgcgcgggagggcgcgcgcgcgcgcccctttttcagcagtgtggcggggtcgcacgcacgcccgcctcggcggctgggcgcgatttgcgacagtggggggggcggtggaggtggcggcggcagcggcaactttgcggcaagctcgggccgggcttgcttgacggcggtgtggcggaggccccgccccaggcggcaggaacctggagggaggcggaggaatatgtccgagagggaagtgtcgactgcgccggcgggaacagacatgcctgcggccaagaagcagaagctgagcagtgacgagaacagcaatccagacctctctggagacgagaatgatgacgctgtcagtatagaaagtggtacaaacactgaacgccctgatacacctacaaacacgccaaatgcacctggaaggaaaagttggggaaagggaaaatggaagtcaaagaaatgcaaatattctttcaaatgtgtaaatagtctcaaggaagatcataaccaaccattgtttggagttcagtttaactggcacagtaaagaaggagatccattagtgtttgcaactgtaggaagcaacagagttaccttgtatgaatgtcattcacaaggagaaatccggttgttgcaatcttacgtggatgctgatgctgatgaaaacttttacacttgtgcatggacctatgatagcaatacgagccatcctctgctggctgtagctggatctagaggcataattaggataataaatcctataacaatgcagtgtataaagcactatgttggccatggaaatgctatcaatgagctgaaattccatccaagagatccaaatcttctcctgtcagtaagtaaagatcatgctttacgattatggaatatccagacggacactctggtggcaatatttggaggcgtagaagggcacagagatgaagttctaagtgctgattatgatcttttgggtgaaaaaataatgtcctgtggtatggatcattctcttaaactttggaggatcaattcaaagagaatgatgaatgcaattaaggaatcttatgattataatccaaataaaactaacaggccatttatttctcagaaaatccattttcctgatttttctaccagagacatacataggaattatgttgattgtgtgcgatggttaggcgatttgatactttctaagtcttgtgaaaatgccattgtgtgctggaaacctggcaagatggaagatgatatagataaaattaaacccagtgaatctaatgtgactattcttgggcgatttgattacagccagtgtgacatttggtacatgaggttttctatggatttctggcaaaagatgcttgcattgggcaatcaagttggcaaactttatgtttgggatttagaagtagaagatcctcataaagccaaatgtacaacactgactcatcataaatgtggtgctgctattcgacaaaccagttttagcagggatagcagcattcttatagctgtttgtgatgatgccagtatttggcgctgggatcgacttcgataaaatacttttgcctaatcaaaattagagtgtgtttgttgtctgtgtaaaatagaattaatgtatcttgctagtaagggcacgtagagcatttagagttgtctttcagcattcaatcaggctgagctgaatgtagtgatgtttacattgtttacattctttgtactgtcttcctgctcagactctactgcttttaataaaaatttatttttgt

SEQ ID NO: 9467 - DNA, 2033 bp, Homo sapiens
  source 1..2033: mol_type = unassigned DNA
tttgcggcaagctcgggccgggcttgcttgacggcggtgtggcggaggccccgccccaggcggcaggaacctggagggaggcggaggaatatgtccgagagggaagtgtcgactgcgccggcgggaacagacatgcctgcggccaagaagcagaagctgagcagtgacgagaacagcaatccagacctctctggagacgagaatgatgacgctgtcagtatagaaagtggtacaaacactgaacgccctgatacacctacaaacacgccaaatgcacctggaaggaaaagttggggaaagggaaaatggaagtcaaagaaatgcaaatattctttcaaatgtgtaaatagtctcaaggaagatcataaccaaccattgtttggagttcagtttaactggcacagtaaagaaggagatccattagtgtttgcaactgtaggaagcaacagagttaccttgtatgaatgtcattcacaaggagaaatccggttgttgcaatcttacgtggatgctgatgctgatgaaaacttttacacttgtgcatggacctatgatagcaatacgagccatcctctgctggctgtagctggatctagaggcataattaggataataaatcctataacaatgcagtgtataaagcactatgttggccatggaaatgctatcaatgagctgaaattccatccaagagatccaaatcttctcctgtcagtaagtaaagatcatgctttacgattatggaatatccagacggacactctggtggcaatatttggaggcgtagaagggcacagagatgaagttctaagtgctgattatgatcttttgggtgaaaaaataatgtcctgtggtatggatcattctcttaaactttggaggatcaattcaaagagaatgatgaatgcaattaaggaatcttatgattataatccaaataaaactaacaggccatttatttctcagaaaatccattttcctgatttttctaccagagacatacataggaattatgttgattgtgtgcgatggttaggcgatttgatactttctaagtcttgtgaaaatgccattgtgtgctggaaacctggcaagatggaagatgatatagataaaattaaacccagtgaatctaatgtgactattcttgggcgatttgattacagccagtgtgacatttggtacatgaggttttctatggatttctggcaaaagatgcttgcattgggcaatcaagttggcaaactttatgtttgggatttagaagtagaagatcctcataaagccaagtaagtatttagaaatttctgttcaaaatttcaggctttttctccacacttgtatgccaatgtagagaagatcatttatatttgcagtgccatccttaagtcatttttaacatttactgttttcagagttaaagttattcttttttattccaataatttttgtttttcctaagtaccttggtgacaagtcatttcttgtttttatacaaattatgtagtgcttgttgaacttaaaatatatctaaattttataaaatttgagactgagctcttagtgaagtatattctggttttaagtgcttttcgtatgacttggaacatctgcttattttctaatccgctgttttagggtagacactgacaacgttatgtgtggtctttaacctgttgtcatgttttttccctagatgtacaacactgactcatcataaatgtggtgctgctattcgacaaaccagttttagcagggatagcagcattcttatagctgtttgtgatgatgccagtatttggcgctgggatcgacttcgataaaatacttttgcctaatcaaaattagagtgtgtttgttgtctgtgtaaaatagaattaatgtatcttgctagtaagggcacgtagagcatttagagttgtctttcagcattcaatcaggctgagctgaatgtagtgatgtttacattgtttacattctttgtactgtcttcctgctcagactctactgcttttaataaaaatttatttttg

SEQ ID NO: 9468 - DNA, 2069 bp, Homo sapiens
  source 1..2069: mol_type = unassigned DNA
ctagcagcgggtcggagatcgaaggaacgggccaattgcggctgaaacgtctttggaaggaggaagggggtgagggagcatccctttgagtttcgcctcttctcgaggcggtggtgggaagggagacatacttaatactgccctcttaatccaacggaccttacatcgtgtagactgccgggagggcggcgggaaaagggcaagacgggagttggggaagggaaggagccaggaagccgcgcgggagggcgcgcgcgcgcgcccctttttcagcagtgtggcggggtcgcacgcacgcccgcctcggcggctgggcgcgatttgcgacagtggggggggcggtggaggtggcggcggcagcggcaactttgcggcaagctcgggccgggcttgcttgacggcggtgtggcggaggccccgccccaggcggcaggaacctggagggaggcggaggaatatgtccgagagggaagtgtcgactgcgccggcgggaacagacatgcctgcggccaagaagcagaagctgagcagtgacgagaacagcaatccagacctctctggagacgagaatgatgacgctgtcagtatagaaagtggtacaaacactgaacgccctgatacacctacaaacacgccaaatgcacctggaaggaaaagttggggaaagggaaaatggaagtcaaagaaatgcaaatattctttcaaatgtgtaaatagtctcaaggaagatcataaccaaccattgtttggagttcagtttaactggcacagtaaagaaggagatccattagtgtttgcaactgtaggaagcaacagagttaccttgtatgaatgtcattcacaaggagaaatccggttgttgcaatcttacgtggatgctgatgctgatgaaaacttttacacttgtgcatggacctatgatagcaatacgagccatcctctgctggctgtagctggatctagaggcataattaggataataaatcctataacaatgcagtgtataaagcactatgttggccatggaaatgctatcaatgagctgaaattccatccaagagatccaaatcttctcctgtcagtaagtaaagatcatgctttacgattatggaatatccagacggacactctggtggcaatatttggaggcgtagaagggcacagagatgaagttctaagtgctgattatgatcttttgggtgaaaaaataatgtcctgtggtatggatcattctcttaaactttggaggatcaattcaaagagaatgatgaatgcaattaaggaatcttatgattataatccaaataaaactaacaggccatttatttctcagaaaatccattttcctgatttttctaccagagacatacataggaattatgttgattgtgtgcgatggttaggcgatttgatactttctaagagtggccgtgccattttacattcccaccagcaatgtatgagagatccagtgtctccgaatcttcgccagcatttgtcttgtgaaaatgccattgtgtgctggaaacctggcaagatggaagatgatatagataaaattaaacccagtgaatctaatgtgactattcttgggcgatttgattacagccagtgtgacatttggtacatgaggttttctatggatttctggcaaaagatgcttgcattgggcaatcaagttggcaaactttatgtttgggatttagaagtagaagatcctcataaagccaaatgtacaacactgactcatcataaatgtggtgctgctattcgacaaaccagttttagcagggatagcagcattcttatagctgtttgtgatgatgccagtatttggcgctgggatcgacttcgataaaatacttttgcctaatcaaaattagagtgtgtttgttgtctgtgtaaaatagaattaatgtatcttgctagtaagggcacgtagagcatttagagttgtctttcagcattcaatcaggctgagctgaatgtagtgatgtttacattgtttacattctttgtactgtcttcctgctcagactctactgcttttaataaaaatttatttttgt

SEQ ID NO: 9469 - DNA, 786 bp, Homo sapiens
  source 1..786: mol_type = unassigned DNA
aggaatatgtccgagagggaagtgtcgactgcgccggcgggaacagacatgcctgcggccaagaagcagaagctgagcagtgacgagaacagcaatccagacctctctggagacgagaatgatgacgctgtcagtatagaaagtggtacaaacactgaacgccctgatacacctacaaacacgccaaatgcacctggaaggaaaagttggggaaagggaaaatggaagtcaaagaaatgcaaatattctttcaaatgtgtaaatagtctcaaggaagatcataaccaaccattgtttggagttcagtttaactggcacagtaaagaaggagatccattagtgtttgcaactgtaggaagcaacagagttaccttgtatgaatgtcattcacaaggagaaatccggttgttgcaatcttacgtggatgctgatgctgatgaaaacttttacacttgtgcatggaaatgctatcaatgagctgaaattccatccaagagatccaaatcttctcctgtcagtaagtaaagatcatgctttacgattatggaatatccagacggacactctggtggcaatatttggaggcgtagaagggcacagagatgaagttctaagtgctgattatgatcttttgggtgaaaaaataatgtcctgtggtatggatcattctcttaaactttggaggatcaattcaaagagaatgatgaatgcaattaaggaatcttatgattataatccaaataaaactaacagtcttgtgaaaatgccattgtgtgctggaaacct

SEQ ID NO: 9470 - DNA, 966 bp, Homo sapiens
  source 1..966: mol_type = unassigned DNA
tcccgccccgcgcagcgcgcgcagcctgcggagccagcggccgtgacgcgacaacgattcggctgtgacgcgacaacgattcggctgtgacgcgagcgcggccgctcccgatgcgctcgtgccgcccccgccgtgctcctcggcagccgttgctcggccggttttggtaggcccgggccgccgccaggcctccgcctgagcccgcacccgccatggacaactacgcagatctttcggataccgagctgaccaccttgctgcgccggtacaacatcccgcacgggcctgtagtagacttgaattcgactagaggggatgcagatatgtatgatcttcccaagaaagaggacgctttactctaccagagcaagggctacaatgacgactactatgaagagagctacttcaccaccaggacttatggggagcccgagtctgccggcccgtccagggctgtccgccagtcagtgacttcattcccagatgctgacgctttccatcaccaggtgcatgatgacgatcttttgtcttcttctgaagaggagtgcaaggatagggaacgccccatgtacggccgggacagtgcctaccagagcatcacgcactaccgccctgtttcagcctccaggagctccctggacctgtcctattatcctacttcctcctccacctcttttatgtcctcctcatcatcttcctcttcatggctcacccgccgtgccatccggcctgaaaaccgtgctcctggggctgggctgggccaggatcgccaggtcccgctctggggccagctgctgcttttcctggtctttgtgatcgtcctcttcttcatttaccacttcatgcaggctgaagaaggcaaccccttctagagggagccatgagggtctgggcttcagagctaggtctttggggaagtcctggctgactgccttagcagtgggggtgggggtgggggcaggggca

SEQ ID NO: 9471 - DNA, 1379 bp, Homo sapiens
  source 1..1379: mol_type = unassigned DNA
gacgtttgggctcgcggccccagcctcccagctctcagggcacggccggtctgtgccggctgctcccgcggttaggtcccgccccgcgcagcgcgcgcagcctgcggagccagcggccgtgacgcgacaacgattcggctgtgacgcgacaacgattcggctgtgacgcgagcgcggccgctcccgatgcgctcgtgccgcccccgccgtgctcctcggcagccgttgctcggccggttttggtaggcccgggccgccgccaggcctccgcctgagcccgcacccgccatggacaactacgcagatctttcggataccgagctgaccaccttgctgcgccggtacaacatcccgcacgggcctgtagtaggatcaactcgtaggctttacgagaagaagatcttcgagtacgagacccagaggcggcggctctcgccccccagctcgtccgccgcctcctcttatagcttctctgacttgaattcgactagaggggatgcagatatgtatgatcttcccaagaaagaggacgctttactctaccagagcaagggctacaatgacgactactatgaagagagctacttcaccaccaggacttatggggagcccgagtctgccggcccgtccagggctgtccgccagtcagtgacttcattcccagatgctgacgctttccatcaccaggtgcatgatgacgatcttttgtcttcttctgaagaggagtgcaaggatagggaacgccccatgtacggccgggacagtgcctaccagagcatcacgcactaccgccctgtttcagcctccaggagctccctggacctgtcctattatcctacttcctcctccacctcttttatgtcctcctcatcatcttcctcttcatggctcacccgccgtgccatccggcctgaaaaccgtgctcctggggctgggctgggccaggatcgccaggtcccgctctggggccagctgctgcttttcctggtctttgtgatcgtcctcttcttcatttaccacttcatgcaggctgaagaaggcaaccccttctagagggagccatgagggtctgggcttcagagctaggtctttggggaagtcctggctgactgccttagcagtgggggtgggggtgggggcaggggcaggggctttatgtgtttttgcttggggggcgctgggcctagcccagagtagtgcttgctccccctgccttgtcccaccagggaggcagcagactcaggccctccatggtcctctttgtcattttgttgacatgcattcctccttttgtcatcttgttggggggaggggattaaccaaaggccaccctgactttgtttttgtggacacacaataaaagccccgtttatttgtaa

SEQ ID NO: 9472 - DNA, 609 bp, Homo sapiens
  source 1..609: mol_type = unassigned DNA
cggagccagcgtgggaggccgctgccgtcgcgcgccttggttgacggcgttgcacgctctcgcggggaggctctggctttccaaacgctggcaccgagggtttttctgttccttttttttttttttttttaacttcctgcctatacacacgcagccatcagcccacaaagacatgactaccaacgcgggccccttgcacccatactggcctcagcacctaagactggacaactttgtacctaatgaccgccccacctggcatatactggctggcctcttctctgtcacaggggtcttagtcgtgaccacatggctgttgtcaggtcgtgctgcggttgtcccattggggacttggcggcgactgtccctgtgctggtttgcagtgtgtgggttcattcacctggtgatcgagggctggttcgttctctactacgaagacctgcttggagaccaagccttcttatctcaactctggaaagagtatgccaagggagacagccgatacatcctgggtgacaacttcacagtgtgcatggaaaccatcacagcttgcctgtggggaccactcagcctgtgggtggtgatcgcctttctccgccagcatcccct

SEQ ID NO: 9473 - DNA, 714 bp, Homo sapiens
  source 1..714: mol_type = unassigned DNA
cctaaagagagcccggagccagcgtgggaggccgctgccgtcgcgcgccttgcgctgcacgccagacaccggcctttcaatatccgtctcttccctgcaggttgacggcgttgcacgctctcgcggggaggctctggctttccaaacgctggcaccgagggtttttctgttccttttttttttttttttttaacttcctgcctatacacacgcagccatcagcccacaaagacatgactaccaacgcgggccccttgcacccatactggcctcagcacctaagactggacaactttgtacctaatgaccgccccacctggcatatactggctggcctcttctctgtcacaggggtcttagtcgtgaccacatggctgttgtcaggtcgtgctgcggttgtcccattggggacttggcggcgactgtccctgtgctggtttgcagtgtgtgggttcattcacctggtgatcgagggctggttcgttctctactacgaagacctgcttggagaccaagccttcttatctcaactctggaaagagtatgccaagggagacagccgatacatcctgggtgacaacttcacagtgtgcatggaaaccatcacagcttgcctgtggggaccactcagcctgtgggtggtgatcgcctttctccgccagcatcccctccgcttcattctacagcttgtggtctctgtgggccagatctatg

SEQ ID NO: 9474 - DNA, 1775 bp, Homo sapiens
  source 1..1775: mol_type = unassigned DNA
tctaattggatgggaggtctgggatgggtctggattctgattgattgctccatctgggggcccactggtggttaggcgtttgattggctttttagaactggcatatggagattgagggtcttcatgccaattggtcagtaggactgagaggcctgggttctaactagttcttctgacttgaggtcgggagaagagagaatgaccgctgctattaggactgaggagttctgagcactgaagagctggggagggggtggttgcagtgtatagcgtgtgatctgcttgtaacagtttcgttgcattatactaagggttactctacctagaaaagggcggaggtgaaaggatgcaacgcaacgctaatttcaccagcggaagaagcgggtacagaccttaatgagtccccgttttgatcgactgataagggaatggggaaattgaagccaggactcgatgcagattggctacggatccaaaacgcccactaaccttggcgcgtcccagtctccaccccaaacctaactcaggtgaaaatggcgccacgcgcgggggcggggctagaggtacaaagagagtgtctattggttgggagcggcacgggccgccttcttcgcttcaccattggctcgctccgtaaggcaagagaacccactaggggatgagcccgaactagggatgtgacagagcgcgagacccagcctaaagagagcccggagccagcgtgggaggccgctgccgtcgcgcgccttggtttttctgttccttttttttttttttttttaacttcctgcctatacacacgcagccatcagcccacaaagacatgactaccaacgcgggccccttgcacccatactggcctcagcacctaagactggacaactttgtacctaatgaccgccccacctggcatatactggctggcctcttctctgtcacaggggtcttagtcgtgaccacatggctgttgtcaggtcgtgctgcggttgtcccattggggacttggcggcgactgtccctgtgctggtttgcagtgtgtgggttcattcacctggtgatcgagggctggttcgttctctactacgaagacctgcttggagaccaagccttcttatctcaactctggaaagagtatgccaagggagacagccgatacatcctgggtgacaacttcacagtgtgcatggaaaccatcacagcttgcctgtggggaccactcagcctgtgggtggtgatcgcctttctccgccagcatcccctccgcttcattctacagcttgtggtctctgtgggccagatctatggggatgtgctctacttcctgacagagcaccgcgacggattccagcacggagagctgggccaccctctctacttctggttttactttgtcttcatgaatgccctgtggctggtgctgcctggagtccttgtgcttgatgctgtgaagcacctcactcatgcccagagcacgctggatgccaaggccacaaaagccaagagcaagaagaactgaggagtggtggaccaggctcgaacactggccgaggaggagctctctgcctgccagaagagtctagtcctgctcccacagtttggagggacaaagctaattgatctgtcacactcaggctcatgggcaggcacaagaaggggaataaaggggctgtgtgaaggcactgctgggagccattagaacacagatacaagagaagccaggaggtctatgatggtgacgatttttaaaatcaggaaataaaagatcttgactctaa

SEQ ID NO: 9475 - DNA, 2188 bp, Homo sapiens
  source 1..2188: mol_type = unassigned DNA
aggtgagcggcggccaatgggcgagcgcggggcaggtgcccgctaactcgcgcctcgcagcgctgggcggccggggctgggcagggcagtgcggggacaccgggggctggggtcggtcccagcgggactccgaaaggagggagacgagctcaaccctcgggccttactggcagctcgcagcctagcacggagcccgcgcctgtgcgggcgcctggagctgcccgctccgccgcagcagccgccgcgcctggccgtacgctgtggccggaccccgcggtcgctcgctcacacacccctcgccgctccgcgcctggctcgcccgcgggggccgagcgcgagcgggcgggcgggggaggtgaggggtgcgggcgggtgtgcatgtgcctggctgggtgcacaccccgcaaggcggcggcgccaggacgcggagcgctccccagagcccggctgcctcgcacagctcccgcggctgcgaccatgttccagcccgcggccaagcgcggctttaccatagagtccttggtggccaaggacggcggcaccggcgggggcactggcggcgggggcgcgggctcccatctcctggcggcggccgcctccgaggaaccgctccggcccacggcgctcaactaccctcaccccagcgcggccgaggcggccttcgtgagtggcttccctgccgcggccgccgcgggcgcgggccgctcgctctacggtgggcccgagctcgtgttccccgaggccatgaaccaccccgcgctgaccgtgcatccggcgcaccagctgggcgcctccccgctgcagcccccgcactccttcttcggcgcccagcaccgggaccctctccatttctacccctgggtcctgcggaaccgcttcttcggccaccgcttccaggccagcgacgtgccccaggacgggctgcttctgcacggccccttcgcacgcaagcccaagcggatccgcacggccttctcgccctcgcagctgctgcggctggagcgcgccttcgagaagaaccactacgtggtgggcgccgagcggaagcagctggccggcagtctcagcctctccgagacgcaggtgaaggtgtggttccagaaccggaggacaaagtacaaacggcagaagctggaggaggaagggcctgagtccgagcagaagaagaagggctcccatcacatcaaccggtggcgcattgccacgaagcaggccaatggggaggacatcgatgtcacctccaatgactagggtgggcaaccacaaacccacgagggcagagtgctgcttgctgctggccaggcccctgcgtgggcccaagctggactctggccactccctggccaggctttggggaggcctggagtcatggccccacagggcttgaagcccggggccgccattgacagagggacaagcaatgggctggctgaggcctgggaccacttggccttctcctcggagagcctgcctgcctgggcgggcccgcccgccaccgcagcctcccagctgctctccgtgtctccaatctcccttttgttttgatgcatttctgttttaatttattttccaggcaccactgtagtttagtgatccccagtgtcccccttccctatgggaataataaaagtctctctcttaatgacacgggcatccagctccagccccagagcctggggtggtagattccggctctgagggccagtgggggctggtagagcaaacgcgttcagggcctgggagcctggggtggggtactggtggagggggtcaagggtaattcattaactcctctcttttgttgggggaccctggtctctacctccagctccacagcaggagaaacaggctagacatagggaagggccatcctgtatcttgagggaggacaggcccaggtctttcttaacgtattgagaggtgggaatcaggcccaggtagttcaatgggagagggagagtgcttccctctgcctagagactctggtggcttctccagttgaggagaaaccagaggaaaggggaggattggggtctgggggagggaacaccattcacaaaggctgacggttccagtccgaagtcgtgggcccaccaggatgctcacctgtccttggagaaccgctgggcaggttgagactgcagagacagggcttaaggctgagcctgcaaccagtccccagtgactc

SEQ ID NO: 9476 - DNA, 3281 bp, Homo sapiens
  source 1..3281: mol_type = unassigned DNA
gcgggcgccgcaggagcgagtgagctgggagcgaggggcgaaggcgcggagaagcccggccgcccggtgggcggcagaaggctcagccgaggcggcggcgccgactccgttccactctcggcccggatccaggcctccgggttcccaggcgctcacctccctctgacgcactttaaagagtctccccccttccacctcagggcgagtaatagcgaccaatcatcaagccatttaccaggcttcggaggaagctgtttatgtgatccccgcactaattaggctcatgaactaacaaatcgtttgcacaacttgtgaagaagcgaacacttccatggattgtccttggacttagggcgccctgcccgccttttgcagaggagaaaaaacttttttttttttttgcctcccccgagaactttccccccttctcctccctgcctctaactccgatccccccacgccatctcgccaaaaaaaaaaaaaaaaaaaaaaaagaaaaaaaaagaaaaaaaaagaaaaaaaattaccccaatccacgcctgcaaattcttctggaaggattttcccccctctcttcaggttgggcgcgtttggtgcaagattctcgggatcctcggctttgcctctccctctccctcccccctcctttcctttttcctttcctttcctttctttcttcctttccttccccccacccccacccccaccccaaacaaacgagtccccaattctcgtccgtcctcgccgcgggcagcgggcggcggaggcagcgtgcggcggtcgccaggagctgggagcccagggcgcccgctcctcggcgcagcatgttccagccggcgcccaagcgctgcttcaccatcgagtcgctggtggccaaggacagtcccctgcccgcctcgcgctccgaggaccccatccgtcccgcggcactcagctacgctaactccagccccataaatccgttcctcaacggcttccactcggccgccgccgccgccgccggtaggggcgtctactccaacccggacttggtgttcgccgaggcggtctcgcacccgcccaaccccgccgtgccagtgcacccggtgccgccgccgcacgccctggccgcccaccccctaccctcctcgcactcgccacaccccctattcgcctcgcagcagcgggatccgtccaccttctacccctggctcatccaccgctaccgatatctgggtcatcgcttccaagggaacgacactagccccgagagtttccttttgcacaacgcgctggcccgaaagcccaagcggatccgaaccgccttctccccgtcccagcttctaaggctggaacacgcctttgagaagaatcactacgtggtgggcgccgaaaggaagcagctggcacacagcctcagcctcacggaaactcaggtaaaagtatggtttcagaaccgaagaacaaagttcaaaaggcagaagctggaggaagaaggctcagattcgcaacaaaagaaaaaagggacgcaccatattaaccggtggagaatcgccaccaagcaggcgagtccggaggaaatagacgtgacctcagatgattaaaaacataaacctaaccccacagaaacggacaacatggagcaaaagagacagggagaggtggagaaggaaaaaaccctacaaaacaaaaacaaaccgcatacacgttcaccgagaaagggagagggaatcggagggagcagcggaatgcggcgaagactctggacagcgagggcacagggtcccaaaccgaggccgcgccaagatggcagaggatggaggctccttcatcaacaagcgaccctcgtctaaagaggcagctgagtgagagacacagagagaaggagaaagagggagggagagagagaaagagagagaaagagagagagagagagagagagagaaagctgaacgtgcactctgacaaggggagctgtcaatcaaacaccaaaccggggagacaagatgattggcaggtattccgtttatcacagtccacttaaaaaatgatgatgatgataaaaaccacgacccaaccaggcacaggacttttttgttttttgcacttcgctgtgtttcccccccatctttaaaaataattagtaataaaaaacaaaaattccatatctagccccatcccacacctgtttcaaatccttgaaatgcatgtagcagttgttgggcgaatggtgtttaaagaccgaaaatgaattgtaattttcttttccttttaaagacaggttctgtgtgctttttattttgattttttttcccaagaaatgtgcagtctgtaaacactttttgataccttctgatgtcaaagtgattgtgcaagctaaatgaagtaggctcagcgatagtggtcctcttacagagaaacggggagcaggacgacgggggggctgggggtggcgggggagggtgcccacaaaaagaatcaggacttgtactgggaaaaaaacccctaaattaattatatttcttggacattccctttcctaacatcctgaggcttaaaaccctgatgcaaacttctcctttcagtggttggagaaattggccgagttcaaccattcactgcaatgcctattccaaactttaaatctatctattgcaaaacctgaaggactgtagttagcggggatgatgttaagtgtggccaagcgcacggcggcaagttttcaagcactgagtttctattccaagatcatagacttactaaagagagtgacaaatgcttccttaatgtcttctataccagaatgtaaatatttttgtgttttgtgttaatttgttagaattctaacacactatatacttccaagaagtatgtcaatgtcaatattttgtcaataaagatttatcaatatgccctcagagtagtcgtcttgggaaattgaagtggatctttaaaaatgtatctcagtaatttgagtgtggtccttccccaactaggctcaagaaacccaggctcctcacccacaaaagggccagattgatggattctcaggcattttaaagaaagatgagggtggagaagggagaagattaggaaaacttaagtccttcagaaaagagatgggagaaaagtttttcaaccagactttgcccattgtatgccctcctgagggagtttagtttgaacttcaggttaaaatgcttacttctcttaacctctggttattaaaaaaaaactggacatatagttacacattgaggactactctcccaaaatattggggaaaacatgtagcagaatct

SEQ ID NO: 9477 - DNA, 2710 bp, Homo sapiens
  source 1..2710: mol_type = unassigned DNA
cgggcgccgcaggagcgagtgagctgggagcgaggggcgaaggcgcggagaagcccggccgcccggtgggcggcagaaggctcagccgaggcggcggcgccgactccgttccactctcggcccggatccaggcctccgggttcccaggcgctcacctccctctgacgcactttaaagagtctccccccttccacctcagggcgagtaatagcgaccaatcatcaagccatttaccaggcttcggaggaagctgtttatgtgatccccgcactaattaggctcatgaactaacaaatcgtttgcacaacttgtgaagaagcgaacacttccatggattgtccttggacttagggcgccctgcccgccttttgcagaggagaaaaaacttttttttttttttgcctcccccgagaactttccccccttctcctccctgcctctaactccgatccccccacgccatctcgccaaaaaaaaaaaaaaaaaaaaaaaagaaaaaaaaagaaaaaaaaagaaaaaaaattaccccaatccacgcctgcaaattcttctggaaggattttcccccctctcttcaggttgggcgcgtttggtgcaagattctcgggatcctcggctttgcctctccctctccctcccccctcctttcctttttcctttcctttcctttctttcttcctttccttccccccacccccacccccaccccaaacaaacgagtccccaattctcgtccgtcctcgccgcgggcagcgggcggcggaggcagcgtgcggcggtcgccaggagctgggagcccagggcgcccgctcctcggcgcagcatgttccagccggcgcccaagcgctgcttcaccatcgagtcgctggtggccaaggacagtcccctgcccgcctcgcgctccgaggaccccatccgtcccgcggcactcagctacgctaactccagccccataaatccgttcctcaacggcttccactcggccgccgccgccgccgccggtaggggcgtctactccaacccggacttggtgttcgccgaggcggtctcgcacccgcccaaccccgccgtgccagtgcacccggtgccgccgccgcacgccctggccgcccaccccctaccctcctcgcactcgccacaccccctattcgcctcgcagcagcgggatccgtccaccttctacccctggctcatccaccgctaccgatatctgggtcatcgcttccaaggtaaaagtatggtttcagaaccgaagaacaaagttcaaaaggcagaagctggaggaagaaggctcagattcgcaacaaaagaaaaaagggacgcaccatattaaccggtggagaatcgccaccaagcaggcgagtccggaggaaatagacgtgacctcagatgattaaaaacataaacctaaccccacagaaacggacaacatggagcaaaagagacagggagaggtggagaaggaaaaaaccctacaaaacaaaaacaaaccgcatacacgttcaccgagaaagggagagggaatcggagggagcagcggaatgcggcgaagactctggacagcgagggcacagggtcccaaaccgaggccgcgccaagatggcagaggatggaggctccttcatcaacaagcgaccctcgtctaaagaggcagctgagtgagagacacagagagaaggagaaagagggagggagagagagaaagagagagaaagagagagagagagagagagagagaaagctgaacgtgcactctgacaaggggagctgtcaatcaaacaccaaaccggggagacaagatgattggcaggtattccgtttatcacagtccacttaaaaaatgatgatgatgataaaaaccacgacccaaccaggcacaggacttttttgttttttgcacttcgctgtgtttcccccccatctttaaaaataattagtaataaaaaacaaaaattccatatctagccccatcccacacctgtttcaaatccttgaaatgcatgtagcagttgttgggcgaatggtgtttaaagaccgaaaatgaattgtaattttcttttccttttaaagacaggttctgtgtgctttttattttgattttttttcccaagaaatgtgcagtctgtaaacactttttgataccttctgatgtcaaagtgattgtgcaagctaaatgaagtaggctcagcgatagtggtcctcttacagagaaacggggagcaggacgacgggggggctgggggtggcgggggagggtgcccacaaaaagaatcaggacttgtactgggaaaaaaacccctaaattaattatatttcttggacattccctttcctaacatcctgaggcttaaaaccctgatgcaaacttctcctttcagtggttggagaaattggccgagttcaaccattcactgcaatgcctattccaaactttaaatctatctattgcaaaacctgaaggactgtagttagcggggatgatgttaagtgtggccaagcgcacggcggcaagttttcaagcactgagtttctattccaagatcatagacttactaaagagagtgacaaatgcttccttaatgtcttctataccagaatgtaaatatttttgtgttttgtgttaatttgttagaattctaacacactatatacttccaagaagtatgtcaatgtcaatattttgtcaataaagatttatcaatatgccctc

SEQ ID NO: 9478 - DNA, 1317 bp, Homo sapiens
  source 1..1317: mol_type = unassigned DNA
aaaaggccggtacctcgggcaagatggctatcaagagtatcgcttcccgcctccggggttcccgtcgttttctgagcggcttcgtggctggggctgtagtgggcgctgcgggagctgggctcgcggccctgcagttcttccggagtcagggcgctgagggagcgttgacagggaagcagccggatggtgatgcagacagaaagcattgtaaatttaagcctgatcccaatatccctccaaccttcagtgccttcaatgaagattatgttggaagtgggtggtcacgaggacacatggctccagcaggaaataacaaattttcaagtaaagccatggctgaaaccttttacctttctaacattgtgcctcaggattttgataataattctggatattggaacagaatagaaatgtactgtcgagagctgacagaaaggtttgaagatgtttgggtggtatctgggcctttgaccttacctcagactagaggcgatggaaagaaaatagttagttaccaggtgattggcgaggacaacgtggcagtcccctcacacctttataaggtaatcctggcccgcagaagctcagtatctaccgaaccactggcgctaggggcctttgtggtacccaatgaagccatcggcttccagccccagttaactgaattccaagtgagcctccaggacctagagaagttgtcaggactggtgttttttcctcatttggatagaactagtgatatccggaatatctgctctgtggacacctgtaagctcctggatttccaggagttcaccttgtacttgagtacaagaaagattgaaggagcccgatcagtgctcagactggaaaagatcatggaaaacttgaagaatgcagagattgaaccagatgattactttatgagtcgctatgagaagaagctagaagaactcaaagctaaggagcagtcaggaacccagataagaaagccatcctagtttttatctcaagatgtgtcataccgtctgtaatgaagcaggcatgccctctttaggctaacatattttagtggctttgctttttgctttttaaaaagtttttctctttaagagatgtggtctcgccgtgtcatccaggctggagtgcagtggtggaatcatagctcactatagcctcaaacttctgggcttaagcaatcctcctgcctctgccccctgagcagctgggactacaggcacacaccatcaccctcagctactagtggctttgctttaaagaaacagtggaatcctaaatttatgactaaaaattcccccaaaagatgaaagatctaca

SEQ ID NO: 9479 - DNA, 2792 bp, Homo sapiens
  source 1..2792: mol_type = unassigned DNA
agcttggcgggcggtgaggcgtggggtgacggggggatggcgggggccggcatgcgcgcgcatgcgccgtggtaaaaggccggtacctcgggcaagatggctatcaagagtatcgcttcccgcctccggggttcccgtcgttttctgagcggcttcgtggctggggctgtagtgggcgctgcgggagctgggctcgcggccctgcagttcttccggagtcagggcgctgagggagcgttgacagggaagcagccggatggatctgcagaaaaggctgtcttggaacaatttggattccctttaactggaacagaggcaaggtgttacactaatcacgctttgtcttatgatcaggcaaagcgggtgcctagatgggttcttgaacatatttccaaaagcaagataatgggtgatgcagacagaaagcattgtaaatttaagcctgatcccaatatccctccaaccttcagtgccttcaatgaagattatgttggaagtgggtggtcacgaggacacatggctccagcaggaaataacaaattttcaagtaaagccatggctgaaaccttttacctttctaacattgtgcctcaggattttgataataattctggatattggaacagaatagaaatgtactgtcgagagctgacagaaaggtttgaagatgtttgggtggtatctgggcctttgaccttacctcagactagaggcgatggaaagaaaatagttagttaccaggtgattggcgaggacaacgtggcagtcccctcacacctttataaggtaatcctggcccgcagaagctcagtatctaccgaaccactggcgctaggggcctttgtggtacccaatgaagccatcggcttccagccccagttaactgaattccaagtgagcctccaggacctagagaagttgtcaggactggtgttttttcctcatttggatagaactagtgatatccggaatatctgctctgtggacacctgtaagctcctggatttccaggagttcaccttgtacttgagtacaagaaagattgaaggagcccgatcagtgctcagactggaaaagatcatggaaaacttgaagaatgcagagattgaaccagatgattactttatgagtcgctatgagaagaagctagaagaactcaaagctaaggagcagtcaggaacccagataagaaagccatcctagtttttatctcaagatgtgtcataccgtctgtaatgaagcaggcatgccctctttaggctaacatattttagtggctttgctttttgctttttaaaaagtttttctctttaagagatgtggtctcgccgtgtcatccaggctggagtgcagtggtggaatcatagctcactatagcctcaaacttctgggcttaagcaatcctcctgcctctgccccctgagcagctgggactacaggcacacaccatcaccctcagctactagtggctttgctttaaagaaacagtggaatcctaaatttatgactaaaaattcccccaaaagatgaaagatctacaatgtttttgtcagtattatatttgactcaggaactaattattaagggagctttgacacctgcagatggagggctgatcttgtgtcaagttaacaggaagactgcccacagatgacactgcatttgtatccctgtggatgtagagtattgggaaggcatttgtttagtttcatgcctccaaaccatgcattgtctgtgatgtatctgcccagccttctcagaactcaatgttgtacatttttccctctaggacctgaattggtcttggaggcagcttttagaaatcctctgtgtagttcctgtccacatgcactatatatttgtttcttttttctcctctcatgaatctgctcgtttctctacttctgtctacgtagaagcactcagcaactagtttctgctcattaaatgtgttctatatactaggctcagtgctttacatgtgttgtctcacaatgactctctgaggtaaatacactatccccattttacctgtgagaaaattgaggcttagagagcttagtgtcttacctgagtttcacttttccaaagtagtcatccacaaagtatgaggcagacagatctaagagaagaaagacagctgaggtagattcaaatcttttctgacatggatggtggctttttactcagaaatatatacctatttccatgggtatttgtgggcctgaggcatgcttggcaagaagagtctggtttctcgtctgctatgcaagccaaagggactttaatgttctttgaattgaaccctccttagctctgtggaaagagacagtcaggaatatttgggaattagacggcaatactttgtggggtttattagagcccatgcttgcctccagagatacagttcttttagtgaccagatactgccaaattgatgtgttcttgctttccaggtgagctttttgttcttaagattaagaaacctatgaaggatctgcagccaggcatggtggctcaggcctataatctcagcactttgggaaatcgaggtgggtggatcgcttgagcccaggagtttgagaccagcctgggcaacataatgaaaccctatctttacaaaaaaatacaaaaattagctgggcgtggtggtgcacacctgtagtcccagctactcgggaggctgaaatgggaggattgcttgagcctggcaggtcaaggctgcgatgggacatggtcatgccactggacgccagcctgggccacagagggagaccctgtctcaaaaaaag

SEQ ID NO: 9480 - DNA, 966 bp, Homo sapiens
  source 1..966: mol_type = unassigned DNA
agcttggcgggcggtgaggcgtggggtgacggggggatggcgggggccggcatgcgcgcgcatgcgccgtggtaaaaggccggtacctcgggcaagatggctatcaagagtatcgcttcccgcctccggggttcccgtcgttttctgagcggcttcgtggctggggctgtagtgggcgctgcgggagctgggctcgcggccctgcagttcttccggagtcagggcgctgagggagcgttgacagggaagcagccggatggatctgcagaaaaggctgtcttggaacaatttggattccctttaactggaacagaggcaaggtgttacactaatcacgctttgtcttatgatcaggcaaagcgggtgcctagatgggttcttgaacatatttccaaaagcaagataatgggtgatgcagacagaaagcattgtaaatttaagcctgatcccaatatccctccaaccttcagtgccttcaatgaagattatgttggaagtgggtggtcacgaggacacatggctccagcaggaaataacaaattttcaagtaaagccatggctgaaaccttttacctttctaacattgtgcctcaggattttgataataattctggatattggaacagaatagaaatgtactgtcgagagctgacagaaaggtttgaagatgtttgggtggtatctgggcctttgaccttacctcagactagaggcgatggaaagaaaatagttagttaccaggtgattggcgaggacaacgtggcagtcccctcacacctttataaggaccacgctggctgctgtgttgagagcccgctggggacaaggaccagtgaggaggccactgcaagaatccaggagagagatgatggcggctcagaccagcgcagtggcctggttgaacttgggatatatttcgaaggtagagccaacaggatttccggccggattggatgtagggtgtga

SEQ ID NO: 9481 - DNA, 1679 bp, Homo sapiens
  source 1..1679: mol_type = unassigned DNA
gaaaggcagggaggggaggttgtcccctgctgagaaccattggtttaaggttaatctggctctgctttcatagactactctgttacccaggctggagtgcggtgatgagtgatcatagctcactgcagccttaaactctagtgatcctcccgccttggccttccaaagtgctgagattacagatgtgaaccaccacacccagcccagtcaatttgtttttagaatgttcccaagaatatagttatgttgctaaataagatactaaaataatcccatactatatttcttgacagaaaaactattaaaatgtatacatgataaaaatttcttttatgaagcaaaatatgttttgttttgctcatgaacgtgaggtattttggaaaaatggtaaagaagtgcagagtcaagtcatagcgactaataatgggttattttcttaaattgtatgcttatgttaattctcacagtctttttgtttgggtctgtgacagatcttacaaaagatcttttagacctatgattcttaacaaaattaaagaattaagtcggaaccaattttccacaatgtctcatctaagaaaggactcacagcccagcagcccaggagatgacgcaatggacaggagtgggctccctgaccttcaaggaagatttgagctatctgggaaaaacagacagtatccactggatgcattggaaccccaacccagcattggggatattaaggacattaaaaaagcagccaagtctatgctagacccagcacataaatctcatttccaccctgtgaccccaagtttagtattcttgtgtttcatatttgatgggttacaccaggcattactgagtgttggtgtgagcaagaggtctaatactgtggttgggaatgagaacgaggaaaggggtactccttatgctagcagattcaaagatatgcctaactttattgcccttgagaagtcatcagttctccgccactgctgtgaccttttgataggcattgcggctggatcaagtgataagatttgcaccagcagtctccaagttcagagacgattcaaggcaatgatggcatctattggaagactttcacatggtgagagtgctgatctgctaatcagctgcaatgcagaatcagccataggttggatcagctcaagaccatgggttggagaattaatgttcacacttctatttggagactttgaatcccctctacacaagctacgcaagtcaagttagttgccaagaaagcacagatgacaacctattaatgctgtgagaatgtttctagatcagtgcatggatggctccattgctctacgggccattgtgtctgagatcccagtctttgaggagaaaaaaaacaatggttaaaaaggcattggggaaatattttgagtttgggggtgtactttgccaccccattattggggagctgtcaccacgaatgttcccaaacttagcaacagcggcaaactactgggccaagatgagcaaccccacatttttgggatttaaagctcctgatgttataccaggatcaaccatcacactccctttgcttcaaatggcatctaccccgtaagatcttgaggggggagtgttgggtggaatcatagatccatgcactcctaacatgaactaattctcattatttaaaaaaaaaaaaaaaaaaa

SEQ ID NO: 9482 - DNA, 1172 bp, Homo sapiens
  source 1..1172: mol_type = unassigned DNA
aaatgcgcaaagaaaggacgccggggacacccggttgggctctgctgctcccttctgggttccgaggcccaagcccttggcagtgtttgtgagtggaagggaggtcacgctatcgtccgcggccccagcagccctgtgccctcgttggatcccgcgacgcggctcctttaagagcctcgcgggtcgcccgccgctaggtcgctccccggccatgcgggcgctgcgggccggcctgaccctggcgtcgggcgcggggctgggtgcggtcgtcgagggctggcggcggcggcgggaggacgcgcgggcggcgccgggactgctgggccggctgcccgtgctgcccgtggcggcggcagccgagttgccccctgtgcccgggggaccccgcggcccgggcgagctggccaagtacgggctgccggggctggcgcagctcaagagccgcgagtcgtacgtgctgtgctacgacccgcgcacccgcggcgcgctctgggtggtggagcagctgcgacccgagcgtctccgcggcgacggcgaccggcgcgagtgcgacttccgcgaggacgactcggtgcacgcgtaccaccgtgccaccaacgccgactaccgcggcagtggcttcgaccgcggtcacctggccgccgccgccaaccaccgctggagccagaaggccatggacgacacgttctacctgagcaacgtcgcgccccaggtgccccacctcaaccagaatgcctggaacaacctggagaaatatagccgcagcttgacccgcagctaccaaaacgtctatgtctgcacagggccactcttcctgcccaggacagaggctgatgggaaatcctacgtaaagtaccaggtcatcggcaagaaccacgtggcagtgcccacacacttcttcaaggtgctgatcctggaggcagcaggtgggcaaattgagctccgcacctacgtgatgcccaacgcacctgtggatgaggccatcccactggagcgcttcctggtgcccatcgagagcattgagcgggcttcggggctgctctttgtgccaaacatcctggcgcgggcaggcagcctcaaggccatcacggcgggcagtaagtgagggtggagcccagtgagactgtgggtgtgtgcaggccggggagtattaaaggtggtgatttttggag

SEQ ID NO: 9483 - DNA, 5488 bp, Homo sapiens
  source 1..5488: mol_type = unassigned DNA
accaattcccttcctgggagttgcggcttccctcgctcggccccactcccgtttaccctttccccagctcccgccttagccaggggcttccccgcctgccgctagggctcgggccgaagcgccgctcagcgccagcctgccgctccccgggctccactttcactttcggtcctgggggagctaggccggcggcagtggtggtggcggcggcgcaagggtgagggcggccccagaaccccaggtaggtagagcaagaagatggtgtttctgcccctcaaatggtcccttgcaaccatgtcatttctactttcctcactgttggctctcttaactgtgtccactccttcatggtgtcagagcactgaagcatctccaaaacgtagtgatgggacaccatttccttggaataaaatacgacttcctgagtacgtcatcccagttcattatgatctcttgatccatgcaaaccttaccacgctgaccttctggggaaccacgaaagtagaaatcacagccagtcagcccaccagcaccatcatcctgcatagtcaccacctgcagatatctagggccaccctcaggaagggagctggagagaggctatcggaagaacccctgcaggtcctggaacacccccgtcaggagcaaattgcactgctggctcccgagcccctccttgtcgggctcccgtacacagttgtcattcactatgctggcaatctttcggagactttccacggattttacaaaagcacctacagaaccaaggaaggggaactgaggatactagcatcaacacaatttgaacccactgcagctagaatggcctttccctgctttgatgaacctgccttcaaagcaagtttctcaatcaaaattagaagagagccaaggcacctagccatctccaatatgccattggtgaaatctgtgactgttgctgaaggactcatagaagaccattttgatgtcactgtgaagatgagcacctatctggtggccttcatcatttcagattttgagtctgtcagcaagataaccaagagtggagtcaaggtttctgtttatgctgtgccagacaagataaatcaagcagattatgcactggatgctgcggtgactcttctagaattttatgaggattatttcagcataccgtatcccctacccaaacaagatcttgctgctattcccgactttcagtctggtgctatggaaaactggggactgacaacatatagagaatctgctctgttgtttgatgcagaaaagtcttctgcatcaagtaagcttggcatcacaatgactgtggcccatgaactggctcaccagtggtttgggaacctggtcactatggaatggtggaatgatctttggctaaatgaaggatttgccaaatttatggagtttgtgtctgtcagtgtgacccatcctgaactgaaagttggagattatttctttggcaaatgttttgacgcaatggaggtagatgctttaaattcctcacaccctgtgtctacacctgtggaaaatcctgctcagatccgggagatgtttgatgatgtttcttatgataagggagcttgtattctgaatatgctaagggagtatcttagtgctgacgcatttaaaagtggtattgtacagtatctccagaagcatagctataaaaatacaaaaaacgaggacctgtgggatagtatggcaagtatttgccctacagatggtgtaaaagggatggatggcttttgctctagaagtcaacattcatcttcatcctcacattggcatcaggaaggggtggatgtgaaaaccatgatgaacacttggacactgcagaagggttttcccctaataaccatcacagtgagggggaggaatgtacacatgaagcaagagcactacatgaagggctctgacggcgccccggacactgggtacctgtggcatgttccattgacattcatcaccagcaaatccgacatggtccatcgatttttgctaaaaacaaaaacagatgtgctcatcctcccagaagaggtggaatggatcaaatttaatgtgggcatgaatggctattacattgtgcattacgaggatgatggatgggactctttgactggccttttaaaaggaacacacacagcagtcagcagtaatgatcgggcgagtctcattaacaatgcatttcagctcgtcagcattgggaagctgtccattgaaaaggccttggatttatccctgtacttgaaacatgaaactgaaattatgcccgtgtttcaaggtttgaatgagctgattcctatgtataagttaatggagaaaagagatatgaatgaagtggaaactcaattcaaggccttcctcatcaggctgctaagggacctcattgataagcagacatggacagacgagggctcagtctcagagcgaatgctgcggagtcaactactactcctcgcctgtgtgcacaactatcagccgtgcgtacagagggcagaaggctatttcagaaagtggaaggaatccaatggaaacttgagcctgcctgtcgacgtgaccttggcagtgtttgctgtgggggcccagagcacagaaggctgggattttctttatagtaaatatcagttttctttgtccagtactgagaaaagccaaattgaatttgccctctgcagaacccaaaataaggaaaagcttcaatggctactagatgaaagctttaagggagataaaataaaaactcaggagtttccacaaattcttacactcattggcaggaacccagtaggatacccactggcctggcaatttctgaggaaaaactggaacaaacttgtacaaaagtttgaacttggctcatcttccatagcccacatggtaatgggtacaacaaatcaattctccacaagaacacggcttgaagaggtaaaaggattcttcagctctttgaaagaaaatggttctcagctccgttgtgtccaacagacaattgaaaccattgaagaaaacatcggttggatggataagaattttgataaaatcagagtgtggctgcaaagtgaaaagcttgaacatgatcctgaagctgacgcaacaggatgaaaatccatcagaatctcagactacagcactaaatatgctttgatgctacatcaaacggaatggaagcatagctgacttcgctaaagttacttcatctccatctagcaaatgaggcactgttctcaaccaaaggagatggggatctggtttagggcaatccctttataatttgatgtgctgtggtctccttggtaatgtataatttggtattgcacaggtgattagtcaaggaagtctggaaaagctttggtcccacagccttgcctcacagcatgtaaataattaaaacaatattgatgctgaggttcttctactgctagtatgaaagtgacaaatttttactggtgtgaattgggaagaaaacaatgctattccatgacgtttgtaaaatgtttgtaaaagctcaaacatgacgattccataaaataaacttgaggttaaataatgggtagtaaattatagaatgtataagaaaaaatataaaggagaaaatcaattatcaggaaagctaaagaacttttcaaatctagtaatttgaatatagacacaatgcactttattgcactttcaattcttataaagcaacaataatattaaggtccttgactatgtgtacaatgttttcacatatatagtttcatttaatcatttcaaagttaatctctgccatctcgctaaatcatcagtctcggctcttctgaaatagaaggtgcctgatcttcctaataattctgcctattttcatttgctttaaacaggcgccctattttctttctagttgtggctgcgcaaaaacatttatctcccaaataagatgtgctgcttaccgaggtatcacggggtggggctccagcttgggtcgttgaagctggggtttgggaaaccacttcagagatggcagcagcaagtttagcatcttcaaatttcttttattgaaaaaaattttattagtaacatgttgtatataaaattatgagcacaatgccatcacttaactataactcttaaagatagcttaatgactgtttattctcttgaccaaatagactcataataacatataattttaaaagaaatttaaattctttcttctctattgtattattttatacaatttgctatttctatttccttctcatattgattattctaaatactatgcaataatataacttagagttccacggtttgtttacacatttcctgttgtacatttaggttattcaaagttttcagctcttttaaaattgctctgaataagttctagtgagtgagttatggtgctggctatattttgctaaactgccctctcaaatgttgctaggaattcatactgcgaaaagcaatgaataagcatgcctgttttcccatggccttgcttgccagaatttgacttttattatgataatcagtgtaaaatgatatactactattgcttgtatattgtggtatacggtgtcaggtttcagggttttttttcaacgttaaatattctagaaactttctgaaataatttctgtttaaaaatattgaatatttgcttcatttcaaatactcccttttgacaaaaaaacttaggtataactgttgatgaaaaaccagaaaaaagtccagaactctttggtgactccaactatggatagcttattttgaaaaaggagaattgcaaattttaccaaaagatggagaaaagcacattaaaaagataccaacattcagaaattcatttcagcatgttattattggaaattatttaaactaatttagataactataagatacttattgtccatttataccctgtaaagccgttttagaatgtaatattttaggtaatccaaaatgtactaaattaaattcatttttagttatgagaaatctttgcttatatgacaaatgaaaagaataacaagttgtcaaatgaaaagaatgacattgaaacatttgtattgtctcttcttaaactatcttattgacttattatttaagccttttaatactaagtatgaaacaacctatggtctggaaatttgtatcgcaaagctatatgtgcatatgttatttaattcatctaatgctacacaaaagcataaaataatgatttttcactctctttaaaaatactaaatcatttatgtccatttctcaattttttcattgatctatgctttgagtttgctttctcaacattattgtattttccacttattattactgtataacatatgctagtgtttagttggattaatcttacctaaaagtactgaaaaatgctttttagtactttttcatattttatacatttattttccgaatgtatcattgaataattttattgagttataaaagtatcttattgctatttaataaaaaattaacacat

SEQ ID NO: 9484 - DNA, 3122 bp, Homo sapiens
  source 1..3122: mol_type = unassigned DNA
actttcggtcctgggggagctaggccggcggcagtggtggtggcggcggcgcaagggtgagggcggccccagaaccccaggtaggtagagcaagaagatggtgtttctgcccctcaaatggtcccttgcaaccatgtcatttctactttcctcactgttggctctcttaactgtgtccactccttcatggtgtcagagcactgaagcatctccaaaacgtagtgatgggacaccatttccttggaataaaatacgacttcctgagtacgtcatcccagttcattatgatctcttgatccatgcaaaccttaccacgctgaccttctggggaaccacgaaagtagaaatcacagccagtcagcccaccagcaccatcatcctgcatagtcaccacctgcagatatctagggccaccctcaggaagggagctggagagaggctatcggaagaacccctgcaggtcctggaacacccccgtcaggagcaaattgcactgctggctcccgagcccctccttgtcgggctcccgtacacagttgtcattcactatgctggcaatctttcggagactttccacggattttacaaaagcacctacagaaccaaggaaggggaactgaggatactagcatcaacacaatttgaacccactgcagctagaatggcctttccctgctttgatgaacctgccttcaaagcaagtttctcaatcaaaattagaagagagccaaggcacctagccatctccaatatgccattggtgaaatctgtgactgttgctgaaggactcatagaagaccattttgatgtcactgtgaagatgagcacctatctggtggccttcatcatttcagattttgagtctgtcagcaagataaccaagagtggagtcaaggtttctgtttatgctgtgccagacaagataaatcaagcagattatgcactggatgctgcggtgactcttctagaattttatgaggattatttcagcataccgtatcccctacccaaacaagatcttgctgctattcccgactttcagtctggtgctatggaaaactggggactgacaacatatagagaatctgctctgttgtttgatgcagaaaagtcttctgcatcaagtaagcttggcatcacaatgactgtggcccatgaactggctcaccagtggtttgggaacctggtcactatggaatggtggaatgatctttggctaaatgaaggatttgccaaatttatggagtttgtgtctgtcagtgtgacccatcctgaactgaaagttggagattatttctttggcaaatgttttgacgcaatggaggtagatgctttaaattcctcacaccctgtgtctacacctgtggaaaatcctgctcagatccgggagatgtttgatgatgtttcttatgataagggagcttgtattctgaatatgctaagggagtatcttagtgctgacgcatttaaaagtggtattgtacagtatctccagaagcatagctataaaaatacaaaaaacgaggacctgtgggatagtatggcaagtatttgccctacagatggtgtaaaagggatggatggcttttgctctagaagtcaacattcatcttcatcctcacattggcatcaggaaggggtggatgtgaaaaccatgatgaacacttggacactgcagaagggttttcccctaataaccatcacagtgagggggaggaatgtacacatgaagcaagagcactacatgaagggctctgacggcgccccggacactgggtacctgtggcatgttccattgacattcatcaccagcaaatccgacatggtccatcgatttttgctaaaaacaaaaacagatgtgctcatcctcccagaagaggtggaatggatcaaatttaatgtgggcatgaatggctattacattgtgcattacgaggatgatggatgggactctttgactggccttttaaaaggaacacacacagcagtcagcagtaatgatcgggcgagtctcattaacaatgcatttcagctcgtcagcattgggaagctgtccattgaaaaggccttggatttatccctgtacttgaaacatgaaactgaaattatgcccgtgtttcaaggtttgaatgagctgattcctatgtataagttaatggagaaaagagatatgaatgaagtggaaactcaattcaaggccttcctcatcaggctgctaagggacctcattgataagcagacatggacagacgagggctcagtctcagagcgaatgctgcggagtcaactactactcctcgcctgtgtgcacaactatcagccgtgcgtacagagggcagaaggctatttcagaaagtggaaggaatccaatggaaacttgagcctgcctgtcgacgtgaccttggcagtgtttgctgtgggggcccagagcacagaaggctgggattttctttatagtaaatatcagttttctttgtccagtactgagaaaagccaaattgaatttgccctctgcagaacccaaaataaggaaaagcttcaatggctactagatgaaagctttaagggagataaaataaaaactcaggagtttccacaaattcttacactcattggcaggaacccagtaggatacccactggcctggcaatttctgaggaaaaactggaacaaacttgtacaaaagtttgaacttggctcatcttccatagcccacatggtaatgggtacaacaaatcaattctccacaagaacacggcttgaagaggtaaaaggattcttcagctctttgaaagaaaatggttctcagctccgttgtgtccaacagacaattgaaaccattgaagaaaacatcggttggatggataagaattttgataaaatcagagtgtggctgcaaagtgaaaagcttgaacgtatgtaaaaattcctcccttgccaggttcctgttatctctaatcaccaacattttgttgagtgtattttcaaactagagatggctgttttggctccaactggagatacttttttcccttcaactcattttttgactatccctgtgaaaagaatagctgttagtttttcatgaatggtttaataaaaatagaaatcactggtaattt

SEQ ID NO: 9485 - DNA, 4805 bp, Homo sapiens
  source 1..4805: mol_type = unassigned DNA
gcagtggtggtggcggcggcgcaagggtgagggcggccccagaaccccaggtaggtagagcaagaagatggtgtttctgcccctcaaatggtcccttgcaaccatgtcatttctactttcctcactgttggctctcttaactgtgtccactccttcatggtgtcagagcactgaagcatctccaaaacgtagtgatgggacaccatttccttggaataaaatacgacttcctgagtacgtcatcccagttcattatgatctcttgatccatgcaaaccttaccacgctgaccttctggggaaccacgaaagtagaaatcacagccagtcagcccaccagcaccatcatcctgcatagtcaccacctgcagatatctagggccaccctcaggaagggagctggagagaggctatcggaagaacccctgcaggtcctggaacacccccgtcaggagcaaattgcactgctggctcccgagcccctccttgtcgggctcccgtacacagttgtcattcactatgctggcaatctttcggagactttccacggattttacaaaagcacctacagaaccaaggaaggggaactgaggatactagcatcaacacaatttgaacccactgcagctagaatggcctttccctgctttgatgaacctgccttcaaagcaagtttctcaatcaaaattagaagagagccaaggcacctagccatctccaatatgccattggtgaaatctgtgactgttgctgaaggactcatagaagaccattttgatgtcactgtgaagatgagcacctatctggtggccttcatcatttcagattttgagtctgtcagcaagataaccaagagtggagtcaaggtttctgtttatgctgtgccagacaagataaatcaagcagattatgcactggatgctgcggtgactcttctagaattttatgaggattatttcagcataccgtatcccctacccaaacaagatcttgctgctattcccgactttcagtctggtgctatggaaaactggggactgacaacatatagagaatctgctctgttgtttgatgcagaaaagtcttctgcatcaagtaagcttggcatcacaatgactgtggcccatgaactggctcaccagtggtttgggaacctggtcactatggaatggtggaatgatctttggctaaatgaaggatttgccaaatttatggagtttgtgtctgtcagtgtgacccatcctgaactgaaagttggagattatttctttggcaaatgttttgacgcaatggaggtagatgctttaaattcctcacaccctgtgtctacacctgtggaaaatcctgctcagatccgggagatgtttgatgatgtttcttatgataagggagcttgtattctgaatatgctaagggagtatcttagtgctgacgcatttaaaagtggtattgtacagtatctccagaagcatagctataaaaatacaaaaaacgaggacctgtgggatagtatggcaagtatttgccctacagatggtgtaaaagggatggatggcttttgctctagaagtcaacattcatcttcatcctcacattggcatcaggaaggggtggatgtgaaaaccatgatgaacacttggacactgcagaagggttttcccctaataaccatcacagtgagggggaggaatgtacacatgaagcaagagcactacatgaagggctctgacggcgccccggacactgggtacctgtggcatgttccattgacattcatcaccagcaaatccgacatggtccatcgatttttgctaaaaacaaaaacagatgtgctcatcctcccagaagaggtggaatggatcaaatttaatgtgggcatgaatggctattacattgtgcattacgaggatgatggatgggactctttgactggccttttaaaaggaacacacacagcagtcagcagtaatgatcgggcgagtctcattaacaatgcatttcagctcgtcagcattgggaagctgtccattgaaaaggccttggatttatccctgtacttgaaacatgaaactgaaattatgcccgtgtttcaaggtttgaatgagctgattcctatgtataagttaatggagaaaagagatatgaatgaagtggaaactcaattcaaggccttcctcatcaggctgctaagggacctcattgataagcagacatggacagacgagggctcagtctcagagcgaatgctgcggagtcaactactactcctcgcctgtgtgcacaactatcagccgtgcgtacagagggcagaaggctatttcagaaagtggaaggaatccaatggaaacttgagcctgcctgtcgacgtgaccttggcagtgtttgctgtgggggcccagagcacagaaggctgggattttctttatagtaaatatcagttttctttgtccagtactgagaaaagccaaattgaatttgccctctgcagaacccaaaataaggaaaagcttcaatggctactagatgaaagctttaagggagataaaataaaaactcaggagtttccacaaattcttacactcattggcaggaacccagtaggatacccactggcctggcaatttctgaggaaaaactggaacaaacttgtacaaaagtttgaacttggctcatcttccatagcccacatggtaatgggtacaacaaatcaattctccacaagaacacggcttgaagaggtaaaaggattcttcagctctttgaaagaaaatggttctcagctccgttgtgtccaacagacaattgaaaccattgaagaaaacatcggttggatggataagaattttgataaaatcagagtgtggctgcaaagtgaaaagcttgaacgtatgtaaaaattcctcccttgccaggttcctgttatctctaatcaccaacattttgttgagtgtattttcaaactagagatggctgttttggctccaactggagatacttttttcccttcaactcattttttgactatccctgtgaaaagaatagctgttagtttttcatgaatgggctatcgctaccatgtgttttgttcatcacaggtgttgccctgcaacgtaaacccaagtgttgggttccctgccacagaagaataaagtaccttattcttctcattttatagtttatgcttaagcacccgtgtccaaaaccctgtaccccatgtttatcattcataaactgtttcatcagtctcctcgaaagactctgaatagtcgactactgaacaatgaacacctggatctgagactaagccggacgatgactgggttaaagctctcccggctcacccctccagacccgctgcccatccctcttccttgctccatgcccaggggctgacttgtaaaggccaagtcatcaagctttcttgccctttggatgttggtcagtggggagccggagagctggagctggggtcggaggaggtagtaggtggaggtgttcttccctgattcccttgcgggatgcctcgggctggcctcccctgagggtcttagctccgagaggggaccctcttttccacacagccttctccacctctggattttggtaactgctccctcctcatcccttcaggattagtggcctcagtgggagtctggcttttactagtcctggcggacttgtggtttctacataatgtgctcgcacttttgcaaaaaatctttttatagaaccctcctcagataattctgagtgagtgtcatctatttccctgactggtacagtatctcttctgaaaaagcagagtgcattcaagtctgtaggaaaacccttttcttagggaggtgattttttttctctctctgcttcttatttggcctactttacaatttctaactaactagttattggcatttactgacagtaaattattgcagtcaccaataaatgatagtacattgtgaaacaaaatatttgctcatattagcaaataggacattctttggctttgaagtctttctttcttttgtgaagacttcacacacggttgcttcagcacacagttgctgctcaggttttatgtatagatgataataatagaaagcacagtttactaacatggtaaaccaacggagttcaagtcaagtcagttaataccctaagaattagattttatttcttattctgaaaacttgctacacagggacttatctaacccatagtgtgctctgttgctgacttgattcaagttgcagcgtgttttgcgctgactctaaggtgcggaaatcctcacacctggcaaaggagaattcaaactgaactttttgaatataaggcaaaaacttcaagataagggaatatgattgatgattggtacgaaaaatgtcaaaatgtgttcccctaatacacgacaaaatagagtgacttctggacataaatctgccatttattaaaccattcactacaacaaataaataggtataaaagtggaattggaatttttatacttatttgttgtagtgaatggtttaataaaaatagaaatcactggtaatttccaccccaaactaaactatttcccttcttttaaaaaaatacacaaccaagattttaatgtaaaatattttgctttaattgtattttatgccttgattaatgaaacatggaaatattgattttcagttttggtcacctgaggaacctatctttgtttgcttttggaaaagcccattttctaaacagatacaatattgccacaacaatgtgcagaaacctttttgataataaaaaattgttctttgcctctaa

SEQ ID NO: 9486 - DNA, 583 bp, Homo sapiens
  source 1..583: mol_type = unassigned DNA
agctaggccggcggcagtggtggtggcggcggcgcaagggtgagggcggccccagaaccccagacagagtcttgctctgttgccaggctggagtgcagtggtgcaatctcagctcactgcaactctgcctcccaggttcaagcgattctcctgcctcagcctcccaagtaattaggactacaggtagagcaagaagatggtgtttctgcccctcaaatggtcccttgcaaccatgtcatttctactttcctcactgttggctctcttaactgtgtccactccttcatggtgtcagagcactgaagcatctccaaaacgtagtgatgggacaccatttccttggaataaaatacgacttcctgagtacgtcatcccagttcattatgatctcttgatccatgcaaaccttaccacgctgaccttctggggaaccacgaaagtagaaatcacagccagtcagcccaccagcaccatcatcctgcatagtcaccacctgcagatatctagggccaccctcaggaagggagctggagagaggctatcggaagaacccctgcaggtcctggaacacccccgtcaggag

SEQ ID NO: 9487 - DNA, 3219 bp, Homo sapiens
  source 1..3219: mol_type = unassigned DNA
atctgcagcagcatgatttaagattaaattcatgtattgaaaatattgttcagaccccatgtgacataactggagccagtgcagtgccatgaagaactacgagattagcctggatattaacttgtcttctagagaatagatttcatgttccattcttctgcaatggttaattcacacagaaaaccaatgtttaacattcacagaggattttactgcttaacagccatcttgccccaaatatgcatttgttctcagttctcagtgccatctagttatcacttcactgaggatcctggggctttcccagtagccactaatggggaacgatttccttggcaggagctaaggctccccagtgtggtcattcctctccattatgacctctttgtccaccccaatctcacctctctggactttgttgcatctgagaagatcgaagtcttggtcagcaatgctacccagtttatcatcttgcacagcaaagatcttgaaatcacgaatgccacccttcagtcagaggaagattcaagatacatgaaaccaggaaaagaactgaaagttttgagttaccctgctcatgaacaaattgcactgctggttccagagaaacttacgcctcacctgaaatactatgtggctatggacttccaagccaagttaggtgatggctttgaagggttttataaaagcacatacagaactcttggtggtgaaacaagaattcttgcagtaacagattttgagccaacccaggcacgcatggctttcccttgctttgatgaaccgttgttcaaagccaacttttcaatcaagatacgaagagagagcaggcatattgcactatccaacatgccaaaggtgtccatctatgcatccccagacaaacggaatcaaacacattatgctttgcaggcatcactgaagctacttgatttttatgaaaagtactttgatatctactatccactctccaaactggatttaattgctattcctgactttgcacctggagccatggaaaattggggcctcattacatatagggagacgtcactgctttttgaccccaagacctcttctgcttccgataaactgtgggtcaccagagtcatagcccatgaactggcgcaccagtggtttggcaacctggtcacaatggaatggtggaatgatatttggcttaaggagggttttgcaaaatacatggaacttatcgctgttaatgctacatatccagagctgcaatttgatgactattttttgaatgtgtgttttgaagtaattacaaaagattcattgaattcatcccgccctatctccaaaccagcggaaaccccgactcaaatacaggaaatgtttgatgaagtttcctataacaagggagcttgtattttgaatatgctcaaggattttctgggtgaggagaaattccagaaaggaataattcagtacttaaagaagttcagctatagaaatgctaagaatgatgacttgtggagcagtctgtcaaatagttgtttagaaagtgattttacatctggtggagtttgtcattcggatcccaagatgacaagtaacatgctcgcctttctgggggaaaatgcagaggtcaaagagatgatgactacatggactctccagaaaggaatccccctgctggtggttaaacaagacgggtgttcactccgactgcaacaggagcgcttcctccagggggttttccaggaagaccctgaatggagggccctgcaggagaggtacctgtggcatatcccattgacctactccacgagttcttctaatgtgatccacagacacattctaaaatcaaagacagatactctggatctacctgaaaagaccagttgggtgaaatttaatgtggactcaaatggttactacatcgttcactatgagggtcatggatgggaccaactcattacacagctgaatcagaaccacacacttctcagacctaaggacagagtaggtctgattcatgatgtgtttcagctagttggtgcagggagactgaccctagacaaagctcttgacatgacttactacctccaacatgaaacaagcagccccgcacttctcgaaggtctgagttacttggaatcgttttaccacatgatggacagaaggaatatttcagatatctctgaaaacctcaagcgttaccttcttcagtattttaagccagtgattgacaggcaaagctggagtgacaagggctcagtctgggacaggatgctccgctcggctctcttgaagctggcctgtgacctgaaccatgctccttgcatccagaaagctgctgaactcttctcccagtggatggaatccagtggaaaattaaatataccaacagatgttttaaagattgtgtattctgtgggtgctcagacaacagcaggatggaattaccttttagagcaatatgaactgtcaatgtcaagtgctgaacaaaacaaaattctgtatgctttgtcaacgagcaagcatcaggaaaagttactgaagttaattgaactaggaatggaaggaaaggttatcaagacacagaacttggcagctctccttcatgcgattgccagacgtccaaaggggcagcaactagcatgggattttgtaagagaaaattggacccatcttctgaaaaaatttgacttgggctcatatgacataaggatgatcatctctggcacaacagctcacttttcttccaaggataagttgcaagaggtgaaactattttttgaatctcttgaggctcaaggatcacatctggatatttttcaaactgttctggaaacgataaccaaaaatataaaatggctggagaagaatcttccgactctgaggacttggctaatggttaatacttaaatggtcaatagaaaaagtaggctgggcgcggtggctcacgcctgtaatcccagcactttgggaggctgagaagggcggatcacgaggtcaggagatggagaccatcctggctaacacggtgagaccccgtctccgctaaaaatacaaaaaattagccgggcatggtggcaggtgcctgtagtcccagctactcggcaggctgcagcaggaaaatggcataaacccgggaggtggagcttgcagtgagccgagattgcaccactgcattccagcctgggtgactgagcgagactctgtctcaaaaaaaaaaaaaaaaaaaaaaagaaa

SEQ ID NO: 9488 - DNA, 5705 bp, Homo sapiens
  source 1..5705: mol_type = unassigned DNA
cccaactcaaacaggcagataaagagagatcaaagagatgagcatgagatacagtcccctcgtgcccaaggagacagggtggttacagacatggaaaatctgagaataatcacctctgataaagatcacagaagctgcccgggaggtgtttggtaagcttggagttacgtttgtggggtggatgggcagaagtcagatttcatagcactgaggatgcagcacaaggagaagttcaagatcaattcctaagacaacaacttggcactaaaaaacataaactatgttctgaaggctttaccctggggacaagggaagggaggtgataacagcagaagtggcagccactggcgatcctttctttccatggtttggcttctactccaaagccacttatttgtgcattctacaaaaagtttcttgtcctttttgaaataaagctcttatcctaagctccattcacacctgcgtgataatgaaccagctagtacttactgtactcaggaagcatgcaaagttctgaatcttagaacagaaagtgaaagcaaaagtaaattccccttcagtcaaatctgcagcagcatgatttaagattaaattcatgtattgaaaatattgttcagaccccatgtgacataactggagccagtgcagtgccatgaagaactacgagattagcctggatattaacttgtcttctagagaatagatttcatgttccattcttctgcaatggttaattcacacagaaaaccaatgtttaacattcacagaggattttactgcttaacagccatcttgccccaaatatgcatttgttctcagttctcagtgccatctagttatcacttcactgaggatcctggggctttcccagtagccactaatggggaacgatttccttggcaggagctaaggctccccagtgtggtcattcctctccattatgacctctttgtccaccccaatctcacctctctggactttgttgcatctgagaagatcgaagtcttggtcagcaatgctacccagtttatcatcttgcacagcaaagatcttgaaatcacgaatgccacccttcagtcagaggaagattcaagatacatgaaaccaggaaaagaactgaaagttttgagttaccctgctcatgaacaaattgcactgctggttccagagaaacttacgcctcacctgaaatactatgtggctatggacttccaagccaagttaggtgatggctttgaagggttttataaaagcacatacagaactcttggtggtgaaacaagaattcttgcagtaacagattttgagccaacccaggcacgcatggctttcccttgctttgatgaaccgttgttcaaagccaacttttcaatcaagatacgaagagagagcaggcatattgcactatccaacatgccaaaggttaagacaattgaacttgaaggaggtcttttggaagatcactttgaaactactgtaaaaatgagtacataccttgtagcctacatagtttgtgatttccactctctgagtggcttcacttcatcaggggtcaaggtgtccatctatgcatccccagacaaacggaatcaaacacattatgctttgcaggcatcactgaagctacttgatttttatgaaaagtactttgatatctactatccactctccaaactggatttaattgctattcctgactttgcacctggagccatggaaaattggggcctcattacatatagggagacgtcactgctttttgaccccaagacctcttctgcttccgataaactgtgggtcaccagagtcatagcccatgaactggcgcaccagtggtttggcaacctggtcacaatggaatggtggaatgatatttggcttaaggagggttttgcaaaatacatggaacttatcgctgttaatgctacatatccagagctgcaatttgatgactattttttgaatgtgtgttttgaagtaattacaaaagattcattgaattcatcccgccctatctccaaaccagcggaaaccccgactcaaatacaggaaatgtttgatgaagtttcctataacaagggagcttgtattttgaatatgctcaaggattttctgggtgaggagaaattccagaaaggaataattcagtacttaaagaagttcagctatagaaatgctaagaatgatgacttgtggagcagtctgtcaaatagttgtttagaaagtgattttacatctggtggagtttgtcattcggatcccaagatgacaagtaacatgctcgcctttctgggggaaaatgcagaggtcaaagagatgatgactacatggactctccagaaaggaatccccctgctggtggttaaacaagacgggtgttcactccgactgcaacaggagcgcttcctccagggggttttccaggaagaccctgaatggagggccctgcaggagaggtacctgtggcatatcccattgacctactccacgagttcttctaatgtgatccacagacacattctaaaatcaaagacagatactctggatctacctgaaaagaccagttgggtgaaatttaatgtggactcaaatggttactacatcgttcactatgagggtcatggatgggaccaactcattacacagctgaatcagaaccacacacttctcagacctaaggacagagtaggtctgattcatgatgtgtttcagctagttggtgcagggagactgaccctagacaaagctcttgacatgacttactacctccaacatgaaacaagcagccccgcacttctcgaaggtctgagttacttggaatcgttttaccacatgatggacagaaggaatatttcagatatctctgaaaacctcaagcgttaccttcttcagtattttaagccagtgattgacaggcaaagctggagtgacaagggctcagtctgggacaggatgctccgctcggctctcttgaagctggcctgtgacctgaaccatgctccttgcatccagaaagctgctgaactcttctcccagtggatggaatccagtggaaaattaaatataccaacagatgttttaaagattgtgtattctgtgggtgctcagacaacagcaggatggaattaccttttagagcaatatgaactgtcaatgtcaagtgctgaacaaaacaaaattctgtatgctttgtcaacgagcaagcatcaggaaaagttactgaagttaattgaactaggaatggaaggaaaggttatcaagacacagaacttggcagctctccttcatgcgattgccagacgtccaaaggggcagcaactagcatgggattttgtaagagaaaattggacccatcttctgaaaaaatttgacttgggctcatatgacataaggatgatcatctctggcacaacagctcacttttcttccaaggataagttgcaagaggtgaaactattttttgaatctcttgaggctcaaggatcacatctggatatttttcaaactgttctggaaacgataaccaaaaatataaaatggctggagaagaatcttccgactctgaggacttggctaatggttaatacttaaatggtcaatagaaaaagtaggctgggcgcggtggctcacgcctgtaatcccagcactttgggaggctgagaagggcggatcacgaggtcaggagatggagaccatcctggctaacacggtgagaccccgtctccgctaaaaatacaaaaaattagccgggcatggtggcaggtgcctgtagtcccagctactcggcaggctgcagcaggaaaatggcataaacccgggaggtggagcttgcagtgagccgagattgcaccactgcattccagcctgggtgactgagcgagactctgtctcaaaaaaaaaaaaaaaaaaaaaaagaaaaagaaaaagaaaagaaaagaaaaggtacatcagacatgactgcctgcatgaagtcaaacagggtaacaccagtgaagctcaagtcaagagctgtggatattttgtctaaccaacaagaagtctcaagaaatcaggcagtgcagctgcctgctctcagctatcgtatccagccaaaagatgcatgatgatggagtggtgggggaaggccagttcagtatcctatttaaaagtaaacttcctgaataatggatatatgtggagatacagacatagatatatagatacagctgtaattatttagcctcaagtgactttctccattgcttcacgctatgccactattttgcttctttaatttttttaaccttgcttagtattctatagtttgcccaaccagttttacgtccaaggaaaattagccaatgcataaaatatacaaactatgaaaggcaaggatcaggaaaccagagactttgccaccaaatctcagattattagaaactaggtgtcagggtttatcaagaaggccaggaaggccttttgggttaagccttacattcatgaagaacctcaagggtagatttttgagagcattccaaatgaatggtctctggtcaaatgaatgaatggtcaaatgaataaatctgccctcacagagatacaaaaggaaaaggaatataattcataccatttggtttaagccttacattcatgaagtacctcaagggtagatttttgagatcattccaaatgaagtcgaatctgccctcacagagacacaagaaaggaatataattcatacactattgcatttttaataaatcttttgaaatttgcagaattagattgtattgtgtattttcggttaaatgataattgaatgtaaatatttagatgcagcaccatattttataacccagctttagcatttcttcatattttaaggaaaccccccacctccttcttttaagggcgcttcttgctctctgaaatgccctgctaaatgcttctcttaattatttgaataaggtagtttggaataaagaaagaaaagatcactctacatacagatagtaaacttaatttgtgatcctatatatgagacagtataaaaatacagataagttttagaaagactcaaaacaatatgtaaatgactgatgtttgcattattaaggaagacttgggatgttgggtcaagaggggaaagtgttagtcaatccactttggagcaatatcatgaaggtcaattataattccatatacctttctttgatgccacagtcagagatagaatacagtttgggtggccatggatgtgccccaatacagtacacattttttggttaaatttgttttcagatcatttcatggaatctttgaagtatctttgactctaactttgacttggtggtggaccttccttggtttttataacacctaagagatatcctttagaattacatgtattttagcataaggaaattgaaaaagtaaaacatactggtttttttcaacaagaccatatgtaaattaaatagtgaaatgtgtatgagtttcagtagaactgtaccatcaacaatgtttccataaatatgcagagttctttcttttgtattgttatttacaatattgttaaattgaatgcatttgcaatttctaggattctaaagaattgagtacagaaagtagcaattttattatttgatgataatatgagaattactgtgccaatactgttttgataaataaatagatttttaaaaataaatgtattgtactta

SEQ ID NO: 9489 - DNA, 1275 bp, Homo sapiens
  source 1..1275: mol_type = unassigned DNA
attaaattcatgtattgaaaatattgttcagaccccatgtgacataactggagccagtgcagtgccatgaagaactacgagattagcctggatattaacttgtcttctagagaatagatttcatgttccattcttctgcaatggttaattcacacagaaaaccaatgtttaacattcacagaggattttactgcttaacagccatcttgccccaaatatgcatttgttctcagttctcagtgccatctagttatcacttcactgaggatcctggggctttcccagtagccactaatggggaacgatttccttggcaggagctaaggctccccagtgtggtcattcctctccattatgacctctttgtccaccccaatctcacctctctggactttgttgcatctgagaagatcgaagtcttggtcagcaatgctacccagtttatcatcttgcacagcaaagatcttgaaatcacgaatgccacccttcagtcagaggaagattcaagatacatgaaaccaggaaaagaactgaaagttttgagttaccctgctcatgaacaaattgcactgctggttccagagaaacttacgcctcacctgaaatactatgtggctatggacttccaagccaagttaggtgatggctttgaagggttttataaaagcacatacagaactcttggtggtgaaacaagaattcttgcagtaacagattttgagccaacccaggcacgcatggctttcccttgctttgatgaaccgttgttcaaagccaacttttcaatcaagatacgaagagagagcaggcatattgcactatccaacatgccaaaggttaagacaattgaacttgaaggaggtcttttggaagatcactttgaaactactgtaaaaatgagtacataccttgtagcctacatagtttgtgatttccactctctgagtggcttcacttcatcaggggtcaaggtgtccatctatgcatccccagacaaacggaatcaaacacattatgctttgcaggcatcactgaagctacttgatttttatgaaaagtactttgatatctactatccactctccaaactgggtatgttcaaattccacattattgtcttcatttttgctcataaaacttgctttgatctcttccctctttctctttctatgtgatttaaatgagcactgaggaattcagttagctcaggaaaaaataatttgttcctcagagatgattcttgagtgtagaaaataaaatatttatgacatgccc

SEQ ID NO: 9490 - DNA, 2309 bp, Homo sapiens
  source 1..2309: mol_type = unassigned DNA
gatacagtcccctcgtgcccaaggagacagggtggttacagacatggaaaatctgagaataatcacctctgataaagatcacagaagctgcccgggaggtgtttgattaaattcatgtattgaaaatattgttcagaccccatgtgacataactggagccagtgcagtgccatgaagaactacgagattagcctggatattaacttgtcttctagagaatagatttcatgttccattcttctgcaatggttaattcacacagaaaaccaatgtttaacattcacagaggattttactgcttaacagccatcttgccccaaatatgcatttgttctcagttctcagtgccatctagttatcacttcactgaggatcctggggctttcccagtagccactaatggggaacgatttccttggcaggagctaaggctccccagtgtggtcattcctctccattatgacctctttgtccaccccaatctcacctctctggactttgttgcatctgagaagatcgaagtcttggtcagcaatgctacccagtttatcatcttgcacagcaaagatcttgaaatcacgaatgccacccttcagtcagaggaagattcaagatacatgaaaccaggaaaagaactgaaagttttgagttaccctgctcatgaacaaattgcactgctggttccagagaaacttacgcctcacctgaaatactatgtggctatggacttccaagccaagttaggtgatggctttgaagggttttataaaagcacatacagaactcttggtggtgaaacaagaattcttgcagtaacagattttgagccaacccaggcacgcatggctttcccttgctttgatgaaccgttgttcaaagccaacttttcaatcaagatacgaagagagagcaggcatattgcactatccaacatgccaaaggttaagacaattgaacttgaaggaggtcttttggaagatcactttgaaactactgtaaaaatgagtacataccttgtagcctacatagtttgtgatttccactctctgagtggcttcacttcatcaggggtcaaggtgtccatctatgcatccccagacaaacggaatcaaacacattatgctttgcaggcatcactgaagctacttgatttttatgaaaagtactttgatatctactatccactctccaaactggatttaattgctattcctgactttgcacctggagccatggaaaattggggcctcattacatatagggagacgtcactgctttttgaccccaagacctcttctgcttccgataaactgtgggtcaccagagtcatagcccatgaactggcgcaccagtggtttggcaacctggtcacaatggaatggtggaatgatatttggcttaaggagggttttgcaaaatacatggaacttatcgctgttaatgctacatatccagagctgcaatttgatgactattttttgaatgtgtgttttgaagtaattacaaaagattcattgaattcatcccgccctatctccaaaccagcggaaaccccgactcaaatacaggaaatgtttgatgaagtttcctataacaagggagcttgtattttgaatatgctcaaggattttctgggtgaggagaaattccagaaaggaataattcagtacttaaagaagttcagctatagaaatgctaagaatgatgacttgtggagcagtctgtcaaatagttgtttagaaagtgattttacatctggtggagtttgtcattcggatcccaagatgacaagtaacatgctcgcctttctgggggaaaatgcagaggtcaaagagatgatgactacatggactctccagaaaggaatccccctgctggtggttaaacaagacgggtgttcactccgactgcaacaggagcgcttcctccagggggttttccaggaagaccctgaatggagggccctgcaggagaggtacctgtggcatatcccattgacctactccacgagttcttctaatgtgatccacagacacattctaaaatcaaagacagatactctggatctacctgaaaagaccagttgggtgaaatttaatgtggactcaaatggttactacatcgttcactatgagggtcatggatgggaccaactcattacacagctgaatcagaaccacacacttctcagacctaaggacagagtaggtctgattcatgatgtgtttcagctagttggtgcagggagactgaccctagacaaagctcttgacatgacttactacctccaacatgaaacaagcagcccc

SEQ ID NO: 9491 - DNA, 2433 bp, Homo sapiens
  source 1..2433: mol_type = unassigned DNA
ggcggcggttgggccggtgatacccgggcgctttatagtcccgccgcctcctcctccacctcctcctcctcctcctctcctcctggagcagaggaggttgtggcggtggctggagaaagcggcggcggaggatggaggaaggaggcggcggcgtacggagtctggtcccgggcgggccggtgttactggtcctctgcggcctcctggaggcgtccggcggcggccgagcccttcctcaactcagcgatgacatccctttccgagtcaactggcccggcaccgagttctctctgcccacaactggagttttatataaagaagataattatgtcatcatgacaactgcacataaagaaaaatataaatgcatacttccccttgtgacaagtggggatgaggaagaagaaaaggattataaaggccctaatccaagagagcttttggagccactatttaaacaaagcagttgttcctacagaattgagtcttattggacttacgaagtatgtcatggaaaacacattcggcagtaccatgaagagaaagaaactggtcagaaaataaatattcacgagtactaccttgggaatatgttggccaagaaccttctatttgaaaaagaacgagaagcagaagaaaaggaaaaatcaaatgagattcccactaaaaatatcgaaggtcagatgacaccatactatcctgtgggaatgggaaatggtacaccttgtagtttgaaacagaaccggcccagatcaagtactgtgatgtacatatgtcatcctgaatctaagcatgaaattctttcagtagctgaagttacaacttgtgaatatgaagttgtcattttgacaccactcttgtgcagtcatcctaaatataggttcagagcatctcctgtgaatgacatattttgtcaatcactgccaggatctccatttaagcccctcaccctgaggcagctggagcagcaggaagaaatactaagggtgccttttaggagaaataaagaggaagatttgcaatcaactaaagaagagagatttccagcgatccacaagtcgattgctattggctctcagccagtgctcactgttgggacaacccacatatccaaattgacagatgaccaactcataaaagagtttcttagtggttcttactgctttcgtgggggtgtcggttggtggaaatatgaattctgctatggcaaacatgtacatcaataccatgaggacaaggatagtgggaaaacctctgtggttgtcgggacatggaaccaagaagagcatattgaatgggctaagaagaatactgctagagcttatcatcttcaagacgatggtacccagacagtcaggatggtgtcacatttttatggaaatggagatatttgtgatataactgacaaaccaagacaggtgactgtaaaactaaagtgcaaagaatcagattcacctcatgctgttactgtatatatgctagagcctcactcctgtcaatatattcttggggttgaatctccagtgatctgtaaaatcttagatacagcagatgaaaatggacttctttctctccccaactaaaggatattaaagttaggggaaagaaaagatcattgaaagtcatgataatttctgtcccactgtgtctcattatagagttctcagccattggacctcttctaaaggatggtataaaatgactctcaaccactttgtgaatacatatgtgtatataagaggttattgataaacttctgaggcagacatttgtctcgctttttttcatttttgttgtgtcttataaactgactgtttttctttgcttggatactgtgattccaaaataaatctcatccaagcaagttagagtccagcctaatcaaatgtcataattgttgtacctattgaaagtttttaaataatagatttattatgtaaattatagtatatgtaagtagctaatgaagtaaagatcatgaagaaagaaattgataggtgtaaatgagagaccatgtaaaatatgtaaattctagtacctgaaatcctttcaacagatttttatatagcaactgctctctgcaagtagttaaactagaaactgggcacatggtagaggctcacatgggagttgtcctcacccttgttaatctcaagaaactcttatttataataggttgcttctctctcagaacttttatctattacttttttcttcttatgagtatgtttactctcagagtatctatctgatgtagacagttggtgatgcttctgagactcagaatggtttactctaacaaaacactgtgctgtctatcccttgtacttgcctactgtaatatggatttcacttctgaacagtttacagcacaatatttattttaaagtgaataaaatgtccacaagcagtgttgtcatgtagtcaatggca

SEQ ID NO: 9492 - DNA, 2271 bp, Homo sapiens
  source 1..2271: mol_type = unassigned DNA
ggcggcggttgggccggtgatacccgggcgctttatagtcccgccgcctcctcctccacctcctcctcctcctcctctcctcctggagcagaggaggttgtggcggtggctggagaaagcggcggcggaggatggaggaaggaggcggcggcgtacggagtctggtcccgggcgggccggtgttactggtcctctgcggcctcctggaggcgtccggcggcggccgagcccttcctcaactcagcgatgacatccctttccgagtcaactggcccggcaccgagttctctctgcccacaactggagttttatataaagaagataattatgtcatcatgacaactgcacataaagaaaaatataaatgcatacttccccttgtgacaagtggggatgaggaagaagaaaaggattataaaggccctaatccaagagagcttttggagccactatttaaacaaagcagttgttcctacagaattgagtcttattggacttacgaagtatgtcatggaaaacacattcggcagtaccatgaagagaaagaaactggtcagaaaataaatattcacgagtactaccttgggaatatgttggccaagaaccttctatttgaaaaagaacgagaagcagaagaaaaggaaaaatcaaatgagattcccactaaaaatatcgaaggtcagatgacaccatactatcctgtgggaatgggaaatggtacaccttgtagtttgaaacagaaccggcccagatcaagtactgtgatgtacatatgtcatcctgaatctaagcatgaaattctttcagtagctgaagttacaacttgtgaatatgaagttgtcattttgacaccactcttgtgcagtcatcctaaatataggttcagagcatctcctgtgaatgacatattttgtcaatcactgccaggatctccatttaagcccctcaccctgaggcagctggagcagcaggaagaaatactaagggtgccttttaggagaaataaagagggtgtcggttggtggaaatatgaattctgctatggcaaacatgtacatcaataccatgaggacaaggatagtgggaaaacctctgtggttgtcgggacatggaaccaagaagagcatattgaatgggctaagaagaatactgctagagcttatcatcttcaagacgatggtacccagacagtcaggatggtgtcacatttttatggaaatggagatatttgtgatataactgacaaaccaagacaggtgactgtaaaactaaagtgcaaagaatcagattcacctcatgctgttactgtatatatgctagagcctcactcctgtcaatatattcttggggttgaatctccagtgatctgtaaaatcttagatacagcagatgaaaatggacttctttctctccccaactaaaggatattaaagttaggggaaagaaaagatcattgaaagtcatgataatttctgtcccactgtgtctcattatagagttctcagccattggacctcttctaaaggatggtataaaatgactctcaaccactttgtgaatacatatgtgtatataagaggttattgataaacttctgaggcagacatttgtctcgctttttttcatttttgttgtgtcttataaactgactgtttttctttgcttggatactgtgattccaaaataaatctcatccaagcaagttagagtccagcctaatcaaatgtcataattgttgtacctattgaaagtttttaaataatagatttattatgtaaattatagtatatgtaagtagctaatgaagtaaagatcatgaagaaagaaattgataggtgtaaatgagagaccatgtaaaatatgtaaattctagtacctgaaatcctttcaacagatttttatatagcaactgctctctgcaagtagttaaactagaaactgggcacatggtagaggctcacatgggagttgtcctcacccttgttaatctcaagaaactcttatttataataggttgcttctctctcagaacttttatctattacttttttcttcttatgagtatgtttactctcagagtatctatctgatgtagacagttggtgatgcttctgagactcagaatggtttactctaacaaaacactgtgctgtctatcccttgtacttgcctactgtaatatggatttcacttctgaacagtttacagcacaatatttattttaaagtgaataaaatgtccacaagcagtgttgtcatgtagtcaatggca

SEQ ID NO: 9493 - DNA, 1756 bp, Homo sapiens
  source 1..1756: mol_type = unassigned DNA
ggcggcggttgggccggtgatacccgggcgctttatagtcccgccgcctcctcctccacctcctcctcctcctcctctcctcctggagcagaggaggttgtggcggtggctggagaaagcggcggcggaggatggaggaaggaggcggcggcgtacggagtctggtcccgggcgggccggtgttactggtcctctgcggcctcctggaggcgtccggcggcggccgagcccttcctcaactcagcgatgacatccctttccgagtcaactggcccggcaccgagttctctctgcccacaactggagttttatataaagaagataattatgtcatcatgacaactgcacataaagaaaaatataaatgcatacttccccttgtgacaagtggggatgaggaagaagaaaaggattataaaggccctaatccaagagagcttttggagccactatttaaacaaagcagttgttcctacagaattgagtcttattggacttacgaagtatgtcatggaaaacacattcggcagtaccatgaagagaaagaaactggtcagaaaataaatattcacgagtactaccttgggaatatgttggccaagaaccttctatttgaaaaagaacgagaagcagaagaaaaggaaaaatcaaatgagattcccactaaaaatatcgaaggtcagatgacaccatactatcctgtgggaatgggaaatggtacaccttgtagtttgaaacagaaccggcccagatcaagtactgtgatgtacatatgtcatcctgaatctaagcatgaaattctttcagtagctgaagttacaacttgtgaatatgaagttgtcattttgacaccactcttgtgcagtcatcctaaatataggttcagagcatctcctgtgaatgacatattttgtcaatcactgccaggatctccatttaagcccctcaccctgaggcagctggagcagcaggaagaaatactaagggtgccttttaggagaaataaagaggaagatttgcaatcaactaaagaagagagatttccagcgatccacaagtcgattgctattggctctcagccagtgctcactgttgggacaacccacatatccaaattgacagatgaccaactcataaaagagtttcttagtggttcttactgctttcgtgggggtgtcggttggtggaaatatgaattctgctatggcaaacatgtacatcaataccatgaggacaaggatagtgggaaaacctctgtggttgtcgggacatggaaccaagaagagcatattgaatgggctaagaagaatactgctagagcttatcatcttcaagacgatggtacccagacagtcaggtgcaaagaatcagattcacctcatgctgttactgtatatatgctagagcctcactcctgtcaatatattcttggggttgaatctccagtgatctgtaaaatcttagatacagcagatgaaaatggacttctttctctccccaactaaaggatattaaagttaggggaaagaaaagatcattgaaagtcatgataatttctgtcccactgtgtctcattatagagttctcagccattggacctcttctaaaggatggtataaaatgactctcaaccactttgtgaatacatatgtgtatataagaggttattgataaacttctgaggcagacatttgtctcgctttttttcatttttgttgtgtcttataaactgactgtttttctttgcttggatact

SEQ ID NO: 9494 - DNA, 5376 bp, Homo sapiens
  source 1..5376: mol_type = unassigned DNA
aggaggcgctgcggcagcgacggcggcgtcggcggcggccggggctgtcgcgggttggggcggttgggctggcagctgaggctcgtggccatggagtggggttctgagtcggctgctgtgaggcggcaccgcgtcggagtagagcgtcgagagggagcggcggccgcgccaccgccggagagggaggcccgagcgcaggagcctctggtggatgggtgcagcggcggcgggaggacgcggaagaggagccccgggggtagcggcggcgcgagcaggggcgcggggaccgggctgtctgaggtgcgcgccgcgctggggctcgcgctctacctgatcgcgctgcggacgctggtgcagctctcgctgcagcagctcgtgctacgcggggccgctggacaccgcggggagttcgacgcgctccaagccagggattatcttgaacacataacctccattggccccaggactacaggaagtccagaaaatgaaattctgaccgtgcactaccttttggaacagattaaactgattgaagtgcaaagcaacagccttcataagatttcagtagatgtacaacggcccacaggctcttttagcattgatttcttgggaggttttacaagctattatgacaacatcaccaatgttgtggtaaagctggaacccagagatggagcccagcatgctgtcttggctaattgtcattttgactcagtagcaaactcaccaggtgccagtgatgatgcagttagctgctcagtgatgctggaagtccttcgcgtcttgtcaacatcttcagaagccttgcatcatgctgtcatatttctctttaatggtgctgaggaaaatgtcttgcaagccagtcatggtttcattactcagcacccctgggctagcttgattcgtgcattcattaacctagaggcagcaggtgtaggagggaaagaacttgtattccaaacaggtcctgaaaatccttggttggttcaagcttatgtttcagcagctaaacacccttttgcttctgtggtggctcaggaggtttttcagagtggaatcattccttcagatactgactttcgtatctacagggattttgggaacattccaggaatagacttagcttttattgagaatggatacatttatcacaccaagtatgacacagcggacagaattctaacagattccattcagagagcaggtgacaacattttagcagttcttaagcatctagctacatctgatatgctggctgctgcttctaagtatcgacatggaaacatggtcttctttgatgtgctgggcctgtttgtcattgcctacccctctcgtattggctcaatcataaactacatggtggtaatgggtgttgttttgtacctgggcaaaaaatttttgcagcccaaacataagactggtaactacaagaaggacttcttgtgtggacttggcatcactttgatcagctggttcactagccttgttaccgttctcattatagcagtgttcatctctcttattggacagtctctctcatggtataaccacttctatgtctccgtttgtctgtatggaactgcaactgtagccaaaataatacttatacatactcttgcgaaaagattttattacatgaatgccagtgcccagtatctgggagaagtattttttgacatttcgctgtttgtccattgctgttttcttgttaccctcacttaccaaggactttgctcggcgtttattagtgctgtctgggtagcattcccattgctcacaaagctctgtgtgcataaggacttcaagcagcatggtgcccaaggaaaatttattgctttttaccttttggggatgtttattccttatctttatgcattgtacctcatctgggcagtatttgagatgtttacccctatcctcgggagaagtggttctgaaatcccacctgatgttgtgctggcatccattttggctggctgtacaatgattctctcgtcctattttattaacttcatctaccttgccaagagcacaaaaaaaaccatgctaactttaactttggtatgtgcaattacattcctccttgtttgcagtggaacattttttccatatagctccaatcctgctaatccgaagccaaagagagtgtttcttcagcatatgactagaacattccatgacttggaaggaaatgcagttaaacgggactctggaatatggatcaatgggtttgattatactggaatttctcacataacccctcacattcctgagatcaatgatagtatccgagctcactgtgaggagaatgcacctctttgtggttttccttggtatcttccagtgcactttctgatcaggaaaaactggtatcttcctgccccagaagtttctccaagaaatcctcctcatttccgactcatatccaaagaacagacaccttgggattctataaaattgacttttgaagcaacaggaccaagccatatgtccttctatgttcgagcccacaaagggtcaacactttctcagtggtctcttggcaatggcaccccagtcacaagtaaaggaggagactactttgtcttttactcccatggactccaggcctctgcatggcagttctggatagaagtgcaggtttcagaagaacatcctgaaggaatggtcaccgtggccattgctgcccactatctgtctggggaagacaagagatcccctcaactggatgctctgaaggaaaagttcccagattggacatttccctctgcctgggtgtgcacctacgatctctttgtattttaatcttgtggatgagctctaagtacatgcccagtggatactccatgtgacatggtttctccctatgttacgtggatgtttgtaacgtaagtcaatgaattttaatgatcatatgttcaaagagctttctgggttaacgcttttcagggccaagcactataagggtttagctgtggcgcagtgatgcatggcctgttgacacttgaaaatgccagtcttttggcacttcagcacatgtgggtactgccactacacacacgtcattttatatgaccttaaggacaaagccaacaatccacttcaatagctgcccctttaggatcaagaaagatgtacactgtcagagcattgttaatgagacaaaagttgtttccaatttaagccccaaaaccatttgttgtattagtggatggtgggtaaaatatcattcactgaggtaatgattccccttgagaatataactctgtgtaggtcactggaaagtgattgccatagggctgggagagaagcattgcactcttgaggctgtagcctgtgtcaagctgtttcttcaggcagcctctcaaatgtgctttgtctctctgtgctgaggcctggaccctgtgctgagctggtgactcactgtcctgacaagtggacacacagatgcactgctgtgctgctttcctgaggtggttttctatgcctgttttcctctgaaacatgtctgttacccctctccatcttaccaagttgaaaaggggaatatttggccacatacccctctggttttcgtaggttcttttggttcagaatattgtttgtgccagtacatgaccttaacttccttcctcagagcactgagctgccatctgggctattctggggtagaaggaaggctgggagtggtgggaattttataaatatttattctcttttctttgtttcataggagtcttgtgttatacaaggttagtccttcatggtataatcttactgatgcactgggcctatctttttgttttccagccagttgaatagattagtttttctcagtaacttactatccagcagactggctttcctgagacttgaggttgtggcttatactggaatgagaccactgtacgtgtaggtggttcagatcctgcgtaatggcagcatgaggacttaaaaggtggttttcattttgaagatggctatgtagcttgtaaggtgtatcacagcagtacctctcatggctttttggttccagcagtgagggcattggtgagatcaatggtaaactgtgcaagctttctttttatcattaggaaatgtgaaacgttggacaaattttgagttttaacaaggacaaaaagttgaaagaaaaggcacagttaacaaaaaagggtggctagatttatcttgggtgatggaggaaatgagagaggaatgctcttgaaaggtggtctgtggatctgtctgaatagaaagagcacagtaagtatgcattgccggagaaaacgtccttgaagctgcttgtctcatgtgtatgatgtgctttttaaatcatgcccctcgttgcctgcctaatctgtgactccctaaaaactaactgggcccatgtagatggggctgcaaccagagctgaataacatgttaggctcacacatgcatcagcactgcacactggaatcattgctcttcctggactttgtagaaatcagtctcaagtgcttcaagagtctggctcctgctacttttatctgtcaggtagcacataaggtttgcagggtttatattttgtatagaatcacagttgtggagaaaaagtaataatttctcaatgaattttaaaaatgggcctattttctatccccgtggttcatctgatataattagtgttccctgtgaattccccccctctatgggaaggatgcctttactctttatcagtaataaattatgactgttttcatattgccttagggttatttccctgtgtaaaccattgtcttttgttttggttttctttagcattatgaagctttggtattgtacaaggtcagtagtaagatgctcactagtctcagggcttgtgtaatattctgggaggtcatttaaatgccagaaatggtcaagcaattatacacagtatttatgactctgttaagcataccgtttgtctgtcacattagtagattctgagattaaaaaaaatttttaaagagtgatcatttaaataatttctaaaagggtcttttcaagctctaacaaagtcactaacaaatgcattattttctacagaattagatgttagtagtacagtactgcatattcagggaaaaagtgtgaggaattgatttcaaaatagttcgttcttgtgtttgacctaagaatgattgtcgcatgaagtgtttgtttttacagtttagcatatataaacaaacatgataggattccttaagatgttaccacccagggggccacaagccagcctgctgtctcaggaagctgtagaaggagtgtttgtcaatttcttgtcactggtttgctgacttactgaggattaattgttgccttacaatgttactgaaataaactgtttaatat

SEQ ID NO: 9495 - DNA, 2054 bp, Homo sapiens
  source 1..2054: mol_type = unassigned DNA
gatggagcccagcatgctgtcttggctaattgtcattttgactcagtagcaaactcaccaggtgccagtgatgatgcagttagctgctcagtgatgctggaagtccttcgcgtcttgtcaacatcttcagaagccttgcatcatgctgtcatatttctctttaatggtgctgaggaaaatgtcttgcaagccagtcatggtttcattactcagcacccctgggctagcttgattcgtgcattcattaacctagaggcagcaggtgtaggagggaaagaacttgtattccaaacaggtcctgaaaatccttggttggttcaagcttatgtttcagcagctaaacacccttttgcttctgtggtggctcaggaggtttttcagagtggaatcattccttcagatactgactttcgtatctacagggattttgggaacattccaggaatagacttagcttttattgagaatggatacatttatcacaccaagtatgacacagcggacagaattctaacagattccattcagagagcaggtgacaacattttagcagttcttaagcatctagctacatctgatatgctggctgctgcttctaagtatcgacatggaaacatggtcttctttgatgtgctgggcctgtttgtcattgcctacccctctcgtattggctcaatcataaactacatggtggtaatgggtgttgttttgtacctgggcaaaaaatttttgcagcccaaacataagactggtaactacaagaaggacttcttgtgtggacttggcatcactttgatcagctggttcactagccttgttaccgttctcattatagcagtgttcatctctcttattggacagtctctctcatggtataaccacttctatgtctccgtttgtctgtatggaactgcaactgtagccaaaataatacttatacatactcttgcgaaaagattttattacatgaatgccagtgcccagtatctgggagaagtattttttgacatttcgctgtttgtccattgctgttttcttgttaccctcacttaccaaggactttgctcggcgtttattagtgctgtctgggtagcattcccattgctcacaaagctctgtgtgcataaggacttcaagcagcatgattaacttcatctaccttgccaagagcacaaaaaaaaccatgctaactttaactttggtatgtgcaattacattcctccttgtttgcagtggaacattttttccatatagctccaatcctgctaatccgaagccaaagagagtgtttcttcagcatatgactagaacattccatgacttggaaggaaatgcagttaaacgggactctggaatatggatcaatgggtttgattatactggaatttctcacataacccctcacattcctgagatcaatgatagtatccgagctcactgtgaggagaatgcacctctttgtggttttccttggtatcttccagtgcactttctgatcaggaaaaactggtatcttcctgccccagaagtttctccaagaaatcctcctcatttccgactcatatccaaagaacagacaccttgggattctataaaattgacttttgaagcaacaggaccaagccatatgtccttctatgttcgagcccacaaagggtcaacactttctcagtggtctcttggcaatggcaccccagtcacaagtaaaggaggagactactttgtcttttactcccatggactccaggcctctgcatggcagttctggatagaagtgcaggtttcagaagaacatcctgaaggaatggtcaccgtggccattgctgcccactatctgtctggggaagacaagagatcccctcaactggatgctctgaaggaaaagttcccagattggacatttccctctgcctgggtgtgcacctacgatctctttgtattttaatcttgtggatgagctctaagtacatgcccagtggatactccatgtgacatggtttctccctatgttacgtggatgtttgtaacgtaagtcaatgaattttaatgatcat

SEQ ID NO: 9496 - DNA, 3554 bp, Homo sapiens
  source 1..3554: mol_type = unassigned DNA
tcgcgggttggggcggttgggctggcagctgaggctcgtggccatggagtggggttctgagtcggctgctgtgaggcggcaccgcgtcggagtagagcgtcgagagggagcggcggccgcgccaccgccggagagggaggcccgagcgcaggagcctctggtggatgggtgcagcggcggcgggaggacgcggaagaggagccccgggggtagcggcggcgcgagcaggggcgcggggaccgggctgtctgaggtgcgcgccgcgctggggctcgcgctctacctgatcgcgctgcggacgctggtgcagctctcgctgcagcagctcgtgctacgcggggccgctggacaccgcggggagttcgacgcgctccaagccagggattatcttgaacacataacctccattggccccaggactacaggaagtccagaaaatgaaattctgaccgtgcactaccttttggaacagattaaactgattgaagtgcaaagcaacagccttcataagatttcagtagatgtacaacggcccacaggctcttttagcattgatttcttgggaggttttacaagctattatgacaacatcaccaatgttgtggtaaagctggaacccagagatggagcccagcatgctgtcttggctaattgtcattttgactcagtagcaaactcaccaggtgccagtgatgatgcagttagctgctcagtgatgctggaagtccttcgcgtcttgtcaacatcttcagaagccttgcatcatgctgtcatatttctctttaatggtgctgaggaaaatgtcttgcaagccagtcatggtttcattactcagcacccctgggctagcttgattcgtgcattcattaacctagaggcagcaggtgtaggagggaaagaacttgtattccaaacaggtcctgaaaatccttggttggttcaagcttatgtttcagcagctaaacacccttttgcttctgtggtggctcaggaggtttttcagagtggaatcattccttcagatactgactttcgtatctacagggattttgggaacattccaggaatagacttagcttttattgagaatggatacatttatcacaccaagtatgacacagcggacagaattctaacagattccattcagagagcaggtgacaacattttagcagttcttaagcatctagctacatctgatatgctggctgctgcttctaagtatcgacatggaaacatggtcttctttgatgtgctgggcctgtttgtcattgcctacccctctcgtattggctcaatcataaactacatggtggtaatgggtgttgttttgtacctgggcaaaaaatttttgcagcccaaacataagactggtaactacaagaaggacttcttgtgtggacttggcatcactttgatcagctggttcactagccttgttaccgttctcattatagcagtgttcatctctcttattggacagtctctctcatggtataaccacttctatgtctccgtttgtctgtatggaactgcaactgtagccaaaataatacttatacatactcttgcgaaaagattttattacatgaatgccagtgcccagtatctgggagaagtattttttgacatttcgctgtttgtccattgctgttttcttgttaccctcacttaccaaggactttgctcggcgtttattagtgctgtctgggtagcattcccattgctcacaaagctctgtgtgcataaggacttcaagcagcatggtgcccaaggaaaatttattgctttttaccttttggggatgtttattccttatctttatgcattgtacctcatctgggcagtatttgagatgtttacccctatcctcgggagaagtggttctgaaatcccacctgatgttgtgctggcatccattttggctggctgtacaatgattctctcgtcctattttattaacttcatctaccttgccaagagcacaaaaaaaaccatgctaactttaactttggtatgtgcaattacattcctccttgtttgcagtggaacattttttccatatagctccaatcctgctaatccgaagccaaagagagtgtttcttcagcatatgactagaacattccatgacttggaaggaaatgcagttaaacgggactctggaatatggatcaatgggtttgattatactggaatttctcacataacccctcacattcctgagatcaatgatagtatccgagctcactgtgaggagaatgcacctctttgtggttttccttggtatcttccagtgcactttctgatcaggaaaaactggtatcttcctgccccagaagtttctccaagaaatcctcctcatttccgactcatatccaaagaacagacaccttgggattctataaaattgacttttgaagcaacaggaccaagccatatgtccttctatgttcgagcccacaaagggtcaacactttctcagtggtctcttggcaatggcaccccagtcacaagtaaaggaggagactactttgtcttttactcccatggactccaggcctctgcatggcagttctggatagaagtgcaggtttcagaagaacatcctgaaggaatggtcaccgtggccattgctgcccactatctgtctggggaagacaagagatcccctcaactggatgctctgaaggaaaagttcccagattggacatttccctctgcctgggtgtgcacctacgatctctttgtattttaatcttgtggatgagctctaagtacatgcccagtggatactccatgtgacatggtttctccctatgttacgtggatgtttgtaacagggaccagatggcatacttagtgttttctgtaaactgaatttactggcaggaacattttcagctgactgggataaactgatgcttcgattcctgaagaactcaaatccaccacttgaactgggttcctaggattacacaccatatgcagtaccattagagaaagatgctacgtgggtgtatggcctagagaagatgtgtaacttttgcaactaacctgagctgtgggtgtggatggaggtgtctcagattctccagagccaatggctttaagaaatcgaatcatgtgtcgacaaaggtcccacttgccttgttctagtgctgtgttgaatagaagggtagcatgttgcctacttactgcagggacttccatattctacaaaaaacaaccaggacagcattctttttatactacacaatttgggaagatatgagcaattctttatctcgttttctaaactcaaagaatgtagccacaccaccacaggggttagtttaataataagattaaaaagtaccatacaaggaaaagcgaggcaagtactcttctggtgtatgtaaactataatttattaaactcctactacatgccagatagcatacatatactttaagtcatttcatttatttctcccagtgactctgcagataggcatatcatttgtattttacaagtgaggaaactgagttaagtaaattgttgaagatcagcag

SEQ ID NO: 9497 - DNA, 1637 bp, Homo sapiens
  source 1..1637: mol_type = unassigned DNA
cgtattggctcaatcataaactacatggtggtaatgggtgttgttttgtacctgggcaaaaaatttttgcagcccaaacataagactggtaactacaagaaggacttcttgtgtggacttggcatcactttgatcagctggttcactagccttgttaccgttctcattatagcagtgttcatctctcttattggacagtctctctcatggtataaccacttctatgtctccgtttgtctgtatggaactgcaactgtagccaaaataatacttatacatactcttgcgaaaagattttattacatgaatgccagtgcccagtatctgggagaagtattttttgacatttcgctgtttgtccattgctgttttcttgttaccctcacttaccaaggactttgctcggcgtttattagtgctgtctgggtagcattcccattgctcacaaagctctgtgtgcataaggacttcaagcagcatggtgcccaaggaaaatttattgctttttaccttttggggatgtttattccttatctttatgcattgtacctcatctgggcagtatttgagatgtttacccctatcctcgggagaagtggttctgaaatcccacctgatgttgtgctggcatccattttggctggctgtacaatgattctctcgtcctattttattaacttcatctaccttgccaagagcacaaaaaaaaccatgctaactttaactttggtatgtgcaattacattcctccttgtttgcagtggaacattttttccatatagctccaatcctgctaatccgaagccaaagagagtgtttcttcagcatatgactagaacattccatgacttggaaggaaatgcagttaaacgggactctggaatatggatcaatgggtttgattatactggaatttctcacataacccctcacattcctgagatcaatgatagtatccgagctcactgtgaggagaatgcacctctttgtggttttccttggtatcttccagtgcactttctgatcaggaaaaactggtatcttcctgccccagaagtttctccaagaaatcctcctcatttccgactcatatccaaagaacagacaccttgggattctataaaattgacttttgaagcaacagcctgcctgcctatccttcagattttggacttgccagcctcaacaatcatgaccaagccatatgtccttctatgttcgagcccacaaagggtcaacactttctcagtggtctcttggcaatggcaccccagtcacaagtaaaggaggagactactttgtcttttactcccatggactccaggcctctgcatggcagttctggatagaagtgcaggtttcagaagaacatcctgaaggaatggtcaccgtggccattgctgcccactatctgtctggggaagacaagagatcccctcaactggatgctctgaaggaaaagttcccagattggacatttccctctgcctgggtgtgcacctacgatctctttgtattttaatcttgtggatgagctctaagtacatgcccagtggatactccatgtgacatggtttctccctatgttacgtggatgtttgtaacgtaagtcaatgaattttaatgatcatatgttc

SEQ ID NO: 9498 - DNA, 1735 bp, Homo sapiens
  source 1..1735: mol_type = unassigned DNA
cgtggccccaccctctcaccctagacagatgggagcctcctggggtgtccacgtgagcgcgcgtgagtccgcccccccagtcacgtgaccgctgactcggggcgttctccactatcgcttacctacctccctctgcaggaacccggcgatatggctgccgctgtgccccgcgccgcatttctctccccgctgcttccccttctcctgggcttcctgctcctctccgctccgcatggcggcagcggcctgcacaccaagggcgcccttcccctggatacggtcactttctacaaggtcattcccaaaagcaagttcgtcttggtgaagttcgacacccagtacccctacggtgagaagcaggatgagttcaagcgtcttgctgaaaactcggcttccagcgatgatctcttggtggcagaggtggggatctcagattatggtgacaagctgaacatggagctgagtgagaaatacaagctggacaaagagagctacccagtcttctacctcttccgggatggggactttgagaacccagtcccatacactggggcagttaaggttggagccatccagcgctggctgaaggggcaaggggtctacctaggtatgcctggttgcctgcctgtatacgacgccctggccggggagttcatcagggcctctggtgtggaggcccgccaggccctcttgaagcaggggcaagataacctctcaagtgtgaaggagactcagaagaagtgggccgagcaatacctgaagatcatggggaagatcttagaccaaggggaggacttcccagcatcagagatgacacggatcgccaggctgattgagaagaacaagatgagtgacgggaagaaggaggagctccagaagagcttaaacatcctgactgccttccagaagaagggggccgagaaagaggagctgtaaaaaggctgtctgtgattttccagggtttggtgggggtagggaggggagagttaacctgctggctgtgagtcccttgtggaatataagggggtagtgggaaaagtggtactaacccacgattctgagccctgagtatgcctggacattgatgctaacatgaccatgcttgggatgtctctagctggtctggggatagctggagcacttactcaggtggctggtgaaatgacacctcagaaggaatgagtgctatagagaggagagaggagtgtactgcccaggtctttgacagatgtaattctcattcaattaaagtttcagtgttttggttaagtggacctgaagccattcttttttcttttcaaattatactttcgtctatgacctgctttcctctttgaatctaagctggtatagactccactttcccagggtaacaaactatcctcataacactgtggaaactggcatacctttgttattttccagtgatattcagactgacatggattgactgtcaatggtaaagtttgtctattttccagtccttaaaactcaatagcagtattgatgaatatattgaaccaacattgatggaccatggtgtaattattttccatgctttgtgaggtacacatagcaaattcttagttttactgatatattctgtgacttggatttacacagctaaatgatatagtccgatttcaaaattaaaaaatattttccatctaaatcactatcactaaataaatactaacttctagaaagcagaataaagagcacttgtgccaacatt

SEQ ID NO: 9499 - DNA, 1333 bp, Homo sapiens
  source 1..1333: mol_type = unassigned DNA
gagcctcctggggtgtccacgtgagcgcgcgtgagtccgcccccccagtcacgtgaccgctgactcggggcgttctccactatcgcttacctacctccctctgcaggaacccggcgatatggctgccgctgtgccccgcgccgcatttctctccccgctgcttccccttctcctgggcttcctgctcctctccgctccgcatggcggcagcggcctgcacaccaagggcgcccttcccctggatacggtcactttctacaagattatggtgacaagctgaacatggagctgagtgagaaatacaagctggacaaagagagctacccagtcttctacctcttccgggatggggactttgagaacccagtcccatacactggggcagttaaggttggagccatccagcgctggctgaaggggcaaggggtctacctaggtatgcctggttgcctgcctgtatacgacgccctggccggggagttcatcagggcctctggtgtggaggcccgccaggccctcttgaagcaggggcaagataacctctcaagtgtgaaggagactcagaagaagtgggccgagcaatacctgaagatcatggggaagatcttagaccaaggggaggacttcccagcatcagagatgacacggatcgccaggctgattgagaagaacaagatgagtgacgggaagaaggaggagctccagaagagcttaaacatcctgactgccttccagaagaagggggccgagaaagaggagctgtaaaaaggctgtctgtgattttccagggtttggtgggggtagggaggggagagttaacctgctggctgtgagtcccttgtggaatataagggggtagtgggaaaagtggtactaacccacgattctgagccctgagtatgcctggacattgatgctaacatgaccatgcttgggatgtctctagctggtctggggatagctggagcacttactcaggtggctggtgaaatgacacctcagaaggaatgagtgctatagagaggagagaggagtgtactgcccaggtctttgacagatgtaattctcattcaattaaagtttcagtgttttggttaagtggacctgaagccattcttttttcttttcaaattatactttcgtctatgacctgctttcctctttgaatctaagctggtatagactccactttcccagggtaacaaactatcctcataacactgtggaaactggcatacctttgttattttccagtgatattcagactgacatggattgactgtcaatggtaaagtttgtctattttccagtccttaaaactcaatagcagtat

SEQ ID NO: 9500 - DNA, 3616 bp, Homo sapiens
  source 1..3616: mol_type = unassigned DNA
gcttgtacctgctgtgcagtgaggactccaggaactgatgatgaaccggcacggtcctcggcacgtggcaagttctccataagtgggctcagtaaaatccctctcccgggaaagcgccccaccgtgtttggtggggtgactgggacgcgaggatgcggctgggagtgtgatgagaagggcggggatcggcgaggactccaggctggggttgcaggcccagccaggggcggagccttctccgggtcgggcggggacagagcgctcccttggaggcacccagggacctggccagccgtgcagctgcccaggcgctatggcgagtgcggtcagggggtcgaggccgtggccccggctggggctccagctccagttcgcggcgctgctgctcgggacgctgagtccacaggttcatactctcaggccagagaacctcctgctggtgtccaccttggatggaagtctccacgcactaagcaagcagacaggggacctgaagtggactctgagggatgatcccgtcatcgaaggaccaatgtacgtcacagaaatggcctttctctctgacccagcagatggcagcctgtacatcttggggacccaaaaacaacagggattaatgaaactgccattcaccatccctgagctggttcatgcctctccctgccgcagctctgatggggtcttctacacaggccggaagcaggatgcctggtttgtggtggaccctgagtcaggggagacccagatgacactgaccacagagggtccctccaccccccgcctctacattggccgaacacagtatacggtcaccatgcatgacccaagagccccagccctgcgctggaacaccacctaccgccgctactcagcgccccccatggatggctcacctgggaaatacatgagccacctggcgtcctgcgggatgggcctgctgctcactgtggacccaggaagcgggacggtgctgtggacacaggacctgggcgtgcctgtgatgggcgtctacacctggcaccaggacggcctgcgccagctgccgcatctcacgctggctcgagacactctgcatttcctcgccctccgctggggccacatccgactgcctgcctcaggcccccgggacacagccaccctcttctctaccttggacacccagctgctaatgacgctgtatgtggggaaggatgaaactggcttctatgtctctaaagcactggtccacacaggagtggccctggtgcctcgtggactgaccctggcccccgcagatggccccaccacagatgaggtgacactccaagtctcaggagagcgagagggctcacccagcactgctgttagatacccctcaggcagtgtggccctcccaagccagtggctgctcattggacaccacgagctacccccagtcctgcacaccaccatgctgagggtccatcccaccctggggagtggaactgcagagacaagacctccagagaatacccaggccccagccttcttcttggagctattgagcctgagccgagagaaactttgggactccgagctgcatccagaagaaaaaactccagactcttacttggggctgggaccccaagacctgctggcagctagcctcactgctgtcctcctgggagggtggattctctttgtgatgaggcagcaacagccgcaggtggtggagaagcagcaggagacccccctggcacctgcagactttgctcacatctcccaggatgcccagtccctgcactcgggggccagccggaggagccagaagaggcttcagagtccctcaaagcaagcccagccactcgacgaccctgaagctgagcaactcaccgtagtggggaagatttccttcaatcccaaggacgtgctgggccgcggggcaggcgggactttcgttttccggggacagtttgagggacgggcagtggctgtcaagcggctcctccgcgagtgctttggcctggttcggcgggaagttcaactgctgcaggagtctgacaggcaccccaacgtgctccgctacttctgcaccgagcggggaccccagttccactacattgccctggagctctgccgggcctccttgcaggagtacgtagaaaacccggacctggatcgcgggggtctggagcccgaggtcgtgctgcagcagctgatgtctggcctggcccacctgcactctttacacatagtgcaccgggacctgaagccaggaaatattctcatcaccgggcctgacagccagggcctgggcagagtggtgctctcagacttcggcctctgcaagaagctgcctgctggccgctgtagcttcagcctccactccggcatccccggcacggaaggctggatggcgcccgagcttctgcagctcctgccaccagacagtcctaccagcgctgtggacatcttctctgcaggctgcgtgttctactacgtgctttctggtggcagccacccctttggagacagtctttatcgccaggcaaacatcctcacaggggctccctgtctggctcacctggaggaagaggtccacgacaaggtggttgcccgggacctggttggagccatgttgagcccactgccgcagccacgcccctctgccccccaggtgctggcccaccccttcttttggagcagagccaagcaactccagttcttccaggacgtcagtgactggctggagaaggagtccgagcaggagcccctggtgagggcactggaggcgggaggctgcgcagtggtccgggacaactggcacgagcacatctccatgccgctgcagacagatctgagaaagttccggtcctataaggggacatcagtgcgagacctgctccgtgctgtgaggaacaagaagcaccactacagggagctcccagttgaggtgcgacaggcactcggccaagtccctgatggcttcgtccagtacttcacaaaccgcttcccacggctgctcctccacacgcaccgagccatgaggagctgcgcctctgagagcctcttcctgccctactacccgccagactcagaggccaggaggccatgccctggggccacagggaggtgaggtgggctggatgccacacagatggtctccgtgctggctcactgaagagctgagcctgtggctggcctcagaatcaggctgggtgcagtggctcacacctgtaatcccagcattttgggaggctgagtgagaggatcacttgagctcaggagttcgagaccagcctggccaacatggcaacaccccatttctacaaaaaatttgtaaaattagccaggcatggtggcgcacgcctgtagtcccagctgcttgggaggctgaggtgggagaatcacttgagcccaggagttcgaggctgcagtgagccaggatcatgccactgcactccagcctggtccacagagagacactgtcaccccctttcccccacaagactggcagaggctgggcagcctggggctgatgaagcagagatgttcgctggatcccaggccctggcacccctcaggaaatacaagaaaaagaatattcacatctgtttaatgtgcataaagccaaggaaaggacagttccgaattcaat

SEQ ID NO: 9501 - DNA, 3169 bp, Homo sapiens
  source 1..3169: mol_type = unassigned DNA
acccagggacctggccagccgtgcagctgcccaggcgctatggcgagtgcggtcagggggtcgaggccgtggccccggctggggctccagctccagttcgcggcgctgctgctcgggacgctgagtccacaggttcatactctcaggccagagaacctcctgctggtgtccaccttggatggaagtctccacgcactaagcaagcagacaggggacctgaagtggactctgagggatgatcccgtcatcgaaggaccaatgtacgtcacagaaatggcctttctctctgacccagcagatggcagcctgtacatcttggggacccaaaaacaacagggattaatgaaactgccattcaccatccctgagctggttcatgcctctccctgccgcagctctgatggggtcttctacacaggccggaagcaggatgcctggtttgtggtggaccctgagtcaggggagacccagatgacactgaccacagagggtccctccaccccccgcctctacattggccgaacacagtatacggtcaccatgcatgacccaagagccccagccctgcgctggaacaccacctaccgccgctactcagcgccccccatggatggctcacctgggaaatacatgagccacctggcgtcctgcgggatgggcctgctgctcactgtggacccaggaagcgggacggtgctgtggacacaggacctgggcgtgcctgtgatgggcgtctacacctggcaccaggacggcctgcgccagctgccgcatctcacgctggctcgagacactctgcatttcctcgccctccgctggggccacatccgactgcctgcctcaggcccccgggacacagccaccctcttctctaccttggacacccagctgctaatgacgctgtatgtggggaaggatgaaactggcttctatgtctctaaagcactggtccacacaggagtggccctggtgcctcgtggactgaccctggcccccgcagatggccccaccacagatgaggtgacactccaagtctcaggagagcgagagggctcacccagcactgctgttagatacccctcaggcagtgtggccctcccaagccagtggctgctcattggacaccacgagctacccccagtcctgcacaccaccatgctgagggtccatcccaccctggggagtggaactgcagagacaagacctccagagaatacccaggccccagccttcttcttggagcaacagccgcaggtggtggagaagcagcaggagacccccctggcacctgcagactttgctcacatctcccaggatgcccagtccctgcactcgggggccagccggaggagccagaagaggcttcagagtccctcaaagcaagcccagccactcgacgaccctgaagctgagcaactcaccgtagtggggaagatttccttcaatcccaaggacgtgctgggccgcggggcaggcgggactttcgttttccggggacagtttgagggacgggcagtggctgtcaagcggctcctccgcgagtgctttggcctggttcggcgggaagttcaactgctgcaggagtctgacaggcaccccaacgtgctccgctacttctgcaccgagcggggaccccagttccactacattgccctggagctctgccgggcctccttgcaggagtacgtagaaaacccggacctggatcgcgggggtctggagcccgaggtcgtgctgcagcagctgatgtctggcctggcccacctgcactctttacacatagtgcaccgggacctgaagccaggaaatattctcatcaccgggcctgacagccagggcctgggcagagtggtgctctcagacttcggcctctgcaagaagctgcctgctggccgctgtagcttcagcctccactccggcatccccggcacggaaggctggatggcgcccgagcttctgcagctcctgccaccagacagtcctaccagcgctgtggacatcttctctgcaggctgcgtgttctactacgtgctttctggtggcagccacccctttggagacagtctttatcgccaggcaaacatcctcacaggggctccctgtctggctcacctggaggaagaggtccacgacaaggtggttgcccgggacctggttggagccatgttgagcccactgccgcagccacgcccctctgccccccaggtgctggcccaccccttcttttggagcagagccaagcaactccagttcttccaggacgtcagtgactggctggagaaggagtccgagcaggagcccctggtgagggcactggaggcgggaggctgcgcagtggtccgggacaactggcacgagcacatctccatgccgctgcagacagatctgagaaagttccggtcctataaggggacatcagtgcgagacctgctccgtgctgtgaggaacaagaagcaccactacagggagctcccagttgaggtgcgacaggcactcggccaagtccctgatggcttcgtccagtacttcacaaaccgcttcccacggctgctcctccacacgcaccgagccatgaggagctgcgcctctgagagcctcttcctgccctactacccgccagactcagaggccaggaggccatgccctggggccacagggaggtgaggtgggctggatgccacacagatggtctccgtgctggctcactgaagagctgagcctgtggctggcctcagaatcaggctgggtgcagtggctcacacctgtaatcccagcattttgggaggctgagtgagaggatcacttgagctcaggagttcgagaccagcctggccaacatggcaacaccccatttctacaaaaaatttgtaaaattagccaggcatggtggcgcacgcctgtagtcccagctgcttgggaggctgaggtgggagaatcacttgagcccaggagttcgaggctgcagtgagccaggatcatgccactgcactccagcctggtccacagagagacactgtcaccccctttcccccacaagactggcagaggctgggcagcctggggctgatgaagcagagatgttcgctggatcccaggccctggcacccctcaggaaatacaagaaaaagaatattcacatctgtttaatgtgcataaagccaaggaaagg

SEQ ID NO: 9502 - DNA, 2479 bp, Homo sapiens
  source 1..2479: mol_type = unassigned DNA
agtgacaggagccgaagcagcagcgcaggttgtccccgtttcccctcccccttcccttctccggttgccttcccgggccccttacactccacagtcccggtcccgccatgtcccagaaacaagaagaagagaaccctgcggaggagaccggcgaggagaagcaggacacgcaggagaaagaaggtattctgcctgagagagctgaagaggcaaagctaaaggccaaatacccaagcctaggacaaaagcctggaggctccgacttcctcatgaagagactccagaaagggcaaaagtactttgactcaggagactacaacatggccaaagccaagatgaagaataagcagctgccaagtgcaggaccagacaagaacctggtgactggtgatcacatccccaccccacaggatctgccccagagaaagtcctcgctcgtcaccagcaagcttgcggggtaacctgagcccccctctcctccccttcctcaaccactggacgtttatatattataggcagggatgaaatgggcacctagtcagatcttctcagcttgctagccagaaatgactgtgattctgctgggggctgctgagaaggtaatgtaggttgaaaaggggctctaagtttatttatttcgttagattgacacttccacacactccctgtagtccaggtagggcccagaaataggaaaggctaggattggataatgctgcaaatgctttttttgtgtgagaaactggagagatgtgatttctccttttgggagagaatgtcccaaaattgattaggctgagccttgggaatagtttggcaggtttaacatcccaaggctaacctaacgtagttgggaaaggtagattgaatgagacatgttttctgtgcttctaagtgttctgtcccttaggctgctattgcttcatgtttccattatggcaggtttagagaatccttaaaaagaaaaattgacttgcttgcctaaaactacagtgcccccttagcctccattacttagtatctcttacagtttgctctggctctcaaataatataaagattgatgaacattattcacagaaaatgggcaccttctctctctcttccagcatgttgcttttgaaagtatcatgggatagtgggacgagcactggtttaggagtcaagatatctgggttctcactctactcagtcccagcagagctgttgtataaccttgattaagtcatttagcctctctggatttctatttcctcatctgtaaaatagagttaaatgtatgtaagattgattctgattctgaagtcttaactgccagcagaaaaactccatactgttcattgtaaaactaaaagtgaggaaggctcgtgggtggtgaacctctgctctgtaatactgggaaagtactacagaggggaaccatttgagggatacatgaggagagagtaaattgaggtttggggattataaattcaggcaagagaaccttatagatatcacagtcttgagggtcaaaaaaaaatacttaggaagctagccatggaagcttcttgcctctgacccagcccactttcccagcctacctctgggccttagctgctaaaaagcttctctggcagcggagctgcaggcctgaggaaacatgctcagtcatgcacatgtgttgacccatgtttcagatgcagtctgatgccaggtatattgttagggaaagaggaagaagggtaaactgagctagcccctggggctgagtactcctgcagggctggaggaacaggttcttagaagatgattcaccttggaggaagctggggaaagtggttagggagggagaggaggaagactgagaaatctctgcatccccagaactcagcaacccagctcttttatcatgaggagaggtagccatgctgactcatgaacaggtggaggaaaggggttgcaggtgaccagcatcttcaatctagttaccaccagcttggctagaattttattgaacgcaacttgctagttatgacagagaggaccagggtgagaactaatgctcaagagagcaagattctgtaatcctcttgccctctcacatcacaaattctgatatgccaaacatttggcccaatgagaatgactgatagacttgctgatgtgcatgtggggggatgaggtgtgtatatgcctttctcctgactggccattcagtgttcaggctgtcattcaaattggataggagaaagttggtgaggaaggaatggagagagcaggatccctggactccctggtccccaaactccttgactgtcacttgtaattgtatataatttttgtgtttcttgctccatttcctcatgctgtcatccttaaagtccatctgggaaggggaaaatgctgaacaccattgtatagtttcttcaactgtcccagccatgttgtacatagatatgtcatgttattatatatataaatatatatataattttgta

SEQ ID NO: 9503 - DNA, 633 bp, Homo sapiens
  source 1..633: mol_type = unassigned DNA
gtgacaggagccgaagcagcagcgcaggttgtccccgtttcccctcccccttcccttctccggttgccttcccgggccccttacactccacagtcccggtcccgccatgtcccagaaacaagaagaagagaaccctgcggaggagaccggcgaggagaagcaggacacgcaggagaaagaaggtattctgcctgagagagctgaagaggcaaagctaaaggccaaatacccaagcctaggacaaaagcctggaggctccgacttcctcatgaagagactccagaaaggggattataaatcattacattggagtgtgcttctctgtgcggatgaaatgcaaaagtactttgactcaggagactacaacatggccaaagccaagatgaagaataagcagctgccaagtgcaggaccagacaagaacctggtgactggtgatcacatccccaccccacaggatctgccccagagaaagtcctcgctcgtcaccagcaagcttgcgggtggccaagttgaatgatgctgcccggggctctgccagatcctgagacgcttcccctccctgccccacccgggtcctgtgctggctcctgccccttcctgcttttgcagccaggggtcaggaggtggctc

SEQ ID NO: 9504 - DNA, 2546 bp, Homo sapiens
  source 1..2546: mol_type = unassigned DNA
agtgacaggagccgaagcagcagcgcaggttgtccccgtttcccctcccccttcccttctccggttgccttcccgggccccttacactccacagtcccggtcccgccatgtcccagaaacaagaagaagagaaccctgcggaggagaccggcgaggagaagcaggacacgcaggagaaagaaggtattctgcctgagagagctgaagaggcaaagctaaaggccaaatacccaagcctaggacaaaagcctggaggctccgacttcctcatgaagagactccagaaaggggtatggggcatagtctcttaccctctttctttggagctaaaggaggttcttcgaatgaagtctgtagagcaaaagtactttgactcaggagactacaacatggccaaagccaagatgaagaataagcagctgccaagtgcaggaccagacaagaacctggtgactggtgatcacatccccaccccacaggatctgccccagagaaagtcctcgctcgtcaccagcaagcttgcggggtaacctgagcccccctctcctccccttcctcaaccactggacgtttatatattataggcagggatgaaatgggcacctagtcagatcttctcagcttgctagccagaaatgactgtgattctgctgggggctgctgagaaggtaatgtaggttgaaaaggggctctaagtttatttatttcgttagattgacacttccacacactccctgtagtccaggtagggcccagaaataggaaaggctaggattggataatgctgcaaatgctttttttgtgtgagaaactggagagatgtgatttctccttttgggagagaatgtcccaaaattgattaggctgagccttgggaatagtttggcaggtttaacatcccaaggctaacctaacgtagttgggaaaggtagattgaatgagacatgttttctgtgcttctaagtgttctgtcccttaggctgctattgcttcatgtttccattatggcaggtttagagaatccttaaaaagaaaaattgacttgcttgcctaaaactacagtgcccccttagcctccattacttagtatctcttacagtttgctctggctctcaaataatataaagattgatgaacattattcacagaaaatgggcaccttctctctctcttccagcatgttgcttttgaaagtatcatgggatagtgggacgagcactggtttaggagtcaagatatctgggttctcactctactcagtcccagcagagctgttgtataaccttgattaagtcatttagcctctctggatttctatttcctcatctgtaaaatagagttaaatgtatgtaagattgattctgattctgaagtcttaactgccagcagaaaaactccatactgttcattgtaaaactaaaagtgaggaaggctcgtgggtggtgaacctctgctctgtaatactgggaaagtactacagaggggaaccatttgagggatacatgaggagagagtaaattgaggtttggggattataaattcaggcaagagaaccttatagatatcacagtcttgagggtcaaaaaaaaatacttaggaagctagccatggaagcttcttgcctctgacccagcccactttcccagcctacctctgggccttagctgctaaaaagcttctctggcagcggagctgcaggcctgaggaaacatgctcagtcatgcacatgtgttgacccatgtttcagatgcagtctgatgccaggtatattgttagggaaagaggaagaagggtaaactgagctagcccctggggctgagtactcctgcagggctggaggaacaggttcttagaagatgattcaccttggaggaagctggggaaagtggttagggagggagaggaggaagactgagaaatctctgcatccccagaactcagcaacccagctcttttatcatgaggagaggtagccatgctgactcatgaacaggtggaggaaaggggttgcaggtgaccagcatcttcaatctagttaccaccagcttggctagaattttattgaacgcaacttgctagttatgacagagaggaccagggtgagaactaatgctcaagagagcaagattctgtaatcctcttgccctctcacatcacaaattctgatatgccaaacatttggcccaatgagaatgactgatagacttgctgatgtgcatgtggggggatgaggtgtgtatatgcctttctcctgactggccattcagtgttcaggctgtcattcaaattggataggagaaagttggtgaggaaggaatggagagagcaggatccctggactccctggtccccaaactccttgactgtcacttgtaattgtatataatttttgtgtttcttgctccatttcctcatgctgtcatccttaaagtccatctgggaaggggaaaatgctgaacaccattgtatagtttcttcaactgtcccagccatgttgtacatagatatgtcatgttattatatatataaatatatatataattttg

SEQ ID NO: 9505 - DNA, 792 bp, Homo sapiens
  source 1..792: mol_type = unassigned DNA
ggcgggtggttggaaagacggtgaatggaaaggggatggctggtggtcttgggtgtgatgtgtgttattggtttgtagaggacacgcaggagaaagaaggtattctgcctgagagagctgaagaggcaaagctaaaggccaaatacccaagcctaggacaaaagcctggaggctccgacttcctcatgaagagactccagaaagggcaaaagtactttgactcaggagactacaacatggccaaagccaagatgaagaataagcagctgccaagtgcaggaccagacaagaacctggtgactggtgatcacatccccaccccacaggatctgccccagagaaagtcctcgctcgtcaccagcaagcttgcgggtggccaagttgaatgatgctgcccggggctctgccagatcctgagacgcttcccctccctgccccacccgggtcctgtgctggctcctgccccttcctgcttttgcagccaggggtcaggaggtggctcgggtgtgggctggagaggcagaagccctttcctgttggtgtcccagcacatggagccccttgggctgagcaccaagaccttgaaccttttttgttttaccttttttccaaataacagttgggagaaatatcaatgaaattctgggggtgggggtggggttgaaagggtggggtgggagatatggaggagtatgaattagggcttggagttggtaaaaacattcctgactatccttcttaaccacgtggctgatgtggggtaggtatgaggggaaggaagtggagtagcct

SEQ ID NO: 9506 - DNA, 725 bp, Homo sapiens
  source 1..725: mol_type = unassigned DNA
gaaagacggtgaatggaaaggggatggctggtggtcttgggtgtgatgtgtgttattggtttgtagaggacacgcaggagaaagaaggtattctgcctgagagagctgaagaggcaaagctaaaggccaaatacccaagcctaggacaaaagcctggaggctccgacttcctcatgaagagactccagaaaggggattataaatcattacattggagtgtgcttctctgtgcggatgaaatgcaaaagtactttgactcaggagactacaacatggccaaagccaagatgaagaataagcagctgccaagtgcaggaccagacaagaacctggtgactggtgatcacatccccaccccacaggatctgccccagagaaagtcctcgctcgtcaccagcaagcttgcgggtggccaagttgaatgatgctgcccggggctctgccagatcctgagacgcttcccctccctgccccacccgggtcctgtgctggctcctgccccttcctgcttttgcagccaggggtcaggaggtggctcgggtgtgggctggagaggcagaagccctttcctgttggtgtcccagcacatggagccccttgggctgagcaccaagaccttgaaccttttttgttttaccttttttccaaataacagttgggagaaatatcaatgaaattctgggggtgggggtggggttgaaagggtggggtgggagatatggagg

SEQ ID NO: 9507 - DNA, 703 bp, Homo sapiens
  source 1..703: mol_type = unassigned DNA
agtgacaggagccgaagcagcagcgcaggttgtccccgtttcccctcccccttcccttctccggttgccttcccgggccccttacactccacagtcccggtcccgccatgtcccagaaacaagaagaagagaaccctgcggaggagaccggcgaggagaagcaggacacgcaggagaaagaaggtattctgcctgagagagctgaagaggcaaagctaaaggccaaatacccaagcctaggacaaaagcctggaggctccgacttcctcatgaagagactccagaaaggggtatggggcatagtctcttaccctctttctttggagctaaaggaggttcttcgaatgaagtctgtagaggttctactggatccttttctggaggttttgttgttgaacagaagtagaggcgaatttgaaatttgaaaagagcaagtcaaattaatgtaaatccctgatgtggtatcaattccctcctgatttcccatgtaggaaattaaggcctaaattggagcatttgggtgtgtggggaaatgagggaaagatgttagaaactgaaatgcagactgcccccaggcatttgcctgtttgaatgttggaggttttaggattgtgcactttttaagcattagagataaattttgggatgcatcatttcagaagaagatcaaaccatctctcctacagaaataaatcctcaactt

SEQ ID NO: 9508 - DNA, 1277 bp, Homo sapiens
  source 1..1277: mol_type = unassigned DNA
attttgactgagcaaccctagtgacaggagccgaagcagcagcgcaggttgtccccgtttcccctcccccttcccttctccggttgccttcccgggccccttacactccacagtcccggtcccgccatgtcccagaaacaagaagaagagaaccctgcggaggagaccggcgaggagaagcaggacacgcaggagaaagaaggtattctgcctgagagagctgaagaggcaaagctaaaggccaaatacccaagcctaggacaaaagcctggaggctccgacttcctcatgaagagactccagaaaggggtatggggcatagtctcttaccctctttctttggagctaaaggaggttcttcgaatgaagtctgtagagcaaaagtactttgactcaggagactacaacatggccaaagccaagatgaagaataagcagctgccaagtgcaggaccagacaagaacctggtgactggtgatcacatccccaccccacaggatctgccccagagaaagtcctcgctcgtcaccagcaagcttgcgggtggccaagttgaatgatgctgcccggggctctgccagatcctgagacgcttcccctccctgccccacccgggtcctgtgctggctcctgccccttcctgcttttgcagccaggggtcaggaggtggctcgggtgtgggctggagaggcagaagccctttcctgttggtgtcccagcacatggagccccttgggctgagcaccaagaccttgaaccttttttgttttaccttttttccaaataacagttgggagaaatatcaatgaaattctgggggtgggggtggggttgaaagggtggggtgggagatatggaggagtatgaattagggcttggagttggtaaaaacattcctgactatccttcttaaccacgtggctgatgtggggtaggtatgaggggaaggaagtggagtagcctaatgaaaaggggttctagttgagctctgtagataaatgccttgtttcagtgtggttggagacctggtgtcagataaaagaaactccatccgcacagacagatgcaaacagctcctctagttctgcagagctagttgagaactcaacattaatcattttaaaaagtactgtccttgaaatagatttgctgtgggaagaagggcagtgagtgtgggagaaaggagccgtgagcgtggggaaccccacagagcccaaaggactttttcagtattcgaaataaacaaaacaaaaacccatgaaaaaacccaacccag

SEQ ID NO: 9509 - DNA, 2085 bp, Homo sapiens
  source 1..2085: mol_type = unassigned DNA
attttgactgagcaaccctagtgacaggagccgaagcagcagcgcaggttgtccccgtttcccctcccccttcccttctccggttgccttcccgggccccttacactccacagtcccggtcccgccatgtcccagaaacaagaagaagagaaccctgcggaggagaccggcgaggagaagcaggacacgcaggagaaagaaggtattctgcctgagagagctgaagaggcaaagctaaaggccaaatacccaagcctaggacaaaagcctggaggctccgacttcctcatgaagagactccagaaagggcaaaagtactttgactcaggagactacaacatggccaaagccaagatgaagaataagcagctgccaagtgcaggaccagacaagaacctggtgactggtgatcacatccccaccccacaggatctgccccagagaaagtcctcgctcgtcaccagcaagcttgcgggtggccaagttgaatgatgctgcccggggctctgccagatcctgagacgcttcccctccctgccccacccgggtcctgtgctggctcctgccccttcctgcttttgcagccaggggtcaggaggtggctcgggtgtgggctggagaggcagaagccctttcctgttggtgtcccagcacatggagccccttgggctgagcaccaagaccttgaaccttttttgttttaccttttttccaaataacagttgggagaaatatcaatgaaattctgggggtgggggtggggttgaaagggtggggtgggagatatggaggagtatgaattagggcttggagttggtaaaaacattcctgactatccttcttaaccacgtggctgatgtggggtaggtatgaggggaaggaagtggagtagcctaatgaaaaggggttctagttgagctctgtagataaatgccttgtttcagtgtggttggagacctggtgtcagataaaagaaactccatccgcacagacagatgcaaacagctcctctagttctgcagagctagttgagaactcaacattaatcattttaaaaagtactgtccttgaaatagatttgctgtgggaagaagggcagtgagtgtgggagaaaggagccgtgagcgtggggaaccccacagagcccaaaggactttttcagtattcgaaataaacaaaacaaaaacccatgaaaaaacccaacccagaaatattctgaagcagttggtgtgttttattggggtttgggagggggaagaaaacaatactgaagacattgttaatgtgagatgcggctgagttccccaataccatcacttaggaaagggagcaggaatgttggcataaaccttgcccatccctttgtttctgtaaccaatgtagaaggtgcatcaacctcagtttgtggctcacaaaatgaggcatttaagatatttgatctaaatggtttcttgacacctaagcctagtccaggtttagcagaaaaggaggcccagtctccttttccctctgtcttccattccttttcaagttcccatgtttgtgagggagaaatgtgacaaaccaaaagaaatatattatttctttgtaataagccaaaagaaactcaagtctttctgctggtggccagcaggaggcagagtgatttctttcctcatgatgtgccaatctgcattgctggaaacctgctactgaaagaagttaaaagctgcctgtgaatgtaacgtacaaaagaaaggttaccaaaggagaaaaaactccagcgggtgtacggtggctcacgcctataattccagcactttgggaggccaaggtgggtggatcacttgaggtcaggagtttgagaccagcctagccaacatggtgaaaccccatctctactaaaaatacaaaaattagccgggcgtggcggcacatgcctataatcccacttacttgggaggctgaggtaggagaatcgcttgaacccaggaggcagagtttgcagtgagccgagattgtgccattgcactccagcctgggcgacagagcgagactccatctaaaaaaaataaatgaataaaataaaacaagtacaaatttaaa

SEQ ID NO: 9510 - DNA, 574 bp, Homo sapiens
  source 1..574: mol_type = unassigned DNA
agcagcgcaggttgtccccgtttcccctcccccttcccttctccggttgccttcccgggccccttacactccacagtcccggtcccgccatgtcccagaaacaagaagaagagaaccctgcggaggagaccggcgaggagaagcaggacacgcaggagaaagaaggtattctgcctgagagagctgaagaggcaaagctaaaggccaaatacccaagcctaggacaaaagcctggaggctccgacttcctcatgaagagactccagaaaggggattataaatcattacattggagtgtgcttctctgtgcggatgaaatgcaaaagtactttgactcaggagactacaacatggccaaagccaagatgaagaataagcagctgccaagtgcaggaccagacaagaacctggtgactggtgatcacatccccaccccacaggatctgccccagagaaagtcctcgctcgtcaccagcaagcttgcggggtaacctgagcccccctctcctccccttcctcaaccactggacgtttatatattataggcagggatgaaatgggcacctagtcagat

SEQ ID NO: 9511 - DNA, 793 bp, Homo sapiens
  source 1..793: mol_type = unassigned DNA
ccctagtgacaggagccgaagcagcagcgcaggttgtccccgtttcccctcccccttcccttctccggttgccttcccgggccccttacactccacagtcccggtcccgccatgtcccagaaacaagaagaagagaaccctgcggaggagaccggcgaggagaagcaggacacgcaggagaaagaaggtattctgcctgagagagctgaagaggcaaagctaaaggccaaatacccaagcctaggacaaaagcctggaggctccgacttcctcatgaagagactccagaaaggggtatggggcatagtctcttaccctctttctttggagctaaaggaggttcttcgaatgaagtctgtagaggttctactggatccttttctggaggttttgttgttgaacagaagtagaggcgaatttgaaatttgaaaagagcaagtcaaattaatcaaaagtactttgactcaggagactacaacatggccaaagccaagatgaagaataagcagctgccaagtgcaggaccagacaagaacctggtgactggtgatcacatccccaccccacaggatctgccccagagaaagtcctcgctcgtcaccagcaagcttgcggggtaacctgagcccccctctcctccccttcctcaaccactggacgtttatatattataggcagggatgaaatgggcacctagtcagatcttctcagcttgctagccagaaatgactgtgattctgctgggggctgctgagaaggtaatgtaggttgaaaaggggctctaagtttattt

SEQ ID NO: 9512 - DNA, 1369 bp, Homo sapiens
  source 1..1369: mol_type = unassigned DNA
atggaaaggggatggctggtggtcttgggtgtgatgtgtgttattggtttgtagaggacacgcaggagaaagaaggtattctgcctgagagagctgaagaggcaaagctaaaggccaaatacccaagcctaggacaaaagcctggaggctccgacttcctcatgaagagactccagaaagggcaaaagtactttgactcaggagactacaacatggccaaagccaagatgaagaataagcagctgccaagtgcaggaccagacaagaacctggtgactggtgatcacatccccaccccacaggatctgccccagagaaagtcctcgctcgtcaccagcaagcttgcggggtaacctgagcccccctctcctccccttcctcaaccactggacgtttatatattataggcagggatgaaatgggcacctagtcagatcttctcagcttgctagccagaaatgactgtgattctgctgggggctgctgagaaggtaatgtaggttgaaaaggggctctaagtttatttatttcgttagattgacacttccacacactccctgtagtccaggtagggcccagaaataggaaaggctaggattggataatgctgcaaatgctttttttgtgtgagaaactggagagatgtgatttctccttttgggagagaatgtcccaaaattgattaggctgagccttgggaatagtttggcaggtttaacatcccaaggctaacctaacgtagttgggaaaggtagattgaatgagacatgttttctgtgcttctaagtgttctgtcccttaggctgctattgcttcatgtttccattatggcaggtttagagaatccttaaaaagaaaaattgacttgcttgcctaaaactacagtgcccccttagcctccattacttagtatctcttacagtttgctctggctctcaaataatataaagattgatgaacattattcacagaaaatgggcaccttctctctctcttccagcatgttgcttttgaaagtatcatgggatagtgggacgagcactggtttaggagtcaagatatctgggttctcactctactcagtcccagcagagctgttgtataaccttgattaagtcatttagcctctctggatttctatttcctcatctgtaaaatagagttaaatgtatgtaagattgattctgattctgaagtcttaactgccagcagaaaaactccatactgttcattgtaaaactaaaagtgaggaaggctcgtgggtggtgaacctctgctctgtaatactgggaaagtactacagaggggaaccatttgagggatacatgaggagagagtaaattgaggtttggggattataaattcaggc

SEQ ID NO: 9513 - DNA, 1826 bp, Homo sapiens
  source 1..1826: mol_type = unassigned DNA
gggctggagccgccctgggtgtcagcggctcggctcccgcgcacgctccggccgtcgcgcagcctcggcacctgcaggtccgtgcgtcccgcggctggcgcccctgactccgtcccggccagggagggccatgatttccctcccggggcccctggtgaccaacttgctgcggtttttgttcctggggctgagtgccctcgcgcccccctcgcgggcccagctgcaactgcacttgcccgccaaccggttgcaggcggtggagggaggggaagtggtgcttccagcgtggtacaccttgcacggggaggtgtcttcatcccagccatgggaggtgccctttgtgatgtggttcttcaaacagaaagaaaaggaggatcaggtgttgtcctacatcaatggggtcacaacaagcaaacctggagtatccttggtctactccatgccctcccggaacctgtccctgcggctggagggtctccaggagaaagactctggcccctacagctgctccgtgaatgtgcaagacaaacaaggcaaatctaggggccacagcatcaaaaccttagaactcaatgtactggttcctccagctcctccatcctgccgtctccagggtgtgccccatgtgggggcaaacgtgaccctgagctgccagtctccaaggagtaagcccgctgtccaataccagtgggatcggcagcttccatccttccagactttctttgcaccagcattagatgtcatccgtgggtctttaagcctcaccaacctttcgtcttccatggctggagtctatgtctgcaaggcccacaatgaggtgggcactgcccaatgtaatgtgacgctggaagtgagcacagggcctggagctgcagtggttgctggagctgttgtgggtaccctggttggactggggttgctggctgggctggtcctcttgtaccaccgccggggcaaggccctggaggagccagccaatgatatcaaggaggatgccattgctccccggaccctgccctggcccaagagctcagacacaatctccaagaatgggaccctttcctctgtcacctccgcacgagccctccggccaccccatggccctcccaggcctggtgcattgacccccacgcccagtctctccagccaggccctgccctcaccaagactgcccacgacagatggggcccaccctcaaccaatatcccccatccctggtggggtttcttcctctggcttgagccgcatgggtgctgtgcctgtgatggtgcctgcccagagtcaagctggctctctggtatgatgaccccaccactcattggctaaaggatttggggtctctccttcctataagggtcacctctagcacagaggcctgagtcatgggaaagagtcacactcctgacccttagtactctgcccccacctctctttactgtgggaaaaccatctcagtaagacctaagtgtccaggagacagaaggagaagaggaagtggatctggaattgggaggagcctccacccacccctgactcctccttatgaagccagctgctgaaattagctactcaccaagagtgaggggcagagacttccagtcactgagtctcccaggcccccttgatctgtaccccacccctatctaacaccacccttggctcccactccagctccctgtattgatataacctgtcaggctggcttggttaggttttactggggcagaggatagggaatctcttattaaaactaacatgaaatatgtgttgttttcatttgcaaatttaaataaagatacataatgtttgtatgagataagaaacaa

SEQ ID NO: 9514 - DNA, 1013 bp, Homo sapiens
  source 1..1013: mol_type = unassigned DNA
agacttgggctggagccgccctgggtgtcagcggctcggctcccgcgcacgctccggccgtcgcgcagcctcggcacctgcaggtccgtgcgtcccgcggctggcgcccctgactccgtcccggccagggagggccatgatttccctcccggggcccctggtgaccaacttgctgcggtttttgttcctggggctgagtgccctcgatgtcatccgtgggtctttaagcctcaccaacctttcgtcttccatggctggagtctatgtctgcaaggcccacaatgaggtgggcactgcccaatgtaatgtgacgctggaagtgagcacagggcctggagctgcagtggttgctggagctgttgtgggtaccctggttggactggggttgctggctgggctggtcctcttgtaccaccgccggggcaaggccctggaggagccagccaatgatatcaaggtgaggtctcctttaggtctcagtttctctgcccctaaaatggagtggctctggaaatggagagatgctcatttctacagagactcctacctcagtaagtggtgaaatgaaaagcgctgtggacaggaagggtctgcggcctggggctcacactcacagtgaggctccgaggtggggactccccttgccagctctggggtatcaggacgccttccaaagtcagctttccttccgtctctgcagaaggcccaccccaagcccagcgcttttcccaaggccggacagcttcagaccttggggagaagaggaaggaaggaggaagaagggacagagggattgcagaatcggggctggaggagaggagggaggagcacttttttttttttttaacctgcggcgccggcctctcccctgtttgctctgagataccagtctcgctcctgcccagcccgggcggctgcccttgggtgctcccttccctgcccgacacccagaccgaccttgaccgcccacctggcaggagcaggacaggacggccggacgcggccatggccga

SEQ ID NO: 9515 - DNA, 5160 bp, Homo sapiens
  source 1..5160: mol_type = unassigned DNA
gctttacactcgcgagcggaccgccacacgggtccggtgcccgctgcgcttccgccccagcgctcctgaggcggccgtacaatcctcggcagtgtcctgagactgtatggtcagctcagcccggcctccgactccttccgactcccagcattcgagccacttttttttttctttgaaaactcagaaaagtgactccttttccagggaaaaaggaacttgggttcccttctctccgtcctcttttcgggtctgacagcctccacccactccttccccggaccccgcctccgcgcgcaggttcctcccagtcacctttctccacccccgcccccgcacctagcccgccgcgcgccaccttccacctgactgcgcggggcgctcgggacctgcgcgcacctcggaccttcaccacccgcccgggccgcggggagcggacgagggccacagccccccacccgccagggagcccaggtgctcggcgtctgaacgtctcaaagggccacagcgacaatgacagctgacaaggagaagaaaaggagtagctcggagaggaggaaggagaagtcccgggatgctgcgcggtgccggcggagcaaggagacggaggtgttctatgagctggcccatgagctgcctctgccccacagtgtgagctcccatctggacaaggcctccatcatgcgactggcaatcagcttcctgcgaacacacaagctcctctcctcagtttgctctgaaaacgagtccgaagccgaagctgaccagcagatggacaacttgtacctgaaagccttggagggtttcattgccgtggtgacccaagatggcgacatgatctttctgtcagaaaacatcagcaagttcatgggacttacacaggtggagctaacaggacatagtatctttgacttcactcatccctgcgaccatgaggagattcgtgagaacctgagtctcaaaaatggctctggttttgggaaaaaaagcaaagacatgtccacagagcgggacttcttcatgaggatgaagtgcacggtcaccaacagaggccgtactgtcaacctcaagtcagccacctggaaggtcttgcactgcacgggccaggtgaaagtctacaacaactgccctcctcacaatagtctgtgtggctacaaggagcccctgctgtcctgcctcatcatcatgtgtgaaccaatccagcacccatcccacatggacatccccctggatagcaagaccttcctgagccgccacagcatggacatgaagttcacctactgtgatgacagaatcacagaactgattggttaccaccctgaggagctgcttggccgctcagcctatgaattctaccatgcgctagactccgagaacatgaccaagagtcaccagaacttgtgcaccaagggtcaggtagtaagtggccagtaccggatgctcgcaaagcatgggggctacgtgtggctggagacccaggggacggtcatctacaaccctcgcaacctgcagccccagtgcatcatgtgtgtcaactacgtcctgagtgagattgagaagaatgacgtggtgttctccatggaccagactgaatccctgttcaagccccacctgatggccatgaacagcatctttgatagcagtggcaagggggctgtgtctgagaagagtaacttcctattcaccaagctaaaggaggagcccgaggagctggcccagctggctcccaccccaggagacgccatcatctctctggatttcgggaatcagaacttcgaggagtcctcagcctatggcaaggccatcctgcccccgagccagccatgggccacggagttgaggagccacagcacccagagcgaggctgggagcctgcctgccttcaccgtgccccaggcagctgccccgggcagcaccacccccagtgccaccagcagcagcagcagctgctccacgcccaatagccctgaagactattacacatctttggataacgacctgaagattgaagtgattgagaagctcttcgccatggacacagaggccaaggaccaatgcagtacccagacggatttcaatgagctggacttggagacactggcaccctatatccccatggacggggaagacttccagctaagccccatctgccccgaggagcggctcttggcggagaacccacagtccaccccccagcactgcttcagtgccatgacaaacatcttccagccactggcccctgtagccccgcacagtcccttcctcctggacaagtttcagcagcagctggagagcaagaagacagagcccgagcaccggcccatgtcctccatcttctttgatgccggaagcaaagcatccctgccaccgtgctgtggccaggccagcacccctctctcttccatggggggcagatccaatacccagtggcccccagatccaccattacattttgggcccacaaagtgggccgtcggggatcagcgcacagagttcttgggagcagcgccgttggggccccctgtctctccaccccatgtctccaccttcaagacaaggtctgcaaagggttttggggctcgaggcccagacgtgctgagtccggccatggtagccctctccaacaagctgaagctgaagcgacagctggagtatgaagagcaagccttccaggacctgagcgggggggacccacctggtggcagcacctcacatttgatgtggaaacggatgaagaacctcaggggtgggagctgccctttgatgccggacaagccactgagcgcaaatgtacccaatgataagttcacccaaaaccccatgaggggcctgggccatcccctgagacatctgccgctgccacagcctccatctgccatcagtcccggggagaacagcaagagcaggttccccccacagtgctacgccacccagtaccaggactacagcctgtcgtcagcccacaaggtgtcaggcatggcaagccggctgctcgggccctcatttgagtcctacctgctgcccgaactgaccagatatgactgtgaggtgaacgtgcccgtgctgggaagctccacgctcctgcaaggaggggacctcctcagagccctggaccaggccacctgagccaggccttctacctgggcagcacctctgccgacgccgtcccaccagcttcactctctccgtctgtttttgcaactaggtatttctaacgccagcacactatttacaagatggacttacctggcagacttgcccaggtcaccaagcagtggcctttttctgagatgctcactttattatccctatttttaaagtacacaattgttttacctgttctgaaatgttcttaaattttgtaggatttttttcctccccaccttcaatgacttctaatttatattatccataggtttctctccctccttctccttctcacacacaactgtccatactaacaagtttggtgcatgtctgttcttctgtagggagaagctttagcttcattttactaaaaagattcctcgttattgttgttgccaaagagaaacaaaaatgattttgctttccaagcttggtttgtggcgtctccctcgcagagcccttctcgtttcttttttaaactaatcaccatattgtaaatttcagggtttttttttttttgtttaagctgactctttgctctaattttggaaaaaaagaaatgtgaagggtcaactccaacgtatgtggttatctgtgaaagttgcacagcgtggcttttcctaaactggtgtttttcccccgcatttggtggattttttattattattcaaaaacataactgagttttttaaaagaggagaaaatttatatctgggttaagtgtttatcatatatatgggtactttgtaatatctaaaaacttagaaacggaaatggaatcctgctcacaaaatcactttaagatcttttcgaagctgttaatttttcttagtgttgtggacactgcagacttgtccagtgctcccacggcctgtacggacactgtggaaggcctccctctgtcggctttttgccatctgtgatatgccataggtgtgacaatccgagcagtggagtcattcagcgggagcactgcgcgctatcccctcacattctctatgtactatgtatgtatgtattattattattgctgccaagagggtctgatggcacgttgtggggtcggggggtggggcggggaagtgctctaacttttcttaaggttttgttgctagcccttcaagtgcactgagctatgtgactcggatggtctttcacacggcacatttggacatttccagaactaccatgagatggtttagacgggaattcatgcaaatgaggggtcaaaaatggtatagtgaccccgtccacgtcctccaagctcacgaccttggagccccgtggagctggactgaggaggaggctgcacagcgggagagcagctggtccagaccagccctgcagcccccactcagccggcagccagatggccccgcaaggcctccagggatggcccctagccacaggccctggctgaggtctctgggtcggtcagtgacatgtaggtaggaagcactgaaaatagtgttcccagagcactttgcaactccctgggtaagagggacgacacctctggtttttcaataccaattacatggaacttttctgtaatgggtacaatgaagaagtttctaaaaacacacacaaagcacattgggccaactatttagtaagcccggatagacttattgccaaaaacaaaaaatagctttcaaaagaaatttaagttctatgagaaattccttagtcatggtgttgcgtaaatcatattttagctgcacggcattaccccacacagggtggcagaacttgaagggttactgacgtgtaaatgctggtatttgatttcctgtgtgtgttgccctggcattaagggcattttacccttgcagttttactaaaacactgaaaaatattccaagcttcatattaaccctacctgtcaacgtaacgatttcatgaacgttattatattgtcgaattcctactgacaacattataactgtatgggagcttaactttataaggaaatgtattttgacactggtatcttattaaagtattctgatccta

SEQ ID NO: 9516 - DNA, 1067 bp, Homo sapiens
  source 1..1067: mol_type = unassigned DNA
agatcacactggggaaccagactgacttctccaattctgaactcgccccggcctcgggcggctcaaagggcctcctctgccgcatccccgccaaaaccaaaccgcctggcacaagccgcccgccgcgcgccaccttccacctgactgcgcggggcgctcgggacctgcgcgcacctcggaccttcaccacccgcccgggccgcggggagcggacgagggccacagccccccacccgccagggagcccaggtgctcggcgtctgaacgtctcaaagggccacagcgacaatgacagctgacaaggagaagaaaaggagtagctcggagaggaggaaggagaagtcccgggatgctgcgcggtgccggcggagcaaggagacggaggtgttctatgagctggcccatgagctgcctctgccccacagtgtgagctcccatctggacaaggcctccatcatgcgactggcaatcagcttcctgcgaacacacaagctcctctcctcagtttgctctgaaaacgagtccgaagccgaagctgaccagcagatggacaacttgtacctgaaagccttggagggtttcattgccgtggtgacccaagatggcgacatgatctttctgtcagaaaacatcagcaagttcatgggacttacacaggtggagctaacaggacatagtatctttgacttcactcatccctgcgaccatgaggagattcgtgagaacctgagtctcaaaaatggctctggttttgggaaaaaaagcaaagacatgtccacagagcgggacttcttcatgaggatgaagtgcacggtcaccaacagaggccgtactgtcaacctcaagtcagccacctggaaggtcttgcactgcacgggccaggtgaaagtctacaacaactgccctcctcacaatagtctgtgtggctacaaggagcccctgctgtcctgcctcatcatcatgtgtgaaccaatccagcacccatcccacatggacatccccctggatagcaagaccttcctgagccgccacagcatggacatgaagttcacctactgtgatgacag

SEQ ID NO: 9517 - DNA, 1241 bp, Homo sapiens
  source 1..1241: mol_type = unassigned DNA
cagcttaatagcaggacgctggcaacaggcactccctgctccagtccagcctgcgcgctccaccgccgctatggtctccgtgcctaccacctggtgctccgttgcgctagccctgctcgtggccctgcatgaagggaagggccaggctgctgccaccctggagcagccagcgtcctcatctcatgcccaaggcacccaccttcggcttcgccgttgctcctgcagctcctggctcgacaaggagtgcgtctacttctgccacttggacatcatctgggtgaacactcctgaacagacagctccttacggcctgggaaacccgccaagacgccggcgccgctccctgccaaggcgctgtcagtgctccagtgccagggaccccgcctgtgccaccttctgccttcgaaggccctggactgaagccggggcagtcccaagccggaagtcccctgcagacgtgttccagactggcaagacaggggccactacaggagagcttctccaaaggctgagggacatttccacagtcaagagcctctttgccaagcgacaacaggaggccatgcgggagcctcggtccacacattccaggtggaggaagagatagtgtcgtgagctggaggaacattgggaaggaagcccgcggggagagaggaggagagaagtggccagggcttgtggactctctgcctgcttcctggaccggggccttggtcccagacagctggacccatttgccaggattggcacaagctccctggtgagggagcctcgtccaaggcagttctgtgtcctcgcactgcccagggaagccctcggcctccagactgcggagcagcctccagtgctggctgctggcccacagctctgctggaagaactgcatggggagtacattcatctggaggctgcgtcctgaggagtgtcctgtctgctgggctacaaaccaggagcaaccgtgcagccacgaacacgcatgcctcagccagccctggaggctggatggctcccctgaggctggcatcctggctggctgtgtcctctccagctttccctccccagagttcttgcaccctcattccctcgggaccctcccagtgagaagggcctgctctgcttttcctgtctgtatataacttatttgccctaagaactttgagaatcccaattatttattttaatgtattttttagaccctctatttacctgcgaacttgtgtttataataaatgaggaaacata

SEQ ID NO: 9518 - DNA, 2655 bp, Homo sapiens
  source 1..2655: mol_type = unassigned DNA
cctcgggccgctgcgctcctggccagctccccccagcgcctgggaggcgacccccagtgcgcccgggttcaaaggcccggcgaggcagttccagcccctctggggggcggggaggcgacgggggtggtgcagaagccagaaaagcccgagccacagccggccagctccgcgcagggatgggcagcgcgctctgaaagtttatgaccgccgcagccaactcctggccggagctggagacgcagcgagcgatcggccggcctcgaacccccacagctggagggcgaggccagctgtacccggccccagtgccctttcgcggccacaagcggccgtcctcctggtccggtgctccggcgcctgatctaggttcatggagccggggctgtggctccttttcgggctcacagtgacctccgccgcaggattcgtgccttgctcccagtctggggatgctggcaggcgcggcgtgtcccaggcccccactgcagccagatctgagggggactgtgaagagactgtggctggccctggcgaggagactgtggctggccctggcgaggggactgtggccccgacagcactgcagggtccaagccctggaagccctgggcaggagcaggcggccgagggggcccctgagcaccaccgatccaggcgctgcacgtgcttcacctacaaggacaaggagtgtgtctactattgccacctggacatcatttggatcaacactcccgaacagacggtgccctatggactgtccaactacagaggaagcttccggggcaagaggtctgcggggccacttccagggaatctgcagctctcacatcggccacacttgcgctgcgcttgtgtggggagatatgacaaggcctgcctgcacttttgcacccaaactctggacgtcagcagtaattcaaggacggcagaaaaaacagacaaagaagaggaagggaaggtgagaggtgccaacagaggcctgtgtcaaaggaggttgaagtcaaggaccaacaaagcaagcaggctttagacctccaccatccaaagctcatgcccggcagtggactcgccctcgctccatctacctgcccccgctgcctctttcaggaaggagccccttaggaggacaggcctgcagcatcctggtctcgggaggcttctgtcattgctcacacacagttcagatttccacctctttatagacaagaagtgaatttgcctggggcagaacacccacccaaagagtccccacttaacaataccccccccccacggcaagaatgcccaaatccgaatgaccccagttttcctaatgagtaaaatgatcccagatgtgccccagagcatgacgcctgcagctccggtttcatgcaggaaattggttttggagagttttggcaagttggaaagccacttactggcttttgacatgacttctcttggagaataagtggactccaagctaactctttgcaaatgtaaacacatgtccatcttgtaataaatgcaaaatgcccgtgcagcagaagcatgcgactttcatatccttgcctagaataggctgcatggtgtatgtcagtgagggccacgaggcgtcggctttagacacagatcatagctctacaggagtttatgaatttgaagcttatgggattttggcagagaaattttcagctgtgcttgatacccaccaaaagaatgtatctcgaaagaatgaaggaagaagaaaaaaggatccttgatgtttgtgacaagaaaatgagaaagttagtatctgcaatacagagcttgttcctgttcagtgactgaccctctgtattctgtatagacaccaggccgatacacagtggagttcccaggccttgtttgcaggaagccgactgtaaagacagccccagctcaaggctattaggttgaatatttgctttcatgagtaaatgtggatctttggggaatggcttcaaaataagtcacgaacacaaattctttgtaaattatgtaaattcctgtttatataaattggcaacaacttataccgtctgacagttcaaaatctctttcagctgcgctcttcccaccgagccgagcttactgtgagtgtggagatgttatcccaccatgtaaagtcgcctgcgcaggggagggctgcccatctccccaacccagtcacagagagataggaaacggcatttgagtgggtgtccagggccccgtagagagacatttaagatggtgtatgacagagcattggccttgaccaaatgttaaatcctctgtgtgtatttcataagttattacaggtataaaagtgatgacctatcatgaggaaatgaaagtggctgatttgctggtaggattttgtacagtttagagaagcgattatttattgtgaaactgttctccactccaactcctttatgtggatctgttcaaagtagtcactgtatatacgtatagagaggtagataggtaggtagattttaaattgcattctgaatacaaactcatactccttagagcttgaattacatttttaaaatgcatatgtgctgtttggcaccgtggcaagatggtatcagagagaaacccatcaattgctcaaatactcagaaagtactgtcaaaagcctaataaaaaacctaaagtttgctctga

SEQ ID NO: 9519 - DNA, 2636 bp, Homo sapiens
  source 1..2636: mol_type = unassigned DNA
cgctgtcctgggtgcgcctcgggccgctgcgctcctggccagctccccccagcgcctgggaggcgacccccagtgcgcccgggttcaaaggcccggcgaggcagttccagcccctctggggggcggggaggcgacgggggtggtgcagaagccagaaaagcccgagccacagccggccagctccgcgcagggatgggcagcgcgctctgaaagtttatgaccgccgcagccaactcctggccggagctggagacgcagcgagcgatcggccggcctcgaacccccacagctggagggcgaggccagctgtacccggccccagtgccctttcgcggccacaagcggccgtcctcctggtccggtgctccggcgcctgatctaggttcatggagccggggctgtggctccttttcgggctcacagtgacctccgccgcaggattcgtgccttgctcccagtctggggatgctggcaggcgcggcgtgtcccaggcccccactgcagccagatctgagggggactgtgaagagactgtggctggccctggcgaggagactgtggctggccctggcgaggggactgtggccccgacagcactgcagggtccaagccctggaagccctgggcaggagcaggcggccgagggggcccctgagcaccaccgatccaggcgctgcacgtgcttcacctacaaggacaaggagtgtgtctactattgccacctggacatcatttggatcaacactcccgaacagacggtgccctatggactgtccaactacagaggaagcttccggggcaagaggtctgcggggccacttccagggaatctgcagctctcacatcggccacacttgcgctgcgcttgtgtggggagatatgacaaggcctgcctgcacttttgcacccaaactctggacgtcagcagtaattcaaggacggcagaaaaaacagacaaagaagaggaagggaaggttgaagtcaaggaccaacaaagcaagcaggctttagacctccaccatccaaagctcatgcccggcagtggactcgccctcgctccatctacctgcccccgctgcctctttcaggaaggagccccttaggaggacaggcctgcagcatcctggtctcgggaggcttctgtcattgctcacacacagttcagatttccacctctttatagacaagaagtgaatttgcctggggcagaacacccacccaaagagtccccacttaacaataccccccccccacggcaagaatgcccaaatccgaatgaccccagttttcctaatgagtaaaatgatcccagatgtgccccagagcatgacgcctgcagctccggtttcatgcaggaaattggttttggagagttttggcaagttggaaagccacttactggcttttgacatgacttctcttggagaataagtggactccaagctaactctttgcaaatgtaaacacatgtccatcttgtaataaatgcaaaatgcccgtgcagcagaagcatgcgactttcatatccttgcctagaataggctgcatggtgtatgtcagtgagggccacgaggcgtcggctttagacacagatcatagctctacaggagtttatgaatttgaagcttatgggattttggcagagaaattttcagctgtgcttgatacccaccaaaagaatgtatctcgaaagaatgaaggaagaagaaaaaaggatccttgatgtttgtgacaagaaaatgagaaagttagtatctgcaatacagagcttgttcctgttcagtgactgaccctctgtattctgtatagacaccaggccgatacacagtggagttcccaggccttgtttgcaggaagccgactgtaaagacagccccagctcaaggctattaggttgaatatttgctttcatgagtaaatgtggatctttggggaatggcttcaaaataagtcacgaacacaaattctttgtaaattatgtaaattcctgtttatataaattggcaacaacttataccgtctgacagttcaaaatctctttcagctgcgctcttcccaccgagccgagcttactgtgagtgtggagatgttatcccaccatgtaaagtcgcctgcgcaggggagggctgcccatctccccaacccagtcacagagagataggaaacggcatttgagtgggtgtccagggccccgtagagagacatttaagatggtgtatgacagagcattggccttgaccaaatgttaaatcctctgtgtgtatttcataagttattacaggtataaaagtgatgacctatcatgaggaaatgaaagtggctgatttgctggtaggattttgtacagtttagagaagcgattatttattgtgaaactgttctccactccaactcctttatgtggatctgttcaaagtagtcactgtatatacgtatagagaggtagataggtaggtagattttaaattgcattctgaatacaaactcatactccttagagcttgaattacatttttaaaatgcatatgtgctgtttggcaccgtggcaagatggtatcagagagaaacccatcaattgctcaaatactcagaaagtactgtcaaaagcctaataaaaaacctaaagtttgctctga

SEQ ID NO: 9520 - DNA, 1153 bp, Homo sapiens
  source 1..1153: mol_type = unassigned DNA
gatgggcagcgcgctctgaaagtttatgaccgccgcagccaactcctggccggagctggagacgcagcgagcgatcggccggcctcgaacccccacagctggagggcgaggccagctgtacccggccccagtgccctttcgcggccacaagcggccgtcctcctggtccggtgctccggcgcctgatctaggttcatggagccggggctgtggctccttttcgggctcacagtgacctccgccgcaggattcgtgccttgctcccagtctggggatgctggcaggcgcggcgtgtcccaggcccccactgcagccagatctgagggggactgtgaagagactgtggctggccctggcgaggagactgtggctggccctggcgaggggactgtggccccgacagcactgcagggtccaagccctggaagccctgggcaggagcaggcggccgagggggcccctgagcaccaccgatccaggcgctgcacgtgcttcacctacaaggacaaggagtgtgtctactattgccacctggacatcatttggatcaacactcccgaacagacggtgccctatggactgtccaactacagaggaagcttccggggcaagaggtctgcggggccacttccagggaatctgcagctctcacatcggccacacttgcgctgcgcttgtgtggggagatatgacaaggcctgcctgcacttttgcacccaaactctggacgtcagcaggttgaagtcaaggaccaacaaagcaagcaggctttagacctccaccatccaaagctcatgcccggcagtggactcgccctcgctccatctacctgcccccgctgcctctttcaggaaggagccccttaggaggacaggcctgcagcatcctggtctcgggaggcttctgtcattgctcacacacagttcagatttccacctctttatagacaagaagtgaatttgcctggggcagaacacccacccaaagagtccccacttaacaataccccccccccacggcaagaatgcccaaatccgaatgaccccagttttcctaatgagtaaaatgatcccagatgtgccccagagcatgacgcctgcagctccggtttcatgcaggaaattggttttggagagttttggcaagttggaaa

SEQ ID NO: 9521 - DNA, 2397 bp, Homo sapiens
  source 1..2397: mol_type = unassigned DNA
ctcgggccgctgcgctcctggccagctccccccagcgcctgggaggcgacccccagtgcgcccgggttcaaaggcccggcgaggcagttccagcccctctggggggcggggaggcgacgggggtggtgcagaagccagaaaagcccgagccacagccggccagctccgcgcagggatgggcagcgcgctctgaaagtttatgaccgccgcagccaactcctggccggagctggagacgcagcgagcgatcggccggcctcgaacccccacagctggagggcgaggccagctgtacccggccccagtgccctttcgcggccacaagcggccgtcctcctggtccggtgctccggcgcctgatctaggttcatggagccggggctgtggctccttttcgggctcacagtgacctccgccgcaggattcgtgccttgctcccagtctggggatgctggcaggcgcggcgtgtcccaggcccccactgcagccagatctgagggggactgtgaagagactgtggctggccctggcgaggagactgtggctggccctggcgaggggactgtggccccgacagcactgcagggtccaagccctggaagccctgggcaggagcaggcggccgagggggcccctgagcaccaccgatccaggcgctgcacgtgcttcacctacaaggacaaggagtgtgtctactattgccacctggacatcatttggatcaacactcccgaacagacggtgccctatggactgtccaactacagaggaagcttccggggcaagaggtctgcggggccacttccagggaatctgcagctctcacatcggccacacttgcgctgcgcttgtgtggggagatatgacaaggcctgcctgcacttttgcacccaaactctggacgtcagcagtaattcaaggacggcagaaaaaacagacaaagaagaggaagggaaggttgaagtcaaggaccaacaaagcaagcaggctttagacctccaccatccaaagctcatgcccggcagtggactcgccctcgctccatctacctgcccccgctgcctctttcaggaaggagccccttaggaggacaggcctgcactccggtttcatgcaggaaattggttttggagagttttggcaagttggaaagccacttactggcttttgacatgacttctcttggagaataagtggactccaagctaactctttgcaaatgtaaacacatgtccatcttgtaataaatgcaaaatgcccgtgcagcagaagcatgcgactttcatatccttgcctagaataggctgcatggtgtatgtcagtgagggccacgaggcgtcggctttagacacagatcatagctctacaggagtttatgaatttgaagcttatgggattttggcagagaaattttcagctgtgcttgatacccaccaaaagaatgtatctcgaaagaatgaaggaagaagaaaaaaggatccttgatgtttgtgacaagaaaatgagaaagttagtatctgcaatacagagcttgttcctgttcagtgactgaccctctgtattctgtatagacaccaggccgatacacagtggagttcccaggccttgtttgcaggaagccgactgtaaagacagccccagctcaaggctattaggttgaatatttgctttcatgagtaaatgtggatctttggggaatggcttcaaaataagtcacgaacacaaattctttgtaaattatgtaaattcctgtttatataaattggcaacaacttataccgtctgacagttcaaaatctctttcagctgcgctcttcccaccgagccgagcttactgtgagtgtggagatgttatcccaccatgtaaagtcgcctgcgcaggggagggctgcccatctccccaacccagtcacagagagataggaaacggcatttgagtgggtgtccagggccccgtagagagacatttaagatggtgtatgacagagcattggccttgaccaaatgttaaatcctctgtgtgtatttcataagttattacaggtataaaagtgatgacctatcatgaggaaatgaaagtggctgatttgctggtaggattttgtacagtttagagaagcgattatttattgtgaaactgttctccactccaactcctttatgtggatctgttcaaagtagtcactgtatatacgtatagagaggtagataggtaggtagattttaaattgcattctgaatacaaactcatactccttagagcttgaattacatttttaaaatgcatatgtgctgtttggcaccgtggcaagatggtatcagagagaaacccatcaattgctcaaatactcagaaagtactgtcaaaagcctaataaaaaacctaaagtttgctctg

SEQ ID NO: 9522 - DNA, 2318 bp, Homo sapiens
  source 1..2318: mol_type = unassigned DNA
cgaacccccacagctggagggcgaggccagctgtacccggccccagtgccctttcgcggccacaagcggccgtcctcctggtccggtgctccggcgcctgatctaggttcatggagccggggctgtggctccttttcgggctcacagtgacctccgccgcaggattcgtgccttgctcccagtctggggatgctggcaggcgcggcgtgtcccaggcccccactgcagccagatctgagggggactgtgaagagactgtggctggccctggcgaggagactgtggctggccctggcgaggggactgtggccccgacagcactgcagggtccaagccctggaagccctgggcaggagcaggcggccgagggggcccctgagcaccaccgatccaggcgctgcacgtgcttcacctacaaggacaaggagtgtgtctactattgccacctggacatcatttggatcaacactcccgaacagacggtgccctatggactgtccaactacagaggaagcttccggggcaagaggtctgcggggccacttccagggaatctgcagctctcacatcggccacacttgcgctgcgcttgtgtggggagatatgacaaggcctgcctgcacttttgcacccaaactctggacgtcagcagacaggttgaagtcaaggaccaacaaagcaagcaggctttagacctccaccatccaaagctcatgcccggcagtggactcgccctcgctccatctacctgcccccgctgcctctttcaggaaggagccccttaggaggacaggcctgcagcatcctggtctcgggaggcttctgtcattgctcacacacagttcagatttccacctctttatagacaagaagtgaatttgcctggggcagaacacccacccaaagagtccccacttaacaataccccccccccacggcaagaatgcccaaatccgaatgaccccagttttcctaatgagtaaaatgatcccagatgtgccccagagcatgacgcctgcagctccggtttcatgcaggaaattggttttggagagttttggcaagttggaaagccacttactggcttttgacatgacttctcttggagaataagtggactccaagctaactctttgcaaatgtaaacacatgtccatcttgtaataaatgcaaaatgcccgtgcagcagaagcatgcgactttcatatccttgcctagaataggctgcatggtgtatgtcagtgagggccacgaggcgtcggctttagacacagatcatagctctacaggagtttatgaatttgaagcttatgggattttggcagagaaattttcagctgtgcttgatacccaccaaaagaatgtatctcgaaagaatgaaggaagaagaaaaaaggatccttgatgtttgtgacaagaaaatgagaaagttagtatctgcaatacagagcttgttcctgttcagtgactgaccctctgtattctgtatagacaccaggccgatacacagtggagttcccaggccttgtttgcaggaagccgactgtaaagacagccccagctcaaggctattaggttgaatatttgctttcatgagtaaatgtggatctttggggaatggcttcaaaataagtcacgaacacaaattctttgtaaattatgtaaattcctgtttatataaattggcaacaacttataccgtctgacagttcaaaatctctttcagctgcgctcttcccaccgagccgagcttactgtgagtgtggagatgttatcccaccatgtaaagtcgcctgcgcaggggagggctgcccatctccccaacccagtcacagagagataggaaacggcatttgagtgggtgtccagggccccgtagagagacatttaagatggtgtatgacagagcattggccttgaccaaatgttaaatcctctgtgtgtatttcataagttattacaggtataaaagtgatgacctatcatgaggaaatgaaagtggctgatttgctggtaggattttgtacagtttagagaagcgattatttattgtgaaactgttctccactccaactcctttatgtggatctgttcaaagtagtcactgtatatacgtatagagaggtagataggtaggtagattttaaattgcattctgaatacaaactcatactccttagagcttgaattacatttttaaaatgcatatgtgctgtttggcaccgtggcaagatggtatcagagagaaacccatcaattgctcaaatactcagaaagtactgtcaaaagcctaataaaaaacctaaagtttgctctga

SEQ ID NO: 9523 - DNA, 2381 bp, Homo sapiens
  source 1..2381: mol_type = unassigned DNA
ggggcgcggcggcggcggcgccagggtcggggccgcttccccattcgggcgcgagagccatggaggcgctgagggagtccgtgctgcatttggccttgcagatgtcgacgtacaagcgggccacgctggacgaggaggacctggtggactcgctctccgagggcgacgcataccccaacggcctgcaggtgaacttccacagcccccggagtggccagaggtgctgggctgcacggacccaggtggagaagcggctggtggtgttggtggtacttctggcggcaggactggtggcctgcttggcagcactgggcatccagtaccagacaagatccccctctgtgtgcctgagcgaagcttgtgtctcagtgaccagctccatcttgagctccatggaccccacagtggacccctgccatgacttcttcagctacgcctgtgggggctggatcaaggccaacccagtccctgatggccactcacgctgggggaccttcagcaacctctgggaacacaaccaagcaatcatcaagcacctcctcgaaaactccacggccagcgtgagcgaggcagagagaaaggcgcaagtatactaccgtgcgtgcatgaacgagaccaggatcgaggagctcagggccaaacctctaatggagttgattgagaggctcgggggctggaacatcacaggtccctgggccaaggacaacttccaggacaccctgcaggtggtcaccgcccactaccgcacctcacccttcttctctgtctatgtcagtgccgattccaagaactccaacagcaacgtgatccaggtggaccagtctggcctgggcttgccctcgagagactattacctgaacaaaactgaaaacgagaaggtgctgaccggatatctgaactacatggtccagctggggaagctgctgggcggcggggacgaggaggccatccggccccagatgcagcagatcttggactttgagacggcactggccaacatcaccatcccacaggagaagcgccgtgatgaggagctcatctaccacaaagtgacggcagccgagctgcagaccttggcacccgccatcaactggttgccttttctcaacaccatcttctaccccgtggagatcaatgaatccgagcctattgtggtctatgacaaggaataccttgagcagatctccactctcatcaacaccaccgacagatgcctgctcaacaactacatgatctggaacctggtgcggaaaacaagctccttccttgaccagcgctttcaggacgccgatgagaagttcatggaagtcatgtacgggaccaagaagacctgtcttcctcgctggaagttttgcgtgagtgacacagaaaacaacctgggctttgcgttgggccccatgtttgtcaaagcaaccttcgccgaggacagcaagagcatagccaccgagatcatcctggagattaagaaggcatttgaggaaagcctgagcaccctgaagtggatggatgaggaaacccgaaaatcagccaaggaaaaggccgatgccatctacaacatgataggataccccaacttcatcatggatcccaaggagctggacaaagtgtttaatgactacactgcagttccagacctctactttgaaaatgccatgcggtttttcaacttctcatggagggtcactgccgatcagctcaggaaagcccccaacagagatcagtggagcatgaccccgcccatggtgaacgcctactactcgcccaccaagaatgagattgtgtttccggccgggatcctgcaggcaccattctacacacgctcctcacccaaggccttaaactttggtggcataggtgtcgtcgtgggccatgagctgactcatgcttttgatgatcaaggacgggagtatgacaaggacgggaacctccggccatggtggaagaactcatccgtggaggccttcaagcgtcagaccgagtgcatggtagagcagtacagcaactacagcgtgaacggggagccggtgaacgggcggcacaccctgggggagaacatcgccgacaacgggggtctcaaggcggcctatcgggcttaccagaactgggtgaagaagaacggggctgagcactcgctccccaccctgggcctcaccaataaccagctcttcttcctgggctttgcacaggtctggtgctccgtccgcacacctgagagctcccacgaaggcctcatcaccgatccccacagcccctctcgcttccgggtcatcggctccctctccaattccaaggagttctcagaacacttccgctgcccacctggctcacccatgaacccgcctcacaagtgcgaagtctggtaaggacgaagcggagagagc

SEQ ID NO: 9524 - DNA, 3763 bp, Homo sapiens
  source 1..3763: mol_type = unassigned DNA
gactctctgatgtttgggagcagatccgagcagctgagcagggtggctgttcctttcctggattagggctgaatctgtgggaaccagaccacccctgagacaggaggcagccctgatgcctctccagggcctgggcctgcagcggaaccccttcctccaagggaagcggggcccggggctcacgtcttccccgcccctcctgcctccttccctgcaggtgaacttccacagcccccggagtggccagaggtgctgggctgcacggacccaggtggagaagcggctggtggtgttggtggtacttctggcggcaggactggtggcctgcttggcagcactgggcatccagtaccagacaagatccccctctgtgtgcctgagcgaagcttgtgtctcagtgaccagctccatcttgagctccatggaccccacagtggacccctgccatgacttcttcagctacgcctgtgggggctggatcaaggccaacccagtccctgatggccactcacgctgggggaccttcagcaacctctgggaacacaaccaagcaatcatcaagcacctcctcgaaaactccacggccagcgtgagcgaggcagagagaaaggcgcaagtatactaccgtgcgtgcatgaacgagaccaggatcgaggagctcagggccaaacctctaatggagttgattgagaggctcgggggctggaacatcacaggtccctgggccaaggacaacttccaggacaccctgcaggtggtcaccgcccactaccgcacctcacccttcttctctgtctatgtcagtgccgattccaagaactccaacagcaacgtgatccaggtggaccagtctggcctgggcttgccctcgagagactattacctgaacaaaactgaaaacgagaaggtgctgaccggatatctgaactacatggtccagctggggaagctgctgggcggcggggacgaggaggccatccggccccagatgcagcagatcttggactttgagacggcactggccaacatcaccatcccacaggagaagcgccgtgatgaggagctcatctaccacaaagtgacggcagccgagctgcagaccttggcacccgccatcaactggttgccttttctcaacaccatcttctaccccgtggagatcaatgaatccgagcctattgtggtctatgacaaggaataccttgagcagatctccactctcatcaacaccaccgacagatgcctgctcaacaactacatgatctggaacctggtgcggaaaacaagctccttccttgaccagcgctttcaggacgccgatgagaagttcatggaagtcatgtacgggaccaagaagacctgtcttcctcgctggaagttttgcgtgagtgacacagaaaacaacctgggctttgcgttgggccccatgtttgtcaaagcaaccttcgccgaggacagcaagagcatagccaccgagatcatcctggagattaagaaggcatttgaggaaagcctgagcaccctgaagtggatggatgaggaaacccgaaaatcagccaaggaaaaggccgatgccatctacaacatgataggataccccaacttcatcatggatcccaaggagctggacaaagtgtttaatgactacactgcagttccagacctctactttgaaaatgccatgcggtttttcaacttctcatggagggtcactgccgatcagctcaggaaagcccccaacagagatcagtggagcatgaccccgcccatggtgaacgcctactactcgcccaccaagaatgagattgtgtttccggccgggatcctgcaggcaccattctacacacgctcctcacccaaggccttaaactttggtggcataggtgtcgtcgtgggccatgagctgactcatgcttttgatgatcaaggacgggagtatgacaaggacgggaacctccggccatggtggaagaactcatccgtggaggccttcaagcgtcagaccgagtgcatggtagagcagtacagcaactacagcgtgaacggggagccggtgaacgggcggcacaccctgggggagaacatcgccgacaacgggggtctcaaggcggcctatcgggcttaccagaactgggtgaagaagaacggggctgagcactcgctccccaccctgggcctcaccaataaccagctcttcttcctgggctttgcacaggtctggtgctccgtccgcacacctgagagctcccacgaaggcctcatcaccgatccccacagcccctctcgcttccgggtcatcggctccctctccaattccaaggagttctcagaacacttccgctgcccacctggctcacccatgaacccgcctcacaagtgcgaagtctggtaaggacgaagcggagagagccaagacggaggaggggaaggggctgaggacgagacccccatccagcctccagggcattgctcagcccgcttggccacccggggccctgcttcctcacactggcgggttttcagccggaaccgagcccatggtgttggctctcaacgtgacccgcagtctgatcccctgtgaagagccggacatcccaggcacacgtgtgcgccaccttcagcaggcattcgggtgctgggctggtggctcatcaggcctgggccccacactgacaagcgccagatacgccacaaataccactgtgtcaaatgctttcaagatatatttttggggaaactattttttaaacactgtggaatacactggaaatcttcagggaaaaacacatttaaacacttttttttttaaggaaagaattggtatatttattatgttctgtttttctaaataacctgtggacaagggaagccccactgatttactccctctcttccccactccctgtgaggctgggctgaggcacggatccctgggccacagagcaagtctccaaatcagacagctgcctcagcccctgggatgtgtgatttcagctcctgtcacctcatgcaagggcgtggagaccagtagaggtgtggaggccaggcagagagaggagcctgctctgcggggggcccagctcatgggcactgccccttcagctagcctgcctccgtcccctgagtccaacagtgggagccctagctgggaagttctgatccccaaagccacagcaggggactgatggctatagcagaatgaggtcgggtcaggaccctcaaacaccatctgggaacaccaagcaccctgaatcgagactgcaggagccctgcggggtgagactgtgtcagagatacactgctggccacaagtgtcccctctcagtcccaccttttcgggctgtcccatgtctatctcaggggcccgttacctctctgcagcagtcccccatcccagccacaccagggtctgtccggccaaccctcttccccagggaaaggagaaaagagaaaacaggctgggcccggtggctcactcctgtaatcccagcactttgggaggttgaggtgggcggatcacctgaggtcaggagtttgagaccagcctggccaacgtggtgaaaccccatctctactaaaaaaaattacaaaaattagccgggagtggtggtgggcacctgtaatcccagttactcgggaggctgaggcaagagaatctcttgagctcaggaggcagaggttgcagtgagctgagattgcgccactgcactccagcctgggtgacagagggagactccgtcccaaaaaaaagaaaagagaaaca

SEQ ID NO: 9525 - DNA, 2484 bp, Homo sapiens
  source 1..2484: mol_type = unassigned DNA
aggtggtgcaacgcctggcccggcccatcccatcccggccacccgggcagcgggaccaggcgtctggggcacagcatgcggggcgtgtggccgcccccggtgtccgccctgctgtcggcgctggggatgtcgacgtacaagcgggccacgctggacgaggaggacctggtggactcgctctccgagggcgacgcataccccaacggcctgcaggtgaacttccacagcccccggagtggccagaggtgctgggctgcacggacccaggtggagaagcggctggtggtgttggtggtacttctggcggcaggactggtggcctgcttggcagcactgggcatccagtaccagacaagatccccctctgtgtgcctgagcgaagcttgtgtctcagtgaccagctccatcttgagctccatggaccccacagtggacccctgccatgacttcttcagctacgcctgtgggggctggatcaaggccaacccagtccctgatggccactcacgctgggggaccttcagcaacctctgggaacacaaccaagcaatcatcaagcacctcctcgaaaactccacggccagcgtgagcgaggcagagagaaaggcgcaagtatactaccgtgcgtgcatgaacgagaccaggatcgaggagctcagggccaaacctctaatggagttgattgagaggctcgggggctggaacatcacaggtccctgggccaaggacaacttccaggacaccctgcaggtggtcaccgcccactaccgcacctcacccttcttctctgtctatgtcagtgccgattccaagaactccaacagcaacgtgatccaggtggaccagtctggcctgggcttgccctcgagagactattacctgaacaaaactgaaaacgagaaggtgctgaccggatatctgaactacatggtccagctggggaagctgctgggcggcggggacgaggaggccatccggccccagatgcagcagatcttggactttgagacggcactggccaacatcaccatcccacaggagaagcgccgtgatgaggagctcatctaccacaaagtgacggcagccgagctgcagaccttggcacccgccatcaactggttgccttttctcaacaccatcttctaccccgtggagatcaatgaatccgagcctattgtggtctatgacaaggaataccttgagcagatctccactctcatcaacaccaccgacagatgcctgctcaacaactacatgatctggaacctggtgcggaaaacaagctccttccttgaccagcgctttcaggacgccgatgagaagttcatggaagtcatgtacgggaccaagaagacctgtcttcctcgctggaagttttgcgtgagtgacacagaaaacaacctgggctttgcgttgggccccatgtttgtcaaagcaaccttcgccgaggacagcaagagcatagccaccgagatcatcctggagattaagaaggcatttgaggaaagcctgagcaccctgaagtggatggatgaggaaacccgaaaatcagccaaggaaaaggccgatgccatctacaacatgataggataccccaacttcatcatggatcccaaggagctggacaaagtgtttaatgactacactgcagttccagacctctactttgaaaatgccatgcggtttttcaacttctcatggagggtcactgccgatcagctcaggaaagcccccaacagagatcagtggagcatgaccccgcccatggtgaacgcctactactcgcccaccaagaatgagattgtgtttccggccgggatcctgcaggcaccattctacacacgctcctcacccaaggccttaaactttggtggcataggtgtcgtcgtgggccatgagctgactcatgcttttgatgatcaaggacgggagtatgacaaggacgggaacctccggccatggtggaagaactcatccgtggaggccttcaagcgtcagaccgagtgcatggtagagcagtacagcaactacagcgtgaacggggagccggtgaacgggcggcacaccctgggggagaacatcgccgacaacgggggtctcaaggcggcctatcgggcttaccagaactgggtgaagaagaacggggctgagcactcgctccccaccctgggcctcaccaataaccagctcttcttcctgggctttgcacaggtctggtgctccgtccgcacacctgagagctcccacgaaggcctcatcaccgatccccacagcccctctcgcttccgggtcatcggctccctctccaattccaaggagttctcagaacacttccgctgcccacctggctcacccatgaacccgcctcacaagtgcgaagtctggtaaggacgaagcggagagagccaagacggaggaggggaaggggctgaggacgagacccccatccagcctccagggcattgctcagcccgcttggccacc

SEQ ID NO: 9526 - DNA, 5099 bp, Homo sapiens
  source 1..5099: mol_type = unassigned DNA
gagcgcgccgcctgggccaggcagccgagccgtccgagcagctgggctgggagcagggaacccggagctgggaatcgggagccgggcgcggggagctgcgcgaagccggggcggagcacgcgagctatgatgtcgacgtacaagcgggccacgctggacgaggaggacctggtggactcgctctccgagggcgacgcataccccaacggcctgcaggtgaacttccacagcccccggagtggccagaggtgctgggctgcacggacccaggtggagaagcggctggtggtgttggtggtacttctggcggcaggactggtggcctgcttggcagcactgggcatccagtaccagacaagatccccctctgtgtgcctgagcgaagcttgtgtctcagtgaccagctccatcttgagctccatggaccccacagtggacccctgccatgacttcttcagctacgcctgtgggggctggatcaaggccaacccagtccctgatggccactcacgctgggggaccttcagcaacctctgggaacacaaccaagcaatcatcaagcacctcctcgaaaactccacggccagcgtgagcgaggcagagagaaaggcgcaagtatactaccgtgcgtgcatgaacgagaccaggatcgaggagctcagggccaaacctctaatggagttgattgagaggctcgggggctggaacatcacaggtccctgggccaaggacaacttccaggacaccctgcaggtggtcaccgcccactaccgcacctcacccttcttctctgtctatgtcagtgccgattccaagaactccaacagcaacgtgatccaggtggaccagtctggcctgggcttgccctcgagagactattacctgaacaaaactgaaaacgagaaggtgctgaccggatatctgaactacatggtccagctggggaagctgctgggcggcggggacgaggaggccatccggccccagatgcagcagatcttggactttgagacggcactggccaacatcaccatcccacaggagaagcgccgtgatgaggagctcatctaccacaaagtgacggcagccgagctgcagaccttggcacccgccatcaactggttgccttttctcaacaccatcttctaccccgtggagatcaatgaatccgagcctattgtggtctatgacaaggaataccttgagcagatctccactctcatcaacaccaccgacagatgcctgctcaacaactacatgatctggaacctggtgcggaaaacaagctccttccttgaccagcgctttcaggacgccgatgagaagttcatggaagtcatgtacgggaccaagaagacctgtcttcctcgctggaagttttgcgtgagtgacacagaaaacaacctgggctttgcgttgggccccatgtttgtcaaagcaaccttcgccgaggacagcaagagcatagccaccgagatcatcctggagattaagaaggcatttgaggaaagcctgagcaccctgaagtggatggatgaggaaacccgaaaatcagccaaggaaaaggccgatgccatctacaacatgataggataccccaacttcatcatggatcccaaggagctggacaaagtgtttaatgactacactgcagttccagacctctactttgaaaatgccatgcggtttttcaacttctcatggagggtcactgccgatcagctcaggaaagcccccaacagagatcagtggagcatgaccccgcccatggtgaacgcctactactcgcccaccaagaatgagattgtgtttccggccgggatcctgcaggcaccattctacacacgctcctcacccaaggccttaaactttggtggcataggtgtcgtcgtgggccatgagctgactcatgcttttgatgatcaaggacgggagtatgacaaggacgggaacctccggccatggtggaagaactcatccgtggaggccttcaagcgtcagaccgagtgcatggtagagcagtacagcaactacagcgtgaacggggagccggtgaacgggcggcacaccctgggggagaacatcgccgacaacgggggtctcaaggcggcctatcgggcttaccagaactgggtgaagaagaacggggctgagcactcgctccccaccctgggcctcaccaataaccagctcttcttcctgggctttgcacaggtctggtgctccgtccgcacacctgagagctcccacgaaggcctcatcaccgatccccacagcccctctcgcttccgggtcatcggctccctctccaattccaaggagttctcagaacacttccgctgcccacctggctcacccatgaacccgcctcacaagtgcgaagtctggtaaggacgaagcggagagagccaagacggaggaggggaaggggctgaggacgagacccccatccagcctccagggcattgctcagcccgcttggccacccggggccctgcttcctcacactggcgggttttcagccggaaccgagcccatggtgttggctctcaacgtgacccgcagtctgatcccctgtgaagagccggacatcccaggcacacgtgtgcgccaccttcagcaggcattcgggtgctgggctggtggctcatcaggcctgggccccacactgacaagcgccagatacgccacaaataccactgtgtcaaatgctttcaagatatatttttggggaaactattttttaaacactgtggaatacactggaaatcttcagggaaaaacacatttaaacacttttttttttaaggaaagaattggtatatttattatgttctgtttttctaaataacctgtggacaagggaagccccactgatttactccctctcttccccactccctgtgaggctgggctgaggcacggatccctgggccacagagcaagtctccaaatcagacagctgcctcagcccctgggatgtgtgatttcagctcctgtcacctcatgcaagggcgtggagaccagtagaggtgtggaggccaggcagagagaggagcctgctctgcggggggcccagctcatgggcactgccccttcagctagcctgcctccgtcccctgagtccaacagtgggagccctagctgggaagttctgatccccaaagccacagcaggggactgatggctatagcagaatgaggtcgggtcaggaccctcaaacaccatctgggaacaccaagcaccctgaatcgagactgcaggagccctgcggggtgagactgtgtcagagatacactgctggccacaagtgtcccctctcagtcccaccttttcgggctgtcccatgtctatctcaggggcccgttacctctctgcagcagtcccccatcccagccacaccagggtctgtccggccaaccctcttccccagggaaaggagaaaagagaaaacaggctgggcccggtggctcactcctgtaatcccagcactttgggaggttgaggtgggcggatcacctgaggtcaggagtttgagaccagcctggccaacgtggtgaaaccccatctctactaaaaaaaattacaaaaattagccgggagtggtggtgggcacctgtaatcccagttactcgggaggctgaggcaagagaatctcttgagctcaggaggcagaggttgcagtgagctgagattgcgccactgcactccagcctgggtgacagagggagactccgtcccaaaaaaaagaaaagagaaacagctgtcacctcccgcaggacccaaatcctctctctgagcaccgtcatccaccacatggctgggcctggctcccaggaccagtccagtcctctagtgccttatctgaggctgcagccgccagtctccaccccaaggagacagcccctgctcctagatgcccttggcctccgcagtgcagcccccaggtgtcctgactgaagcacaggccatagccccatttccccggtgcctgcagggctaacctccacgggagcccaggagctctggccggcaggtccatggcacagggcatcggaagactgcaaaactgctggacttaccctgggctgcagtccattgtcggcccctgggttgaatcaagatagtacttgcagctagatggatgcttttagccaggggacattgtgaggggaagattcctccacccagtctggcctgtggtgtctgtctcctccctgagaccacagcttctccagtagcagactcatgggcgccaccaagtggaagcacctggagcggcctctgccatccagtggggaagccaggccccgagacggaggtgggggcagcacgtgccctccacagccaccgctttcccgcctcagcagcccaggcctcctggcccagccctgcctggacagtgctctcccctcacccgggaagctggaatcctcctgcccgagaggaagcagacggcacagggacacccctgccaccttgggatctgcctccaagctggtgcagggtatcgagagtggattccagatggaggtcctggtcccagcacgcagcagtcctggtagctctgcagaggagacaggaacccgagaagtagctgaagcagaagccagccgcagtccccttgccacatagaggcgggcttctcccagccatggtgtcccctctgcctcccctcccccgaccctcctgccttccgcgtggagggtggtggtcctgtagtgtcagcaccagcaccatgggcttggaccccctccctggacacaggcaggtgtcctagggctgggggtgcagcccgagggaatggagaccacactcatggctcaggtctgccggggccggcagggggttggggaagaagagggctcaggcccagcaggggtggaagcccctgccactgccactacccgctccagagctttaaggaaaatgaagtgagacccctccccttaggcctggggagccatagggctggcttctctgtgggtgcgtggacgtggggttgggagctgggaatctattttttgtattatgttttgagctactgtagttttggcgtggcactattgtaatggaaataaaatacttgtacggagggc

SEQ ID NO: 9527 - DNA, 2328 bp, Homo sapiens
  source 1..2328: mol_type = unassigned DNA
catcccatcccggccacccgggcagcgggaccaggcgtctggggcacagcatgcggggcgtgtggccgcccccggtgtccgccctgctgtcggcgctggggatgtcgacgtacaagcgggccacgctggacgaggaggacctggtggactcgctctccgagggcgacgcataccccaacggcctgcaggtgaacttccacagcccccggagtggccagaggtgctgggctgcacggacccaggtggagaagcggctggtggtgttggtggtacttctggcggcaggactggtggcctgcttggcagcactgggcatccagtaccagacaagatccccctctgtgtgcctgagcgaagcttgtgtctcagtgaccagctccatcttgagctccatggaccccacagtggacccctgccatgacttcttcagctacgcctgtgggggctggatcaaggccaacccagtccctgatggccactcacgctgggggaccttcagcaacctctgggaacacaaccaagcaatcatcaagcacctcctcgaaaactccacggccagcgtgagcgaggcagagagaaaggcgcaagtatactaccgtgcgtgcatgaacgagaccaggatcgaggagctcagggccaaacctctaatggagttgattgagaggctcgggggctggaacatcacaggtccctgggccaaggacaacttccaggacaccctgcaggtggtcaccgcccactaccgcacctcacccttcttctctgtctatgtcagtgccgattccaagaactccaacagcaacgtgatccaggtggaccagtctggcctgggcttgccctcgagagactattacctgaacaaaactgaaaacgagaaggtgctgaccggatatctgaactacatggtccagctggggaagctgctgggcggcggggacgaggaggccatccggccccagatgcagcagatcttggactttgagacggcactggccaacatcaccatcccacaggagaagcgccgtgatgaggagctcatctaccacaaagtgacggcagccgagctgcagaccttggcacccgccatcaactggttgccttttctcaacaccatcttctaccccgtggagatcaatgaatccgagcctattgtggtctatgacaaggaataccttgagcagatctccactctcatcaacaccaccgacagatgcctgctcaacaactacatgatctggaacctggtgcggaaaacaagctccttccttgaccagcgctttcaggacgccgatgagaagttcatggaagtcatgtacgggaccaagaagacctgtcttcctcgctggaagttttgcgtgagtgacacagaaaacaacctgggctttgcgttgggccccatgtttgtcaaagcaaccttcgccgaggacagcaagagcatagccaccgagatcatcctggagattaagaaggcatttgaggaaagcctgagcaccctgaagtggatggatgaggaaacccgaaaatcagccaaggaaaaggccgatgccatctacaacatgataggataccccaacttcatcatggatcccaaggagctggacaaagtgtttaatgactacactgcagttccagacctctactttgaaaatgccatgcggtttttcaacttctcatggagggtcactgccgatcagctcaggaaagcccccaacagagatcagtggagcatgaccccgcccatggtgaacgcctactactcgcccaccaagaatgagattgtgtttccggccgggatcctgcaggcaccattctacacacgctcctcacccaaggccttaaactttggtggcataggtgtcgtcgtgggccatgagctgactcatgcttttgatgatcaaggacgggagtatgacaaggacgggaacctccggccatggtggaagaactcatccgtggaggccttcaagcgtcagaccgagtgcatggtagagcagtacagcaactacagcgtgaacggggagccggtgaacgggcggcacaccctgggggagaacatcgccgacaacgggggtctcaaggcggcctatcgggtctggtgctccgtccgcacacctgagagctcccacgaaggcctcatcaccgatccccacagcccctctcgcttccgggtcatcggctccctctccaattccaaggagttctcagaacacttccgctgcccacctggctcacccatgaacccgcctcacaagtgcgaagtctggtaaggacgaagcggagagagccaagacggaggaggggaaggggctgaggacgagacccccatcc

SEQ ID NO: 9528 - DNA, 2865 bp, Homo sapiens
  source 1..2865: mol_type = unassigned DNA
ggcggcgggcgctgggagacaccggacgcccgctcggctgcgctgcggctcaggcccccgctcgggcccgacccgctcggtcaccgccggctcgggcgcgcacctgccggctgcggccccagggccatgcggaggcccacgaggaggccggcggccacgcgcatcccgtagcccaggtggcccaggtctgcaccgcggcggcctcggcgccatggagcccccgtattcgctgacggcgcactacgatgagttccaagaggtcaagtacgtgagccgctgcggcgcggggggcgcgcgcggggcctccctgcccccgggcttcccgttgggcgctgcgcgcagcgccaccggggcccggtccgggctgccgcgctggaaccggcgcgaggtgtgcctgctgtcggggctggtgttcgccgccggcctctgcgccattctggcggctatgctggccctcaagtacctgggcccggtcgcggccggcggcggcgcctgtcccgagggctgccctgagcgcaaggccttcgcgcgcgccgctcgcttcctggccgccaacctggacgccagcatcgacccatgccaggacttctactcgttcgcctgcggcggttggctgcggcgccacgccatccccgacgacaagctcacctatggcaccatcgcggccatcggcgagcaaaacgaggagcgcctacggcgcctgctggcgcggcccgggggtgggcctggcggcgcggcccagcgcaaggtgcgcgccttcttccgctcgtgcctcgacatgcgcgagatcgagcgactgggcccgcgacccatgctagaggtcatcgaggactgcgggggctgggacctgggcggcgcggaggagcgtccgggggtcgcggcgcgatgggacctcaaccggctgctgtacaaggcgcagggcgtgtacagcgccgccgcgctcttctcgctcacggtcagcctggacgacaggaactcctcgcgctacgtcatccgcattgaccaggatgggctcaccctgccagagaggaccctgtacctcgctcaggatgaggacagtgagaagatcctggcagcatacagggtgttcatggagcgagtgctcagcctcctgggtgcagacgctgtggaacagaaggcccaagagatcctgcaagtggagcagcagctggccaacatcactgtgtcagagcatgacgacctacggcgagatgtcagctccatgtacaacaaggtgacgctggggcagctgcagaagatcaccccccacttgcggtggaagtggctgctagaccagatcttccaggaggacttctcagaggaagaggaggtggtgctgctggcgacagactacatgcagcaggtgtcgcagctcatccgctccacaccccaccgggtcctgcacaactacctggtgtggcgcgtggtggtggtcctgagtgaacacctgtccccgccattccgtgaggcactgcacgagctggcacaggagatggagggcagcgacaagccacaggagctggcccgggtctgcttgggccaggccaatcgccactttggcatggcgcttggcgccctctttgtacatgagcacttctcagctgccagcaaagccaaggtgcagcagctagtggaagacatcaagtacatcctgggccagcgcctggaggagctggactggatggacgccgagaccagggctgctgctcgggccaagctccagtacatgatggtgatggtcggctacccggacttcctgctgaaacccgatgctgtggacaaggagtatgagtttgaggtccatgagaagacctacttcaagaacatcttgaacagcatccgcttcagcatccagctctcagttaagaagattcggcaggaggtggacaagtccacgtggctgctccccccacaggcgctcaatgcctactatctacccaacaagaaccagatggtgttccccgcgggcatcctgcagcccaccctgtacgaccctgacttcccacagtctctcaactacgggggcatcggcaccatcattggacatgagctgacccacggctacgacgactgggggggccagtatgaccgctcagggaacctgctgcactggtggacggaggcctcctacagccgcttcctgcgaaaggctgagtgcatcgtccgtctctatgacaacttcactgtctacaaccagcgggtgaacgggaaacacacgcttggggagaacatcgcagatatgggcggcctcaagctggcctaccacgcctatcagaagtgggtgcgggagcacggcccagagcacccacttccccggctcaagtacacacatgaccagctcttcttcattgcctttgcccagaactggtgcatcaagcggcggtcgcagtccatctacctgcaggtgctgactgacaagcatgcccctgagcactacagggtgctgggcagtgtgtcccagtttgaggagtttggccgggctttccactgtcccaaggactcacccatgaaccctgcccacaagtgttccgtgtggtgagcctggctgcccgcctgcacgcccccactgcccccgcacgaatcacctcctgctggctaccggggcaggcatgcacccggtgccagccccgctctgggcaccacctgccttccagcccctccaggacccggtccccctgctgcccctcacttcaggaggggcctggagcagggtgaggctggactttggggggctgtgagggaaatatactggggtccccagattctgctctaagggggccagaccctctgccaggctggattgtacgggccccaccttcgctgtgttcttgctgcaaagtctggtcaataaatcactgcactgtt

SEQ ID NO: 9529 - DNA, 2322 bp, Homo sapiens
  source 1..2322: mol_type = unassigned DNA
atggagcccccgtattcgctgacggcgcactacgatgagttccaagaggtcaagtacgtgagccgctgcggcgcggggggcgcgcgcggggcctccctgcccccgggcttcccgttgggcgctgcgcgcagcgccaccggggcccggtccgggctgccgcgctggaaccggcgcgaggtgtgcctgctgtcggggctggtgttcgccgccggcctctgcgccattctggcggctatgctggccctcaagtacctgggcccggtcgcggccggcggcggcgcctgtcccgagggctgccctgagcgcaaggccttcgcgcgcgccgctcgcttcctggccgccaacctggacgccagcatcgacccatgccaggacttctactcgttcgcctgcggcggttggctgcggcgccacgccatccccgacgacaagctcacctatggcaccatcgcggccatcggcgagcaaaacgaggagcgcctacggcgcctgctggcgcggcccgggggtgggcctggcggcgcggcccagcgcaaggtgcgcgccttcttccgctcgtgcctcgacatgcgcgagatcgagcgactgggcccgcgacccatgctagaggtcatcgaggactgcgggggctgggacctgggcggcgcggaggagcgtccgggggtcgcggcgcgatgggacctcaaccggctgctgtacaaggcgcagggcgtgtacagcgccgccgcgctcttctcgctcacggtcagcctggacgacaggaactcctcgcgctacgtcatccgcattgaccaggatgggctcaccctgccagagaggaccctgtacctcgctcaggatgaggacagtgagaagatcctggcagcatacagggtgttcatggagcgagtgctcagcctcctgggtgcagacgctgtggaacagaaggcccaagagatcctgcaagtggagcagcagctggccaacatcactgtgtcagagcatgacgacctacggcgagatgtcagctccatgtacaacaaggtgacgctggggcagctgcagaagatcaccccccacttgcggtggaagtggctgctagaccagatcttccaggaggacttctcagaggaagaggaggtggtgctgctggcgacagactacatgcagcaggtgtcgcagctcatccgctccacaccccaccgggtcctgcacaactacctggtgtggcgcgtggtggtggtcctgagtgaacacctgtccccgccattccgtgaggcactgcacgagctggcacaggagatggagggcagcgacaagccacaggagctggcccgggtctgcttgggccaggccaatcgccactttggcatggcgcttggcgccctctttgtacatgagcacttctcagctgccagcaaagccaaggtgcagcagctagtggaagacatcaagtacatcctgggccagcgcctggaggagctggactggatggacgccgagaccagggctgctgctcgggccaagctccagtacatgatggtgatggtcggctacccggacttcctgctgaaacccgatgctgtggacaaggagtatgagtttgaggtccatgagaagacctacttcaagaacatcttgaacagcatccgcttcagcatccagctctcagttaagaagattcggcaggaggtggacaagtggctgctccccccacaggcgctcaatgcctactatctacccaacaagaaccagatggtgttccccgcgggcatcctgcagcccaccctgtacgaccctgacttcccacagtctctcaactacgggggcatcggcaccatcattggacatgagctgacccacggctacgacgactgggggggccagtatgaccgctcagggaacctgctgcactggtggacggaggcctcctacagccgcttcctgcgaaaggctgagtgcatcgtccgtctctatgacaacttcactgtctacaaccagcgggtgaacgggaaacacacgcttggggagaacatcgcagatatgggcggcctcaagctggcctaccacgcctatcagaagtgggtgcgggagcacggcccagagcacccacttccccggctcaagtacacacatgaccagctcttcttcattgcctttgcccagaactggtgcatcaagcggcggtcgcagtccatctacctgcaggtgctgactgacaagcatgcccctgagcactacagggtgctgggcagtgtgtcccagtttgaggagtttggccgggctttccactgtcccaaggactcacccatgaaccctgcccacaagtgttccgtgtggtga

SEQ ID NO: 9530 - DNA, 4135 bp, Homo sapiens
  source 1..4135: mol_type = unassigned DNA
gtgctttttagtggccgcgtcccaggatagctggaaggttaggacgctcttgcggtcccagagtggagtggaaggtctggagctttgggaggagacggggaggacagactggaggcgtgttcctccggagttttctttttcgtgcgagccctcgcgcgcgcgtacagtcatcccgctggtctgacgattgtggagaggcggtggagaggcttcatccatcccacccggtcgtcgccggggattggggtcccagcgagacctccccgggagaagcagtgcccaggaggttttctgaagccggggaagctgtgcagccgaagccgccgccgcgccggagcccgggacaccggccaccctccgcgccacccaccctcgccggctccggcttcctctggcccaggcgccgcgcggacccggcagctgtctgcgcacgccgagctccacggtgaaaaaaaagtgaaggtgtaaaagcagcacaagtgcaataagagatatttcctcaaatttgcctcaagatggaaaccctttgcctcagggcatccttttggctggcactggttggatgtgtaatcagtgataatcctgagagatacagcacaaatctaagcaatcatgtggatgatttcaccacttttcgtggcacagagctcagcttcctggttaccactcatcaacccactaatttggtcctacccagcaatggctcaatgcacaactattgcccacagcagactaaaattacttcagctttcaaatacattaacactgtgatatcttgtactattttcatcgtgggaatggtggggaatgcaactctgctcaggatcatttaccagaacaaatgtatgaggaatggccccaacgcgctgatagccagtcttgcccttggagaccttatctatgtggtcattgatctccctatcaatgtatttaagctgctggctgggcgctggccttttgatcacaatgactttggcgtatttctttgcaagctgttcccctttttgcagaagtcctcggtggggatcaccgtcctcaacctctgcgctcttagtgttgacaggtacagagcagttgcctcctggagtcgtgttcagggaattgggattcctttggtaactgccattgaaattgtctccatctggatcctgtcctttatcctggccattcctgaagcgattggcttcgtcatggtaccctttgaatataggggtgaacagcataaaacctgtatgctcaatgccacatcaaaattcatggagttctaccaagatgtaaaggactggtggctcttcgggttctatttctgtatgcccttggtgtgcactgcgatcttctacaccctcatgacttgtgagatgttgaacagaaggaatggcagcttgagaattgccctcagtgaacatcttaagcagcgtcgagaagtggcaaaaacagttttctgcttggttgtaatttttgctctttgctggttccctcttcatttaagccgtatattgaagaaaactgtgtataacgagatggacaagaaccgatgtgaattacttagtttcttactgctcatggattacatcggtattaacttggcaaccatgaattcatgtataaaccccatagctctgtattttgtgagcaagaaatttaaaaattgtttccagtcatgcctctgctgctgctgttaccagtccaaaagtctgatgacctcggtccccatgaacggaacaagcatccagtggaagaaccacgatcaaaacaaccacaacacagaccggagcagccataaggacagcatgaactgaccacccttagaagcactcctcggtactcccataatcctctcggagaaaaaaatcacaaggcaactgtgagtccgggaatctcttctctgatccttcttccttaattcactcccacacccaagaagaaatgctttccaaaaccgcaagggtagactggtttatccacccacaacatctacgaatcgtacttctttaattgatctaatttacatattctgcgtgttgtattcagcactaaaaaatggtgggagctgggggagaatgaagactgttaaatgaaaccagaaggatatttactacttttgcatgaaaatagagctttcaagtacatggctagcttttatggcagttctggtgaatgttcaatgggaactggtcaccatgaaactttagagattaacgacaagattttctactttttttaagtgatttttttgtccttcagccaaacacaatatgggctcaagtcacttttatttgaaatgtcatttggtgccagtattttttaactgcataatagcctaacatgattatttgaacttatttacacatagtttgaaaaaaaaaagacaaaaatagtattcaggtgagcaattagattagtattttccacgtcactgtttatttttttaaaacacaaattctaaagctacaacaaatactacaggcccttaaagcacagtctgatgacacatttggcagtttaatagatgttactcaaagaattttttaagaactgtattttattttttaaatggtgttttattacaagggaccttgaacatgttttgtatgttaaattcaaaagtaatgcttcaatcagatagttctttttcacaagttcaatctgtttttcatgtaaattttgtatgaaaaatcaatgtcaagtaccaaaatgttaatgtatgtgtcatttaactctgcctgagactttcagtgcactgtatatagaagtctaaaacacacctaagagaaaaagatcgaatttttcagatgattcagaaattttcattcaggtatttgtaatagtgacatatatatgtatatacatatcacctcctattctcttaatttttcttaaaatgttaactggcagtaagtcttttttgatcattcccttttccatataggaaacataattttgaagtggccagatgagtttatcatgtcagtgaaaaataattacccacaaatgccaccagaacttacgattcttcacttcttggggttttcagtatgaacctaactccccaccccaacatctccctcccacattgtcaccatttcaaagggcccacagtgacttttgctgggcattttcccagatgtttacagactgtgagtacagcagaaaatcttttactagtgtgtgtgtgtatatatataaacaattgtaaatttcttttagcccatttttctagactgtctctgtggaatatatttgtgtgtgtgatatatgcatgtgtgtgatggtatgtatggatttaatctaatctaataattgtgccccgcagttgtgccaaagtgcatagtctgagtaaaatctaggtgattgttcatcatgacaacctgcctcagtccattttaacctgtagcaaccttctgcattcataaatcttgtaatcatgttaccattacaaatgggatataagaggcagcgtgaaagcagatgagctgtggactagcaatatagggttttgtttggttggttggtttgataaagcagtatttggggtcatattgtttcctgtgctggagcaaaagtcattacactttgaagtattatattgttcttatcctcaattcaatgtggtgatgaaattgccaggttgtctgatatttctttcagacttcgccagacagattgctgataataaattaggtaagataatttgttgggccatattttaggacaggtaaaataacatcaggttccagttgcttgaattgcaaggctaagaagtactgcccttttgtgtgttagcagtcaaatctattattccactggcgcatcatatgcagtgatatatgcctataatataagccataggttcacaccattttgtttagacaattgtctttttttcaagatgctttgtttctttcatatgaaaaaaatgcattttataaattcagaaagtcatagatttctgaaggcgtcaacgtgcattttatttatggactggtaagtaactgtggtttactagcaggaatatttccaatttctacctttactacatcttttcaacaagtaactttgtagaaatgagccagaagccaaggccctgagttggcagtggcccataagtgtaaaataaaagtttacagaaaccttg

SEQ ID NO: 9531 - DNA, 4022 bp, Homo sapiens
  source 1..4022: mol_type = unassigned DNA
gggggcggcagctttgtgctttttagtggccgcgtcccaggatagctggaaggttaggacgctcttgcggtcccagagtggagtggaaggtctggagctttgggaggagacggggaggacagactggaggcgtgttcctccggagttttctttttcgtgcgagccctcgcgcgcgcgtacagtcatcccgctggtctgacgattgtggagaggcggtggagaggcttcatccatcccacccggtcgtcgccggggattggggtcccagcgagacctccccgggagaagcagtgcccaggaggttttctgaagccggggaagctgtgcagccgaagccgccgccgcgccggagcccgggacaccggccaccctccgcgccacccaccctcgccggctccggcttcctctggcccaggcgccgcgcggacccggcagctgtctgcgcacgccgagctccacggtgaaaaaaaagtgaaggtgtaaaagcagcacaagtgcaataagagatatttcctcaaatttgcctcaagatggaaaccctttgcctcagggcatccttttggctggcactggttggatgtgtaatcagtgataatcctgagagatacagcacaaatctaagcaatcatgtggatgatttcaccacttttcgtggcacagagctcagcttcctggttaccactcatcaacccactaatttggtcctacccagcaatggctcaatgcacaactattgcccacagcagactaaaattacttcagctttcaaatacattaacactgtgatatcttgtactattttcatcgtgggaatggtggggaatgcaactctgctcaggatcatttaccagaacaaatgtatgaggaatggccccaacgcgctgatagccagtcttgcccttggagaccttatctatgtggtcattgatctccctatcaatgtatttaaggtacagagcagttgcctcctggagtcgtgttcagggaattgggattcctttggtaactgccattgaaattgtctccatctggatcctgtcctttatcctggccattcctgaagcgattggcttcgtcatggtaccctttgaatataggggtgaacagcataaaacctgtatgctcaatgccacatcaaaattcatggagttctaccaagatgtaaaggactggtggctcttcgggttctatttctgtatgcccttggtgtgcactgcgatcttctacaccctcatgacttgtgagatgttgaacagaaggaatggcagcttgagaattgccctcagtgaacatcttaagcagcgtcgagaagtggcaaaaacagttttctgcttggttgtaatttttgctctttgctggttccctcttcatttaagccgtatattgaagaaaactgtgtataacgagatggacaagaaccgatgtgaattacttagtttcttactgctcatggattacatcggtattaacttggcaaccatgaattcatgtataaaccccatagctctgtattttgtgagcaagaaatttaaaaattgtttccagtcatgcctctgctgctgctgttaccagtccaaaagtctgatgacctcggtccccatgaacggaacaagcatccagtggaagaaccacgatcaaaacaaccacaacacagaccggagcagccataaggacagcatgaactgaccacccttagaagcactcctcggtactcccataatcctctcggagaaaaaaatcacaaggcaactgtgagtccgggaatctcttctctgatccttcttccttaattcactcccacacccaagaagaaatgctttccaaaaccgcaagggtagactggtttatccacccacaacatctacgaatcgtacttctttaattgatctaatttacatattctgcgtgttgtattcagcactaaaaaatggtgggagctgggggagaatgaagactgttaaatgaaaccagaaggatatttactacttttgcatgaaaatagagctttcaagtacatggctagcttttatggcagttctggtgaatgttcaatgggaactggtcaccatgaaactttagagattaacgacaagattttctactttttttaagtgatttttttgtccttcagccaaacacaatatgggctcaagtcacttttatttgaaatgtcatttggtgccagtattttttaactgcataatagcctaacatgattatttgaacttatttacacatagtttgaaaaaaaaaagacaaaaatagtattcaggtgagcaattagattagtattttccacgtcactgtttatttttttaaaacacaaattctaaagctacaacaaatactacaggcccttaaagcacagtctgatgacacatttggcagtttaatagatgttactcaaagaattttttaagaactgtattttattttttaaatggtgttttattacaagggaccttgaacatgttttgtatgttaaattcaaaagtaatgcttcaatcagatagttctttttcacaagttcaatctgtttttcatgtaaattttgtatgaaaaatcaatgtcaagtaccaaaatgttaatgtatgtgtcatttaactctgcctgagactttcagtgcactgtatatagaagtctaaaacacacctaagagaaaaagatcgaatttttcagatgattcagaaattttcattcaggtatttgtaatagtgacatatatatgtatatacatatcacctcctattctcttaatttttcttaaaatgttaactggcagtaagtcttttttgatcattcccttttccatataggaaacataattttgaagtggccagatgagtttatcatgtcagtgaaaaataattacccacaaatgccaccagaacttacgattcttcacttcttggggttttcagtatgaacctaactccccaccccaacatctccctcccacattgtcaccatttcaaagggcccacagtgacttttgctgggcattttcccagatgtttacagactgtgagtacagcagaaaatcttttactagtgtgtgtgtgtatatatataaacaattgtaaatttcttttagcccatttttctagactgtctctgtggaatatatttgtgtgtgtgatatatgcatgtgtgtgatggtatgtatggatttaatctaatctaataattgtgccccgcagttgtgccaaagtgcatagtctgagtaaaatctaggtgattgttcatcatgacaacctgcctcagtccattttaacctgtagcaaccttctgcattcataaatcttgtaatcatgttaccattacaaatgggatataagaggcagcgtgaaagcagatgagctgtggactagcaatatagggttttgtttggttggttggtttgataaagcagtatttggggtcatattgtttcctgtgctggagcaaaagtcattacactttgaagtattatattgttcttatcctcaattcaatgtggtgatgaaattgccaggttgtctgatatttctttcagacttcgccagacagattgctgataataaattaggtaagataatttgttgggccatattttaggacaggtaaaataacatcaggttccagttgcttgaattgcaaggctaagaagtactgcccttttgtgtgttagcagtcaaatctattattccactggcgcatcatatgcagtgatatatgcctataatataagccataggttcacaccattttgtttagacaattgtctttttttcaagatgctttgtttctttcatatgaaaaaaatgcattttataaattcagaaagtcatagatttctgaaggcgtcaacgtgcattttatttatggactggtaagtaactgtggtttactagcaggaatatttccaatttctacctttactacatcttttcaacaagtaactttgtagaaatgagccagaagccaaggccctgagttggcagtggcccataagtgtaaaataaaagtttacagaaaccttg

SEQ ID NO: 9532 - DNA, 3823 bp, Homo sapiens
  source 1..3823: mol_type = unassigned DNA
gggggcggcagctttgtgctttttagtggccgcgtcccaggatagctggaaggttaggacgctcttgcggtcccagagtggagtggaaggtctggagctttgggaggagacggggaggacagactggaggcgtgttcctccggagttttctttttcgtgcgagccctcgcgcgcgcgtacagtcatcccgctggtctgacgattgtggagaggcggtggagaggcttcatccatcccacccggtcgtcgccggggattggggtcccagcgagacctccccgggagaagcagtgcccaggaggttttctgaagccggggaagctgtgcagccgaagccgccgccgcgccggagcccgggacaccggccaccctccgcgccacccaccctcgccggctccggcttcctctggcccaggcgccgcgcggacccggcagctgtctgcgcacgccgagctccacggtgaaaaaaaagtgaaggtgtaaaagcagcacaagtgcaataagagatatttcctcaaatttgcctcaagatggaaaccctttgcctcagggcatccttttggctggcactggttggatgtgtaatcagtgataatcctgagagatacagcacaaatctaagcaatcatgtggatgatttcaccacttttcgtggcacagagctcagcttcctggttaccactcatcaacccactaatttggtcctacccagcaatggctcaatgcacaactattgcccacagcagactaaaattacttcagctttcaaatacattaacactgtgatatcttgtactattttcatcgtgggaatggtggggaatgcaactctgctcaggatcatttaccagaacaaatgtatgaggaatggccccaacgcgctgatagccagtcttgcccttggagaccttatctatgtggtcattgatctccctatcaatgtatttaagttctaccaagatgtaaaggactggtggctcttcgggttctatttctgtatgcccttggtgtgcactgcgatcttctacaccctcatgacttgtgagatgttgaacagaaggaatggcagcttgagaattgccctcagtgaacatcttaagcagcgtcgagaagtggcaaaaacagttttctgcttggttgtaatttttgctctttgctggttccctcttcatttaagccgtatattgaagaaaactgtgtataacgagatggacaagaaccgatgtgaattacttagtttcttactgctcatggattacatcggtattaacttggcaaccatgaattcatgtataaaccccatagctctgtattttgtgagcaagaaatttaaaaattgtttccagtcatgcctctgctgctgctgttaccagtccaaaagtctgatgacctcggtccccatgaacggaacaagcatccagtggaagaaccacgatcaaaacaaccacaacacagaccggagcagccataaggacagcatgaactgaccacccttagaagcactcctcggtactcccataatcctctcggagaaaaaaatcacaaggcaactgtgagtccgggaatctcttctctgatccttcttccttaattcactcccacacccaagaagaaatgctttccaaaaccgcaagggtagactggtttatccacccacaacatctacgaatcgtacttctttaattgatctaatttacatattctgcgtgttgtattcagcactaaaaaatggtgggagctgggggagaatgaagactgttaaatgaaaccagaaggatatttactacttttgcatgaaaatagagctttcaagtacatggctagcttttatggcagttctggtgaatgttcaatgggaactggtcaccatgaaactttagagattaacgacaagattttctactttttttaagtgatttttttgtccttcagccaaacacaatatgggctcaagtcacttttatttgaaatgtcatttggtgccagtattttttaactgcataatagcctaacatgattatttgaacttatttacacatagtttgaaaaaaaaaagacaaaaatagtattcaggtgagcaattagattagtattttccacgtcactgtttatttttttaaaacacaaattctaaagctacaacaaatactacaggcccttaaagcacagtctgatgacacatttggcagtttaatagatgttactcaaagaattttttaagaactgtattttattttttaaatggtgttttattacaagggaccttgaacatgttttgtatgttaaattcaaaagtaatgcttcaatcagatagttctttttcacaagttcaatctgtttttcatgtaaattttgtatgaaaaatcaatgtcaagtaccaaaatgttaatgtatgtgtcatttaactctgcctgagactttcagtgcactgtatatagaagtctaaaacacacctaagagaaaaagatcgaatttttcagatgattcagaaattttcattcaggtatttgtaatagtgacatatatatgtatatacatatcacctcctattctcttaatttttcttaaaatgttaactggcagtaagtcttttttgatcattcccttttccatataggaaacataattttgaagtggccagatgagtttatcatgtcagtgaaaaataattacccacaaatgccaccagaacttacgattcttcacttcttggggttttcagtatgaacctaactccccaccccaacatctccctcccacattgtcaccatttcaaagggcccacagtgacttttgctgggcattttcccagatgtttacagactgtgagtacagcagaaaatcttttactagtgtgtgtgtgtatatatataaacaattgtaaatttcttttagcccatttttctagactgtctctgtggaatatatttgtgtgtgtgatatatgcatgtgtgtgatggtatgtatggatttaatctaatctaataattgtgccccgcagttgtgccaaagtgcatagtctgagtaaaatctaggtgattgttcatcatgacaacctgcctcagtccattttaacctgtagcaaccttctgcattcataaatcttgtaatcatgttaccattacaaatgggatataagaggcagcgtgaaagcagatgagctgtggactagcaatatagggttttgtttggttggttggtttgataaagcagtatttggggtcatattgtttcctgtgctggagcaaaagtcattacactttgaagtattatattgttcttatcctcaattcaatgtggtgatgaaattgccaggttgtctgatatttctttcagacttcgccagacagattgctgataataaattaggtaagataatttgttgggccatattttaggacaggtaaaataacatcaggttccagttgcttgaattgcaaggctaagaagtactgcccttttgtgtgttagcagtcaaatctattattccactggcgcatcatatgcagtgatatatgcctataatataagccataggttcacaccattttgtttagacaattgtctttttttcaagatgctttgtttctttcatatgaaaaaaatgcattttataaattcagaaagtcatagatttctgaaggcgtcaacgtgcattttatttatggactggtaagtaactgtggtttactagcaggaatatttccaatttctacctttactacatcttttcaacaagtaactttgtagaaatgagccagaagccaaggccctgagttggcagtggcccataagtgtaaaataaaagtttacagaaaccttg

SEQ ID NO: 9533 - DNA, 1091 bp, Homo sapiens
  source 1..1091: mol_type = unassigned DNA
gggggcggcagctttgtgctttttagtggccgcgtcccaggatagctggaaggttaggacgctcttgcggtcccagagtggagtggaaggtctggagctttgggaggagacggggaggacagactggaggcgtgttcctccggagttttctttttcgtgcgagccctcgcgcgcgcgtacagtcatcccgctggtctgacgattgtggagaggcggtggagaggcttcatccatcccacccggtcgtcgccggggattggggtcccagcgagacctccccgggagaagcagtgcccaggaggttttctgaagccggggaagctgtgcagccgaagccgccgccgcgccggagcccgggacaccggccaccctccgcgccacccaccctcgccggctccggcttcctctggcccaggcgccgcgcggacccggcagctgtctgcgcacgccgagctccacggtgaaaaaaaagtgaaggtgtaaaagcagcacaagtgcaataagagatatttcctcaaatttgcctcaagatggaaaccctttgcctcagggcatccttttggctggcactggttggatgtgtaatcagtgataatcctgagagatacagcacaaatctaagcaatcatgtggatgatttcaccacttttcgtggcacagagctcagcttcctggttaccactcatcaacccactaatttggtcctacccagcaatggctcaatgcacaactattgcccacagcagactaaaattacttcagctttcaaatacattaacactgtgatatcttgtactattttcatcgtgggaatggtggggaatgcaactctgctcaggatcatttaccagaacaaatgtatgaggaatggccccaacgcgctgatagccagtcttgcccttggagaccttatctatgtggtcattgatctccctatcaatgtatttaagctgctggctgggcgctggccttttgatcacaatgactttggcgtatttctttgcaagctgttcccctttttgcagaagtcctcggtggggatcaccgtcctcaacctctgcgctcttagtgttgacagaaagactgaaatg

SEQ ID NO: 9534 - DNA, 1032 bp, Homo sapiens
  source 1..1032: mol_type = unassigned DNA
atggaaaccctttgcctcagggcatccttttggctggcactggttggatgtgtaatcagtgataatcctgagagatacagcacaaatctaagcaatcatgtggatgatttcaccacttttcgtggcacagagctcagcttcctggttaccactcatcaacccactaatttggtcctacccagcaatggctcaatgcacaactattgcccacagcagactaaaattacttcagctttcaaatacattaacactgtgatatcttgtactattttcatcgtgggaatggtggggaatgcaactctgctcaggatcatttaccagaacaaatgtatgaggaatggccccaacgcgctgatagccagtcttgcccttggagaccttatctatgtggtcattgatctccctatcaatgtatttaagttctaccaagatgtaaaggactggtggctcttcgggttctatttctgtatgcccttggtgtgcactgcgatcttctacaccctcatgacttgtgagatgttgaacagaaggaatggcagcttgagaattgccctcagtgaacatcttaagcagcgtcgagaagtggcaaaaacagttttctgcttggttgtaatttttgctctttgctggttccctcttcatttaagccgtatattgaagaaaactgtgtataacgagatggacaagaaccgatgtgaattacttagtttcttactgctcatggattacatcggtattaacttggcaaccatgaattcatgtataaaccccatagctctgtattttgtgagcaagaaatttaaaaattgtttccagtcatgcctctgctgctgctgttaccagtccaaaagtctgatgacctcggtccccatgaacggaacaagcatccagtggaagaaccacgatcaaaacaaccacaacacagaccggagcagccataaggacagcatgaactgaccacccttagaagcactcctcggtactcccataatcctctcggagaaaaaaatcacaaggcaactgtgagtccgg

SEQ ID NO: 9535 - DNA, 2438 bp, Homo sapiens
  source 1..2438: mol_type = unassigned DNA
cgattaaaggcgctgccagcctcacgctctgggcacagctgagcgtgacactcggggaagtcaaacccctcactactgcctaggaagatggctagactttaaatactatttttttccctttaagaaaaaaattattggagctttttttcttgctttctttttccttttctttttctttttttccttcatttttttggccgtggcttactccccatttaaatcaaatcattgaatctggttgcagaaagaaaaaagaaatagccaagtgtctccatatctggatgtctacaaattagagagggagagacagcgagatctatctgctagataagaacgagcgatccaggccagacgcctgagcttttttcctgcacccgccccgtgccttcgctgaggcttcgcctgcctccttcctccgcgcacccccacgggccgctggcaaagtggggtggggagcgaggcggtgggggcgggggccggcgcggcggccggggcggcggggcggccgagcatggaagaacagcagccggaacctaaaagtcagcgcgactcggccctcggcgcggcggcggcggcgactccgggcggcctcagcctgagcctcagtccgggcgccagcggcagcagcggcagcggcagcgatggagacagcgtgccggtgtccccgcagcctgcgcccccctcgccgcccgcggcgccttgcctgccgcccctggcccaccacccgcacctccccccacaccccccgcccccgccgcctcagcatctcgcggcgcctgctcaccagccgcagccagcggcccagctgcaccgcaccaccaactttttcatcgacaacatcctgaggccggacttcggctgcaaaaaggagcagccgccaccgcagcttctggtggctgcggcggccagaggaggcgcaggaggaggaggccgggtcgagcgtgacagaggccagactgccgcaggtagagaccctgtccacccgttgggcacccgggcgccaggcgctgcctcgctcctgtgcgccccggacgcgaactgtggcccacccgacggctcccagccagccgccgccggcgcgggcgcgtctaaagctgggaacccggctgcggcggcggcggcggccgcggcggcagtggcggcggcggcggcggccgcagcagccaagccctcggacaccggtggcggcggcagtggaggcggcgcggggagccccggagcgcagggcaccaaatacccggagcacggcaacccggctatcctacttatgggctcagccaacggcgggcccgtggtcaaaactgactcgcagcagcctctcgtatggcccgcctgggtgtactgcacacgttattcggatcgtccatcctccggtccgcgcaccaggaagctgaagaagaagaagaacgagaaggaggacaagcggccgcggaccgcgttcacggccgagcagctgcagagactcaaggcggagttccaggcaaaccgctacatcacggagcagcggcggcagaccctggcccaggaactcagcctcaacgagtcccagatcaagatctggttccagaacaagcgcgccaagatcaagaaagccacaggcatcaagaacggcctggcgctgcacctcatggcccagggactgtacaaccactccaccaccacggtccaggacaaagacgagagcgagtagccgccacaggccggggccgcgcccgcgccccctcccggcaccgccgccgtcgtctcccggcccctcgctgggggagaaagcatctgctccaaggagggagggagcgcagggaaaagagcgagagagacagaaagagagcctcagaatggacaatgacgttgaaacgcagcatttttgaaaagggagaaagactcggacaggtgctatcgaaaaataagatccattctctattcccagtataagggacgaaactgcgaactccttaaagctctatctagccaaaccgcttacgaccttgtatatatttaatttcaggtaaggaaaacacatacgtgtagcgatctctatttgctggacatttttattaatctcctttattattattgttataattattataattattataattattttatcccctcccccaccgcctcgctgcccccgcccagtttcgttttcgttgcctttttcatttgaatgtcattgcttctccggtgcctcccgacccgcatcgccggccctggtttctctgggacttttctttgtgtgcgagagtgtgtttcctttcgtgtctgcccacctcttctcccccacctcccgggtcccttctgtcggtctgtctgttctgcccccctttcgttttccggagacttgttgagaaatacgaccccacagactgcgagactgaaccgccgctacaagccaaagattttattatgttcagaaacctgtagtctgaaataaa

SEQ ID NO: 9536 - DNA, 3395 bp, Homo sapiens
  source 1..3395: mol_type = unassigned DNA
tctctcatcgtctgggcgagcggggcggctcgtggtgtttctaacccagttcgtggattcaaaggtggctccgcgccgagcgcggccggcgacttgtaggacctcagccctggccgcggccgccgcgcacgccctcggaagactcggcggggtgggggcgcgggggtctccgtgtgcgccgcgggagggccgaaggctgatttggaagggcgtccccggagaaccagtgtgggatttactgtgaacagcatggaggagaatgaccccaagcctggcgaagcagcggcggcggtggagggacagcggcagccggaatccagccccggcggcggctcgggcggcggcggcggtagcagcccgggcgaagcggacaccgggcgccggcgggctctgatgctgcccgcggtcctgcaggcgcccggcaaccaccagcacccgcaccgcatcaccaacttcttcatcgacaacatcctgcggcccgagttcggccggcgaaaggacgcggggacctgctgtgcgggcgcgggaggaggaaggggcggcggagccggcggcgaaggcggcgcgagcggtgcggagggaggcggcggcgcgggcggctcggagcagctcttgggctcgggctcccgagagccccggcagaacccgccatgtgcgcccggcgcgggcgggccgctcccagccgccggcagcgactctccgggtgacggggaaggcggctccaagacgctctcgctgcacggtggcgccaagaaaggcggcgaccccggcggccccctggacgggtcgctcaaggcccgcggcttgggcggcggcgacctgtcggtgagctcggactcggacagctcgcaagccggcgccaacctgggcgcgcagcccatgctctggccggcgtgggtctactgtacgcgctactcggaccggccttcttcaggtcccaggtctcgaaaaccaaagaagaagaacccgaacaaagaggacaagcggccgcgcacggcctttaccgccgagcagctgcagaggctcaaggccgagttccagaccaacaggtacctgacggagcagcggcgccagagcctggcgcaggagctgagcctcaacgagtcacagatcaagatttggttccagaacaagcgcgccaagatcaagaaggccacgggcaacaagaacacgctggccgtgcacctcatggcacagggcttgtacaaccactccaccacagccaaggagggcaagtcggacagcgagtagggcggggggcatggaggccaggtctcagtccgcgctaaacaatgcaataatttaaaatcataaagggccagtgtataaagattataccagcattaatagtgaaaatattgtgtattagctaaggttctgaaatattctatgtatatatcatttacaggtggtataaaatccaaaatatctgactataaaatatttttttgagttttttgtgtttatgagattatgctaattttatgggtttttttcttttttgcgaagggggctgcttagggtttcacctttttttaatcccctaagctccattatatgacattggacacttttttattattccaaaagaagaaaaaattaaaacaacttgctgaagtccaaagattttttattgctgcatttcacacaactgtgaaccgaataaatagctcctatttggtctatgacttctgccactttgtttgtgttggcttggtgaggacagcaggaggggcccacacctcaagcctggaccagccacctcaaggccttggggagcttaggggacctggtgggagagaggggacttccagggtccttgggccagttctgggatttggccctgggaagcagcccagcgtaccccaggcctgctctgggaagtcggctccatgctcaccagcagccgcccaggcccgcagcctcacccggctccctctcctcaccctcctgcacctaactccctcctccttctcctttttcctcctcttcctccttcctccttcctcctgctcctcctttcttcttctttttcttctcctcctcctccttccttcctcctcctccttctctttcctcctcctcctcaccaagggcccaaccgtgtgcatacatcgtctgcgtctgtggtctgtgtcgctgtccccagtcccaccgcagtcctgccgcaggcctaaccctcctgccctgggcactgcctccatgcagaagcgcttcgaggttctggggctaaaggcctggggtgtgtggcctaaagcccaagagcggtggggcgaccctccttttggcttggccccaggaatttcctgtgactccaccagccatcatgggtgccagccagggtcccagaaatgaggccatggctcactgtttctgggcgggcagaaggctctgtagagggagatggcatcatctatcttcctttcctttttcttttcttccctatttttttctttttttcctttatttttttcttttcttggagtggctgcttctgctatagagaacattcttccaagataaatatgtgtgtttacacatatgtctgcatgcatgtgaacacacacacacacacacacacaccaggcgtgtttgagtccacagttctgaaacatgtggctaccttgtctttcaaaagaactcagaatcctccaggatctagaagaaggaagaaagtgtgtaaataatcatttcttatcatcactttttgtcttttcttgttttttaaaatatacattttatttttgaaggtgtggtacagtgtaaattaaatatattcaatatatttcccaccaagtacctatatatgtatataaacaaacacattatctatatataacgccacactgtcttctgtttagtgtatggggaaagaccaatccaactgtccatctgtggctgggacagcccagggggtgtgcccacggctgacccaggggtgtgcacacggctgagctgggagtcccgctggtctccctgaggactgagggtgaacttcgctctttgccttaaacctctttatttcattgcagtaatagttttacgttgtacataatagtgtaaacctttttaaaaaggaaagtataaaaacaaaagttgtaatttaaaagtctgaataaccatctgctgcttaggaaactcaatgaaatgacatgcctttttagcaggaagcaaagttggtttctgttttttgttttctttgttgttttagtttataaaacatgtgcattttacagttccagtatcaaatatttataatcttatgagaaatgaatgaatgtttctatttacaactgtgcttatcaaaattgtgaacacccccacccccgcatttttgtgtgttgaaattcttgaaggttacattaaataaaacaaaatctctttattataaaata

SEQ ID NO: 9537 - DNA, 4022 bp, Homo sapiens
  source 1..4022: mol_type = unassigned DNA
aattagtgcctccaaacgccgtgtgtgagctcatcgaagtcatgctctgcacacatattatttatagcagatctgaggcatgcatggtgtttgacatttctgtcttttaagtagggggacttcaaaaagtcgtgggcatccccctaggcaaagtgcagtgggcagggaccaggcagggtgcgggcgcaaggcgaacgcgcagaccacgagtgtcctggcgcaggtgccgggggcggcggctgcaactccgcagcgtccgctcgggaggagagttcgcggctgatctccggatgccttgcagatgcaaaatgtgtctctggccagcaggaggaaggaagaggaagtgagagcagcggcagccggcggtgcagcagccggccgacccagagtgtaagtgcgtgtgctggggcgagcgggagcgggcgaggatgggcacaggatagaggcagagccacccacgccgccgcggccccacgctgggcgacagagcctccagttccccttcaatggtggcgggtcgccggagctctgatcgccgggaacccttgccgctgctgtcctgcgaccccaagcaggtatagacacgtgtggccgtttacgctgtaggatcctcattcccactggctttgaacattttggggacttacaatgccgccacccgcggacatcgtcaaggtggccatagaatggccgggcgcctaccccaaactcatggaaattgatcagaaaaaaccactgtctgcaataataaaggaagtctgtgatgggtggtctcttgccaaccatgaatattttgcactccagcatgccgatagttcaaacttctatatcacagaaaagaaccgcaatgagataaaaaatggcactatccttcgattaaccacatctccagctcagaacgcccagcagctccatgaacgaatccagtcctcgagtatggatgccaagctggaagccctgaaggacttggccagcctctcccgggatgtcacgtttgcccaggagtttataaacctggacggtatctctctcctcacgcagatggtggagagcggcactgagcgataccagaaattgcagaagatcatgaagccttgctttggagacatgctgtccttcaccctgacggccttcgttgagctgatggaccatggcatagtgtcctgggatacattttcggtggcgttcattaagaagatagcaagttttgtgaacaagtcagccatagacatctcgatcctgcagcggtccttggccattttggagtcgatggtgctcaatagccatgacctctaccagaaagtggcgcaggagatcaccatcggccagctcattccacacctgcaagggtcagatcaagaaatccaaacctatactattgcagtgattaatgcgcttttcctgaaggctcctgatgagaggaggcaggagatggcgaatattttggctcagaagcaactgcgttccatcattttaacacatgtcatccgagcccagcgggccatcaacaatgagatggcgcaccagctgtatgttctacaagtgctcacctttaacctcctggaagacaggatgatgaccaaaatggacccccaggaccaggctcagagggacatcatatttgaacttcgaagaattgcttttgatgctgagtctgaacctaacaacagcagtggcagcatggagaaacgcaagtccatgtacacgcgagattataagaagcttgggttcattaatcatgtcaaccctgccatggacttcacgcagactccacctgggatgttggctctggacaacatgctgtactttgccaagcaccaccaagatgcctacatccggattgtgcttgagaacagtagtcgagaagacaagcatgaatgtccctttggccgcagtagtatagagctgaccaagatgctatgtgagatcttgaaagtgggcgagttgcctagtgagacctgcaacgacttccacccgatgttcttcacccacgacagatcctttgaggagtttttctgcatctgtatccagctcctgaacaagacatggaaggaaatgagggcaacttctgaagacttcaacaaggtaatgcaggtggtgaaggagcaggttatgagagcacttacaaccaagcctagctccctggaccagttcaagagcaaactgcagaacctgagctacactgagatcctgaaaatccgccagtccgagaggatgaaccaggaagatttccagtcccgcccgattttggaactaaaggagaagattcagccagaaatcttagagctgatcaaacagcaacgcctgaaccgccttgtggaagggacctgctttaggaaactcaatgcccggcggaggcaagacaagttttggtattgtcggctttcgccaaatcacaaagtcctgcattacggagacttagaagagagtcctcagggagaagtgccccacgattccttgcaggacaaactgccggtggcagatatcaaagccgtggtgacgggaaaggactgccctcatatgaaagagaaaggtgcccttaaacaaaacaaggaggtgcttgaactcgctttctccatcttgtatgactcaaactgccaactgaacttcatcgctcctgacaagcatgagtactgtatctggacggatggactgaatgcgctactcgggaaggacatgatgagcgacctgacgcggaatgacctggacaccctgctcagcatggaaatcaagctccgcctcctggacctggaaaacatccagatccctgacgcacctccgccgattcccaaggagcccagcaactatgacttcgtctatgactgtaactgaagtggccgggcccagacatgccccttccaaaactggaacacctagctaacaggagagaggaatgaaaacacacccacgccttggaaccgtcctttggtaaagggaagctgtgggtccacattcccttcagcatcacctctagccctggcaactttcagcccctagctggcatcttgctcaccgccctgattctgttcctcggctccactgcttcaggtcacttcccatggctgcagtccactggtgggacaagagcaaagcccactgccagtaagaaggccaaagggcccttccatcctagccctctgcaggcatgcccttccttcccttgggcaggaaagccagcagccccagactgcccaaaaacttgcccaccagaccaagggcagtgccccaaggcccctgtctggaggaaatggcctagctatttgatgagaagaccaaaccccacatcctcctttcccctctctctagaatcatctcgcaccaccagttacacttgaattaagatctgcgctcaaatctcctcccacctctctccctgcttttgccttgctctgttcctctttggtcccaagagcagcagccgcagcctcctcgtgatcctccctagcataaatttcccaaacagtccacaggtcccatgcccactttgcgtctgcactgtgatcgtgacaaatcttccctcctcaccagctagtctggggtttcctctccctgccccaggccagaactgccttcttcatttccacccacgctcccagcctcttagctgaaagcacaaatggtgaaatcagtagtctcgctccatctctaatagactaaacctaaatgcctctaggacggactgttgctatccaagcgtttggtgttaccttctcctgggaggtcctgctgcaactcaagttccacaggatggtcaagctgtcagacatccaagtttacatcattgtaattattactggtatttacaatttgcaagagttttgggttagtttttttttttttttttgctttgtttttgtacaaaagagtctaacattttttgccaaacagatatatatttaatgaaaagaagagatacataaatgtgtgaatttccagtttttttttaattattttaatcccaaacatcttcctgaaaataacattcccttaaacatgctgtggaataaaatggattgtgatga

SEQ ID NO: 9538 - DNA, 2485 bp, Homo sapiens
  source 1..2485: mol_type = unassigned DNA
atgtccgaacatcagaaggaacaaactctggacacaccatctttaagaactgtaacactcactgtgagggtccatggcttcattcttgaagtcagcaagaccaagaacccaccaattccagacacattttggccacccagatgggaccatcgcccatcgccaggcggtgagactaatgcctattgccaaatgaatcatgtcaaccctgccatggacttcacgcagactccacctgggatgttggctctggacaacatgctgtactttgccaagcaccaccaagatgcctacatccggattgtgcttgagaacagtagtcgagaagacaagcatgaatgtccctttggccgcagtagtatagagctgaccaagatgctatgtgagatcttgaaagtgggcgagttgcctagtgagacctgcaacgacttccacccgatgttcttcacccacgacagatcctttgaggagtttttctgcatctgtatccagctcctgaacaagacatggaaggaaatgagggcaacttctgaagacttcaacaaggtaatgcaggtggtgaaggagcaggttatgagagcacttacaaccaagcctagctccctggaccagttcaagagcaaactgcagaacctgagctacactgagatcctgaaaatccgccagtccgagaggatgaaccaggaagatttccagtcccgcccgattttggaactaaaggagaagattcagccagaaatcttagagctgatcaaacagcaacgcctgaaccgccttgtggaagggacctgctttaggaaactcaatgcccggcggaggcaagacaagttttggtattgtcggctttcgccaaatcacaaagtcctgcattacggagacttagaagagagtcctcagggagaagtgccccacgattccttgcaggacaaactgccggtggcagatatcaaagccgtggtgacgggaaaggactgccctcatatgaaagagaaaggtgcccttaaacaaaacaaggaggtgcttgaactcgctttctccatcttgtatgactcaaactgccaactgaacttcatcgctcctgacaagcatgagtactgtatctggacggatggactgaatgcgctactcgggaaggacatgatgagcgacctgacgcggaatgacctggacaccctgctcagcatggaaatcaagctccgcctcctggacctggaaaacatccagatccctgacgcacctccgccgattcccaaggagcccagcaactatgacttcgtctatgactgtaactgaagtggccgggcccagacatgccccttccaaaactggaacacctagctaacaggagagaggaatgaaaacacacccacgccttggaaccgtcctttggtaaagggaagctgtgggtccacattcccttcagcatcacctctagccctggcaactttcagcccctagctggcatcttgctcaccgccctgattctgttcctcggctccactgcttcaggtcacttcccatggctgcagtccactggtgggacaagagcaaagcccactgccagtaagaaggccaaagggcccttccatcctagccctctgcaggcatgcccttccttcccttgggcaggaaagccagcagccccagactgcccaaaaacttgcccaccagaccaagggcagtgccccaaggcccctgtctggaggaaatggcctagctatttgatgagaagaccaaaccccacatcctcctttcccctctctctagaatcatctcgcaccaccagttacacttgaattaagatctgcgctcaaatctcctcccacctctctccctgcttttgccttgctctgttcctctttggtcccaagagcagcagccgcagcctcctcgtgatcctccctagcataaatttcccaaacagtccacaggtcccatgcccactttgcgtctgcactgtgatcgtgacaaatcttccctcctcaccagctagtctggggtttcctctccctgccccaggccagaactgccttcttcatttccacccacgctcccagcctcttagctgaaagcacaaatggtgaaatcagtagtctcgctccatctctaatagactaaacctaaatgcctctaggacggactgttgctatccaagcgtttggtgttaccttctcctgggaggtcctgctgcaactcaagttccacaggatggtcaagctgtcagacatccaagtttacatcattgtaattattactggtatttacaatttgcaagagttttgggttagtttttttttttttttttgctttgtttttgtacaaaagagtctaacattttttgccaaacagatatatatttaatgaaaagaagagatacataaatgtgtgaatttccagtttttttttaattattttaatcccaaacatcttcctgaaaataacattcccttaaacatgctgtggaataaaatggattgtgatgatttgg

SEQ ID NO: 9539 - DNA, 2948 bp, Homo sapiens
  source 1..2948: mol_type = unassigned DNA
aatacaaagcatgcttgtgagacagaattcctccttagacatgccggtcaacttacagaagagaaccgcaatgagataaaaaatggcactatccttcgattaaccacatctccagctcagaacgcccagcagctccatgaacgaatccagtcctcgagtatggatgccaagctggaagccctgaaggacttggccagcctctcccgggatgtcacgtttgcccaggagtttataaacctggacggtatctctctcctcacgcagatggtggagagcggcactgagcgataccagaaattgcagaagatcatgaagccttgctttggagacatgctgtccttcaccctgacggccttcgttgagctgatggaccatggcatagtgtcctgggatacattttcggtggcgttcattaagaagatagcaagttttgtgaacaagtcagccatagacatctcgatcctgcagcggtccttggccattttggagtcgatggtgctcaatagccatgacctctaccagaaagtggcgcaggagatcaccatcggccagctcattccacacctgcaagggtcagatcaagaaatccaaacctatactattgcagtgattaatgcgcttttcctgaaggctcctgatgagaggaggcaggagatggcgaatattttggctcagaagcaactgcgttccatcattttaacacatgtcatccgagcccagcgggccatcaacaatgagatggcgcaccagctgtatgttctacaagtgctcacctttaacctcctggaagacaggatgatgaccaaaatggacccccaggaccaggctcagagggacatcatatttgaacttcgaagaattgcttttgatgctgagtctgaacctaacaacagcagtggcagcatggagaaacgcaagtccatgtacacgcgagattataagaagcttgggttcattaatcatgtcaaccctgccatggacttcacgcagactccacctgggatgttggctctggacaacatgctgtactttgccaagcaccaccaagatgcctacatccggattgtgcttgagaacagtagtcgagaagacaagcatgaatgtccctttggccgcagtagtatagagctgaccaagatgctatgtgagatcttgaaagtgggcgagttgcctagtgagacctgcaacgacttccacccgatgttcttcacccacgacagatcctttgaggagtttttctgcatctgtatccagctcctgaacaagacatggaaggaaatgagggcaacttctgaagacttcaacaaggtaatgcaggtggtgaaggagcaggttatgagagcacttacaaccaagcctagctccctggaccagttcaagagcaaactgcagaacctgagctacactgagatcctgaaaatccgccagtccgagaggatgaaccaggaagatttccagtcccgcccgattttggaactaaaggagaagattcagccagaaatcttagagctgatcaaacagcaacgcctgaaccgccttgtggaagggacctgctttaggaaactcaatgcccggcggaggcaagacaagttttggtattgtcggctttcgccaaatcacaaagtcctgcattacggagacttagaagagagtcctcagggagaagtgccccacgattccttgcaggacaaactgccggtggcagatatcaaagccgtggtgacgggaaaggactgccctcatatgaaagagaaaggtgcccttaaacaaaacaaggaggtgcttgaactcgctttctccatcttgtatgactcaaactgccaactgaacttcatcgctcctgacaagcatgagtactgtatctggacggatggactgaatgcgctactcgggaaggacatgatgagcgacctgacgcggaatgacctggacaccctgctcagcatggaaatcaagctccgcctcctggacctggaaaacatccagatccctgacgcacctccgccgattcccaaggagcccagcaactatgacttcgtctatgactgtaactgaagtggccgggcccagacatgcccttccttcccttgggcaggaaagccagcagccccagactgcccaaaaacttgcccaccagaccaagggcagtgccccaaggcccctgtctggaggaaatggcctagctatttgatgagaagaccaaaccccacatcctcctttcccctctctctagaatcatctcgcaccaccagttacacttgaattaagatctgcgctcaaatctcctcccacctctctccctgcttttgccttgctctgttcctctttggtcccaagagcagcagccgcagcctcctcgtgatcctccctagcataaatttcccaaacagtccacaggtcccatgcccactttgcgtctgcactgtgatcgtgacaaatcttccctcctcaccagctagtctggggtttcctctccctgccccaggccagaactgccttcttcatttccacccacgctcccagcctcttagctgaaagcacaaatggtgaaatcagtagtctcgctccatctctaatagactaaacctaaatgcctctaggacggactgttgctatccaagcgtttggtgttaccttctcctgggaggtcctgctgcaactcaagttccacaggatggtcaagctgtcagacatccaagtttacatcattgtaattattactggtatttacaatttgcaagagttttgggttagtttttttttttttttttgctttgtttttgtacaaaagagtctaacattttttgccaaacagatatatatttaatgaaaagaagagatacataaatgtgtgaatttccagtttttttttaattattttaatcccaaacatcttcctgaaaataacattcccttaaacatgctgtggaataaaatggattgtgatg

SEQ ID NO: 9540 - DNA, 1982 bp, Homo sapiens
  source 1..1982: mol_type = unassigned DNA
tggaggggcagcgtggggaacgagaaactctttgcctgtagggacccttctagctgcaaacttaaaaatgtatgtggcaagatgcaacccaagcaccgagcaggattccagacgagttataatcattctgaacggggagaggaaaggtaatgcaggtggtgaaggagcaggttatgagagcacttacaaccaagcctagctccctggaccagttcaagagcaaactgcagaacctgagctacactgagatcctgaaaatccgccagtccgagaggatgaaccaggaagatttccagtcccgcccgattttggaactaaaggagaagattcagccagaaatcttagagctgatcaaacagcaacgcctgaaccgccttgtggaagggacctgctttaggaaactcaatgcccggcggaggcaagacaagttttggtattgtcggctttcgccaaatcacaaagtcctgcattacggagacttagaagagagtcctcagggagaagtgccccacgattccttgcaggacaaactgccggtggcagatatcaaagccgtggtgacgggaaaggactgccctcatatgaaagagaaaggtgcccttaaacaaaacaaggaggtgcttgaactcgctttctccatcttgtatgactcaaactgccaactgaacttcatcgctcctgacaagcatgagtactgtatctggacggatggactgaatgcgctactcgggaaggacatgatgagcgacctgacgcggaatgacctggacaccctgctcagcatggaaatcaagctccgcctcctggacctggaaaacatccagatccctgacgcacctccgccgattcccaaggagcccagcaactatgacttcgtctatgactgtaactgaagtggccgggcccagacatgccccttccaaaactggaacacctagctaacaggagagaggaatgaaaacacacccacgccttggaaccgtcctttggtaaagggaagctgtgggtccacattcccttcagcatcacctctagccctggcaactttcagcccctagctggcatcttgctcaccgccctgattctgttcctcggctccactgcttcaggtcacttcccatggctgcagtccactggtgggacaagagcaaagcccactgccagtaagaaggccaaagggcccttccatcctagccctctgcaggcatgcccttccttcccttgggcaggaaagccagcagccccagactgcccaaaaacttgcccaccagaccaagggcagtgccccaaggcccctgtctggaggaaatggcctagctatttgatgagaagaccaaaccccacatcctcctttcccctctctctagaatcatctcgcaccaccagttacacttgaattaagatctgcgctcaaatctcctcccacctctctccctgcttttgccttgctctgttcctctttggtcccaagagcagcagccgcagcctcctcgtgatcctccctagcataaatttcccaaacagtccacaggtcccatgcccactttgcgtctgcactgtgatcgtgacaaatcttccctcctcaccagctagtctggggtttcctctccctgccccaggccagaactgccttcttcatttccacccacgctcccagcctcttagctgaaagcacaaatggtgaaatcagtagtctcgctccatctctaatagactaaacctaaatgcctctaggacggactgttgctatccaagcgtttggtgttaccttctcctgggaggtcctgctgcaactcaagttccacaggatggtcaagctgtcagacatccaagtttacatcattgtaattattactggtatttacaatttgcaagagttttgggttagtttttttttttttttttgctttgtttttgtacaaaagagtctaacattttttgccaaacagatatatatttaatgaaaagaagagatacataaa

SEQ ID NO: 9541 - DNA, 2524 bp, Homo sapiens
  source 1..2524: mol_type = unassigned DNA
tgatgaatatgaactatctccagcccatcaccagctttttctttttcttcttgtccttatttgttttttagttctttataagaaaaagtgggggatatattgagaagtaccaagacggggagctatgggtttattgacaaaagagcataggacactaaaatagaaacgaagttattatttttctcttgtgatactctaagagaaaagctcttcctggaaaagccgatgatctctgaagatgctaaataaatgagcaggagtttccctgaaatggaggcgccctttgattggctgatctttccccgactcctgccaatcggagcatccctgggctccagctccataaacataagcaaagctacatgcttattcttctggacttggagtgtataccatttaaaggtgtgcggcgggtctctgttcacatggctcaactggaaacctgtttcatgaacaagcttactcaggaaccatctggtggtattccagcacattgttcttcagggggacgactctaagtcgctttgtggtggcagcagcttagaatcagtatttgtggttgggaaagatggacttacgggagcttggtaatgcaggtggtgaaggagcaggttatgagagcacttacaaccaagcctagctccctggaccagttcaagagcaaactgcagaacctgagctacactgagatcctgaaaatccgccagtccgagaggatgaaccaggaagatttccagtcccgcccgattttggaactaaaggagaagattcagccagaaatcttagagctgatcaaacagcaacgcctgaaccgccttgtggaagggacctgctttaggaaactcaatgcccggcggaggcaagacaagttttggtattgtcggctttcgccaaatcacaaagtcctgcattacggagacttagaagagagtcctcagggagaagtgccccacgattccttgcaggacaaactgccggtggcagatatcaaagccgtggtgacgggaaaggactgccctcatatgaaagagaaaggtgcccttaaacaaaacaaggaggtgcttgaactcgctttctccatcttgtatgactcaaactgccaactgaacttcatcgctcctgacaagcatgagtactgtatctggacggatggactgaatgcgctactcgggaaggacatgatgagcgacctgacgcggaatgacctggacaccctgctcagcatggaaatcaagctccgcctcctggacctggaaaacatccagatccctgacgcacctccgccgattcccaaggagcccagcaactatgacttcgtctatgactgtaactgaagtggccgggcccagacatgccccttccaaaactggaacacctagctaacaggagagaggaatgaaaacacacccacgccttggaaccgtcctttggtaaagggaagctgtgggtccacattcccttcagcatcacctctagccctggcaactttcagcccctagctggcatcttgctcaccgccctgattctgttcctcggctccactgcttcaggtcacttcccatggctgcagtccactggtgggacaagagcaaagcccactgccagtaagaaggccaaagggcccttccatcctagccctctgcaggcatgcccttccttcccttgggcaggaaagccagcagccccagactgcccaaaaacttgcccaccagaccaagggcagtgccccaaggcccctgtctggaggaaatggcctagctatttgatgagaagaccaaaccccacatcctcctttcccctctctctagaatcatctcgcaccaccagttacacttgaattaagatctgcgctcaaatctcctcccacctctctccctgcttttgccttgctctgttcctctttggtcccaagagcagcagccgcagcctcctcgtgatcctccctagcataaatttcccaaacagtccacaggtcccatgcccactttgcgtctgcactgtgatcgtgacaaatcttccctcctcaccagctagtctggggtttcctctccctgccccaggccagaactgccttcttcatttccacccacgctcccagcctcttagctgaaagcacaaatggtgaaatcagtagtctcgctccatctctaatagactaaacctaaatgcctctaggacggactgttgctatccaagcgtttggtgttaccttctcctgggaggtcctgctgcaactcaagttccacaggatggtcaagctgtcagacatccaagtttacatcattgtaattattactggtatttacaatttgcaagagttttgggttagtttttttttttttttttgctttgtttttgtacaaaagagtctaacattttttgccaaacagatatatatttaatgaaaagaagagatacataaatgtgtgaatttccagtttttttttaattattttaatcccaaacatcttcctgaaaataacattcccttaaacatgctgtggaataaaatggattgtgatga

SEQ ID NO: 9542 - DNA, 3154 bp, Homo sapiens
  source 1..3154: mol_type = unassigned DNA
ataaacgcaggtcacctgagccagtagcagcaacctgggtccccttccacgctgtggaatctttgtttttttttcactgctcgcaataaatcttgctgctgcttattatttgggtccgtgttacctttatgagctgtagcactcaccgcgaaggtttgcagcttcgctattcactcttgaagccagcgagaccacgaacccaccgggaggaagaaacaactccggacgcgccacctttaagagctgtaacactaacggtgaaagtctgcggtatcactcctgaagtcagggagaccacgaaccccccagaagaaactccggacgcatctgaacatctgaaggaacaaactctggacacaccatctttaagaactgaaacaccgcgacagttcgctgcttcattcttaaaggcagtgagaccgagaacgcaccaattctggacacaaaaggaccttagcaggctcaggaaatggcaagccatttatgaagagggaagagatagcaaacgttggtctcaagttctctagttctttacccagaccatagctggctgggggatgatcctgatttagtctggggggttcctttacgcattgccaccagcaggtgccgcaaatggaccattggcagtcttaaggtatagacacgtgtggccgtttacgctgtaggatcctcattcccactggctttgaacattttggggacttacaatgccgccacccgcggacatcgtcaaggtggccatagaatggccgggcgcctaccccaaactcatggaaattgatcagaaaaaaccactgtctgcaataataaaggaagtctgtgatgggtggtctcttgccaaccatgaatattttgcactccagcatgccgatagttcaaacttctatatcacagaaaagaaccgcaatgagataaaaaatggcactatccttcgattaaccacatctccagctcagaacgcccagcagctccatgaacgaatccagtcctcgagtatggatgccaagctggaagccctgaaggacttggccagcctctcccgggatgtcacgtttgcccaggagtttataaacctggacggtatctctctcctcacgcagatggtggagagcggcactgagcgataccagaaattgcagaagatcatgaagccttgctttggagacatgctgtccttcaccctgacggccttcgttgagctgatggaccatggcatagtgtcctgggatacattttcggtggcgttcattaagaagatagcaagttttgtgaacaagtcagccatagacatctcgatcctgcagcggtccttggccattttggagtcgatggtgctcaatagccatgacctctaccagaaagtggcgcaggagatcaccatcggccagctcattccacacctgcaagggtcagatcaagaaatccaaacctatactattgcagtgattaatgcgcttttcctgaaggctcctgatgagaggaggcaggagatggcgaatattttggctcagaagcaactgcgttccatcattttaacacatgtcatccgagcccagcgggccatcaacaatgagatggcgcaccagctgtatgttctacaagtgctcacctttaacctcctggaagacaggatgatgaccaaaatggacccccaggaccaggctcagagggacatcatatttgaacttcgaagaattgcttttgatgctgagtctgaacctaacaacagcagtggcagcatggagaaacgcaagtccatgtacacgcgagattataagaagcttgggttcattaatcatgtcaaccctgccatggacttcacgcagactccacctgggatgttggctctggacaacatgctgtactttgccaagcaccaccaagatgcctacatccggattgtgcttgagaacagtagtcgagaagacaagcatgaatgtccctttggccgcagtagtatagagctgaccaagatgctatgtgagatcttgaaagtgggcgagttgcctagtgagacctgcaacgacttccacccgatgttcttcacccacgacagatcctttgaggagtttttctgcatctgtatccagctcctgaacaagacatggaaggaaatgagggcaacttctgaagacttcaacaaggtaatgcaggtggtgaaggagcaggttatgagagcacttacaaccaagcctagctccctggaccagttcaagagcaaactgcagaacctgagctacactgagatcctgaaaatccgccagtccgagaggatgaaccaggaagatttccagtcccgcccgattttggaactaaaggagaagattcagccagaaatcttagagctgatcaaacagcaacgcctgaaccgccttgtggaagggacctgctttaggaaactcaatgcccggcggaggcaagacaagttttggtattgtcggctttcgccaaatcacaaagtcctgcattacggagacttagaagagagtcctcagggagaagtgccccacgattccttgcaggacaaactgccggtggcagatatcaaagccgtggtgacgggaaaggactgccctcatatgaaagagaaaggtgcccttaaacaaaacaaggaggtgcttgaactcgctttctccatcttgtatgactcaaactgccaactgaacttcatcgctcctgacaagcatgagtactgtatctggacggatggactgaatgcgctactcgggaaggacatgatgagcgacctgacgcggaatgacctggacaccctgctcagcatggaaatcaagctccgcctcctggacctggaaaacatccagatccctgacgcacctccgccgattcccaaggagcccagcaactatgacttcgtctatgactgtaactgaagtggccgggcccagacatgccccttccaaaactggaacacctagctaacaggagagaggaatgaaaacacacccacgccttggaaccgtcctttggtaaagggaagctgtgggtccacattcccttcagcatcacctctagccctggcaactttcagcccctagctggcatcttgctcaccgccctgattctgttcctcggctccactgcttcaggtcacttcccatggctgcagtccactggtgggacaagagcaaag

SEQ ID NO: 9543 - DNA, 858 bp, Homo sapiens
  source 1..858: mol_type = unassigned DNA
atagcagatctgaggcatgcatggtgtttgacatttctgtcttttaagtagggggacttcaaaaagtcgtgggcatccccctaggcaaagtgcagtgggcagggaccaggcagggtgcgggcgcaaggcgaacgcgcagaccacgagtgtcctggcgcaggtgccgggggcggcggctgcaactccgcagcgtccgctcgggaggagagttcgcggctgatctccggatgccttgcagatgcaaaatgtgtctctggccagcaggaggaaggaagaggaagtgagagcagcggcagccggcggtgcagcagccggccgacccagagtgtaagtgcgtgtgctggggcgagcgggagcgggcgaggatgggcacaggatagaggcagagccacccacgccgccgcggccccacgctgggcgacagagcctccagttccccttcaatggtggcgggtcgccggagctctgatcgccgggaacccttgccgctgctgtcctgcgaccccaagcagggggcagagcagggagcacttataccatacaaggcagagaagatacagatcaagatatgcccaaggcccttctagttcagcctctccttggagtaggtatagacacgtgtggccgtttacgctgtaggatcctcattcccactggctttgaacattttggggacttacaatgccgccacccgcggacatcgtcaaggtggccatagaatggccgggcgcctaccccaaactcatggaaattgatcagaaaaaaccactgtctgcaataataaaggaagtctgtgatgggtggtctcttgccaaccatgaatattttgcactccagcatgccgatagttcaaacttc

SEQ ID NO: 9544 - DNA, 2621 bp, Homo sapiens
  source 1..2621: mol_type = unassigned DNA
gagctcatcgaagtcatgctctgcacacatattatttatagcagatctgaggcatgcatggtgtttgacatttctgtcttttaagtagggggacttcaaaaagtcgtgggcatccccctaggcaaagtgcagtgggcagggaccaggcagggtgcgggcgcaaggcgaacgcgcagaccacgagtgtcctggcgcaggtgccgggggcggcggctgcaactccgcagcgtccgctcgggaggagagttcgcggctgatctccggatgccttgcagatgcaaaatgtgtctctggccagcaggaggaaggaagaggaagtgagagcagcggcagccggcggtgcagcagccggccgacccagagtgtatagacacgtgtggccgtttacgctgtaggatcctcattcccactggctttgaacattttggggacttacaatgccgccacccgcggacatcgtcaaggtggccatagaatggccgggcgcctaccccaaactcatggaaattgatcagaaaaaaccactgtctgcaataataaaggaagtctgtgatgggtggtctcttgccaaccatgaatattttgcactccagcatgccgatagttcaaacttctatatcacagaaaagaaccgcaatgagataaaaaatggcactatccttcgattaaccacatctccagctcagaacgcccagcagctccatgaacgaatccagtcctcgagtatggatgccaagctggaagccctgaaggacttggccagcctctcccgggatgtcacgtttgcccaggagtttataaacctggacggtatctctctcctcacgcagatggtggagagcggcactgagcgataccagaaattgcagaagatcatgaagccttgctttggagacatgctgtccttcaccctgacggccttcgttgagctgatggaccatggcatagtgtcctgggatacattttcggtggcgttcattaagaagatagcaagttttgtgaacaagtcagccatagacatctcgatcctgcagcggtccttggccattttggagtcgatggtgctcaatagccatgacctctaccagaaagtggcgcaggagatcaccatcggccagctcattccacacctgcaagggtcagatcaagaaatccaaacctatactattgcagtgattaatgcgcttttcctgaaggctcctgatgagaggaggcaggagatggcgaatattttggctcagaagcaactgcgttccatcattttaacacatgtcatccgagcccagcgggccatcaacaatgagatggcgcaccagctgtatgttctacaagtgctcacctttaacctcctggaagacaggatgatgaccaaaatggacccccaggaccaggctcagagggacatcatatttgaacttcgaagaattgcttttgatgctgagtctgaacctaacaacagcagtggcagcatggagaaacgcaagtccatgtacacgcgagattataagaagcttgggttcattaatcatgtcaaccctgccatggacttcacgcagactccacctgggatgttggctctggacaacatgctgtactttgccaagcaccaccaagatgcctacatccggattgtgcttgagaacagtagtcgagaagacaagcatgaatgtccctttggccgcagtagtatagagctgaccaagatgctatgtgagatcttgaaagtgggcgagttgcctagtgagacctgcaacgacttccacccgatgttcttcacccacgacagatcctttgaggagtttttctgcatctgtatccagctcctgaacaagacatggaaggaaatgagggcaacttctgaagacttcaacaaggtaatgcaggtggtgaaggagcaggttatgagagcacttacaaccaagcctagctccctggaccagttcaagagcaaactgcagaacctgagctacactgagatcctgaaaatccgccagtccgagaggatgaaccaggaagatttccagtcccgcccgattttggaactaaaggagaagattcagccagaaatcttagagctgatcaaacagcaacgcctgaaccgccttgtggaagggacctgctttaggaaactcaatgcccggcggaggcaagacaagttttggtattgtcggctttcgccaaatcacaaagtcctgcattacggagacttagaagagagtcctcagggagaagtgccccacgattccttgcaggacaaactgccggtggcagatatcaaagccgtggtgacgggaaaggactgccctcatatgaaagagaaaggtgcccttaaacaaaacaaggaggtgcttgaactcgctttctccatcttgtatgactcaaactgccaactgaacttcatcgctcctgacaagcatgagtactgtatctggacggatggactgaatgcgctactcgggaaggacatgatgagcgacctgacgcggaatgacctggacaccctgctcagcatggaaatcaagctccgcctcctggacctggaaaacatccagatccctgacgcacctccgccgattcccaaggagcccagcaactatgacttcgtctatgactgtaactga

SEQ ID NO: 9545 - DNA, 503 bp, Homo sapiens
  source 1..503: mol_type = unassigned DNA
agatgcaaaatgtgtctctggccagcaggaggaaggaagaggaagtgagagcagcggcagccggcggtgcagcagccggccgacccagagtggggcagagcagggagcacttataccatacaaggcagagaagatacagatcaagatatgcccaaggcccttctagttcagcctctccttggagtaggtatagacacgtgtggccgtttacgctgtaggatcctcattcccactggctttgaacattttggggacttacaatgccgccacccgcggacatcgtcaaggtggccatagaatggccgggcgcctaccccaaactcatggaaattgatcagaaaaaaccactgtctgcaataataaaggaagtctgtgatgggtggtctcttgccaaccatgaatattttgcactccagcatgccgatagttcaaacttctatatcacagaaaagaaccgcaatgagataaaaaatggcactatccttcgattaaccacatctcca

SEQ ID NO: 9546 - DNA, 650 bp, Homo sapiens
  source 1..650: mol_type = unassigned DNA
gaccatgacttcctgggcaatctgtccttcctcagactgttgagtgccagacgtttatatgcatgtctggacagagagtgagcctggctcattcagaccctgggcaccattcagagcagaactcagtggtatagacacgtgtggccgtttacgctgtaggatcctcattcccactggctttgaacattttggggacttacaatgccgccacccgcggacatcgtcaaggtggccatagaatggccgggcgcctaccccaaactcatggaaattgatcagaaaaaaccactgtctgcaataataaaggaagtctgtgatgggtggtctcttgccaaccatgaatattttgcactccagcatgccgatagttcaaacttctatatcacagaaaagaaccgcaatgagataaaaaatggcactatccttcgattaaccacatctccagctcagaacgcccagcagctccatgaacgaatccagtcctcgagtatggatgccaagctggaagccctgaaggacttggccagcctctcccgggatgtcacgtttgcccaggagtttataaacctggacggtatctctctcctcacgcagatggtggagagcggcactgagcgataccagaaattgcagaagatcatgaagccttg

SEQ ID NO: 9547 - DNA, 3669 bp, Homo sapiens
  source 1..3669: mol_type = unassigned DNA
gcgggcggaggctggaggagccgccgagcggagacccgggagcaggagctgggcctaggtctgcgccctggagggaggtgtagaaagaggtacatggagaacaagtttgtcaatccgtctgaacttcagttgccttacctgtaaggcagccgtgtctgtgtttttgtctcgcagaattagagcccattgggaacgatgccaccaccgtcagacattgtcaaagtggccattgagtggccaggtgctaacgcccagctccttgaaatcgaccagaaacggcccctggcatccattatcaaggaagtttgtgatgggtggtcgttgccaaacccagagtattataccctccgttatgcagatggtcctcagctgtacatcaccgaacagactcgcagtgacattaagaatgggacaatcttacaactggctatctccccgtcccgggctgcacgccagctgatggagaggacccagtcatccaacatggagacccggctggatgccatgaaggagctggccaagctctctgccgacgtgactttcgctactgagttcatcaacatggatggcatcattgtgctgacaaggctcgtggaaagtggaaccaagctcttgtcccactacagtgagatgctggcattcaccctgactgccttcctagagctcatggaccatggcattgtctcctgggacatggtttcaatcacctttattaagcagattgcagggtatgtgagccagcccatggtggacgtgtcaatccttcagaggtccctggccatcctggagagcatggtcttgaacagccagagtctgtaccagaagatagccgaggaaatcaccgtgggacagctcatctcacacctccaggtctccaaccaggagattcagacctacgccattgcactgattaatgcactttttctgaaggctcctgaggacaaacgacaggatatggcaaatgcatttgcacagaagcatctccggtctataatcctgaatcatgtgatccgagggaaccgccccatcaaaactgagatggcccatcagctatatgtccttcaagtcctaacctttaaccttctggaagaaaggatgatgaccaagatggaccccaatgaccaggctcaaagggacatcatatttgaactgaggaggattgcatttgacgcagagtctgatcctagcaatgcccctgggagtgggaccgaaaaacgcaaagccatgtacacaaaggactacaaaatgctgggatttaccaaccacatcaatccagccatggactttacccagactcctcctggaatgctggccttggacaacatgctgtacttggctaaagtccaccaggacacctacatccggattgtcttggagaacagtagccgggaagacaaacatgaatgcccctttggccgcagtgccattgagctcaccaaaatgctctgtgaaatcctgcaggttggggaactaccaaatgaaggacgcaatgactaccacccgatgttctttacccatgaccgagcctttgaagagctctttggaatctgcatccagctgttgaacaagacctggaaggagatgagggcaacagcagaggacttcaacaaggttatgcaagtcgtccgagagcaaatcactcgagctttgccctccaaacccaactctttggatcagttcaagagcaaattgcgtagcctgagttactctgagattctacgactgcgccagtctgagaggatgagtcaggatgacttccagtccccgccaattgtggagctgagggagaagatccagcccgagatccttgagctgatcaagcagcagcgcctgaaccggctctgtgagggcagcagcttccgaaagattgggaaccgccgaaggcaagaacggttctggtactgccggttggcactgaaccacaaggtccttcactatggtgacttggatgacaacccacaaggggaggtgacatttgaatccctgcaggagaaaattcctgttgcagacattaaggccattgtcactgggaaagattgtccccacatgaaagagaaaagtgctctgaaacagaacaaggaggtgttggaattggccttctccatcctgtatgaccctgatgagaccttaaacttcatcgcacctaataaatatgagtactgcatctggattgatggcctcagtgcccttctggggaaggacatgtccagtgagctgaccaagagtgacctggacaccctgctgagcatggagatgaagctgcggctcctggacctggagaacatccagattcccgaagccccaccccccatccccaaggagcccagcagctatgactttgtctatcactatggctgagcctggagccagaaacgacggtacccaggagaagggattttgggcccaggagaaacacttacattctggtgccttgtcttttgcttgtacagaatctgtagtgattttggtggccagtaaatgccagccatttctcaaacccacctcggaccacccagagtttcctcttggtccctgtctactaagagtcatgaaggcagggtgctctgcccactccatcaccatgaagcctgggattgggccacgaggaacaaacagcagatgcccttgccttccagtccaagaaactgcttcttgaaatggatttaacaacagccactcaccttttcctcctgagcctgctctctgatcagctggatccccacgtgagcaacagctggcccaggaaaggctgcctgcagaggacaggtgtgttgggcgtgttgagagccttgaagtgactacctgtatcttagatctgagtacaagcctgaggcttttgcttttgtcttttttgatgagggctcactccagcttcatatggtgccaagacgttgctgcttctgaggttggctctaacatctctggtctttagagccaccagatctctctggcccatacagatatcagagcagacggaaatttctccctgcaagcgctcagtctcatcccagcaagtcaaagacctcctggccaagtcctgccctcttaagtctccaggaacgctgcagggaaaacccagctgaggcctgggcctagactgtggtgaggtcactagattctactgctcttcccccacattaataccttttccttcctcagagagaaatctcccctaacctgaattgcagccccctccagtttgctttcctttggccttccagaccccaggaagttggccttcccttcctagtgctatggtttctgccattggccatgatttcagggagctggctgaggccggctgaggccacacctgtgccagtggggcttccctggtgctgcagcacttgtaaaccacacacacagcctctctccctggacatacgttagcacattggcattcagtattggtggcctggcatggtaggtactacccaatgaagagtgtactatatattttcattactataggccatacttatacagacgtgtatatatatttatataagatctacctatcttaggatggaaccttggggaaaaataaaattgaggggaagtaaaaagtatgtaacacttccagttgtgagccaagattgtaaccagagagcagccaggagcttcctgtcagtaaccatgttttcaataaatactctttcatgtacaaac

SEQ ID NO: 9548 - DNA, 2157 bp, Homo sapiens
  source 1..2157: mol_type = unassigned DNA
atgccaccaccgtcagacattgtcaaagtggccattgagtggccaggtgctaacgcccagctccttgaaatcgaccagaaacggcccctggcatccattatcaaggaagtttgtgatgggtggtcgttgccaaacccagagtattataccctccgttatgcagatggtcctcagctgtacatcaccgaacagactcgcagtgacattaagaatgggacaatcttacaactggctatctccccgtcccgggctgcacgccagctgatggagaggacccagtcatccaacatggagacccggctggatgccatgaaggagctggccaagctctctgccgacgtgactttcgctactgagttcatcaacatggatggcatcattgtgctgacaaggctcgtggaaagtggaaccaagctcttgtcccatgagatgctggcattcaccctgactgccttcctagagctcatggaccatggcattgtctcctgggacatggtttcaatcacctttattaagcagattgcagggtatgtgagccagcccatggtggacgtgtcaatccttcagaggtccctggccatcctggagagcatggtcttgaacagccagagtctgtaccagaagatagccgaggaaatcaccgtgggacagctcatctcacacctccaggtctccaaccaggagattcagacctacgccattgcactgattaatgcactttttctgaaggctcctgaggacaaacgacaggatatggcaaatgcatttgcacagaagcatctccggtctataatcctgaatcatgtgatccgagggaaccgccccatcaaaactgagatggcccatcagctatatgtccttcaagtcctaacctttaaccttctggaagaaaggatgatgaccaagatggaccccaatgaccaggctcaaagggacatcatatttgaactgaggaggattgcatttgacgcagagtctgatcctagcaatgcccctgggagtgggaccgaaaaacgcaaagccatgtacacaaaggactacaaaatgctgggatttaccaaccacatcaatccagccatggactttacccagactcctcctggaatgctggccttggacaacatgctgtacttggctaaagtccaccaggacacctacatccggattgtcttggagaacagtagccgggaagacaaacatgaatgcccctttggccgcagtgccattgagctcaccaaaatgctctgtgaaatcctgcaggttggggaactaccaaatgaaggacgcaatgactaccacccgatgttctttacccatgaccgagcctttgaagagctctttggaatctgcatccagctgttgaacaagacctggaaggagatgagggcaacagcagaggacttcaacaaggttatgcaagtcgtccgagagcaaatcactcgagctttgccctccaaacccaactctttggatcagttcaagagcaaattgcgtagcctgagttactctgagattctacgactgcgccagtctgagaggatgagtcaggatgacttccagtccccgccaattgtggagctgagggagaagatccagcccgagatccttgagctgatcaagcagcagcgcctgaaccggctctgtgagggcagcagcttccgaaagattgggaaccgccgaaggcaagaacggttctggtactgccggttggcactgaaccacaaggtccttcactatggtgacttggatgacaacccacaaggggaggtgacatttgaatccctgcaggagaaaattcctgttgcagacattaaggccattgtcactgggaaagattgtccccacatgaaagagaaaagtgctctgaaacagaacaaggaggtgttggaattggccttctccatcctgtatgaccctgatgagaccttaaacttcatcgcacctaataaatatgagtactgcatctggattgatggcctcagtgcccttctggggaaggacatgtccagtgagctgaccaagagtgacctggacaccctgctgagcatggagatgaagctgcggctcctggacctggagaacatccagattcccgaagccccaccccccatccccaaggagcccagcagctatgactttgtctatcactatggctga

SEQ ID NO: 9549 - DNA, 3678 bp, Homo sapiens
  source 1..3678: mol_type = unassigned DNA
gtctgcgccctggagggaggtgtagaaagaggtacatggagaacaagtttgtcaatccgtctgaacttcagttgccttacctgtaaggcagccgtgtctgtgtttttgtctcgcagaattagagcccattgggaacgatgccaccaccgtcagacattgtcaaagtggccattgagtggccaggtgctaacgcccagctccttgaaatcgaccagaaacggcccctggcatccattatcaaggaagtttgtgatgggtaggttgaaatggacctcgttttcaacagtggcagctccgactgaaagagcactcctacaccttgaggtggtcgttgccaaacccagagtattataccctccgttatgcagatggtcctcagctgtacatcaccgaacagactcgcagtgacattaagaatgggacaatcttacaactggctatctccccgtcccgggctgcacgccagctgatggagaggacccagtcatccaacatggagacccggctggatgccatgaaggagctggccaagctctctgccgacgtgactttcgctactgagttcatcaacatggatggcatcattgtgctgacaaggctcgtggaaagtggaaccaagctcttgtcccactacagtgagatgctggcattcaccctgactgccttcctagagctcatggaccatggcattgtctcctgggacatggtttcaatcacctttattaagcagattgcagggtatgtgagccagcccatggtggacgtgtcaatccttcagaggtccctggccatcctggagagcatggtcttgaacagccagagtctgtaccagaagatagccgaggaaatcaccgtgggacagctcatctcacacctccaggtctccaaccaggagattcagacctacgccattgcactgattaatgcactttttctgaaggctcctgaggacaaacgacaggatatggcaaatgcatttgcacagaagcatctccggtctataatcctgaatcatgtgatccgagggaaccgccccatcaaaactgagatggcccatcagctatatgtccttcaagtcctaacctttaaccttctggaagaaaggatgatgaccaagatggaccccaatgaccaggctcaaagggacatcatatttgaactgaggaggattgcatttgacgcagagtctgatcctagcaatgcccctgggagtgggaccgaaaaacgcaaagccatgtacacaaaggactacaaaatgctgggatttaccaaccacatcaatccagccatggactttacccagactcctcctggaatgctggccttggacaacatgctgtacttggctaaagtccaccaggacacctacatccggattgtcttggagaacagtagccgggaagacaaacatgaatgcccctttggccgcagtgccattgagctcaccaaaatgctctgtgaaatcctgcaggttggggaactaccaaatgaaggacgcaatgactaccacccgatgttctttacccatgaccgagcctttgaagagctctttggaatctgcatccagctgttgaacaagacctggaaggagatgagggcaacagcagaggacttcaacaaggttatgcaagtcgtccgagagcaaatcactcgagctttgccctccaaacccaactctttggatcagttcaagagcaaattgcgtagcctgagttactctgagattctacgactgcgccagtctgagaggatgagtcaggatgacttccagtccccgccaattgtggagctgagggagaagatccagcccgagatccttgagctgatcaagcagcagcgcctgaaccggctctgtgagggcagcagcttccgaaagattgggaaccgccgaaggcaagaacggttctggtactgccggttggcactgaaccacaaggtccttcactatggtgacttggatgacaacccacaaggggaggtgacatttgaatccctgcaggagaaaattcctgttgcagacattaaggccattgtcactgggaaagattgtccccacatgaaagagaaaagtgctctgaaacagaacaaggaggtgttggaattggccttctccatcctgtatgaccctgatgagaccttaaacttcatcgcacctaataaatatgagtactgcatctggattgatggcctcagtgcccttctggggaaggacatgtccagtgagctgaccaagagtgacctggacaccctgctgagcatggagatgaagctgcggctcctggacctggagaacatccagattcccgaagccccaccccccatccccaaggagcccagcagctatgactttgtctatcactatggctgagcctggagccagaaacgacggtacccaggagaagggattttgggcccaggagaaacacttacattctggtgccttgtcttttgcttgtacagaatctgtagtgattttggtggccagtaaatgccagccatttctcaaacccacctcggaccacccagagtttcctcttggtccctgtctactaagagtcatgaaggcagggtgctctgcccactccatcaccatgaagcctgggattgggccacgaggaacaaacagcagatgcccttgccttccagtccaagaaactgcttcttgaaatggatttaacaacagccactcaccttttcctcctgagcctgctctctgatcagctggatccccacgtgagcaacagctggcccaggaaaggctgcctgcagaggacaggtgtgttgggcgtgttgagagccttgaagtgactacctgtatcttagatctgagtacaagcctgaggcttttgcttttgtcttttttgatgagggctcactccagcttcatatggtgccaagacgttgctgcttctgaggttggctctaacatctctggtctttagagccaccagatctctctggcccatacagatatcagagcagacggaaatttctccctgcaagcgctcagtctcatcccagcaagtcaaagacctcctggccaagtcctgccctcttaagtctccaggaacgctgcagggaaaacccagctgaggcctgggcctagactgtggtgaggtcactagattctactgctcttcccccacattaataccttttccttcctcagagagaaatctcccctaacctgaattgcagccccctccagtttgctttcctttggccttccagaccccaggaagttggccttcccttcctagtgctatggtttctgccattggccatgatttcagggagctggctgaggccggctgaggccacacctgtgccagtggggcttccctggtgctgcagcacttgtaaaccacacacacagcctctctccctggacatacgttagcacattggcattcagtattggtggcctggcatggtaggtactacccaatgaagagtgtactatatattttcattactataggccatacttatacagacgtgtatatatatttatataagatctacctatcttaggatggaaccttggggaaaaataaaattgaggggaagtaaaaagtatgtaacacttccagttgtgagccaagattgtaaccagagagcagccaggagcttcctgtcagtaaccatgttttcaataaatactctttcatgtacaaa

SEQ ID NO: 9550 - DNA, 3574 bp, Homo sapiens
  source 1..3574: mol_type = unassigned DNA
tcccaagaaggcggggcgggcggaggctggaggagccgccgagcggagacccgggagcaggagctgggcctaggtctgcgccctgaattagagcccattgggaacgatgccaccaccgtcagacattgtcaaagtggccattgagtggccaggtgctaacgcccagctccttgaaatcgaccagaaacggcccctggcatccattatcaaggaagtttgtgatgggtggtcgttgccaaacccagagtattataccctccgttatgcagatggtcctcagctgtacatcaccgaacagactcgcagtgacattaagaatgggacaatcttacaactggctatctccccgtcccgggctgcacgccagctgatggagaggacccagtcatccaacatggagacccggctggatgccatgaaggagctggccaagctctctgccgacgtgactttcgctactgagttcatcaacatggatggcatcattgtgctgacaaggctcgtggaaagtggaaccaagctcttgtcccactacagtgagatgctggcattcaccctgactgccttcctagagctcatggaccatggcattgtctcctgggacatggtttcaatcacctttattaagcagattgcagggtatgtgagccagcccatggtggacgtgtcaatccttcagaggtccctggccatcctggagagcatggtcttgaacagccagagtctgtaccagaagatagccgaggaaatcaccgtgggacagctcatctcacacctccaggtctccaaccaggagattcagacctacgccattgcactgattaatgcactttttctgaaggctcctgaggacaaacgacaggatatggcaaatgcatttgcacagaagcatctccggtctataatcctgaatcatgtgatccgagggaaccgccccatcaaaactgagatggcccatcagctatatgtccttcaagtcctaacctttaaccttctggaagaaaggatgatgaccaagatggaccccaatgaccaggctcaaagggacatcatatttgaactgaggaggattgcatttgacgcagagtctgatcctagcaatgcccctgggagtgggaccgaaaaacgcaaagccatgtacacaaaggactacaaaatgctgggatttaccaaccacatcaatccagccatggactttacccagactcctcctggaatgctggccttggacaacatgctgtacttggctaaagtccaccaggacacctacatccggattgtcttggagaacagtagccgggaagacaaacatgaatgcccctttggccgcagtgccattgagctcaccaaaatgctctgtgaaatcctgcaggttggggaactaccaaatgaaggacgcaatgactaccacccgatgttctttacccatgaccgagcctttgaagagctctttggaatctgcatccagctgttgaacaagacctggaaggagatgagggcaacagcagaggacttcaacaaggttatgcaagtcgtccgagagcaaatcactcgagctttgccctccaaacccaactctttggatcagttcaagagcaaattgcgtagcctgagttactctgagattctacgactgcgccagtctgagaggatgagtcaggatgacttccagtccccgccaattgtggagctgagggagaagatccagcccgagatccttgagctgatcaagcagcagcgcctgaaccggctctgtgagggcagcagcttccgaaagattgggaaccgccgaaggcaagaacggttctggtactgccggttggcactgaaccacaaggtccttcactatggtgacttggatgacaacccacaaggggaggtgacatttgaatccctgcaggagaaaattcctgttgcagacattaaggccattgtcactgggaaagattgtccccacatgaaagagaaaagtgctctgaaacagaacaaggaggtgttggaattggccttctccatcctgtatgaccctgatgagaccttaaacttcatcgcacctaataaatatgagtactgcatctggattgatggcctcagtgcccttctggggaaggacatgtccagtgagctgaccaagagtgacctggacaccctgctgagcatggagatgaagctgcggctcctggacctggagaacatccagattcccgaagccccaccccccatccccaaggagcccagcagctatgactttgtctatcactatggctgagcctggagccagaaacgacggtacccaggagaagggattttgggcccaggagaaacacttacattctggtgccttgtcttttgcttgtacagaatctgtagtgattttggtggccagtaaatgccagccatttctcaaacccacctcggaccacccagagtttcctcttggtccctgtctactaagagtcatgaaggcagggtgctctgcccactccatcaccatgaagcctgggattgggccacgaggaacaaacagcagatgcccttgccttccagtccaagaaactgcttcttgaaatggatttaacaacagccactcaccttttcctcctgagcctgctctctgatcagctggatccccacgtgagcaacagctggcccaggaaaggctgcctgcagaggacaggtgtgttgggcgtgttgagagccttgaagtgactacctgtatcttagatctgagtacaagcctgaggcttttgcttttgtcttttttgatgagggctcactccagcttcatatggtgccaagacgttgctgcttctgaggttggctctaacatctctggtctttagagccaccagatctctctggcccatacagatatcagagcagacggaaatttctccctgcaagcgctcagtctcatcccagcaagtcaaagacctcctggccaagtcctgccctcttaagtctccaggaacgctgcagggaaaacccagctgaggcctgggcctagactgtggtgaggtcactagattctactgctcttcccccacattaataccttttccttcctcagagagaaatctcccctaacctgaattgcagccccctccagtttgctttcctttggccttccagaccccaggaagttggccttcccttcctagtgctatggtttctgccattggccatgatttcagggagctggctgaggccggctgaggccacacctgtgccagtggggcttccctggtgctgcagcacttgtaaaccacacacacagcctctctccctggacatacgttagcacattggcattcagtattggtggcctggcatggtaggtactacccaatgaagagtgtactatatattttcattactataggccatacttatacagacgtgtatatatatttatataagatctacctatcttaggatggaaccttggggaaaaataaaattgaggggaagtaaaaagtatgtaacacttccagttgtgagccaagattgtaaccagagagcagccaggagcttcctgtcagtaaccatgttttcaataaatactctttcatgt

SEQ ID NO: 9551 - DNA, 1344 bp, Homo sapiens
  source 1..1344: mol_type = unassigned DNA
gaggaaatcaccgtgggacagctcatctcacacctccaggtctccaaccaggagattcagacctacgccattgcactgattaatgcactttttctgaaggctcctgaggacaaacgacaggatatggcaaatgcatttgcacagaagcatctccggtctataatcctgaatcatgtgatccgagggaaccgccccatcaaaactgagatggcccatcagctatatgtccttcaagtcctaacctttaaccttctggaagaaaggatgatgaccaagatggaccccaatgaccaggctcaaagggacatcatatttgaactgaggaggattgcatttgacgcagagtctgatcctagcaatgcccctgggagtgggaccgaaaaacgcaaagccatgtacacaaaggactacaaaatgctgggatttaccaaccacatcaatccagccatggactttacccagactcctcctggaatgctggccttggacaacatgctgtacttggctaaagtccaccaggacacctacatccggattgtcttggagaacagtagccgggaagacaaacatgaatgcccctttggccgcagtgccattgagctcaccaaaatgctctgtgaaatcctgcaggttggggaactaccaaatgaaggacgcaatgactaccacccgatgttctttacccatgaccgagcctttgaagagctctttggaatctgcatccagctgttgaacaagacctggaaggagatgagggcaacagcagaggacttcaacaaggtcagtgtctccgggctgctctgaggcccacgggaggagaccatcacacgacagcctttgacagctggctggcacctggagaatccctgagctggaaaagcagcttggtctgcagaactgagtcacaagactgaggcactggggagcctcagccccatctggttgttgctccctctgtgaccttgagcttgtcttccacttggtgccgtaggccctcatttgtccattgaagttagcacctgtccctcccgtcctccagagaggtcaggaggataagcattagaagactcactgtggtttattgagtgcttactgtgcaggtactgctgtagttttgtgaactgggaaggttaggagagaagagtggactggcatgatgtgcacaccctgggtacttaatcgatagttatccctcggtgctttcagtcctcactctatgcagagcactgttgtgccaggccctcaaaagctgatcatctaggggtcgagtgttttgaagttgatcatctcatcataaaaaatttggaaagtataaagaataaaaagttacctgtatttacacca

SEQ ID NO: 9552 - DNA, 2635 bp, Homo sapiens
  source 1..2635: mol_type = unassigned DNA
gaaggcggggcgggcggaggctggaggagccgccgagcggagacccgggagcaggagctgggcctaggtctgcgccctggagggaggtgtagaaagaggtacatggagaacaagtttgtcaatccgtctgaacttcagttgccttacctgtaaggcagccgtgtctgtgtttttgtctcgcagaattagagcccattgggaacgatgccaccaccgtcagacattgtcaaagtggccattgagtggccaggtgctaacgcccagctccttgaaatcgaccagaaacggcccctggcatccattatcaaggaagtttgtgatgggtggtcgttgccaaacccagagtattataccctccgttatgcagatggtcctcagctgtacatcaccgaacagactcgcagtgacattaagaatgggacaatcttacaactggctatctccccgtcccgggctgcacgccagctgatggagaggacccagtcatccaacatggagacccggctggatgccatgaaggagctggccaagctctctgccgacgtgactttcgctactgagttcatcaacatggatggcatcattgtgctgacaaggctcgtggaaagtggaaccaagctcttgtcccactacagtgagatgctggcattcaccctgactgccttcctagagctcatggaccatggcattgtctcctgggacatggtttcaatcacctttattaagcagattgcagggtatgtgagccagcccatggtggacgtgtcaatccttcagaggtccctggccatcctggagagcatggtcttgaacagccagagtctgtaccagaagatagccgaggaaatcaccgtgggacagctcatctcacacctccaggtctccaaccaggagattcagacctacgccattgcactgattaatgcactttttctgaaggctcctgaggacaaacgacaggacaagcaccttaatcctctagacctgcctgtcactgatatggcaaatgcatttgcacagaagcatctccggtctataatcctgaatcatgtgatccgagggaaccgccccatcaaaactgagatggcccatcagctatatgtccttcaagtcctaacctttaaccttctggaagaaaggatgatgaccaagatggaccccaatgaccaggctcaaagggacatcatatttgaactgaggaggattgcatttgacgcagagtctgatcctagcaatgcccctgggagtgggaccgaaaaacgcaaagccatgtacacaaaggactacaaaatgctgggatttaccaaccacatcaatccagccatggactttacccagactcctcctggaatgctggccttggacaacatgctgtacttggctaaagtccaccaggacacctacatccggattgtcttggagaacagtagccgggaagacaaacatgaatgcccctttggccgcagtgccattgagctcaccaaaatgctctgtgaaatcctgcaggttggggaactaccaaatgaaggacgcaatgactaccacccgatgttctttacccatgaccgagcctttgaagagctctttggaatctgcatccagctgttgaacaagacctggaaggagatgagggcaacagcagaggacttcaacaaggttatgcaagtcgtccgagagcaaatcactcgagctttgccctccaaacccaactctttggatcagttcaagagcaaattgcgtagcctgagttactctgagattctacgactgcgccagtctgagaggatgagtcaggatgacttccagtccccgccaattgtggagctgagggagaagatccagcccgagatccttgagctgatcaagcagcagcgcctgaaccggctctgtgagggcagcagcttccgaaagattgggaaccgccgaaggcaagaacggttctggtactgccggttggcactgaaccacaaggtccttcactatggtgacttggatgacaacccacaaggggaggtgacatttgaatccctgcaggagaaaattcctgttgcagacattaaggccattgtcactgggaaagattgtccccacatgaaagagaaaagtgctctgaaacagaacaaggaggtgttggaattggccttctccatcctgtatgaccctgatgagaccttaaacttcatcgcacctaataaatatgagtactgcatctggattgatggcctcagtgcccttctggggaaggacatgtccagtgagctgaccaagagtgacctggacaccctgctgagcatggagatgaagctgcggctcctggacctggagaacatccagattcccgaagccccaccccccatccccaaggagcccagcagctatgactttgtctatcactatggctgagcctggagccagaaacgacggtacccaggagaagggattttgggcccaggagaaacacttacattctggtgccttgtcttttgcttgtacagaatctgtagtgattttggtggccagtaaatgccagccatttctcaaacccacctcggaccacccagagtttcctcttggtccctgtctactaagagtcatgaaggcagggtgctctgcccactccatcaccatgaagcct

SEQ ID NO: 9553 - DNA, 2455 bp, Homo sapiens
  source 1..2455: mol_type = unassigned DNA
ctttatgaccagccaacagaggaggaaggagcctgagcttggtatatggatcaggtgcccagttttgatggtaaatggacacgtacatccatcatggcctcatacatgagaggcatggtgaccaagaagggctcagatcgcttaggaatgaaggttggggtcacaccatcagaattagagcccattgggaacgatgccaccaccgtcagacattgtcaaagtggccattgagtggccaggtgctaacgcccagctccttgaaatcgaccagaaacggcccctggcatccattatcaaggaagtttgtgatgggtggtcgttgccaaacccagagtattataccctccgttatgcagatggtcctcagctgtacatcaccgaacagactcgcagtgacattaagaatgggacaatcttacaactggctatctccccgtcccgggctgcacgccagctgatggagaggacccagtcatccaacatggagacccggctggatgccatgaaggagctggccaagctctctgccgacgtgactttcgctactgagttcatcaacatggatggcatcattgtgctgacaaggctcgtggaaagtggaaccaagctcttgtcccaattgcagggtatgtgagccagcccatggtggacgtgtcaatccttcagaggtccctggccatcctggagagcatggtcttgaacagccagagtctgtaccagaagatagccgaggaaatcaccgtgggacagctcatctcacacctccaggtctccaaccaggagattcagacctacgccattgcactgattaatgcactttttctgaaggctcctgaggacaaacgacaggatatggcaaatgcatttgcacagaagcatctccggtctataatcctgaatcatgtgatccgagggaaccgccccatcaaaactgagatggcccatcagctatatgtccttcaagtcctaacctttaaccttctggaagaaaggatgatgaccaagatggaccccaatgaccaggctcaaagggacatcatatttgaactgaggaggattgcatttgacgcagagtctgatcctagcaatgcccctgggagtgggaccgaaaaacgcaaagccatgtacacaaaggactacaaaatgctgggatttaccaaccacatcaatccagccatggactttacccagactcctcctggaatgctggccttggacaacatgctgtacttggctaaagtccaccaggacacctacatccggattgtcttggagaacagtagccgggaagacaaacatgaatgcccctttggccgcagtgccattgagctcaccaaaatgctctgtgaaatcctgcaggttggggaactaccaaatgaaggacgcaatgactaccacccgatgttctttacccatgaccgagcctttgaagagctctttggaatctgcatccagctgttgaacaagacctggaaggagatgagggcaacagcagaggacttcaacaaggttatgcaagtcgtccgagagcaaatcactcgagctttgccctccaaacccaactctttggatcagttcaagagcaaattgcgtagcctgagttactctgagattctacgactgcgccagtctgagaggatgagtcaggatgacttccagtccccgccaattgtggagctgagggagaagatccagcccgagatccttgagctgatcaagcagcagcgcctgaaccggctctgtgagggcagcagcttccgaaagattgggaaccgccgaaggcaagaacggttctggtactgccggttggcactgaaccacaaggtccttcactatggtgacttggatgacaacccacaaggggaggtgacatttgaatccctgcaggagaaaattcctgttgcagacattaaggccattgtcactgggaaagattgtccccacatgaaagagaaaagtgctctgaaacagaacaaggaggtgttggaattggccttctccatcctgtatgaccctgatgagaccttaaacttcatcgcacctaataaatatgagtactgcatctggattgatggcctcagtgcccttctggggaaggacatgtccagtgagctgaccaagagtgacctggacaccctgctgagcatggagatgaagctgcggctcctggacctggagaacatccagattcccgaagccccaccccccatccccaaggagcccagcagctatgactttgtctatcactatggctgagcctggagccagaaacgacggtacccaggagaagggattttgggcccaggagaaacacttacattctggtgccttgtcttttgcttgtacagaatctgtagtgattttggtggccagtaaatgccagccatttctcaaacccacctcggaccacccagagtttcctcttggtccctgtctactaagagtcatgaaggca

SEQ ID NO: 9554 - DNA, 1168 bp, Homo sapiens
  source 1..1168: mol_type = unassigned DNA
ggaggagccgccgagcggagacccgggagcaggagctgggcctaggtctgcgccctggagggaggtgtagaaagaggtacatggagaacaagtttgtcaatccgtctgaacttcagttgccttacctgtaagaattagagcccattgggaacgatgccaccaccgtcagacattgtcaaagtggccattgagtggccaggtgctaacgcccagctccttgaaatcgaccagaaacggcccctggcatccattatcaaggaagtttgtgatgggtggtcgttgccaaacccagagtattataccctccgttatgcagatggtcctcagctgtacatcaccgaacagactcgcagtgacattaagaatgggacaatcttacaactggctatctccccgtcccgggctgcacgccagctgatggagaggacccagtcatccaacatggagacccggctggatgccatgaaggagctggccaagctctctgccgacgtgactttcgctactgagttcatcaacatggatggcatcattgtgctgacaaggctcgtggaaagtggaaccaagctcttgtcccactacagtgagatgctggcattcaccctgactgccttcctagagctcatggaccatggcattgtctcctgggacatggtttcaatcacctttattaagcagattgcagggtatgtgagccagcccatggtggacgtgtcaatccttcagaggtccctggccatcctggagagcatggtcttgaacagccagagtctgtaccagaagatagccgaggaaatcaccgtgggacagctcatctcacacctccaggtctccaaccaggagattcagacctacgccattgcactgattaatgcactttttctgaaggctcctgaggacaaacgacaggatatggcaaatgcatttgcacagaagcatctccggtctataatcctgaatcatgtgatccgagggaaccgccccatcaaaactgagatggcccatcagctatatgtccttcaagtcctaacctttaaccttctggaagaaaggatgatgaccaagatggaccccaatgaccaggctcaaagggacatcatatttgaactgaggaggattgcatttgacgcagagtctgatcctagcaatgcccctgggagtgggaccg

SEQ ID NO: 9555 - DNA, 2158 bp, Homo sapiens
  source 1..2158: mol_type = unassigned DNA
taccacccgatgttctttacccatgaccgagcctttgaagagctctttggaatctgcatccagctgttgaacaagacctggaaggagatgagggcaacagcagaggacttcaacaaggttatgcaagtcgtccgagagcaaatcactcgagctttgccctccaaacccaactctttggatcagttcaagagcaaattgcgtagcctgagttactctgagattctacgactgcgccagtctgagaggatgagtcaggatgacttccagtccccgccaattgtggagctgagggagaagatccagcccgagatccttgagctgatcaagcagcagcgcctgaaccggctctgtgagggcagcagcttccgaaagattgggaaccgccgaaggcaagaacggttctggtactgccggttggcactgaaccacaaggtccttcactatggtgacttggatgacaacccacaaggggaggtgacatttgaatccctgcaggagaaaaacattaaggccattgtcactgggaaagattgtccccacatgaaagagaaaagtgctctgaaacagaacaaggaggtgttggaattggccttctccatcctgtatgaccctgatgagaccttaaacttcatcgcacctaataaatatgagtactgcatctggattgatggcctcagtgcccttctggggaaggacatgtccagtgagctgaccaagagtgacctggacaccctgctgagcatggagatgaagctgcggctcctggacctggagaacatccagattcccgaagccccaccccccatccccaaggagcccagcagctatgactttgtctatcactatggctgagcctggagccagaaacgacggtacccaggagaagggattttgggcccaggagaaacacttacattctggtgccttgtcttttgcttgtacagaatctgtagtgattttggtggccagtaaatgccagccatttctcaaacccacctcggaccacccagagtttcctcttggtccctgtctactaagagtcatgaaggcagggtgctctgcccactccatcaccatgaagcctgggattgggccacgaggaacaaacagcagatgcccttgccttccagtccaagaaactgcttcttgaaatggatttaacaacagccactcaccttttcctcctgagcctgctctctgatcagctggatccccacgtgagcaacagctggcccaggaaaggctgcctgcagaggacaggtgtgttgggcgtgttgagagccttgaagtgactacctgtatcttagatctgagtacaagcctgaggcttttgcttttgtcttttttgatgagggctcactccagcttcatatggtgccaagacgttgctgcttctgaggttggctctaacatctctggtctttagagccaccagatctctctggcccatacagatatcagagcagacggaaatttctccctgcaagcgctcagtctcatcccagcaagtcaaagacctcctggccaagtcctgccctcttaagtctccaggaacgctgcagggaaaacccagctgaggcctgggcctagactgtggtgaggtcactagattctactgctcttcccccacattaataccttttccttcctcagagagaaatctcccctaacctgaattgcagccccctccagtttgctttcctttggccttccagaccccaggaagttggccttcccttcctagtgctatggtttctgccattggccatgatttcagggagctggctgaggccggctgaggccacacctgtgccagtggggcttccctggtgctgcagcacttgtaaaccacacacacagcctctctccctggacatacgttagcacattggcattcagtattggtggcctggcatggtaggtactacccaatgaagagtgtactatatattttcattactataggccatacttatacagacgtgtatatatatttatataagatctacctatcttaggatggaaccttggggaaaaataaaattgaggggaagtaaaaagtatgtaacacttccagttgtgagccaagattgtaaccagagagcagccaggagcttcctgtcagtaaccatgttttcaataaatactctttcatgta

SEQ ID NO: 9556 - DNA, 1741 bp, Homo sapiens
  source 1..1741: mol_type = unassigned DNA
aagcacttaaaatgtggctggtgcaactaaggaaccaaattttcaacttaaatttgttttaactgatttaaatgcaaatagctgcatatggctagtggctgctatactggacagcacagccctagagacagagctactgagtagggaaattgaaggacatagtggtggtacatgtggaaaatggaggagagcctcatttgggcaagaaagaaccaagagggacaggattcataatgcatgtgatccgagggaaccgccccatcaaaactgagatggcccatcagctatatgtccttcaagtcctaacctttaaccttctggaagaaaggatgatgaccaagatggaccccaatgaccaggctcaaagggacatcatatttgaactgaggaggattgcatttgacgcagagtctgatcctagcaatgcccctgggagtgggaccgaaaaacgcaaagccatgtacacaaaggactacaaaatgctgggatttaccaaccacatcaatccagccatggactttacccagactcctcctggaatgctggccttggacaacatgctgtacttggctaaagtccaccaggacacctacatccggattgtcttggagaacagtagccgggaagacaaacatgaatgcccctttggccgcagtgccattgagctcaccaaaatgctctgtgaaatcctgcaggttggggaactaccaaatgaaggacgcaatgactaccacccgatgttctttacccatgaccgagcctttgaagagctctttggaatctgcatccagctgttgaacaagacctggaaggagatgagggcaacagcagaggacttcaacaaggttatgcaagtcgtccgagagcaaatcactcgagctttgccctccaaacccaactctttggatcagttcaagagcaaattgcgtagcctgagttactctgagattctacgactgcgccagtctgagaggatgagtcaggatgacttccagtccccgccaattgtggagctgagggagaagatccagcccgagatccttgagctgatcaagcagcagcgcctgaaccggctctgtgagggcagcagcttccgaaagattgggaaccgccgaaggcaagaacggttctggtactgccggttggcactgaaccacaaggtccttcactatggtgacttggatgacaacccacaaggggaggtgacatttgaatccctgcaggagaaaattcctgttgcagacattaaggccattgtcactgggaaagattgtccccacatgaaagagaaaagtgctctgaaacagaacaaggaggtgttggaattggccttctccatcctgtatgaccctgatgagaccttaaacttcatcgcacctaataaatatgagtactgcatctggattgatggcctcagtgcccttctggggaaggacatgtccagtgagctgaccaagagtgacctggacaccctgctgagcatggagatgaagctgcggctcctggacctggagaacatccagattcccgaagccccaccccccatccccaaggagcccagcagctatgactttgtctatcactatggctgagcctggagccagaaacgacggtacccaggagaagggattttgggcccaggagaaacacttacattctggtgccttgtcttttgcttgtacagaatctgtagtgattttggtggccagtaaatgccagccatttctcaaacccacctcgg

SEQ ID NO: 9557 - DNA, 2531 bp, Homo sapiens
  source 1..2531: mol_type = unassigned DNA
ctacccccagactccaacccggaactaacctcggctcccttgggaaggccgcgttgcatggccaggagcagcagtctgggccgcgagtgcgggacaccgaggtcaggtctcggaaagggaggacctcctcgtccccaggggccccaggccaggtgcacccttggccgcaggtgcacggtctccggaaagtgcaggcgcccacgtcccagctggaccatggcgcctccgcggaacgtggtgaagattgccatcaagatgcgtgacgccatcccgcagctcatccagctggaccaggcgaagcccctggccgctgtgctgaaggaggtgtgcgacgcgtggagcctgacgcactctgagcgttacgccctgcagtttgcggatgggcaccggagatacatcaccgagaataaccgcgcggagatcaagaatggcagcatcctgtgcctcagcacggccccagaccttgaggctgagcagctcttgggtgggctgcagagtaacagtcctgaagggcgccgggaagccctgaggcgccttgttccgctggcctcggacatgatctttgccagggaggtcatcagccgtaatgggctccagatactaggcaccatcattgaagatggggacgacctaggagaggtgctggccctcagcctgagggccttctcagagctcatggagcacggcgtggtgtcctgggagactctgagcatcccctttgtgaggaaggtggtgtgctacgtgaacatgaacctcatggatgcctccgtgcctcccctggcccttgggctgctggagagtgtgaccttgagcagcccagccctgggccagctggtcaagagcgaggtgcccctggataggctgctggtgcacctacaggtgatgaaccagcagctgcaaaccaaggccatggccctgctgacagccttgctgcagggggccagccctgtggaacgcaagcacatgcttgactatctttggcagaggaaccttcgccagttcatctataagaacatcatccacagtgcagcaccaatgggcgacgagatggctcatcacctgtacgtactgcaggctctcatgctggggctgctggagccgcgcatgcggacgcccctggacccctacagccaggagcagcgggagcagctgcaggtcctacgccaggctgccttcgaggtggagggggagtcctcgggtgccgggctaagtgctgaccgtcgccgttccctctgtgcccgagagttccgcaaactgggcttttctaacagcaacccagcacaggacctggagcgcgtgccccccggtctgctggccctggacaacatgttgtacttctccagaaacgcgcccagcgcgtacagccggtttgtgttggagaacagcagccgcgaggacaagcacgagtgcccctttgcccggggcagcatccagctgacggtgctgctgtgtgagctgctccgtgttggggagccctgctctgagacagcccaggacttctcacccatgttcttcggccaagaccagagcttccacgagctcttctgtgtgggcatccagctgttgaataagacctggaaggagatgcgggctacacaggaggacttcgacaaggtcatgcaggtggtgcgggagcagctggcccgcactctggccctgaagcccacttccctggagctcttccgaaccaaggtgaatgcgctcacttatggggaggtgctgcggctgcggcagactgaacggctgcaccaggagggcacactggctccccctatactggagctgcgggagaagctgaagccagagctcatgggcctgatccgccagcagcgcttgctccgcctctgtgaggggacgctcttccgcaagatcagcagccggcggcgccaggataagctgtggttctgctgcctgtcccccaaccacaagctgctgcagtacggagacatggaggagggcgccagcccgcctaccctggagagtctgcccgagcaactccctgtggccgacatgagggcactcctgacaggcaaggactgcccccatgtccgggagaagggctccgggaagcagaacaaggacctctatgagttggccttctcaatcagctatgaccgtggggaggaggaagcgtacctcaacttcattgccccctccaagcgggagttctacctgtggacagatgggctcagtgccttgctgggcagtcccatgggcagcgagcagacacggctggacctggagcagctgctgaccatggagaccaagctgcgtctgctggagctggagaacgtgcccatccccgagcggccaccccctgtgcccccaccccccaccaacttcaacttctgctatgactgcagcatcgctgaaccttgacagtgtggctggccatgggccacagctgcggccactgcagcagccatgaagggcagtgggtagaggagtgcaggcaccctgaccagcagagattgctgcagaaataaagtctgcttggctcttgggatatgttgagccagctctgtaccttg

SEQ ID NO: 9558 - DNA, 2913 bp, Homo sapiens
  source 1..2913: mol_type = unassigned DNA
gaatggctggggttggctgaagagcgcacagtggagttttaatgtccgccatgttggccatggcgtattgaagagagcgagcgagagaggagcggagcggcacagcctcccaccctcccggctggtgttagtgcccggacggcgggctctgcgctccgcccctcaagtccccggcagcggttggcgagtggggaccgaacccccggttctccatgatcccgctggccggggccgtttccccagagcggagaggtatctgctgcgcctgagatgagtaaactgtcgtttcgggcgcgggcgctagacgcctcgaagccgctgccggttttccgctgtgaggatctgcccgacctgcacgaatacgcctcgataaacagggccgtgccgcagatgcccaccggaatggagaaggaagaggagtcggaacatcatcttcagcgggctatttcagcacagcaggtgtatggcgagaagagggataatatggttataccggtcccagaggcagaaagtaatattgcttactatgagtctatatatcctggggaatttaagatgccaaagcagctcattcacatacagccttttagtttggatgctgaacagcctgattatgatttggattctgaagatgaagtatttgtgaataaactgaaaaagaaaatggacatctgcccattgcaatttgaggagatgattgaccgcctagaaaaaggcagtggtcagcagccagtcagtctgcaggaagccaaactactgctaaaagaagatgatgaactaattagagaagtttatgaatattggattaaaaagagaaaaaactgtcgagggccatctcttattccatcagtaaaacaagagaagcgagatggttccagcacaaatgatccttatgtggcttttagaaggcgtactgaaaaaatgcagactcgaaaaaatcgcaaaaatgatgaagcctcttacgaaaaaatgcttaagctgcgacgagatctaagtcgagctgttactattctagagatgataaaaagaagagaaaaaagtaaaagagagctattgcacttaacactggaaattatggaaaagaggtataatttgggcgactacaatggagagatcatgtctgaggttatggcacagagacagccaatgaaacctacttatgccatccccatcatccctattactaatagcagtcaatttaaacaccaggaagcaatggatgtgaaggagttcaaagttaataagcaagataaagccgatcttatccgaccgaaacggaaatatgaaaagaagcccaaagtcttaccatcgtctgccgctgctactccccaacagacgagtcctgctgcactgccagtcttcaatgctaaagatctgaatcagtatgactttcccagctcagacgaagaacctctctcccaggttttgtctggctcttcggaagctgaggaagacaatgatcctgatggtccttttgctttccgtaggaaagcaggctgtcagtactatgctcctcacttagaccaaactggcaactggccttggactagtcctaaagatggaggattaggggatgtgcgatatagatactgcttaactactctcaccgtaccccaaaggtgtattggatttgcacgaagacgggttgggcgcggtggaagggtcttactggacagagctcattcagactatgacagtgtgtttcaccatctggatttggaaatgctttcctcaccacaacattctccagtcaatcagtttgccaatacctcagaaacaaatacctcggacaaatctttctctaaagacctcagtcagatactagtcaatatcaaatcatgtagatggcggcattttaggcctcggacaccatccctacatgacagtgacaatgatgaactctcctgtagaaaattatataggagtataaaccgaacaggaacagcacaacctgggacccagacatgcagtacctctacgcaaagtaaaagtagcagtggttcagcacactttgcatttacagccgaacaataccagcaacatcaacagcaactggcactcatgcagaaacagcagcttgcacaaattcagcaacagcaagcaaatagtaattcctccaccaacacatcacagaaccttgcatctaaccagcagaaaagtggctttcgcctgaatatacagggtttagaaagaacactacagggttttgtttctaagactttggattctgctagtgcacagtttgctgcttctgctttggtgacatcagaacaactgatgggattcaagatgaaggatgatgtggtgcttggaatcggggtgaatggcgtccttccagcctcaggagtatacaagggcttacacctcagtagtactacaccaacagcacttgtacatacaagtccatcaacggcaggttcagctttgttacagccttcaaatattacacagacttcaagttcccacagtgcactgagtcatcaagtaactgctgccaattctgcaacaactcaggttctgattgggaacaacattcgattaactgtaccttcatcagttgccactgtaaactctattgccccaataaatgcacgacatatacctaggactttaagtgctgttccatcatctgccttaaagctggccgctgcagcaaactgtcaagtttccaaggtcccatcttcatcctctgtagattcagttccaagggaaaatcatgaatcagaaaagccagcactgaacaacatagcagacaacacagtagcgatggaggtgacgtagcttcctccgagtggaactgcagcctggggacttgattaggtgctatgcatcagtagcattttgaatgcaagggatgatggaaagcagcacatgcgtttctgtggcagctgtggggacttgacagcaatgctc

SEQ ID NO: 9559 - DNA, 4057 bp, Homo sapiens
  source 1..4057: mol_type = unassigned DNA
gcgtgcccgcgccgctgcgcgatgcagtgtggggaatggctggggttggctgaagagcgcacagtggagttttaatgtccgccatgttggccatggcgtattgaagagagcgagcgagagaggagcggagcggcacagcctcccaccctcccggctggtgttagtgcccggacggcgggctctgcgctccgcccctcaagtccccggcagcggttggcgagtggggaccgaacccccggttctccatgatcccgctggccggggccgtttccccagagcggagaggtatctgctgcgcctgagatgagtaaactgtcgtttcgggcgcgggcgctagacgcctcgaagccgctgccggttttccgctgtgaggatctgcccgacctgcacgaatacgcctcgataaacagggccgtgccgcagatgcccaccggaatggagaaggaagaggagtcggaacatcatcttcagcgggctatttcagcacagcaggtgtatggcgagaagagggataatatggttataccggtcccagaggcagaaagtaatattgcttactatgagtctatatatcctggggaatttaagatgccaaagcagctcattcacatacagccttttagtttggatgctgaacagcctgattatgatttggattctgaagatgaagtatttgtgaataaactgaaaaagaaaatggacatctgcccattgcaatttgaggagatgattgaccgcctagaaaaaggcagtggtcagcagccagtcagtctgcaggaagccaaactactgctaaaagaagatgatgaactaattagagaagtttatgaatattggattaaaaagagaaaaaactgtcgagggccatctcttattccatcagtaaaacaagagaagcgagatggttccagcacaaatgatccttatgtggcttttagaaggcgtactgaaaaaatgcagactcgaaaaaatcgcaaaaatgatgaagcctcttacgaaaaaatgcttaagctgcgacgagatctaagtcgagctgttactattctagagatgataaaaagaagagaaaaaagtaaaagagagctattgcacttaacactggaaattatggaaaagaggtataatttgggcgactacaatggagagatcatgtctgaggttatggcacagagacagccaatgaaacctacttatgccatccccatcatccctattactaatagcagtcaatttaaacaccaggaagcaatggatgtgaaggagttcaaagttaataagcaagataaagccgatcttatccgaccgaaacggaaatatgaaaagaagcccaaagtcttaccatcgtctgccgctgctactccccaacagacgagtcctgctgcactgccagtcttcaatgctaaagatctgaatcagtatgactttcccagctcagacgaagaacctctctcccaggttttgtctggctcttcggaagctgaggaagacaatgatcctgatggtccttttgctttccgtaggaaagcaggctgtcagtactatgctcctcacttagaccaaactggcaactggccttggactagtcctaaagatggaggattaggggatgtgcgatatagatactgcttaactactctcaccgtaccccaaaggtgtattggatttgcacgaagacgggttgggcgcggtggaagggtcttactggacagagctcattcagactatgacagtgtgtttcaccatctggatttggaaatgctttcctcaccacaacattctccagtcaatcagtttgccaatacctcagaaacaaatacctcggacaaatctttctctaaagacctcagtcagatactagtcaatatcaaatcatgtagatggcggcattttaggcctcggacaccatccctacatgacagtgacaatgatgaactctcctgtagaaaattatataggagtataaaccgaacaggaacagcacaacctgggacccagacatgcagtacctctacgcaaagtaaaagtagcagtggttcagcacactttgcatttacagccgaacaataccagcaacatcaacagcaactggcactcatgcagaaacagcagcttgcacaaattcagcaacagcaagcaaatagtaattcctccaccaacacatcacagggttttgtttctaagactttggattctgctagtgcacagtttgctgcttctgctttggtgacatcagaacaactgatgggattcaagatgaaggatgatgtggtgcttggaatcggggtgaatggcgtccttccagcctcaggagtatacaagggcttacacctcagtagtactacaccaacagcacttgtacatacaagtccatcaacggcaggttcagctttgttacagccttcaaatattacacagacttcaagttcccacagtgcactgagtcatcaagtaactgctgccaattctgcaacaactcaggttctgattgggaacaacattcgattaactgtaccttcatcagttgccactgtaaactctattgccccaataaatgcacgacatatacctaggactttaagtgctgttccatcatctgccttaaagctggccgctgcagcaaactgtcaagtttccaaggtcccatcttcatcctctgtagattcagttccaagggaaaatcatgaatcagaaaagccagcactgaacaacatagcagacaacacagtagcgatggaggtgacgtagcttcctccgagtggaactgcagcctggggacttgattaggtgctatgcatcagtagcattttgaatgcaagggatgatggaaagcagcacatgcgtttctgtggcagctgtggggacttgacagcaatgctcatctctcatgcttcaatttttcttttcttactgttaataggaaaaaaatcaacatctgtaaattaagaatacagcaattatctgtacagtactgcatatttgtaatacccttgtatatatgttacttgaatacagaaatgttcatttgtgatgctttgcacttgggggtggggggtgggagggaaatcaattgcaacaaagagtgtgagatgtgagattgtatagagatgaagtgtcatcacatcatgtgcatggtgcggaacctgctgttttatctatttattgtgccgtgtttacagttttttgtacactgtaccttcattggttcctgtgctgtagtaaatgtgttaggtagctgtggactccttggtattttgtaaatggtataacataacttggttcccctctgggtccttgagttttctgtgtatcatgtgaaaaaaaatggtgacatacatacagaattttacaaaaaaaaaaaaaaaaaaaaaggcatcagtttttttaaaaatggggaatgtactattaaatggggatcttcctggtctactatcattaggacaagtaacaagctaaaaatgaagtctcttgaatctttccatccccaacttgcccacaaagctgtgggtggtttctggtacttaaagcactaatattatgttgctgctctgcgaacagcccagtagtcccatttccttccacaccaaaaagtgttaaatcaagtatgcaaatggagtccttacaactggagtttatgttgtcttgccctttttttagcacaaaaaaaattgtacttttttattgtcgaattgtttaaaagacttcattctttacttgttcttacgaaaaggatataagggagaagaatgcagtaattgctgtacgtgtatcatcattccagtttctaaaaacagccagccagcttttttccttttaagattctccagaaggctgcaaggccagaaccacaaatatcgggtgccttcctttggaaatatttgacctctcttctgtgaagagaatggtacttaacagactactactagtgctttgtcagtaccgaagtctgaatgcccagtccaatggcatacattatccttaaggtttttaatcccacctggaaaaattgtgatagaattctcacaaaataaacccagggcattacatgttgacaaactaa

SEQ ID NO: 9560 - DNA, 3909 bp, Homo sapiens
  source 1..3909: mol_type = unassigned DNA
agcgctcgcctgcttgccatcgcaaagttgttaaccccagagtcttctggctgtgctgcctcctctgcttttaatcttctgtggatatttctccgatttcccccaaaagcccacagatcctgggggaagccaccccattcggccaccgatcatggaagaaagtattactttttatttaccaaacattttaaagatgttggaagatccatatgctgcctggaggctgttgtttctagggacacaagtatccagcctatattgttacaattttttttcaagaactgccgtcttctttgcctgcactaatggaacatcatcttcagcgggctatttcagcacagcaggtgtatggcgagaagagggataatatggttataccggtcccagaggcagaaagtaatattgcttactatgagtctatatatcctggggaatttaagatgccaaagcagctcattcacatacagccttttagtttggatgctgaacagcctgattatgatttggattctgaagatgaagtatttgtgaataaactgaaaaagaaaatggacatctgcccattgcaatttgaggagatgattgaccgcctagaaaaaggcagtggtcagcagccagtcagtctgcaggaagccaaactactgctaaaagaagatgatgaactaattagagaagtttatgaatattggattaaaaagagaaaaaactgtcgagggccatctcttattccatcagtaaaacaagagaagcgagatggttccagcacaaatgatccttatgtggcttttagaaggcgtactgaaaaaatgcagactcgaaaaaatcgcaaaaatgatgaagcctcttacgaaaaaatgcttaagctgcgacgagatctaagtcgagctgttactattctagagatgataaaaagaagagaaaaaagtaaaagagagctattgcacttaacactggaaattatggaaaagaggtataatttgggcgactacaatggagagatcatgtctgaggttatggcacagagacagccaatgaaacctacttatgccatccccatcatccctattactaatagcagtcaatttaaacaccaggaagcaatggatgtgaaggagttcaaagttaataagcaagataaagccgatcttatccgaccgaaacggaaatatgaaaagaagcccaaagtcttaccatcgtctgccgctgctactccccaacagacgagtcctgctgcactgccagtcttcaatgctaaagatctgaatcagtatgactttcccagctcagacgaagaacctctctcccaggttttgtctggctcttcggaagctgaggaagacaatgatcctgatggtccttttgctttccgtaggaaagcaggctgtcagtactatgctcctcacttagaccaaactggcaactggccttggactagtcctaaagatggaggattaggggatgtgcgatatagatactgcttaactactctcaccgtaccccaaaggtgtattggatttgcacgaagacgggttgggcgcggtggaagggtcttactggacagagctcattcagactatgacagtgtgtttcaccatctggatttggaaatgctttcctcaccacaacattctccagtcaatcagtttgccaatacctcagaaacaaatacctcggacaaatctttctctaaagacctcagtcagatactagtcaatatcaaatcatgtagatggcggcattttaggcctcggacaccatccctacatgacagtgacaatgatgaactctcctgtagaaaattatataggagtataaaccgaacaggaacagcacaacctgggacccagacatgcagtacctctacgcaaagtaaaagtagcagtggttcagcacactttgcatttacagccgaacaataccagcaacatcaacagcaactggcactcatgcagaaacagcagcttgcacaaattcagcaacagcaagcaaatagtaattcctccaccaacacatcacagggttttgtttctaagactttggattctgctagtgcacagtttgctgcttctgctttggtgacatcagaacaactgatgggattcaagatgaaggatgatgtggtgcttggaatcggggtgaatggcgtccttccagcctcaggagtatacaagggcttacacctcagtagtactacaccaacagcacttgtacatacaagtccatcaacggcaggttcagctttgttacagccttcaaatattacacagacttcaagttcccacagtgcactgagtcatcaagtaactgctgccaattctgcaacaactcaggttctgattgggaacaacattcgattaactgtaccttcatcagttgccactgtaaactctattgccccaataaatgcacgacatatacctaggactttaagtgctgttccatcatctgccttaaagctggccgctgcagcaaactgtcaagtttccaaggtcccatcttcatcctctgtagattcagttccaagggaaaatcatgaatcagaaaagccagcactgaacaacatagcagacaacacagtagcgatggaggtgacgtagcttcctccgagtggaactgcagcctggggacttgattaggtgctatgcatcagtagcattttgaatgcaagggatgatggaaagcagcacatgcgtttctgtggcagctgtggggacttgacagcaatgctcatctctcatgcttcaatttttcttttcttactgttaataggaaaaaaatcaacatctgtaaattaagaatacagcaattatctgtacagtactgcatatttgtaatacccttgtatatatgttacttgaatacagaaatgttcatttgtgatgctttgcacttgggggtggggggtgggagggaaatcaattgcaacaaagagtgtgagatgtgagattgtatagagatgaagtgtcatcacatcatgtgcatggtgcggaacctgctgttttatctatttattgtgccgtgtttacagttttttgtacactgtaccttcattggttcctgtgctgtagtaaatgtgttaggtagctgtggactccttggtattttgtaaatggtataacataacttggttcccctctgggtccttgagttttctgtgtatcatgtgaaaaaaaatggtgacatacatacagaattttacaaaaaaaaaaaaaaaaaaaaaggcatcagtttttttaaaaatggggaatgtactattaaatggggatcttcctggtctactatcattaggacaagtaacaagctaaaaatgaagtctcttgaatctttccatccccaacttgcccacaaagctgtgggtggtttctggtacttaaagcactaatattatgttgctgctctgcgaacagcccagtagtcccatttccttccacaccaaaaagtgttaaatcaagtatgcaaatggagtccttacaactggagtttatgttgtcttgccctttttttagcacaaaaaaaattgtacttttttattgtcgaattgtttaaaagacttcattctttacttgttcttacgaaaaggatataagggagaagaatgcagtaattgctgtacgtgtatcatcattccagtttctaaaaacagccagccagcttttttccttttaagattctccagaaggctgcaaggccagaaccacaaatatcgggtgccttcctttggaaatatttgacctctcttctgtgaagagaatggtacttaacagactactactagtgctttgtcagtaccgaagtctgaatgcccagtccaatggcatacattatccttaaggtttttaatcccacctggaaaaattgtgatagaattctcacaaaataaacccagggcattacatgttgacaaactaa

SEQ ID NO: 9561 - DNA, 3642 bp, Homo sapiens
  source 1..3642: mol_type = unassigned DNA
gccgcccgggctgttcctgtaaggcggggagacaatgagtaaactctccttccgagcgcgggcgctggacgccgccaagccgctgcctatctaccgcggcaaggacatgcctgatctcaacgactgcgtctccatcaaccgggccgtgccccagatgcccaccgggatggagaaggaggaggaatcggaacatcatttacagcgagcaatttcagcacagcaagtgtttagagaaaaaaaagagagtatggtcattcctgttcctgaggcagagagcaacgtcaactattacaatcgcttgtacaaaggagagtttaaacagccaaaacagttcattcatattcagccttttaatctagacaacgagcaaccagattatgatatggattcagaagatgagactttattaaatagacttaacagaaagatggaaattaagcctttgcaatttgaaattatgattgacagacttgaaaaagccagttctaatcagcttgtaacacttcaagaagcaaaactgctgctaaacgaagatgattaccttattaaagctgtatatgactactgggtgagaaaacgtaaaaactgcagggggccatccctcattcctcagataaaacaagagaaaagagatggctctaccaacaatgacccttatgttgcctttcggagaagaacagagaaaatgcaaactcgaaagaatcgtaagaatgatgaagcctcttatgaaaagatgttgaaactgagacgagaatttagtagagccataacaattttggaaatgattaagagaagagagaaaacaaaacgagaattattgcacttaaccttagaagttgtggagaaaagataccatttgggagactatggtggtgaaatccttaatgaagtaaaaatcagtagatcagaaaaagagttatatgccactccagcaactcttcataatggaaatcatcacaaagttcaagaatgtaaaactaagcaccctcatcatttgtctttgaaagaagaggcttctgatgtggttcgtcaaaagaagaagtacccaaagaagcctaaagcagaggctttgataacatctcagcaacccactcctgagacattgcctgtgatcaataagagtgacattaagcaatatgattttcacagctcagatgaagatgaatttccacaggtattgtccccagtatcagaaccggaagaagaaaatgatcctgatggtccctgtgctttcagaaggcgggcaggatgccagtattatgctcctcgtttggaccaagctaaccattcatgtgaaaattcagaattggcagatttggataagttgaggtataggcattgccttacaacacttacagtcccaagaagatgtataggatttgcaaggaggcgaattggcagaggtggaagggtcataatggaccgaatatccacagaacatgacccagtcctgaaacagatagaccctgaaatgctgaatagtttttcaagctcttcccaaactatagacttttcttctaatttctctcggaccaatgcttccagtaaacattgtgaaaatagactgtctctttctgaaatattaagcaatatcagatcatgtcgactacagtgtttccagccaaggctactaaatttacaggacagtgatagtgaagaatgtacctcaagaaaaccagggcagactgtgaacaataaaagagtttctgcagcatctgtagctttattgaacaccagcaagaatggcatatcagtaacagggggtatcacagaagagcagtttcagacacatcagcagcagttagttcagatgcaaaggcagcaacttgcccagcttcagcagaaacagcaatctcagcattcctcgcaacagacacatccaaaagcacagggctcaagcacctctgactgtatgtctaaaacacttgactcagccagcgcccactttgctgcatctgcagtggtcagtgcacctgttccaagtcgcagtgaggtagccaaggaacagaacactggccacaacaacataaacggtgttgtccagccttcaggaacctctaaaacattatactccaccaatatggctttatcatccagcccagggatttcagctgtacagcttgtaaggacagttggccacaccactacaaaccacttaatcccagcattgtgcacaagcagtcctcagacacttcccatgaacaattcctgcctgacaaatgcagtgcacctcaataatgtcagtgttgtttctccagtcaatgtgcatatcaatacacggacttcagcaccatcgccaacagccttaaaacttgccacagttgctgccagtatggacagagtgccaaaggttactcccagcagtgccatcagcagcatagcaagagagaaccacgaaccagaaagattgggcttaaatggaatagcagagacaacagtagctatggaagtgacataacctaaaacacgtggctctgacctgtgctgatggtgtgcagtcattcatattccagctgaatgcaaaaggcaacactctgtggatcacagagtgtaacaatggacctaaatggactatagtatattggatgttaaatccatatatgatgtatattttgtaaaattgggaaaatcactaccttgtaaaatagtttatttgtatcatcaatattatttctgttacttgaatagtagatattcatcatcatgcttttgcacttgaatttgcaactgaatggattttaaaaaataattctttaatgggatcatgagcatgaaatgggatcctgcatcacttgttttaactatttattttgccatgtttacattttgtatcttgtaaaaataaatccaactttgtgtctaaaaagttaaagattcatagctaggaaatgaaattcttgtaatttttttctaaaggaactgtaaagttttcacttggttcattttgtttcacaatttgactagatggactttttggtaaatactttagtggcatttcactgtcaaatatgaagttcaaggcaaaatagtattttctattactgtgcaggggaaagggatggatcgatacatgcaaatttaatgtagtaactcacttttccatatattttgaatgtatatttctatttatgataccaatttataaaaaataattacacagaaaaaatggaataggaaaaattatgcatctagcacatttaaactgtgcaaatatgaaaatttttcgaggattacattttatctgaaggctgcatattttaactggctttaaaactgtaacacatcacataaaagatactttaccaggtatgtattgcattatatcattgcaataattattggaagtctagatatcgagccatcccaggtgttgggcggggggagggttgtggcaagattgtcttttcaattttggagagttttcctgtggctacaaggcaagtaacgggttggaaaaagtctgactgtaagcgttggacaccttcatagtgtagtgttttagtgactttttttatacggttcttgtaaattagatacgtgtagtggtgtttcagaatgtttgtttatgcactagttcagacaactttccctgttacttgttcttgataagtgaaaactgcagggaaataaaaaatacatatc

SEQ ID NO: 9562 - DNA, 1116 bp, Homo sapiens
  source 1..1116: mol_type = unassigned DNA
cgacctccggcccaggatacttacgttgccgccatttttgagtagggctaatgaaagatgtctgatgtcactgtctataccggtgatcacttgagccgtatgtttaataacgaaagtacggaagacagcgtcttgaaaaaaaataattcttcctaaagcttggaaactttcccttacctttttgcctttatcgaagatggctgaaacagagtcagtagctgctctagctgccggaagtgactgtgcctctatgatccaaaaggctcttttgcgttgcactttcgacgacttccggcggctcctctcgcgaggattggctgttagcggcgttgtagttaagctcgtgtaacggcggcggtgtcggcagctgctgtagcgaagagagtttggcgcgatgtctcacaccattttgctggtacagcctaccaagaggccagaaggcagaacttatgctgactacgaatctgtgaatgaatgcatggaaggtgtttgtaaaatgtatgaagaacatctgaaaagaatgaatcccaacagtccctctatcacatatgacatcagtcagttgtttgatttcatcgatgatctggcagacctcagctgcctggtttaccgagctgatacccagacataccagccttataacaaagactggattaaagagaagatctacgtgctccttcgtcggcaggcccaacaggctgggaaataattgtgttggaagcactgggggggttggggtgggcttggaacacaggtgtgtacagcgtgctgtagtggaagttttgtatcatagtaatcctgtttccactttgttatactctagccaagattgactgtattagatgaaatgtgaggatcttgttcaatcggaaacccccgttacctcctctttttctttctctttctttttttttttttacttaaacatttttatgatgatttagatggaagttgttcttcgtcacttaatgttggttccagtccttcaactgttcatatctactttataacattcacatactaacccttcttcaagatggggtggggggtggaaatgcagtttagccatgtcctcaagataaagtcttggtaaaaataaataaatgtcctttagtt

SEQ ID NO: 9563 - DNA, 4645 bp, Homo sapiens
  source 1..4645: mol_type = unassigned DNA
gcgcatgcgtcctagcagcgggacccgcggctcgggatggaggctggacacctgttctgctgttgtgtcctgccattctcctgaagaacagaggcacactgtaaaacccaacacttccccttgcattctataagattacagcaagatggaaataccaaatccccctacctccaaatgtatcacttactggaaaagaaaagtgaaatctgaatacatgcgacttcgacaacttaaacggcttcaggcaaatatgggtgcaaaggctttgtatgtggcaaattttgcaaaggttcaagaaaaaacccagatcctcaatgaagaatggaagaagcttcgtgtccaacctgttcagtcaatgaagcctgtgagtggacacccttttctcaaaaagtgtaccatagagagcattttcccgggatttgcaagccaacatatgttaatgaggtcactgaacacagttgcattggttcccatcatgtattcctggtcccctctccaacagaactttatggtagaagatgagacggttttgtgcaatattccctacatgggagatgaagtgaaagaagaagatgagacttttattgaggagctgatcaataactatgatgggaaagtccatggtgaagaagagatgatccctggatccgttctgattagtgatgctgtttttctggagttggtcgatgccctgaatcagtactcagatgaggaggaggaagggcacaatgacacctcagatggaaagcaggatgacagcaaagaagatctgccagtaacaagaaagagaaagcgacatgctattgaaggcaacaaaaagagttccaagaaacagttcccaaatgacatgatcttcagtgcaattgcctcaatgttccctgagaatggtgtcccagatgacatgaaggagaggtatcgagaactaacagagatgtcagaccccaatgcacttccccctcagtgcacacccaacatcgatggccccaatgccaagtctgtgcagcgggagcaatctctgcactccttccacacacttttttgccggcgctgctttaaatacgactgcttccttcacccttttcatgccacccctaatgtatataaacgcaagaataaagaaatcaagattgaaccagaaccatgtggcacagactgcttccttttgctggaaggagcaaaggagtatgccatgctccacaacccccgctccaagtgctctggtcgtcgccggagaaggcaccacatagtcagtgcttcctgctccaatgcctcagcctctgctgtggctgagactaaagaaggagacagtgacagggacacaggcaatgactgggcctccagttcttcagaggctaactctcgctgtcagactcccacaaaacagaaggctagtccagccccacctcaactctgcgtagtggaagcaccctcggagcctgtggaatggactggggctgaagaatctctttttcgagtcttccatggcacctacttcaacaacttctgttcaatagccaggcttctggggaccaagacgtgcaagcaggtctttcagtttgcagtcaaagaatcacttatcctgaagctgccaacagatgagctcatgaacccctcacagaagaagaaaagaaagcacagattgtgggctgcacactgcaggaagattcagctgaagaaagataactcttccacacaagtgtacaactaccaaccctgcgaccacccagaccgcccctgtgacagcacctgcccctgcatcatgactcagaatttctgtgagaagttctgccagtgcaacccagactgtcagaatcgtttccctggctgtcgctgtaagacccagtgcaataccaagcaatgtccttgctatctggcagtgcgagaatgtgaccctgacctgtgtctcacctgtggggcctcagagcactgggactgcaaggtggtttcctgtaaaaactgcagcatccagcgtggacttaagaagcacctgctgctggccccctctgatgtggccggatggggcaccttcataaaggagtctgtgcagaagaacgaattcatttctgaatactgtggtgagctcatctctcaggatgaggctgatcgacgcggaaaggtctatgacaaatacatgtccagcttcctcttcaacctcaataatgattttgtagtggatgctactcggaaaggaaacaaaattcgatttgcaaatcattcagtgaatcccaactgttatgccaaagtggtcatggtgaatggagaccatcggattgggatctttgccaagagggcaattcaagctggcgaagagctcttctttgattacaggtacagccaagctgatgctctcaagtacgtggggatcgagagggagaccgacgtcctttagccctcccaggccccacggcagcacttatggtagcggcactgtcttggctttcgtgctcacaccactgctgctcgagtctcctgcactgtgtctcccacactgagaaaccccccaacccactccctctgtagtgaggcctctgccatgtccagagggcacaaaactgtctcaatgagaggggagacagaggcagctagggcttggtctcccaggacagagagttacagaaatgggagactgtttctctggcctcagaagaagcgagcacaggctggggtggatgacttatgcgtgatttcgtgtcggctccccaggctgtggcctcaggaatcaacttaggcagttcccaacaagcgctagcctgtaattgtagctttccacatcaagagtccttatgttattgggatgcaggcaaacctctgtggtcctaagacctggagaggacaggctaagtgaagtgtggtccctggagcctacaagtggtctgggttagaggcgagcctggcaggcagcacagactgaactcagaggtagacaggtcaccttactacctcctccctcgtggcagggctcaaactgaaagagtgtgggttctaagtacaggcattcaaggctgggggaaggaaagctacgccatccttccttagccagagagggagaaccagccagatgatagtagttaaactgctaagcttgggcccaggaggctttgagaaagccttctctgtgtactctggagatagatggagaagtgttttcagattcctgggaacagacaccagtgctccagctcctccaaagttctggcttagcagctgcaggcaagcattatgctgctattgaagaagcattaggggtatgcctggcaggtgtgagcatcctggctcgctggatttgtgggtgttttcaggccttccattccccatagaggcaaggcccaatggccagtgttgcttatcgcttcagggtaggtgggcacaggcttggactagagaggagaaagattggtgtaatctgctttcctgtctgtagtgcctgctgtttggaaagggtgagttagaatatgttccaaggttggtgaggggctaaattgcacgcgtttaggctggcaccccgtgtgcagggcacactggcagagggtatctgaagtgggagaagaagcaggtagaccacctgtcccaggctgtggtgccaccctctctggcattcatgcagagcaaagcactttaaccatttcttttaaaaggtctatagattggggtagagtttggcctaaggtctctagggtccctgcctaaatcccactcctgagggagggggaagaagagagggtgggagattctcctccagtcctgtctcatctcctgggagaggcagacgagtgagtttcacacagaagaatttcatgtgaatggggccagcaagagctgccctgtgtccatggtgggtgtgccgggctggctgggaacaaggagcagtatgttgagtagaaagggtgtgggcgggtatagattggcctgggagtgttacagtagggagcaggcttctcccttctttctgggactcagagccccgcttcttcccactccacttgttgtcccatgaaggaagaagtggggttcctcctgacccagctgcctcttacggtttggtatgggacatgcacacacactcacatgctctcactcaccacactggagggcacacacgtaccccgcacccagcaactcctgacagaaagctcctcccacccaaatgggccaggccccagcatgatcctgaaatctgcatccgccgtggtttgtattcattgtgcatatcagggataccctcaagctggactgtgggttccaaattactcatagaggagaaaaccagagaaagatgaagaggaggagttaggtctatttgaaatgccaggggctcgctgtgaggaataggtgaaaaaaaacttttcaccagcctttgagagactagactgaccccacccttccttcagtgagcagaatcactgtggtcagtctcctgtcccagcttcagttcatgaatactcctgttcctccagtttcccatcctttgtccctgctgtcccccacttttaaagatgggtctcaacccctccccaccacgtcatgatggatggggcaaggtggtggggactaggggagcctggtatacatgcggcttcattgccaataaatttcatgcactttaaagtcctgtggcttgtgacctcttaataaagtgttagaatcc

SEQ ID NO: 9564 - DNA, 4525 bp, Homo sapiens
  source 1..4525: mol_type = unassigned DNA
gcgcatgcgtcctagcagcgggacccgcggctcgggatggaggctggacacctgttctgctgttgtgtcctgccattctcctgaagaacagaggcacactgtaaaacccaacacttccccttgcattctataagattacagcaagatggaaataccaaatccccctacctccaaatgtatcacttactggaaaagaaaagtgaaatctgaatacatgcgacttcgacaacttaaacggcttcaggcaaatatgggtgcaaaggctttgtatgtggcaaattttgcaaaggttcaagaaaaaacccagatcctcaatgaagaatggaagaagcttcgtgtccaacctgttcagtcaatgaagcctgtgagtggacacccttttctcaaaaaggtagaagatgagacggttttgtgcaatattccctacatgggagatgaagtgaaagaagaagatgagacttttattgaggagctgatcaataactatgatgggaaagtccatggtgaagaagagatgatccctggatccgttctgattagtgatgctgtttttctggagttggtcgatgccctgaatcagtactcagatgaggaggaggaagggcacaatgacacctcagatggaaagcaggatgacagcaaagaagatctgccagtaacaagaaagagaaagcgacatgctattgaaggcaacaaaaagagttccaagaaacagttcccaaatgacatgatcttcagtgcaattgcctcaatgttccctgagaatggtgtcccagatgacatgaaggagaggtatcgagaactaacagagatgtcagaccccaatgcacttccccctcagtgcacacccaacatcgatggccccaatgccaagtctgtgcagcgggagcaatctctgcactccttccacacacttttttgccggcgctgctttaaatacgactgcttccttcacccttttcatgccacccctaatgtatataaacgcaagaataaagaaatcaagattgaaccagaaccatgtggcacagactgcttccttttgctggaaggagcaaaggagtatgccatgctccacaacccccgctccaagtgctctggtcgtcgccggagaaggcaccacatagtcagtgcttcctgctccaatgcctcagcctctgctgtggctgagactaaagaaggagacagtgacagggacacaggcaatgactgggcctccagttcttcagaggctaactctcgctgtcagactcccacaaaacagaaggctagtccagccccacctcaactctgcgtagtggaagcaccctcggagcctgtggaatggactggggctgaagaatctctttttcgagtcttccatggcacctacttcaacaacttctgttcaatagccaggcttctggggaccaagacgtgcaagcaggtctttcagtttgcagtcaaagaatcacttatcctgaagctgccaacagatgagctcatgaacccctcacagaagaagaaaagaaagcacagattgtgggctgcacactgcaggaagattcagctgaagaaagataactcttccacacaagtgtacaactaccaaccctgcgaccacccagaccgcccctgtgacagcacctgcccctgcatcatgactcagaatttctgtgagaagttctgccagtgcaacccagactgtcagaatcgtttccctggctgtcgctgtaagacccagtgcaataccaagcaatgtccttgctatctggcagtgcgagaatgtgaccctgacctgtgtctcacctgtggggcctcagagcactgggactgcaaggtggtttcctgtaaaaactgcagcatccagcgtggacttaagaagcacctgctgctggccccctctgatgtggccggatggggcaccttcataaaggagtctgtgcagaagaacgaattcatttctgaatactgtggtgagctcatctctcaggatgaggctgatcgacgcggaaaggtctatgacaaatacatgtccagcttcctcttcaacctcaataatgattttgtagtggatgctactcggaaaggaaacaaaattcgatttgcaaatcattcagtgaatcccaactgttatgccaaagtggtcatggtgaatggagaccatcggattgggatctttgccaagagggcaattcaagctggcgaagagctcttctttgattacaggtacagccaagctgatgctctcaagtacgtggggatcgagagggagaccgacgtcctttagccctcccaggccccacggcagcacttatggtagcggcactgtcttggctttcgtgctcacaccactgctgctcgagtctcctgcactgtgtctcccacactgagaaaccccccaacccactccctctgtagtgaggcctctgccatgtccagagggcacaaaactgtctcaatgagaggggagacagaggcagctagggcttggtctcccaggacagagagttacagaaatgggagactgtttctctggcctcagaagaagcgagcacaggctggggtggatgacttatgcgtgatttcgtgtcggctccccaggctgtggcctcaggaatcaacttaggcagttcccaacaagcgctagcctgtaattgtagctttccacatcaagagtccttatgttattgggatgcaggcaaacctctgtggtcctaagacctggagaggacaggctaagtgaagtgtggtccctggagcctacaagtggtctgggttagaggcgagcctggcaggcagcacagactgaactcagaggtagacaggtcaccttactacctcctccctcgtggcagggctcaaactgaaagagtgtgggttctaagtacaggcattcaaggctgggggaaggaaagctacgccatccttccttagccagagagggagaaccagccagatgatagtagttaaactgctaagcttgggcccaggaggctttgagaaagccttctctgtgtactctggagatagatggagaagtgttttcagattcctgggaacagacaccagtgctccagctcctccaaagttctggcttagcagctgcaggcaagcattatgctgctattgaagaagcattaggggtatgcctggcaggtgtgagcatcctggctcgctggatttgtgggtgttttcaggccttccattccccatagaggcaaggcccaatggccagtgttgcttatcgcttcagggtaggtgggcacaggcttggactagagaggagaaagattggtgtaatctgctttcctgtctgtagtgcctgctgtttggaaagggtgagttagaatatgttccaaggttggtgaggggctaaattgcacgcgtttaggctggcaccccgtgtgcagggcacactggcagagggtatctgaagtgggagaagaagcaggtagaccacctgtcccaggctgtggtgccaccctctctggcattcatgcagagcaaagcactttaaccatttcttttaaaaggtctatagattggggtagagtttggcctaaggtctctagggtccctgcctaaatcccactcctgagggagggggaagaagagagggtgggagattctcctccagtcctgtctcatctcctgggagaggcagacgagtgagtttcacacagaagaatttcatgtgaatggggccagcaagagctgccctgtgtccatggtgggtgtgccgggctggctgggaacaaggagcagtatgttgagtagaaagggtgtgggcgggtatagattggcctgggagtgttacagtagggagcaggcttctcccttctttctgggactcagagccccgcttcttcccactccacttgttgtcccatgaaggaagaagtggggttcctcctgacccagctgcctcttacggtttggtatgggacatgcacacacactcacatgctctcactcaccacactggagggcacacacgtaccccgcacccagcaactcctgacagaaagctcctcccacccaaatgggccaggccccagcatgatcctgaaatctgcatccgccgtggtttgtattcattgtgcatatcagggataccctcaagctggactgtgggttccaaattactcatagaggagaaaaccagagaaagatgaagaggaggagttaggtctatttgaaatgccaggggctcgctgtgaggaataggtgaaaaaaaacttttcaccagcctttgagagactagactgaccccacccttccttcagtgagcagaatcactgtggtcagtctcctgtcccagcttcagttcatgaatactcctgttcctccagtttcccatcctttgtccctgctgtcccccacttttaaagatgggtctcaacccctccccaccacgtcatgatggatggggcaaggtggtggggactaggggagcctggtatacatgcggcttcattgccaataaatttcatgcactttaaagtcctgtggcttgtgacctcttaataaagtgttagaatcc

SEQ ID NO: 9565 - DNA, 4645 bp, Homo sapiens; identical to SEQ ID NO: 9563
  source 1..4645: mol_type = unassigned DNA

SEQ ID NO: 9566 - DNA, 4404 bp, Homo sapiens
  source 1..4404: mol_type = unassigned DNA
gcgcatgcgtcctagcagcgggacccgcggctcgggatggaggctggacacctgttctgctgttgtgtcctgccattctcctgaagaacagaggcacactgtaaaacccaacacttccccttgcattctataagattacagcaagatggaaataccaaatccccctacctccaaatgtatcacttactggaaaagaaaagtgaaatctgaatacatgcgacttcgacaacttaaacggcttcaggcaaatatgggtgcaaaggctttgtatgtggcaaattttgcaaaggttcaagaaaaaacccagatcctcaatgaagaatggaagaagcttcgtgtccaacctgttcagtcaatgaagcctgtgagtggacacccttttctcaaaaagagatgatccctggatccgttctgattagtgatgctgtttttctggagttggtcgatgccctgaatcagtactcagatgaggaggaggaagggcacaatgacacctcagatggaaagcaggatgacagcaaagaagatctgccagtaacaagaaagagaaagcgacatgctattgaaggcaacaaaaagagttccaagaaacagttcccaaatgacatgatcttcagtgcaattgcctcaatgttccctgagaatggtgtcccagatgacatgaaggagaggtatcgagaactaacagagatgtcagaccccaatgcacttccccctcagtgcacacccaacatcgatggccccaatgccaagtctgtgcagcgggagcaatctctgcactccttccacacacttttttgccggcgctgctttaaatacgactgcttccttcacccttttcatgccacccctaatgtatataaacgcaagaataaagaaatcaagattgaaccagaaccatgtggcacagactgcttccttttgctggaaggagcaaaggagtatgccatgctccacaacccccgctccaagtgctctggtcgtcgccggagaaggcaccacatagtcagtgcttcctgctccaatgcctcagcctctgctgtggctgagactaaagaaggagacagtgacagggacacaggcaatgactgggcctccagttcttcagaggctaactctcgctgtcagactcccacaaaacagaaggctagtccagccccacctcaactctgcgtagtggaagcaccctcggagcctgtggaatggactggggctgaagaatctctttttcgagtcttccatggcacctacttcaacaacttctgttcaatagccaggcttctggggaccaagacgtgcaagcaggtctttcagtttgcagtcaaagaatcacttatcctgaagctgccaacagatgagctcatgaacccctcacagaagaagaaaagaaagcacagattgtgggctgcacactgcaggaagattcagctgaagaaagataactcttccacacaagtgtacaactaccaaccctgcgaccacccagaccgcccctgtgacagcacctgcccctgcatcatgactcagaatttctgtgagaagttctgccagtgcaacccagactgtcagaatcgtttccctggctgtcgctgtaagacccagtgcaataccaagcaatgtccttgctatctggcagtgcgagaatgtgaccctgacctgtgtctcacctgtggggcctcagagcactgggactgcaaggtggtttcctgtaaaaactgcagcatccagcgtggacttaagaagcacctgctgctggccccctctgatgtggccggatggggcaccttcataaaggagtctgtgcagaagaacgaattcatttctgaatactgtggtgagctcatctctcaggatgaggctgatcgacgcggaaaggtctatgacaaatacatgtccagcttcctcttcaacctcaataatgattttgtagtggatgctactcggaaaggaaacaaaattcgatttgcaaatcattcagtgaatcccaactgttatgccaaagtggtcatggtgaatggagaccatcggattgggatctttgccaagagggcaattcaagctggcgaagagctcttctttgattacaggtacagccaagctgatgctctcaagtacgtggggatcgagagggagaccgacgtcctttagccctcccaggccccacggcagcacttatggtagcggcactgtcttggctttcgtgctcacaccactgctgctcgagtctcctgcactgtgtctcccacactgagaaaccccccaacccactccctctgtagtgaggcctctgccatgtccagagggcacaaaactgtctcaatgagaggggagacagaggcagctagggcttggtctcccaggacagagagttacagaaatgggagactgtttctctggcctcagaagaagcgagcacaggctggggtggatgacttatgcgtgatttcgtgtcggctccccaggctgtggcctcaggaatcaacttaggcagttcccaacaagcgctagcctgtaattgtagctttccacatcaagagtccttatgttattgggatgcaggcaaacctctgtggtcctaagacctggagaggacaggctaagtgaagtgtggtccctggagcctacaagtggtctgggttagaggcgagcctggcaggcagcacagactgaactcagaggtagacaggtcaccttactacctcctccctcgtggcagggctcaaactgaaagagtgtgggttctaagtacaggcattcaaggctgggggaaggaaagctacgccatccttccttagccagagagggagaaccagccagatgatagtagttaaactgctaagcttgggcccaggaggctttgagaaagccttctctgtgtactctggagatagatggagaagtgttttcagattcctgggaacagacaccagtgctccagctcctccaaagttctggcttagcagctgcaggcaagcattatgctgctattgaagaagcattaggggtatgcctggcaggtgtgagcatcctggctcgctggatttgtgggtgttttcaggccttccattccccatagaggcaaggcccaatggccagtgttgcttatcgcttcagggtaggtgggcacaggcttggactagagaggagaaagattggtgtaatctgctttcctgtctgtagtgcctgctgtttggaaagggtgagttagaatatgttccaaggttggtgaggggctaaattgcacgcgtttaggctggcaccccgtgtgcagggcacactggcagagggtatctgaagtgggagaagaagcaggtagaccacctgtcccaggctgtggtgccaccctctctggcattcatgcagagcaaagcactttaaccatttcttttaaaaggtctatagattggggtagagtttggcctaaggtctctagggtccctgcctaaatcccactcctgagggagggggaagaagagagggtgggagattctcctccagtcctgtctcatctcctgggagaggcagacgagtgagtttcacacagaagaatttcatgtgaatggggccagcaagagctgccctgtgtccatggtgggtgtgccgggctggctgggaacaaggagcagtatgttgagtagaaagggtgtgggcgggtatagattggcctgggagtgttacagtagggagcaggcttctcccttctttctgggactcagagccccgcttcttcccactccacttgttgtcccatgaaggaagaagtggggttcctcctgacccagctgcctcttacggtttggtatgggacatgcacacacactcacatgctctcactcaccacactggagggcacacacgtaccccgcacccagcaactcctgacagaaagctcctcccacccaaatgggccaggccccagcatgatcctgaaatctgcatccgccgtggtttgtattcattgtgcatatcagggataccctcaagctggactgtgggttccaaattactcatagaggagaaaaccagagaaagatgaagaggaggagttaggtctatttgaaatgccaggggctcgctgtgaggaataggtgaaaaaaaacttttcaccagcctttgagagactagactgaccccacccttccttcagtgagcagaatcactgtggtcagtctcctgtcccagcttcagttcatgaatactcctgttcctccagtttcccatcctttgtccctgctgtcccccacttttaaagatgggtctcaacccctccccaccacgtcatgatggatggggcaaggtggtggggactaggggagcctggtatacatgcggcttcattgccaataaatttcatgcactttaaagtcctgtggcttgtgacctcttaataaagtgttagaatcc

SEQ ID NO: 9567 - DNA, 2639 bp, Homo sapiens
  source 1..2639: mol_type = unassigned DNA
tccggtcgcgtccgacacccggtgggactcagaaggcagtggagccccggcggcggcggcggcggcgcgcgggggcgacgcgcgggaacaacgcgagtcggcgcgcgggacgaagaataatcatgggccagactgggaagaaatctgagaagggaccagtttgttggcggaagcgtgtaaaatcagagtacatgcgactgagacagctcaagaggttcagacgagctgatgaagtaaagagtatgtttagttccaatcgtcagaaaattttggaaagaacggaaatcttaaaccaagaatggaaacagcgaaggatacagcctgtgcacatcctgacttctgtgagctcattgcgcgggactagggagtgttcggtgaccagtgacttggattttccaacacaagtcatcccattaaagactctgaatgcagttgcttcagtacccataatgtattcttggtctcccctacagcagaattttatggtggaagatgaaactgttttacataacattccttatatgggagatgaagttttagatcaggatggtactttcattgaagaactaataaaaaattatgatgggaaagtacacggggatagagaatgtgggtttataaatgatgaaatttttgtggagttggtgaatgcccttggtcaatataatgatgatgacgatgatgatgatggagacgatcctgaagaaagagaagaaaagcagaaagatctggaggatcaccgagatgataaagaaagccgcccacctcggaaatttccttctgataaaatttttgaagccatttcctcaatgtttccagataagggcacagcagaagaactaaaggaaaaatataaagaactcaccgaacagcagctcccaggcgcacttcctcctgaatgtacccccaacatagatggaccaaatgctaaatctgttcagagagagcaaagcttacactcctttcatacgcttttctgtaggcgatgttttaaatatgactgcttcctacatcgtaagtgcaattattcttttcatgcaacacccaacacttataagcggaagaacacagaaacagctctagacaacaaaccttgtggaccacagtgttaccagcatttggagggagcaaaggagtttgctgctgctctcaccgctgagcggataaagaccccaccaaaacgtccaggaggccgcagaagaggacggcttcccaataacagtagcaggcccagcacccccaccattaatgtgctggaatcaaaggatacagacagtgatagggaagcagggactgaaacggggggagagaacaatgataaagaagaagaagagaagaaagatgaaacttcgagctcctctgaagcaaattctcggtgtcaaacaccaataaagatgaagccaaatattgaacctcctgagaatgtggagtggagtggtgctgaagcctcaatgtttagagtcctcattggcacttactatgacaatttctgtgccattgctaggttaattgggaccaaaacatgtagacaggtgtatgagtttagagtcaaagaatctagcatcatagctccagctcccgctgaggatgtggatactcctccaaggaaaaagaagaggaaacaccggttgtgggctgcacactgcagaaagatacagctgaaaaaggacggctcctctaaccatgtttacaactatcaaccctgtgatcatccacggcagccttgtgacagttcgtgcccttgtgtgatagcacaaaatttttgtgaaaagttttgtcaatgtagttcagagtgtcaaaaccgctttccgggatgccgctgcaaagcacagtgcaacaccaagcagtgcccgtgctacctggctgtccgagagtgtgaccctgacctctgtcttacttgtggagccgctgaccattgggacagtaaaaatgtgtcctgcaagaactgcagtattcagcggggctccaaaaagcatctattgctggcaccatctgacgtggcaggctgggggatttttatcaaagatcctgtgcagaaaaatgaattcatctcagaatactgtggagagattatttctcaagatgaagctgacagaagagggaaagtgtatgataaatacatgtgcagctttctgttcaacttgaacaatgattttgtggtggatgcaacccgcaagggtaacaaaattcgttttgcaaatcattcggtaaatccaaactgctatgcaaaagttatgatggttaacggtgatcacaggataggtatttttgccaagagagccatccagactggcgaagagctgttttttgattacagatacagccaggctgatgccctgaagtatgtcggcatcgaaagagaaatggaaatcccttgacatctgctacctcctcccccctcctctgaaacagctgccttagcttcaggaacctcgagtactgtgggcaatttagaaaaagaacatgcagtttgaaattctgaatttgcaaagtactgtaagaataatttatagtaatgagtttaaaaatcaactttttattgccttctcaccagctgcaaagtgttttgtaccagtgaatttttgcaataatgcagtatggtacatttttcaactttgaataaagaatacttgaacttg

SEQ ID NO: 9568 - DNA, 2477 bp, Homo sapiens
  source 1..2477: mol_type = unassigned DNA
agaaggcagtggagccccggcggcggcggcggcggcgcgcgggggcgacgcgcgggaacaacgcgagtcggcgcgcgggacgaagaataatcatgggccagactgggaagaaatctgagaagggaccagtttgttggcggaagcgtgtaaaatcagagtacatgcgactgagacagctcaagaggttcagacgagctgatgaagtaaagagtatgtttagttccaatcgtcagaaaattttggaaagaacggaaatcttaaaccaagaatggaaacagcgaaggatacagcctgtgcacatcctgacttctgtgagctcattgcgcgggactagggaggtggaagatgaaactgttttacataacattccttatatgggagatgaagttttagatcaggatggtactttcattgaagaactaataaaaaattatgatgggaaagtacacggggatagagaatgtgggtttataaatgatgaaatttttgtggagttggtgaatgcccttggtcaatataatgatgatgacgatgatgatgatggagacgatcctgaagaaagagaagaaaagcagaaagatctggaggatcaccgagatgataaagaaagccgcccacctcggaaatttccttctgataaaatttttgaagccatttcctcaatgtttccagataagggcacagcagaagaactaaaggaaaaatataaagaactcaccgaacagcagctcccaggcgcacttcctcctgaatgtacccccaacatagatggaccaaatgctaaatctgttcagagagagcaaagcttacactcctttcatacgcttttctgtaggcgatgttttaaatatgactgcttcctacatccttttcatgcaacacccaacacttataagcggaagaacacagaaacagctctagacaacaaaccttgtggaccacagtgttaccagcatttggagggagcaaaggagtttgctgctgctctcaccgctgagcggataaagaccccaccaaaacgtccaggaggccgcagaagaggacggcttcccaataacagtagcaggcccagcacccccaccattaatgtgctggaatcaaaggatacagacagtgatagggaagcagggactgaaacggggggagagaacaatgataaagaagaagaagagaagaaagatgaaacttcgagctcctctgaagcaaattctcggtgtcaaacaccaataaagatgaagccaaatattgaacctcctgagaatgtggagtggagtggtgctgaagcctcaatgtttagagtcctcattggcacttactatgacaatttctgtgccattgctaggttaattgggaccaaaacatgtagacaggtgtatgagtttagagtcaaagaatctagcatcatagctccagctcccgctgaggatgtggatactcctccaaggaaaaagaagaggaaacaccggttgtgggctgcacactgcagaaagatacagctgaaaaaggacggctcctctaaccatgtttacaactatcaaccctgtgatcatccacggcagccttgtgacagttcgtgcccttgtgtgatagcacaaaatttttgtgaaaagttttgtcaatgtagttcagagtgtcaaaaccgctttccgggatgccgctgcaaagcacagtgcaacaccaagcagtgcccgtgctacctggctgtccgagagtgtgaccctgacctctgtcttacttgtggagccgctgaccattgggacagtaaaaatgtgtcctgcaagaactgcagtattcagcggggctccaaaaagcatctattgctggcaccatctgacgtggcaggctgggggatttttatcaaagatcctgtgcagaaaaatgaattcatctcagaatactgtggagagattatttctcaagatgaagctgacagaagagggaaagtgtatgataaatacatgtgcagctttctgttcaacttgaacaatgattttgtggtggatgcaacccgcaagggtaacaaaattcgttttgcaaatcattcggtaaatccaaactgctatgcaaaagttatgatggttaacggtgatcacaggataggtatttttgccaagagagccatccagactggcgaagagctgttttttgattacagatacagccaggctgatgccctgaagtatgtcggcatcgaaagagaaatggaaatcccttgacatctgctacctcctcccccctcctctgaaacagctgccttagcttcaggaacctcgagtactgtgggcaatttagaaaaagaacatgcagtttgaaattctgaatttgcaaagtactgtaagaataatttatagtaatgagtttaaaaatcaactttttattgccttctcaccagctgcaaagtgttttgtaccagtgaatttttgcaataatgcagtatggtacatttttcaactttgaataaagaatacttgaacttg

SEQ ID NO: 9569 - DNA, 2591 bp, Homo sapiens
  source 1..2591: mol_type = unassigned DNA
aggcagtggagccccggcggcggcggcggcggcgcgcgggggcgacgcgcgggaacaacgcgagtcggcgcgcgggacgaagaataatcatgggccagactgggaagaaatctgagaagggaccagtttgttggcggaagcgtgtaaaatcagagtacatgcgactgagacagctcaagaggttcagacgagctgatgaagtaaagagtatgtttagttccaatcgtcagaaaattttggaaagaacggaaatcttaaaccaagaatggaaacagcgaaggatacagcctgtgcacatcctgacttctgtgagctcattgcgcgggactagggagtgttcggtgaccagtgacttggattttccaacacaagtcatcccattaaagactctgaatgcagttgcttcagtacccataatgtattcttggtctcccctacagcagaattttatggtggaagatgaaactgttttacataacattccttatatgggagatgaagttttagatcaggatggtactttcattgaagaactaataaaaaattatgatgggaaagtacacggggatagagaatgtgggtttataaatgatgaaatttttgtggagttggtgaatgcccttggtcaatataatgatgatgacgatgatgatgatggagacgatcctgaagaaagagaagaaaagcagaaagatctggaggatcaccgagatgataaagaaagccgcccacctcggaaatttccttctgataaaatttttgaagccatttcctcaatgtttccagataagggcacagcagaagaactaaaggaaaaatataaagaactcaccgaacagcagctcccaggcgcacttcctcctgaatgtacccccaacatagatggaccaaatgctaaatctgttcagagagagcaaagcttacactcctttcatacgcttttctgtaggcgatgttttaaatatgactgcttcctacatccttttcatgcaacacccaacacttataagcggaagaacacagaaacagctctagacaacaaaccttgtggaccacagtgttaccagcatttggagggagcaaaggagtttgctgctgctctcaccgctgagcggataaagaccccaccaaaacgtccaggaggccgcagaagaggacggcttcccaataacagtagcaggcccagcacccccaccattaatgtgctggaatcaaaggatacagacagtgatagggaagcagggactgaaacggggggagagaacaatgataaagaagaagaagagaagaaagatgaaacttcgagctcctctgaagcaaattctcggtgtcaaacaccaataaagatgaagccaaatattgaacctcctgagaatgtggagtggagtggtgctgaagcctcaatgtttagagtcctcattggcacttactatgacaatttctgtgccattgctaggttaattgggaccaaaacatgtagacaggtgtatgagtttagagtcaaagaatctagcatcatagctccagctcccgctgaggatgtggatactcctccaaggaaaaagaagaggaaacaccggttgtgggctgcacactgcagaaagatacagctgaaaaaggacggctcctctaaccatgtttacaactatcaaccctgtgatcatccacggcagccttgtgacagttcgtgcccttgtgtgatagcacaaaatttttgtgaaaagttttgtcaatgtagttcagagtgtcaaaaccgctttccgggatgccgctgcaaagcacagtgcaacaccaagcagtgcccgtgctacctggctgtccgagagtgtgaccctgacctctgtcttacttgtggagccgctgaccattgggacagtaaaaatgtgtcctgcaagaactgcagtattcagcggggctccaaaaagcatctattgctggcaccatctgacgtggcaggctgggggatttttatcaaagatcctgtgcagaaaaatgaattcatctcagaatactgtggagagattatttctcaagatgaagctgacagaagagggaaagtgtatgataaatacatgtgcagctttctgttcaacttgaacaatgattttgtggtggatgcaacccgcaagggtaacaaaattcgttttgcaaatcattcggtaaatccaaactgctatgcaaaagttatgatggttaacggtgatcacaggataggtatttttgccaagagagccatccagactggcgaagagctgttttttgattacagatacagccaggctgatgccctgaagtatgtcggcatcgaaagagaaatggaaatcccttgacatctgctacctcctcccccctcctctgaaacagctgccttagcttcaggaacctcgagtactgtgggcaatttagaaaaagaacatgcagtttgaaattctgaatttgcaaagtactgtaagaataatttatagtaatgagtttaaaaatcaactttttattgccttctcaccagctgcaaagtgttttgtaccagtgaatttttgcaataatgcagtatggtacatttttcaactttgaataaagaatacttgaacttg

SEQ ID NO: 9570 - DNA, 1491 bp, Homo sapiens
  source 1..1491: mol_type = unassigned DNA
aaataaaagcgatggcgattgggctgccgcgtttggcgctcggtccggtcgcgtccgacacccggtgggactcagaaggcagtggagccccggcggcggcggcggcggcgcgcgggggcgacgcgcgggaacaacgcgagtcggcgcgcgggacgaagaataatcatgggccagactgggaagaaatctgagaagggaccagtttgttggcggaagcgtgtaaaatcagagtacatgcgactgagacagctcaagaggttcagacgagctgatgaagtaaagagtatgtttagttccaatcgtcagaaaattttggaaagaacggaaatcttaaaccaagaatggaaacagcgaaggatacagcctgtgcacatcctgacttctgtgagctcattgcgcgggactagggaggccattcacctgctcttccctctacgattttccataacacagtttttacttggaaccagccttctgccaagagtctcagtttggttgtgtactcctacaactactatttttggcttgacttccctctccagctcccagtggtccagccacacagtcgcctattgtaccagctggttgattgttcggtgaccagtgacttggattttccaacacaagtcatcccattaaagactctgaatgcagttgcttcagtacccataatgtattcttggtctcccctacagcagaattttatggtggaagatgaaactgttttacataacattccttatatgggagatgaagttttagatcaggatggtactttcattgaagaactaataaaaaattatgatgggaaagtacacggggatagagaatgtgggtttataaatgatgaaatttttgtggagttggtgaatgcccttggtcaatataatgatgatgacgatgatgatgatggagacgatcctgaagaaagagaagaaaagcagaaagatctggaggatcaccgagatgataaagaaagccgcccacctcggaaatttccttctgataaaatttttgaagccatttcctcaatgtttccagataagggcacagcagaagaactaaaggaaaaatataaagaactcaccgaacagcagctcccaggcgcacttcctcctgaatgtacccccaacatagatggaccaaatgctaaatctgttcagagagagcaaagcttacactcctttcatacgcttttctgtaggcgatgttttaaatatgactgcttcctacatccttttcatgcaacacccaacacttataagcggaagaacacagaaacagctctagacaacaaaccttgtggaccacagtgttaccagcatttgccactcctacctaggaactaaatgggtatatattgcctgttggattttggacagaagattcattgaatggcacctgcagaaggagggagcaaaggagtttgctgctgctctcaccgctgagcggataaagaccccaccaaaacgtccaggaggccgcagaaga

SEQ ID NO: 9571 - DNA, 2471 bp, Homo sapiens
  source 1..2471: mol_type = unassigned DNA
tccggtcgcgtccgacacccggtgggactcagaaggcagtggagccccggcggcggcggcggcggcgcgcgggggcgacgcgcgggaacaacgcgagtcggcgcgcgggacgaagaataatcatgggccagactgggaagaaatctgagaagggaccagtttgttggcggaagcgtgtaaaatcagagtacatgcgactgagacagctcaagaggttcagacgagctgatgaagtaaagagtatgtttagttccaatcgtcagaaaattttggaaagaacggaaatcttaaaccaagaatggaaacagcgaaggatacagcctgtgcacatcctgacttcttgttcggtgaccagtgacttggattttccaacacaagtcatcccattaaagactctgaatgcagttgcttcagtacccataatgtattcttggtctcccctacagcagaattttatggtggaagatgaaactgttttacataacattccttatatgggagatgaagttttagatcaggatggtactttcattgaagaactaataaaaaattatgatgggaaagtacacggggatagagaatgtgggtttataaatgatgaaatttttgtggagttggtgaatgcccttggtcaatataatgatgatgacgatgatgatgatggagacgatcctgaagaaagagaagaaaagcagaaagatctggaggatcaccgagatgataaagaaagccgcccacctcggaaatttccttctgataaaatttttgaagccatttcctcaatgtttccagataagggcacagcagaagaactaaaggaaaaatataaagaactcaccgaacagcagctcccaggcgcacttcctcctgaatgtacccccaacatagatggaccaaatgctaaatctgttcagagagagcaaagcttacactcctttcatacgcttttctgtaggcgatgttttaaatatgactgcttcctacatccttttcatgcaacacccaacacttataagcggaagaacacagaaacagctctagacaacaaaccttgtggaccacagtgttaccagcatttggagggagcaaaggagtttgctgctgctctcaccgctgagcggataaagaccccaccaaaacgtccaggaggccgcagaagaggacggcttcccaataacagtagcaggcccagcacccccaccattaatgtgctggaatcaaaggatacagacagtgatagggaagcagggactgaaacggggggagagaacaatgataaagaagaagaagagaagaaagatgaaacttcgagctcctctgaagcaaattctcggtgtcaaacaccaataaagatgaagccaaatattgaacctcctgagaatgtggagtggagtggtgctgaagcctcaatgtttagagtcctcattggcacttactatgacaatttctgtgccattgctaggttaattgggaccaaaacatgtagacaggtgtatgagtttagagtcaaagaatctagcatcatagctccagctcccgctgaggatgtggatactcctccaaggaaaaagaagaggaaacaccggttgtgggctgcacactgcagaaagatacagctgaaaaagggtcaaaaccgctttccgggatgccgctgcaaagcacagtgcaacaccaagcagtgcccgtgctacctggctgtccgagagtgtgaccctgacctctgtcttacttgtggagccgctgaccattgggacagtaaaaatgtgtcctgcaagaactgcagtattcagcggggctccaaaaagcatctattgctggcaccatctgacgtggcaggctgggggatttttatcaaagatcctgtgcagaaaaatgaattcatctcagaatactgtggagagattatttctcaagatgaagctgacagaagagggaaagtgtatgataaatacatgtgcagctttctgttcaacttgaacaatgattttgtggtggatgcaacccgcaagggtaacaaaattcgttttgcaaatcattcggtaaatccaaactgctatgcaaaagttatgatggttaacggtgatcacaggataggtatttttgccaagagagccatccagactggcgaagagctgttttttgattacagatacagccaggctgatgccctgaagtatgtcggcatcgaaagagaaatggaaatcccttgacatctgctacctcctcccccctcctctgaaacagctgccttagcttcaggaacctcgagtactgtgggcaatttagaaaaagaacatgcagtttgaaattctgaatttgcaaagtactgtaagaataatttatagtaatgagtttaaaaatcaactttttattgccttctcaccagctgcaaagtgttttgtaccagtgaatttttgcaataatgcagtatggtacatttttcaactttgaataaagaatacttgaacttg

SEQ ID NO: 9572 - DNA, 2572 bp, Homo sapiens
  source 1..2572: mol_type = unassigned DNA
gacgacgttcgcggcggggaactcggagtagcttcgcctctgacgtttccccacgacgcaccccgaaatccccctgagctccggcggtcgcgggctgccctcgccgcctggtctggctttatgctaagtttgagggaagagtcgagctgctctgctctctattgattgtgtttctggagggcgtcctgttgaattcccacttcattgtgtacatccccttccgttccccccaaaaatctgtgccacagggttactttttgaaagcgggaggaatcgagaagcacgatcttttggaaaacttggtgaacgcctaaataatcatgggccagactgggaagaaatctgagaagggaccagtttgttggcggaagcgtgtaaaatcagagtacatgcgactgagacagctcaagaggttcagacgagctgatgaagtaaagagtatgtttagttccaatcgtcagaaaattttggaaagaacggaaatcttaaaccaagaatggaaacagcgaaggatacagcctgtgcacatcctgacttcttgttcggtgaccagtgacttggattttccaacacaagtcatcccattaaagactctgaatgcagttgcttcagtacccataatgtattcttggtctcccctacagcagaattttatggtggaagatgaaactgttttacataacattccttatatgggagatgaagttttagatcaggatggtactttcattgaagaactaataaaaaattatgatgggaaagtacacggggatagagaatgtgggtttataaatgatgaaatttttgtggagttggtgaatgcccttggtcaatataatgatgatgacgatgatgatgatggagacgatcctgaagaaagagaagaaaagcagaaagatctggaggatcaccgagatgataaagaaagccgcccacctcggaaatttccttctgataaaatttttgaagccatttcctcaatgtttccagataagggcacagcagaagaactaaaggaaaaatataaagaactcaccgaacagcagctcccaggcgcacttcctcctgaatgtacccccaacatagatggaccaaatgctaaatctgttcagagagagcaaagcttacactcctttcatacgcttttctgtaggcgatgttttaaatatgactgcttcctacatccttttcatgcaacacccaacacttataagcggaagaacacagaaacagctctagacaacaaaccttgtggaccacagtgttaccagcatttggagggagcaaaggagtttgctgctgctctcaccgctgagcggataaagaccccaccaaaacgtccaggaggccgcagaagaggacggcttcccaataacagtagcaggcccagcacccccaccattaatgtgctggaatcaaaggatacagacagtgatagggaagcagggactgaaacggggggagagaacaatgataaagaagaagaagagaagaaagatgaaacttcgagctcctctgaagcaaattctcggtgtcaaacaccaataaagatgaagccaaatattgaacctcctgagaatgtggagtggagtggtgctgaagcctcaatgtttagagtcctcattggcacttactatgacaatttctgtgccattgctaggttaattgggaccaaaacatgtagacaggtgtatgagtttagagtcaaagaatctagcatcatagctccagctcccgctgaggatgtggatactcctccaaggaaaaagaagaggaaacaccggttgtgggctgcacactgcagaaagatacagctgaaaaagggtcaaaaccgctttccgggatgccgctgcaaagcacagtgcaacaccaagcagtgcccgtgctacctggctgtccgagagtgtgaccctgacctctgtcttacttgtggagccgctgaccattgggacagtaaaaatgtgtcctgcaagaactgcagtattcagcggggctccaaaaagcatctattgctggcaccatctgacgtggcaggctgggggatttttatcaaagatcctgtgcagaaaaatgaattcatctcagaatactgtggagagattatttctcaagatgaagctgacagaagagggaaagtgtatgataaatacatgtgcagctttctgttcaacttgaacaatgattttgtggtggatgcaacccgcaagggtaacaaaattcgttttgcaaatcattcggtaaatccaaactgctatgcaaaagttatgatggttaacggtgatcacaggataggtatttttgccaagagagccatccagactggcgaagagctgttttttgattacagatacagccaggctgatgccctgaagtatgtcggcatcgaaagagaaatggaaatcccttgacatctgctacctcctcccccctcctctgaaacagctgccttagcttcaggaacctcgagtactgtgggcaatttagaaaaagaacatgcagtttgaaattctgaatttgcaaagtactgtaagaataatttatagtaatgagtttaaaaatcaactttttattg

SEQ ID NO: 9573 - DNA, 2466 bp, Homo sapiens
  source 1..2466: mol_type = unassigned DNA
ggcgctcggtccggtcgcgtccgacacccggtgggactcagaaggcagtggagccccggcggcggcggcggcggcgcgcgggggcgacgcgcgggaacaacgcgagtcggcgcgcgggacgaagaataatcatgggccagactgggaagaaatctgagaagggaccagtttgttggcggaagcgtgtaaaatcagagtacatgcgactgagacagctcaagaggttcagacgagctgatgaagtaaagagtatgtttagttccaatcgtcagaaaattttggaaagaacggaaatcttaaaccaagaatggaaacagcgaaggatacagcctgtgcacatcctgacttcttgttcggtgaccagtgacttggattttccaacacaagtcatcccattaaagactctgaatgcagttgcttcagtacccataatgtattcttggtctcccctacagcagaattttatggtggaagatgaaactgttttacataacattccttatatgggagatgaagttttagatcaggatggtactttcattgaagaactaataaaaaattatgatgggaaagtacacggggatagagaatgtgggtttataaatgatgaaatttttgtggagttggtgaatgcccttggtcaatataatgatgatgacgatgatgatgatggagacgatcctgaagaaagagaagaaaagcagaaagatctggaggatcaccgagatgataaagaaagccgcccacctcggaaatttccttctgataaaatttttgaagccatttcctcaatgtttccagataagggcacagcagaagaactaaaggaaaaatataaagaactcaccgaacagcagctcccaggcgcacttcctcctgaatgtacccccaacatagatggaccaaatgctaaatctgttcagagagagcaaagcttacactcctttcatacgcttttctgtaggcgatgttttaaatatgactgcttcctacatccttttcatgcaacacccaacacttataagcggaagaacacagaaacagctctagacaacaaaccttgtggaccacagtgttaccagcatttggagggagcaaaggagtttgctgctgctctcaccgctgagcggataaagaccccaccaaaacgtccaggaggccgcagaagaggacggcttcccaataacagtagcaggcccagcacccccaccattaatgtgctggaatcaaaggatacagacagtgatagggaagcagggactgaaacggggggagagaacaatgataaagaagaagaagagaagaaagatgaaacttcgagctcctctgaagcaaattctcggtgtcaaacaccaataaagatgaagccaaatattgaacctcctgagaatgtggagtggagtggtgctgaagcctcaatgtttagagtcctcattggcacttactatgacaatttctgtgccattgctaggttaattgggaccaaaacatgtagacaggtgtatgagtttagagtcaaagaatctagcatcatagctccagctcccgctgaggatgtggatactcctccaaggaaaaagaagaggaaacaccggttgtgggctgcacactgcagaaagatacagctgaaaaaggacggctcctctaaccatgtttacaactatcaaccctgtgatcatccacggcagccttgtgacagttcgtgcccttgtgtgatagcacaaaatttttgtgaaaagttttgtcaatgtagttcagagtgtcaaaaccgctttccgggatgccgctgcaaagcacagtgcaacaccaagcagtgcccgtgctacctggctgtccgagagtgtgaccctgacctctgtcttacttgtggagccgctgaccattgggacagtaaaaatgtgtcctgcaagaactgcagtattcagcggggctccaaaaagcatctattgctggcaccatctgacgtggcaggctgggggatttttatcaaagatcctgtgcagaaaaatgaattcatctcagaatactgtggagagattatttctcaagatgaagctgacagaagagggaaagtgtatgataaatacatgtgcagctttctgttcaacttgaacaatgattttgtggtggatgcaacccgcaagggtaacaaaattcgttttgcaaatcattcggtaaatccaaactgctatgcaaaagttatgatggttaacggtgatcacaggataggtatttttgccaagagagccatccagactggcgaagagctgttttttgattacagatacagccaggctgatgccctgaagtatgtcggcatcgaaagagaaatggaaatcccttgacatctgctacctcctcccccctcctctgaaacagctgccttagcttcaggaacctcgagtactgtgggcaatttagaaaaagaacatgcagtttgaaattctgaatttgcaaagtactgta

SEQ ID NO: 9574 - DNA, 1783 bp, Homo sapiens
  source 1..1783: mol_type = unassigned DNA
ggacagtatctgtgggtacccggagcacggagatctcgccggctttacgttcacctcggtgtctgcagcaccctccgcttcctctcctaggcgacgagacccagtggctagaagttcaccatgtctattctcaagatccatgccagggagatctttgactctcgcgggaatcccactgttgaggttgatctcttcacctcaaaaggtctcttcagagctgctgtgcccagtggtgcttcaactggtatctatgaggccctagagctccgggacaatgataagactcgctatatggggaagggtgtctcaaaggctgttgagcacatcaataaaactattgcgcctgccctggttagcaagaaactgaacgtcacagaacaagagaagattgacaaactgatgatcgagatggatggaacagaaaataaatctaagtttggtgcgaacgccattctgggggtgtcccttgccgtctgcaaagctggtgccgttgagaagggggtccccctgtaccgccacatcgctgacttggctggcaactctgaagtcatcctgccagtcccggcgttcaatgtcatcaatggcggttctcatgctggcaacaagctggccatgcaggagttcatgatcctcccagtcggtgcagcaaacttcagggaagccatgcgcattggagcagaggtttaccacaacctgaagaatgtcatcaaggagaaatatgggaaagatgccaccaatgtgggggatgaaggcgggtttgctcccaacatcctggagaataaagaaggcctggagctgctgaagactgctattgggaaagctggctacactgataaggtggtcatcggcatggacgtagcggcctccgagttcttcaggtctgggaagtatgacctggacttcaagtctcccgatgaccccagcaggtacatctcgcctgaccagctggctgacctgtacaagtccttcatcaaggactacccagtggtgtctatcgaagatccctttgaccaggatgactggggagcttggcagaagttcacagccagtgcaggaatccaggtagtgggggatgatctcacagtgaccaacccaaagaggatcgccaaggccgtgaacgagaagtcctgcaactgcctcctgctcaaagtcaaccagattggctccgtgaccgagtctcttcaggcgtgcaagctggcccaggccaatggttggggcgtcatggtgtctcatcgttcgggggagactgaagataccttcatcgctgacctggttgtggggctgtgcactgggcagatcaagactggtgccccttgccgatctgagcgcttggccaagtacaaccagctcctcagaattgaagaggagctgggcagcaaggctaagtttgccggcaggaacttcagaaaccccttggccaagtaagctgtgggcaggcaagcccttcggtcacctgttggctacacagacccctcccctcgtgtcagctcaggcagctcgaggcccccgaccaacacttgcaggggtccctgctagttagcgccccaccgccgtggagttcgtaccgcttccttagaacttctacagaagccaagctccctggagccctgttggcagctctagctttgcagtcgtgtaattggcccaagtcattgtttttctcgcctcactttccaccaagtgtctagagtcatgtgagcctcgtgtcatctccggggtggccacaggctagatccccggtggttttgtgctcaaaataaaaagcctcagtgacccatgagaa

SEQ ID NO: 9575 - DNA, 2423 bp, Homo sapiens
  source 1..2423: mol_type = unassigned DNA
acccgcgctcgtacgtgcgcctccgccggcagctcctgactcatcgggggctccgggtcacatgcgcccgcgcggccctataggcgcctcctccgcccgccgcccgggagccgcagccgccgccgccactgccactcccgctctctcagcgccgccgtcgccaccgccaccgccaccgccactaccaccgtctgagtctgcagtcccgagatcccagccatcatgtccatagagaagatctgggcccgggagatcctggactcccgcgggaaccccacagtggaggtggatctctatactgccaaaggtcttttccgggctgcagtgcccagtggagcctctacgggcatctatgaggccctggagctgagggatggagacaaacagcgttacttaggcaaaggtgtcctgaaggcagtggaccacatcaactccaccatcgcgccagccctcatcagctcaggtctctctgtggtggagcaagagaaactggacaacctgatgctggagttggatgggactgagaacaaatccaagtttggggccaatgccatcctgggtgtgtctctggccgtgtgtaaggcaggggcagctgagcgggaactgcccctgtatcgccacattgctcagctggccgggaactcagacctcatcctgcctgtgccggccttcaacgtgatcaatggtggctctcatgctggcaacaagctggccatgcaggagttcatgatcctcccagtgggagctgagagctttcgggatgccatgcgactaggtgcagaggtctaccatacactcaagggagtcatcaaggacaaatacggcaaggatgccaccaatgtgggggatgaaggtggctttgcccccaatatcctggagaacagtgaagccttggagctggtgaaggaagccatcgacaaggctggctacacggaaaagatcgttattggcatggatgttgctgcctcagagttttatcgtgatggcaaatatgacttggacttcaagtctcccactgatccttcccgatacatcactggggaccagctgggggcactctaccaggactttgtcagggactatcctgtggtctccattgaggacccatttgaccaggatgattgggctgcctggtccaagttcacagccaatgtagggatccagattgtgggtgatgacctgacagtgaccaacccaaaacgtattgagcgggcagtggaagaaaaggcctgcaactgtctgctgctcaaggtcaaccagatcggctcggtcactgaagccatccaagcgtgcaagctggcccaggagaatggctggggggtcatggtgagtcatcgctcaggagagactgaggacacattcattgctgacctggtggtggggctgtgcacaggccagatcaagactggtgccccgtgccgttctgaacgtctggctaaatacaaccagctcatgagaattgaggaagagctgggggatgaagctcgctttgccggacataacttccgtaatcccagtgtgctgtgattcctctgcttgcctggagacgtggaacctctgtctcatcctcctggaaccttgctgtcctgatctgtgatagttcaccccctgagatcccctgagccccagggtgcccagaacttccctgattgacctgctccgctgctccttggcttacctgacctcttgctgtctctgctcgccctcctttctgtgccctactcattggggttccgcactttccacttcttcctttctctttctctcttccctcagaaactagaaatgtgaatgaggattattataaaagggggtccgtggaagaatgatcagcatctgtgatgggagcgtcagggttggtgtgctgaggtgttagagagggaccatgtgtcacttgtgctttgctcttgtcccacgtgtcttccactttgcatatgagccgtgaactgtgcatagtgctgggatggaggggagtgttgggcatgtgatcacgcctggctaataaggctttagtgtatttatttatttatttattttatttgtttttcattcatcccattaatcatttccccataactcaatggcctaaaactggcctgacttgggggaacgatgtgtctgtatttcatgtggctgtagatcccaagatgactggggtgggaggtcttgctagaatgggaagggtcatagaaagggccttgacatcagttcctttgtgtgtactcactgaagcctgcgttggtccagagcggaggctgtgtgcctgggggagttttcctctatacatctctccccaaccctaggttccctgttcttcctccagctgcaccagagcaacctctcactccccatgccacgttccacagttgccaccacctctgtggcattgaaatgagcacctccattaaagtctgaatcagtgc

SEQ ID NO: 9576 - DNA, 2827 bp, Homo sapiens
  source 1..2827: mol_type = unassigned DNA
ctcttcacttcccgctgcaacccccagggactgcagggcctttctcaggaccctcttccccgacacctgtattgcatgcgcctttcgcgggaagaggagggatacacgtttgggagagagtgggaccttggggaaggggcagtgttcaggcagctggggtgttaagttggggaggtatgggggctctggaagagaggcccaggcagcccatcctcttcttggctcccaggagaaatgcaagcctggcagccattccgctctgaggagatctgggggaaccccaccggctggccaagctgcaaagaggcgcgggaaccactgtcgtgcccctcccctcctcactgcagtgttctcccatctcatcatttgatcttaccccgccccccactgcagtgacctccccttcctcactgcattgaccttctcctcttcccaggggggagggggaatcccttctacagccctagactgcagccagcgcctccctacccaccccccacccactgcagtaacctctttcccatccctcccagcctcccgccccgcccattgatctcaggctccacccctctaagcctcttatctttctccttccttcccttccacccgaggagatcccagccatcatgtccatagagaagatctgggcccgggagatcctggactcccgcgggaaccccacagtggaggtggatctctatactgccaaaggtcttttccgggctgcagtgcccagtggagcctctacgggcatctatgaggccctggagctgagggatggagacaaacagcgttacttaggcaaaggtgtcctgaaggcagtggaccacatcaactccaccatcgcgccagccctcatcagctcaggtctctctgtggtggagcaagagaaactggacaacctgatgctggagttggatgggactgagaacaaatccaagtttggggccaatgccatcctgggtgtgtctctggccgtgtgtaaggcaggggcagctgagcgggaactgcccctgtatcgccacattgctcagctggccgggaactcagacctcatcctgcctgtgccggccttcaacgtgatcaatggtggctctcatgctggcaacaagctggccatgcaggagttcatgatcctcccagtgggagctgagagctttcgggatgccatgcgactaggtgcagaggtctaccatacactcaagggagtcatcaaggacaaatacggcaaggatgccaccaatgtgggggatgaaggtggctttgcccccaatatcctggagaacagtgaagccttggagctggtgaaggaagccatcgacaaggctggctacacggaaaagatcgttattggcatggatgttgctgcctcagagttttatcgtgatggcaaatatgacttggacttcaagtctcccactgatccttcccgatacatcactggggaccagctgggggcactctaccaggactttgtcagggactatcctgtggtctccattgaggacccatttgaccaggatgattgggctgcctggtccaagttcacagccaatgtagggatccagattgtgggtgatgacctgacagtgaccaacccaaaacgtattgagcgggcagtggaagaaaaggcctgcaactgtctgctgctcaaggtcaaccagatcggctcggtcactgaagccatccaagcgtgcaagctggcccaggagaatggctggggggtcatggtgagtcatcgctcaggagagactgaggacacattcattgctgacctggtggtggggctgtgcacaggccagatcaagactggtgccccgtgccgttctgaacgtctggctaaatacaaccagctcatgagaattgaggaagagctgggggatgaagctcgctttgccggacataacttccgtaatcccagtgtgctgtgattcctctgcttgcctggagacgtggaacctctgtctcatcctcctggaaccttgctgtcctgatctgtgatagttcaccccctgagatcccctgagccccagggtgcccagaacttccctgattgacctgctccgctgctccttggcttacctgacctcttgctgtctctgctcgccctcctttctgtgccctactcattggggttccgcactttccacttcttcctttctctttctctcttccctcagaaactagaaatgtgaatgaggattattataaaagggggtccgtggaagaatgatcagcatctgtgatgggagcgtcagggttggtgtgctgaggtgttagagagggaccatgtgtcacttgtgctttgctcttgtcccacgtgtcttccactttgcatatgagccgtgaactgtgcatagtgctgggatggaggggagtgttgggcatgtgatcacgcctggctaataaggctttagtgtatttatttatttatttattttatttgtttttcattcatcccattaatcatttccccataactcaatggcctaaaactggcctgacttgggggaacgatgtgtctgtatttcatgtggctgtagatcccaagatgactggggtgggaggtcttgctagaatgggaagggtcatagaaagggccttgacatcagttcctttgtgtgtactcactgaagcctgcgttggtccagagcggaggctgtgtgcctgggggagttttcctctatacatctctccccaaccctaggttccctgttcttcctccagctgcaccagagcaacctctcactccccatgccacgttccacagttgccaccacctctgtggcattgaaatgagcacctccattaaagtctgaatcagtgc

SEQ ID NO: 9577 - DNA, 1646 bp, Homo sapiens
  source 1..1646: mol_type = unassigned DNA
gctctctcagcgccgccgtcgccaccgccaccgccaccgccactaccaccgtctgagtctgcagtcccgaggagatcccagccatcatgtccatagagaagatctgggcccgggagatcctggactcccgcgggaaccccacagtggaggtggatctctatactgccaaaggtcttttccgggctgcagtgcccagtggagcctctacgggcatctatgaggccctggagctgagggatggagacaaacagcgttacttaggcaaagccaagtttggggccaatgccatcctgggtgtgtctctggccgtgtgtaaggcaggggcagctgagcgggaactgcccctgtatcgccacattgctcagctggccgggaactcagacctcatcctgcctgtgccggccttcaacgtgatcaatggtggctctcatgctggcaacaagctggccatgcaggagttcatgatcctcccagtgggagctgagagctttcgggatgccatgcgactaggtgcagaggtctaccatacactcaagggagtcatcaaggacaaatacggcaaggatgccaccaatgtgggggatgaaggtggctttgcccccaatatcctggagaacagtgaagccttggagctggtgaaggaagccatcgacaaggctggctacacggaaaagatcgttattggcatggatgttgctgcctcagagttttatcgtgatggcaaatatgacttggacttcaagtctcccactgatccttcccgatacatcactggggaccagctgggggcactctaccaggactttgtcagggactatcctgtggtctccattgaggacccatttgaccaggatgattgggctgcctggtccaagttcacagccaatgtagggatccagattgtgggtgatgacctgacagtgaccaacccaaaacgtattgagcgggcagtggaagaaaaggcctgcaactgtctgctgctcaaggtcaaccagatcggctcggtcactgaagccatccaagcgtgcaagctggcccaggagaatggctggggggtcatggtgagtcatcgctcaggagagactgaggacacattcattgctgacctggtggtggggctgtgcacaggccagatcaagactggtgccccgtgccgttctgaacgtctggctaaatacaaccagctcatgagaattgaggaagagctgggggatgaagctcgctttgccggacataacttccgtaatcccagtgtgctgtgattcctctgcttgcctggagacgtggaacctctgtctcatcctcctggaaccttgctgtcctgatctgtgatagttcaccccctgagatcccctgagccccagggtgcccagaacttccctgattgacctgctccgctgctccttggcttacctgacctcttgctgtctctgctcgccctcctttctgtgccctactcattggggttccgcactttccacttcttcctttctctttctctcttccctcagaaactagaaatgtgaatgaggattattataaaagggggtccgtggaagaatgatcagcatctgtgatgggagcgtcagggttggtgtgctgaggtgttagagagggaccatgtgtcacttgtgctttgctcttgt

SEQ ID NO: 9578 - DNA, 2549 bp, Homo sapiens
  source 1..2549: mol_type = unassigned DNA
ctgttactgtcgagtgggtcgggccgtgggtatgagcgcttgtgtgcgctggggccaggtcgtgggtgcccccacccttcccccatcctcctcccttccccactccaccctcgtcggtcccccacccgcgctcgtacgtgcgcctccgccggcagctcctgactcatcgggggctccgggtcacatgcgcccgcgcggccctataggcgcctcctccgcccgccgcccgggagccgcagccgccgccgccactgccactcccgctctctcagcgccgccgtcgccaccgccaccgccaccgccactaccaccgtctgagtctgcagtcccgaggagatcccagccatcatgtccatagagaagatctgggcccgggagatcctggactcccgcgggaaccccacagtggaggtggatctctatactgccaaaggtcttttccgggctgcagtgcccagtggagcctctacgggcatctatgaggccctggagctgagggatggagacaaacagcgttacttaggcaaaggtgtcctgaaggcagtggaccacatcaactccaccatcgcgccagccctcatcagctcaggtctctctgtggtggagcaagagaaactggacaacctgatgctggagttggatgggactgagaacaaatccaagtttggggccaatgccatcctgggtgtgtctctggccgtgtgtaaggcaggggcagctgagcgggaactgcccctgtatcgccacattgctcagctggccgggaactcagacctcatcctgcctgtgccggccttcaacgtgatcaatggtggctctcatgctggcaacaagctggccatgcaggagttcatgatcctcccagtgggagctgagagctttcgggatgccatgcgactaggtgcagaggtctaccatacactcaagggagtcatcaaggacaaatacggcaaggatgccaccaatgtgggggatgaaggtggctttgcccccaatatcctggagaacagtgaagccttggagctggtgaaggaagccatcgacaaggctggctacacggaaaagatcgttattggcatggatgttgctgcctcagagttttatcgtgatggcaaatatgacttggacttcaagtctcccactgatccttcccgatacatcactggggaccagctgggggcactctaccaggactttgtcagggactatcctgtggtctccattgaggacccatttgaccaggatgattgggctgcctggtccaagttcacagccaatgtagggatccagattgtgggtgatgacctgacagtgaccaacccaaaacgtattgagcgggcagtggaagaaaaggcctgcaactgtctgctgctcaaggtcaaccagatcggctcggtcactgaagccatccaagcgtgcaagctggcccaggagaatggctggggggtcatggtgagtcatcgctcaggagagactgaggacacattcattgctgacctggtggtggggctgtgcacaggccagatcaagactggtgccccgtgccgttctgaacgtctggctaaatacaaccagctcatgagaattgaggaagagctgggggatgaagctcgctttgccggacataacttccgtaatcccagtgtgctgtgattcctctgcttgcctggagacgtggaacctctgtctcatcctcctggaaccttgctgtcctgatctgtgatagttcaccccctgagatcccctgagccccagggtgcccagaacttccctgattgacctgctccgctgctccttggcttacctgacctcttgctgtctctgctcgccctcctttctgtgccctactcattggggttccgcactttccacttcttcctttctctttctctcttccctcagaaactagaaatgtgaatgaggattattataaaagggggtccgtggaagaatgatcagcatctgtgatgggagcgtcagggttggtgtgctgaggtgttagagagggaccatgtgtcacttgtgctttgctcttgtcccacgtgtcttccactttgcatatgagccgtgaactgtgcatagtgctgggatggaggggagtgttgggcatgtgatcacgcctggctaataaggctttagtgtatttatttatttatttattttatttgtttttcattcatcccattaatcatttccccataactcaatggcctaaaactggcctgacttgggggaacgatgtgtctgtatttcatgtggctgtagatcccaagatgactggggtgggaggtcttgctagaatgggaagggtcatagaaagggccttgacatcagttcctttgtgtgtactcactgaagcctgcgttggtccagagcggaggctgtgtgcctgggggagttttcctctatacatctctccccaaccctaggttccctgttcttcctccagctgcaccagagcaacctctcactccccatgccacgttccacagttgccaccacctctgtggcattgaaatgagcacctccattaaagtctgaatcagtgc

SEQ ID NO: 9579 - DNA, 1643 bp, Homo sapiens
  source 1..1643: mol_type = unassigned DNA
gctctctcagcgccgccgtcgccaccgccaccgccaccgccactaccaccgtctgagtctgcagtcccgagatcccagccatcatgtccatagagaagatctgggcccgggagatcctggactcccgcgggaaccccacagtggaggtggatctctatactgccaaaggtcttttccgggctgcagtgcccagtggagcctctacgggcatctatgaggccctggagctgagggatggagacaaacagcgttacttaggcaaagccaagtttggggccaatgccatcctgggtgtgtctctggccgtgtgtaaggcaggggcagctgagcgggaactgcccctgtatcgccacattgctcagctggccgggaactcagacctcatcctgcctgtgccggccttcaacgtgatcaatggtggctctcatgctggcaacaagctggccatgcaggagttcatgatcctcccagtgggagctgagagctttcgggatgccatgcgactaggtgcagaggtctaccatacactcaagggagtcatcaaggacaaatacggcaaggatgccaccaatgtgggggatgaaggtggctttgcccccaatatcctggagaacagtgaagccttggagctggtgaaggaagccatcgacaaggctggctacacggaaaagatcgttattggcatggatgttgctgcctcagagttttatcgtgatggcaaatatgacttggacttcaagtctcccactgatccttcccgatacatcactggggaccagctgggggcactctaccaggactttgtcagggactatcctgtggtctccattgaggacccatttgaccaggatgattgggctgcctggtccaagttcacagccaatgtagggatccagattgtgggtgatgacctgacagtgaccaacccaaaacgtattgagcgggcagtggaagaaaaggcctgcaactgtctgctgctcaaggtcaaccagatcggctcggtcactgaagccatccaagcgtgcaagctggcccaggagaatggctggggggtcatggtgagtcatcgctcaggagagactgaggacacattcattgctgacctggtggtggggctgtgcacaggccagatcaagactggtgccccgtgccgttctgaacgtctggctaaatacaaccagctcatgagaattgaggaagagctgggggatgaagctcgctttgccggacataacttccgtaatcccagtgtgctgtgattcctctgcttgcctggagacgtggaacctctgtctcatcctcctggaaccttgctgtcctgatctgtgatagttcaccccctgagatcccctgagccccagggtgcccagaacttccctgattgacctgctccgctgctccttggcttacctgacctcttgctgtctctgctcgccctcctttctgtgccctactcattggggttccgcactttccacttcttcctttctctttctctcttccctcagaaactagaaatgtgaatgaggattattataaaagggggtccgtggaagaatgatcagcatctgtgatgggagcgtcagggttggtgtgctgaggtgttagagagggaccatgtgtcacttgtgctttgctcttgt

SEQ ID NO: 9580 - DNA, 1322 bp, Homo sapiens
  source 1..1322: mol_type = unassigned DNA
gacactgtcccagctgccacctagactcggagctccatccaaacctccagcgaagacatcccagccatggccatgcagaaaatctttgcccgggaaatcttggactccaggggcaaccccacggtggaggtggacctgcacacggccaagggccgattccgagcagctgtgcccagtggggcttccacgggtatctatgaggctctggaactaagagacggagacaaaggccgctacctggggaaagccaagtttggggccaatgccatcctgggcgtgtccttggccgtgtgtaaggcgggagcagctgagaagggggtccccctgtaccgccacatcgcagatctcgctgggaaccctgacctcatactcccagtgccagccttcaatgtgatcaacgggggctcccatgctggaaacaagctggccatgcaggagttcatgattctgcctgtgggagccagctccttcaaggaagccatgcgcattggcgccgaggtctaccaccacctcaagggggtcatcaaggccaagtatgggaaggatgccaccaatgtgggtgatgaaggtggcttcgcacccaacatcctggagaacaatgaggccctggagctgctgaagacggccatccaggcggctggttacccagacaaggtggtgatcggcatggatgtggcagcatctgagttctatcgcaatgggaagtacgatcttgacttcaagtcgcctgatgatcccgcacggcacatcactggggagaagctcggagagctgtataagagctttatcaagaactatcctgtggtctccatcgaagacccctttgaccaggatgactgggccacttggacctccttcctctcgggggtgaacatccagattgtgggggatgacttgacagtcaccaaccccaagaggattgcccaggccgttgagaagaaggcctgcaactgtctgctgctgaaggtcaaccagatcggctcggtgaccgaatcgatccaggcgtgcaaactggctcagtctaatggctggggggtgatggtgagccaccgctctggggagactgaggacacattcattgctgaccttgtggtggggctctgcacaggacagatcaagactggcgccccctgccgctcggagcgtctggccaaatacaaccaactcatgaggatcgaggaggctcttggggacaaggcaatctttgctggacgcaagttccgtaacccgaaggccaagtgagaagctggaggctccaggactccactggacagacccaggtcttccagacctgcttcctgaaataaacactggtgccaacc

SEQ ID NO: 9581 - DNA, 1521 bp, Homo sapiens
  source 1..1521: mol_type = unassigned DNA
gcgcagcctgagagggggtgagctgacactgtcccagctgccacctagactcggagctccatccaaacctccagcgaagacatcccaggtcgggtgaatcttccagccctgggggtggaggtagtaaaggccatggccatgcagaaaatctttgcccgggaaatcttggactccaggggcaaccccacggtggaggtggacctgcacacggccaagggccgattccgagcagctgtgcccagtggggcttccacgggtatctatgaggctctggaactaagagacggagacaaaggccgctacctggggaaaggagtcctgaaggctgtggagaacatcaacaatactctgggccctgctctgctgcaaaagaaactaagcgttgtggatcaagaaaaagttgacaaatttatgattgagctagatgggaccgagaataagtccaagtttggggccaatgccatcctgggcgtgtccttggccgtgtgtaaggcgggagcagctgagaagggggtccccctgtaccgccacatcgcagatctcgctgggaaccctgacctcatactcccagtgccagccttcaatgtgatcaacgggggctcccatgctggaaacaagctggccatgcaggagttcatgattctgcctgtgggagccagctccttcaaggaagccatgcgcattggcgccgaggtctaccaccacctcaagggggtcatcaaggccaagtatgggaaggatgccaccaatgtgggtgatgaaggtggcttcgcacccaacatcctggagaacaatgaggccctggagctgctgaagacggccatccaggcggctggttacccagacaaggtggtgatcggcatggatgtggcagcatctgagttctatcgcaatgggaagtacgatcttgacttcaagtcgcctgatgatcccgcacggcacatcactggggagaagctcggagagctgtataagagctttatcaagaactatcctgtggtctccatcgaagacccctttgaccaggatgactgggccacttggacctccttcctctcgggggtgaacatccagattgtgggggatgacttgacagtcaccaaccccaagaggattgcccaggccgttgagaagaaggcctgcaactgtctgctgctgaaggtcaaccagatcggctcggtgaccgaatcgatccaggcgtgcaaactggctcagtctaatggctggggggtgatggtgagccaccgctctggggagactgaggacacattcattgctgaccttgtggtggggctctgcacaggacagatcaagactggcgccccctgccgctcggagcgtctggccaaatacaaccaactcatgaggatcgaggaggctcttggggacaaggcaatctttgctggacgcaagttccgtaacccgaaggccaagtgagaagctggaggctccaggactccactggacagacccaggtcttccagacctgcttcctgaaataaacactggtgccaaccaaga

SEQ ID NO: 9582 - DNA, 1448 bp, Homo sapiens
  source 1..1448: mol_type = unassigned DNA
aaagggcaagggatttctggttccttaagagatcaactgtctacactcactcacacctcctgtcctgcagccatggccatgcagaaaatctttgcccgggaaatcttggactccaggggcaaccccacggtggaggtggacctgcacacggccaagggccgattccgagcagctgtgcccagtggggcttccacgggtatctatgaggctctggaactaagagacggagacaaaggccgctacctggggaaaggagtcctgaaggctgtggagaacatcaacaatactctgggccctgctctgctgcaaaagaaactaagcgttgtggatcaagaaaaagttgacaaatttatgattgagctagatgggaccgagaataagtccaagtttggggccaatgccatcctgggcgtgtccttggccgtgtgtaaggcgggagcagctgagaagggggtccccctgtaccgccacatcgcagatctcgctgggaaccctgacctcatactcccagtgccagccttcaatgtgatcaacgggggctcccatgctggaaacaagctggccatgcaggagttcatgattctgcctgtgggagccagctccttcaaggaagccatgcgcattggcgccgaggtctaccaccacctcaagggggtcatcaaggccaagtatgggaaggatgccaccaatgtgggtgatgaaggtggcttcgcacccaacatcctggagaacaatgaggccctggagctgctgaagacggccatccaggcggctggttacccagacaaggtggtgatcggcatggatgtggcagcatctgagttctatcgcaatgggaagtacgatcttgacttcaagtcgcctgatgatcccgcacggcacatcactggggagaagctcggagagctgtataagagctttatcaagaactatcctgtggtctccatcgaagacccctttgaccaggatgactgggccacttggacctccttcctctcgggggtgaacatccagattgtgggggatgacttgacagtcaccaaccccaagaggattgcccaggccgttgagaagaaggcctgcaactgtctgctgctgaaggtcaaccagatcggctcggtgaccgaatcgatccaggcgtgcaaactggctcagtctaatggctggggggtgatggtgagccaccgctctggggagactgaggacacattcattgctgaccttgtggtggggctctgcacaggacagatcaagactggcgccccctgccgctcggagcgtctggccaaatacaaccaactcatgaggatcgaggaggctcttggggacaaggcaatctttgctggacgcaagttccgtaacccgaaggccaagtgagaagctggaggctccaggactccactggacagacccaggtcttccagacctgcttcctgaaataaacactg

SEQ ID NO: 9583 - DNA, 945 bp, Homo sapiens
  source 1..945: mol_type = unassigned DNA
ataaatgcgcagcctgagagggggtgagctgacactgtcccagctgccacctagactcggagctccatccaaacctccagcgaagacatcccagccatggccatgcagaaaatctttgcccgggaaatcttggactccaggggcaaccccacggtggaggtggacctgcacacggccaagggccgattccgagcagctgtgcccagtggggcttccacgggtatctatgaggctctggaactaagagacggagacaaaggccgctacctggggaaaggagtcctgaaggctgtggagaacatcaacaatactctgggccctgctctgctgcaaaagaaactaagcgttgtggatcaagaaaaagttgacaaatttatgattgagctagatgggaccgagaataagtccaagtttggggccaatgccatcctgggcgtgtccttggccgtgtgtaaggcgggagcagctgagaagggggtccccctgtaccgccacatcgcagatctcgctgggaaccctgacctcatactcccagtgccagccttcaatgtgatcaacgggggctcccatgctggaaacaagctggccatgcaggagttcatgattctgcctgtgggagccagctccttcaaggaagccatgcgcattggcgccgaggtctaccaccacctcaagggggtcatcaaggccaagtatgggaaggatgccaccaatgtgggtgatgaaggtggcttcgcacccaacatcctggagaacaatgaggccctggagctgctgaagacggccatccaggcggctggttacccagacaaggtggtgatcggcatggatgtggcagcatctgagttctatcgcaatgggaagtacgatcttgacttcaagtcgcctgatgatcccgcacggcacatcactggggagaagctcggagagctgtataagagcttt

SEQ ID NO: 9584 - DNA, 561 bp, Homo sapiens
  source 1..561: mol_type = unassigned DNA
gacactgtcccagctgccacctagactcggagctccatccaaacctccagcgaagacatcccaggtcgggtgaatcttccagccctgggggtggagccatggccatgcagaaaatctttgcccgggaaatcttggactccaggggcaaccccacggtggaggtggacctgcacacggccaagggccgattccgagcagctgtgcccagtggggcttccacgggtatctatgaggctctggaactaagagacggagacaaaggccgctacctggggaaaggagtcctgaaggctgtggagaacatcaacaatactctgggccctgctctgctgcaaaagaaactaagcgttgtggatcaagaaaaagttgacaaatttatgattgagctagatgggaccgagaataagtccaagtttggggccaatgccatcctgggcgtgtccttggccgtgtgtaaggcgggagcagctgagaagggggtccccctgtaccgccacatcgcagatctcgctgggaaccctgacctcatactcccagtgccagccttcaatgtgatcaacg

SEQ ID NO: 9585 - DNA, 563 bp, Homo sapiens
  source 1..563: mol_type = unassigned DNA
acttattcaagtaataagaaagcaaagaagagtttggccaaatcctctagtcgctctcatagctgaaggcacccaccggggccacttctgtccccagcgtcttctcgggtcgtgcagccatggccatgcagaaaatctttgcccgggaaatcttggactccaggggcaaccccacggtggaggtggacctgcacacggccaagggccgattccgagcagctgtgcccagtggggcttccacgggtatctatgaggctctggaactaagagacggagacaaaggccgctacctggggaaaggagtcctgaaggctgtggagaacatcaacaatactctgggccctgctctgctgcaaaagaaactaagcgttgtggatcaagaaaaagttgacaaatttatgattgagctagatgggaccgagaataagtccaagtttggggccaatgccatcctgggcgtgtccttggccgtgtgtaaggcgggagcagctgagaagggggtccccctgtaccgccacatcgcagatctcgctgggaaccctgacctcatactcccagtgcca

SEQ ID NO: 9586 - DNA, 1867 bp, Homo sapiens
  source 1..1867: mol_type = unassigned DNA
cgctcccgccctcccgccctcccgccgcgcgctcgggatcccgaccagtcctgaccgcacgggggccgcggccacggggcgcaggggccatggtgcgcggcaggatctcccggctctcggtccgggacgtgcgcttccccacgtcgcttgggggccacggcgcggacgccatgcacacggaccctgactactcggctgcctatgtcgtcatagaaactgatgcagaagatggaatcaaggggtgtggaattaccttcactctgggaaaaggcactgaagttgttgtctgtgctgtgaatgccctcgcccaccatgtgctcaacaaggacctcaaggacattgttggtgacttcagaggcttctataggcagctcacaagtgatgggcagctcagatggattggtccagaaaagggcgtggtgcacctggcgacagcggccgtcctaaacgcggtgtgggacttgtgggccaagcaggagggaaagcctgtctggaagttacttgtggacatggatcccaggatgctggtatcctgcatagatttcaggtacatcactgatgtcctgactgaggaggatgccctagaaatactgcagaaaggtcaaattggtaaaaaagaaagagagaagcaaatgctggcacaaggataccctgcttacacgacatcgtgcgcctggctggggtactcagatgacacgttgaagcagctctgtgcccaggcgctgaaggatggctggaccaggtttaaagtaaaggtgggtgctgatctccaggatgacatgcgaagatgccaaatcatccgagacatgattggaccggaaaagactttgatgatggatgccaaccagcgctgggatgtgcctgaggcggtggagtggatgtccaagctggccaagttcaagccattgtggattgaggagccaacctcccctgatgacattctggggcacgccaccatttccaaggcactggtcccattaggaattggcattgccacaggagaacagtgccacaatagagtgatatttaagcaactcctacaggcgaaggccctgcagttcctccagattgacagttgcagactgggcagtgtcaatgagaacctctcagtattgctgatggccaaaaagtttgaaattcctgtttgcccccatgctggtggagttggcctctgtgaactggtgcagcacctgattatatttgactacatatcagtttctgcaagccttgaaaatagggtgtgtgagtatgttgaccacctgcatgagcatttcaagtatcccgtgatgatccagcgggcttcctacatgcctcccaaggatcccggctactcaacagaaatgaaggaggaatctgtaaagaaacaccagtatccagatggtgaagtttggaagaaactccttcctgctcaagaaaattaagtgctcagccccaacaacttttttctttctgaagtgaaagggcttaaaatttcttggaaatagttttacaaaaatggatttaaaaaatcctaccgatcaagatgagttcagctagaagtcataccaccctcaggaatcagctaagtaattattacttgattcttttagcaaatcaatgcacgttatcctacttaatccttaaataagtttagatttaactaacccaaagtccaggaggatgttcttacaaaaatagctatatcaagggctggcacctagacattaaactgtaatttgaaaataagcaacatgttgcataacttgttggaataattccttgttctgtttaacacttgtcataaattagcagaataaaaatagtcgtgcaacaccgggggtatctggtatgcaacgaagggaaaaatatttcactgattaaccccgaa

SEQ ID NO: 9587 - DNA, 2382 bp, Homo sapiens
  source 1..2382: mol_type = unassigned DNA
aatagagacagggtttcgctatgttgatcaggctggtcctgaactcctgacctcaggtgatccgcctgcctcagcctcccaaagtgctgggattataggcgtgagccactgcacccagccaggtgggtctttaatatcagcaaccctttgcttccatgtaatttccagccagaggtcccagttcccaagagccaggctgttcctcttccacttgagtgccctcctctccctccaggccacctcctttccacactgctcatctgcacttctcccttctgactctcgcctgtgcaggtaaagacctctggccatcctaagaccttctctggatgaacctcgatggttgatgaccctgcatcctgaaacagggcaggatgcagagggaccatcatctcttttgacccagtcactgtgtgtccctcagcacagctcacggtggcactttttgcctgtgacatgtcaccaggcttcctatctgacttgcagccactctggtctctgagcctcctgctactcagtgtgtcctgtggagcaggagctccagcatcacctgggagcttgtgagaaatgcagcctgggcctctccccagacccgctgcctgggaatctgcattggaacaagatcccctagtgattcctatgcgttcttaagttggagaggcactgaattcttgttaatgcctcagctaaataaaggcttgaggagtgagaacttgaaggaggcagcatgaagccgcggaaagaggtgttggcatctgatagaactgaaatcacatcttgccttttcccctcatccgctgcaagtacttgctgtgtgatcaattactcaacctctctgaacttcattttctctcagtagaaataatatgagctttggtcctcctccaagttgccatatctcagaaggaccagcacagggcaggattcagagcagctgctgtaagtgctgtttgccctccctctgcatacccgggggaggctgcagcagtgtatctggtgagtcagagaaggctgtggggagatttaaagggtctcttcccagcacaggaagcctggcacccagagcctaaggccagccaccctctctggagcatcacggatcatgtagttgaagcctccagctggtacagaagagaacagcaggtgcctgagaatgtgcggcactctgcaagctggggctctttgcaaagcagcagggggacctcagccaaggaggcgcacagggagggtttaaagtaaaggtgggtgctgatctccaggatgacatgcgaagatgccaaatcatccgagacatgattggaccggaaaagactttgatgatggatgccaaccagcgctgggatgtgcctgaggcggtggagtggatgtccaagctggccaagttcaagccattgtggattgaggagccaacctcccctgatgacattctggggcacgccaccatttccaaggcactggtcccattaggaattggcattgccacaggagaacagtgccacaatagagtgatatttaagcaactcctacaggcgaaggccctgcagttcctccagattgacagttgcagactgggcagtgtcaatgagaacctctcagtattgctgatggccaaaaagtttgaaattcctgtttgcccccatgctggtggagttggcctctgtgaactggtgcagcacctgattatatttgactacatatcagtttctgcaagccttgaaaatagggtgtgtgagtatgttgaccacctgcatgagcatttcaagtatcccgtgatgatccagcgggcttcctacatgcctcccaaggatcccggctactcaacagaaatgaaggaggaatctgtaaagaaacaccagtatccagatggtgaagtttggaagaaactccttcctgctcaagaaaattaagtgctcagccccaacaacttttttctttctgaagtgaaagggcttaaaatttcttggaaatagttttacaaaaatggatttaaaaaatcctaccgatcaagatgagttcagctagaagtcataccaccctcaggaatcagctaaagcaaaaagaacttttacctcggcatccagcccaacccctaaagactgacaatatccttcgagctcctttgaaagcaccctaaacagccatttccattttaatagttggatgcggattgtacccttcaatctgaaagtcttcagctttgaagtcatcaattttctcaacttttcgaagaatcctgagctttgggaaaggtctgggttctcgctgaagctaaaaacaaaataaggccattattttgccataattgtacgacctgttgtaattgctcctcatgtccgtgaaacaagtacacaggatgtgatcaacaaagttctattttacagg

SEQ ID NO: 9588 - DNA, 1658 bp, Homo sapiens
  source 1..1658: mol_type = unassigned DNA
gcttccccacgtcgcttgggggccacggcgcggacgccatggtaagcgcggacgccatggtaagcgcggacgccatggtaagcgcggacgccatggtaagcgcggacgccatggtaagcgcggacgccatggtaagcgcggacgccatggtaagcgcggacgccatggtaagcgcggacgccatgcacacggaccctgactactcggctgcctatgtcgtcatagaaactgatgcagaagatggaatcaaggggtgtggaattaccttcactctgggaaaaggcactgaagttgttgtctgtgctgtgaatgccctcgcccaccatgtgctcaacaaggacctcaaggacattgttggtgacttcagaggcttctataggcagctcacaagtgatgggcagctcagatggattggtccagaaaagggcgtggtgcacctggcgacagcggccgtcctaaacgcggtgtgggacttgtgggccaagcaggagggaaagcctgtctggaagttacttgtggacatggatcccaggatgctggtatcctgcatagatttcaggtacatcactgatgtcctgactgaggaggatgccctagaaatactgcagaaaggtcaaattggtaaaaaagaaagagagaagcaaatgctggcacaaggataccctgcttacacgacatcgtgcgcctggctggggtactcagatgacacgttgaagcagctctgtgcccaggcgctgaaggatggctggaccaggtttaaagtaaaggtgggtgctgatctccaggatgacatgcgaagatgccaaatcatccgagacatgattggaccggaaaagactttgatgatggatgccaaccagcgctgggatgtgcctgaggcggtggagtggatgtccaagctggccaagttcaagccattgtggattgaggagccaacctcccctgatgacattctggggcacgccaccatttccaagtgccacaatagagtgatatttaagcaactcctacaggcgaaggccctgcagttcctccagattgacagttgcagactgggcagtgtcaatgagaacctctcagtattgctgatggccaaaaagtttgaaattcctgtttgcccccatgctggtggagttggcctctgtgaactggtgcagcacctgattatatttgactacatatcagtttctgcaagccttgaaaatagggtgtgtgagtatgttgaccacctgcatgagcatttcaagtatcccgtgatgatccagcgggcttcctacatgcctcccaaggatcccggctactcaacagaaatgaaggaggaatctgtaaagaaacaccagtatccagatggtgaagtttggaagaaactccttcctgctcaagaaaattaagtgctcagccccaacaacttttttctttctgaagtgaaagggcttaaaatttcttggaaatagttttacaaaaatggatttaaaaaatcctaccgatcaagatgagttcagctagaagtcataccaccctcaggaatcagctaagtaattattacttgattcttttagcaaatcaatgcacgttatcctacttaatccttaaataagtttagatttaactaacccaaagtccaggaggatgttcttacaaaaatagctatatcaagg

SEQ ID NO: 9589 - DNA, 1966 bp, Homo sapiens
  source 1..1966: mol_type = unassigned DNA
cgccctcccgccgcgcgctcgggatcccgaccagtcctgaccgcacgggggccgcggccacggggcgcaggggccatggtgcgcggcaggatctcccggctctcggtccgggacgtgcgcttccccacgtcgcttgggggccacggcgcggacgccatgcacacggaccctgactactcggctgcctatgtcgtcatagaaactgatgcagaagatggaatcaaggggtgtggaattaccttcactctgggaaaaggcactgaagttgattggtccagaaaagggcgtggtgcacctggcgacagcggccgtcctaaacgcggtgtgggacttgtgggccaagcaggagggaaagcctgtctggaagttacttgtggacatggatcccaggatgctggtatcctgcatagatttcaggtacatcactgatgtcctgactgaggaggatgccctagaaatactgcagaaaggtcaaattggtaaaaaagaaagagagaagcaaatgctggcacaaggataccctgcttacacgacatcgtgcgcctggctggggtactcagatgacacgttgaagcagctctgtgcccaggcgctgaaggatggctggaccaggtttaaagtaaaggtgggtgctgatctccaggatgacatgcgaagatgccaaatcatccgagacatgattggaccggaaaagactttgatgatggatgccaaccagcgctgggatgtgcctgaggcggtggagtggatgtccaagctggccaagttcaagccattgtggattgaggagccaacctcccctgatgacattctggggcacgccaccatttccaaggcactggtcccattaggaattggcattgccacaggagaacagtgccacaatagagtgatatttaagcaactcctacaggcgaaggccctgcagttcctccagattgacagttgcagactgggcagtgtcaatgagaacctctcagtattgctgatggccaaaaagtttgaaattcctgtttgcccccatgctggtggagttggcctctgtgaactggtgcagcacctgattatatttgactacatatcagtttctgcaagccttgaaaatagggtgtgtgagtatgttgaccacctgcatgagcatttcaagtatcccgtgatgatccagcgggcttcctacatgcctcccaaggatcccggctactcaacagaaatgaaggaggaatctgtaaagaaacaccagtatccagatggtgaagtttggaagaaactccttcctgctcaagaaaattaagtgctcagccccaacaacttttttctttctgaagtgaaagggcttaaaatttcttggaaatagttttacaaaaatggatttaaaaaatcctaccgatcaagatgagttcagctagaagtcataccaccctcaggaatcagctaaagcaaaaagaacttttacctcggcatccagcccaacccctaaagactgacaatatccttcgagctcctttgaaagcaccctaaacagccatttccattttaatagttggatgcggattgtacccttcaatctgaaagtcttcagctttgaagtcatcaattttctcaacttttcgaagaatcctgagctttgggaaaggtctgggttctcgctgaagctaaaaacaaaataaggccattattttgccataattgtacgacctgttgtaattgctcctcatgtccgtgaaacaagtacacaggatgtgatcaacaaagttctattttacaggagtatgatcctgtcgataccttgccgtaggttatgtaacatgattggagcgcaaccagctgttctcttgcacagatcgagagtgaggggtattttgtgacattacacagcatcaggagcctggtgcctcatcaggtgtaagttcttataaccactcttggcaaatttattaaagacaggaacacagtcaatctgtaactc

SEQ ID NO: 9590 - DNA, 886 bp, Homo sapiens
  source 1..886: mol_type = unassigned DNA
cgcggccacggggcgcaggggccatggtgcgcggcaggatctcccggctctcggtccgggacgtgcgcttccccacgtcgcttgggggccacggcgcggacgccatgcacacggaccctgactactcggctgcctatgtcgtcatagaaactgatgcagaagatggaatcaaggggtgtggaattaccttcactctgggaaaaggcactgaagttgttgtctgtgctgtgaatgccctcgcccaccatgtgctcaacaaggacctcaaggacattgttggtgacttcagaggcttctataggcagctcacaagtgatgggcagctcagatggattggtccagaaaagggcgtggtgcacctggcgacagcggccgtcctaaacgcggtgtgggacttgtgggccaagcaggagggaaagcctgtctggaagttacttgtggacatggggtgaacaactggatgctgaggaggaaaaaactgggcaaattaaaggggaatgagcttcagaccccatgcagagctggctgtgagtccgggtttcactgctcaccagctgcatgaccttgagcatgtgacttccccactctgagctgcggtggcctcagtgcaacacctgggtggcggttaaaaacctcgtgatccacaaatgaaggcccttgttattagttggcaaaaaattaaggaaaaacaaagaacaccatggccttgaagagtgttgggcaggagactgctcctcctccggaggaaagtgaagacaggaggctgtcacatcgtctctgacatggagagtggcttccgggccatccgtaggggaaggacacagagctcttgagcccccttctagattcaaggatcccaggatgctggtatcctgcatagatttca

SEQ ID NO: 9591 - DNA, 1257 bp, Homo sapiens
  source 1..1257: mol_type = unassigned DNA
gctcaacatggcggccttctgtgcccgccccctccgctaacgggcacgttactccgtccgaacgcagtagacgaaggcggcggcgatggcggcggggatagtggcttctcgcagactccgcgacctactgacccggcgactgacaggctccaactacccgggactcagtattagccttcgcctcactggctcctctgcacaagaggaggcttccggagtagccctcggtgaagccccagaccacagctatgagtcccttcgtgtgacgtctgcgcagaaacatgttctgcatgtccagctcaaccggcccaacaagaggaatgccatgaacaaggtcttctggagagagatggtagagtgcttcaacaagatttcgagagacgctgactgtcgggcggtggtgatctctggtgcaggaaaaatgttcactgcaggtattgacctgatggacatggcttcggacatcctgcagcccaaaggagatgatgtggcccggatcagctggtacctccgtgacatcatcactcgataccaggagaccttcaacgtcatcgagaggtgccccaagcccgtgattgctgccgtccatgggggctgcattggcggaggtgtggaccttgtcaccgcctgtgacatccggtactgtgcccaggatgctttcttccaggtgaaggaggtggacgtgggtttggctgccgatgtaggaacactgcagcgcctgcccaaggtcatcgggaaccagagcctggtcaacgagctggccttcaccgcccgcaagatgatggctgacgaggccctgggcagtgggctggtcagccgggtgttcccagacaaagaggtcatgctggatgctgccttagcgctggcggccgagatttccagcaagagccccgtggcggtgcagagcaccaaggtcaacctgctgtattcccgcgaccattcggtggccgagagcctcaactacgtggcgtcctggaacatgagcatgctgcagacccaagacctcgtgaagtcggtccaggccacgactgagaacaaggaactgaaaaccgtcaccttctccaagctctgagagccctcgcgtcccaggccccagccagggggccggccttgtcccgcctcatccacagaaagggaggatgggcgatgacagttgtttctatgccttctgacccagtttcccagtttataactttatgacaatgagtttctcaagcccaaggccttatcttcaccccacaaacaataaagcaaagt

SEQ ID NO: 9592 - DNA, 1361 bp, Homo sapiens
  source 1..1361: mol_type = unassigned DNA
gacacgagggagcgcgaagcggagggcgcctcgcggcaggagcgggatttccggggtcacgggaaccggcaggggaacgggataaagttcccggagaaaggaaaggagagcgtgggatagtaaaagagaagacgcggagaagaggagaggacctacaagaacggaggacaggggcgcacgatggtcccggggggagcggaaacaaaggcacgcaaaacggaaaagcgtgtgtaggggagcggaaaaggaagtcaccaccgtggcctgcgacgaaatggcgaaaagtcttttgaagacagcctctctgtctggaaggacaaaattgctacatcaaacaggattgtcactttatagtacatcccatggattttatgaggaagaagtgaaaaaaacacttcagcagtttcctggtggatccattgaccttcagaaggaagacaatggcattggcattcttactctgaacaatccaagtagaatgaatgccttttcaggtgttatgatgctacaacttctggaaaaagtaattgaattggaaaattggacagaggggaaaggcctcattgtccgtggggcaaaaaatactttctcttcaggatctgatctgaatgctgtgaaatcactaggactccagaggagacttcctttaataagtgttgcgctggttcaaggttgggcattgggtggaggagcagaatttactacagcatgtgatttcaggttaatgactccagagagtaagatcagattcgtccacaaagagatgggcataataccaagctggggtggcaccacccggctagttgaaataatcggaagtagacaagctctcaaagtgttgagtggggcccttaaactggattcaaaaaatgctctaaacataggaatggttgaagaggtcttgcagtcttcagatgaaactaaatctctagaagaggcacaagaatggctaaagcaattcatccaagggccaccggaagtaattagagctttgaaaaaatctgtttgttcaggcagagagctatatttggaggaagcattacagaacgaaagagatcttttaggaacagtttggggtgggcctgcaaatttagaggctattgctaagaaaggaaaatttaataaataattggtttttcgtgtggatgtactccaagtaaagctccagtgactaatatgtataaatgttaaatgatattaaatatgaacatcagaattactttgaaggctactattaatatgcagacttacttttaatcatttgaatatctgaactcatttacctcatttcttgccaattactcacttgggtatttactgcgtaatctggaacatttagctaaaatatacacttttggctt

SEQ ID NO: 9593 - DNA, 909 bp, Homo sapiens
  source 1..909: mol_type = unassigned DNA
aagtcaccaccgtggcctgcgacggaccctttccagctttttgcctgaaagctttgcagaagaaatggcgaaaagtcttttgaagacagcctctctgtctggaaggacaaaattgctacatcaaacaggattgtcactttatagtacatcccatggattttatgaggaagaagtgaaaaaaacacttcagcagtttcctggtggatccattgaccttcagaaggaagacaatggcattggcattcttactctgaacaatccaagtagaatgaatgccttttcaggtgttatgatgctacaacttctggaaaaagtaattgaattggaaaattggacagaggggaaaggcctcattgtccgtggggcaaaaaatactttctcttcaggatctgatctgaatgctgtgaaatcactaggaactccagagacttcctttaataagtgttgcgctggttcaaggttgggcattgggtggaggagcagaatttactacagcatgtgatttcaggttaatgactccagagagtaagatcagattcgtccacaaagagatgggcataataccaagctggggtggcaccacccggctagttgaaataatcggaagtagacaagctctcaaagtgttgagtggggcccttaaactggattcaaaaaatgctctaaacataggaatggttgaagaggtcttgcagtcttcagatgaaactaaatctctagaagaggcacaagaatggctaaagcaattcatccaagggccaccggaagtaattagagctttgaaaaaatctgtttgttcaggcagagagctatatttggaggaagcattacagaacgaaagagatcttttaggaacagtttggggtgggcctgcaaatttagaggctattgctaagaaaggaaaattta

SEQ ID NO: 9594 - DNA, 2285 bp, Homo sapiens
  source 1..2285: mol_type = unassigned DNA
gtgacacgagggagcgcgaagcggagggcgcctcgcggcaggagcgggatttccggggtcacgggaaccggcaggggaacgggataaagttcccggagaaaggaaaggagagcgtgggatagtaaaagagaagacgcggagaagaggagaggacctacaagaacggaggacaggggcgcacgatggtcccggggggagcggaaacaaaggcacgcaaaacggaaaagcgtgtgtaggggagcggaaaaggaagtcaccaccgtggcctgcgacgaaatggcgaaaagtcttttgaagacagcctctctgtctggaaggacaaaattgctacatcaaacaggattgtcactttatagtacatcccatggattttatgaggaagaagtgaaaaaaacacttcagcagtttcctggtggatccattgaccttcagaaggaagacaatggcattggcattcttactctgaacaatccaagtagaatgaatgccttttcaggtgttatgatgctacaacttctggaaaaagtaattgaattggaaaattggacagaggggaaaggcctcattgtccgtggggcaaaaaatactttctcttcaggatctgatctgaatgctgtgaaatcactaggaactccagaggaaacttcctttaataagtgttgcgctggttcaaggttgggcattgggtggaggagcagaatttactacagcatgtgatttcaggttaatgactccagagagtaagatcagattcgtccacaaagagatgggcataataccaagctggggtggcaccacccggctagttgaaataatcggaagtagacaagctctcaaagtgttgagtggggcccttaaactggattcaaaaaatgctctaaacataggaatggttgaagaggtcttgcagtcttcagatgaaactaaatctctagaagaggcacaagaatggctaaagcaattcatccaagggccaccggaagtaattagagctttgaaaaaatctgtttgttcaggcagagagctatatttggaggaagcattacagaacgaaagagatcttttaggaacagtttggggtgggcctgcaaatttagaggctattgctaagaaaggaaaatttaataaataattggtttttcgtgtggatgtactccaagtaaagctccagtgactaatatgtataaatgttaaatgatattaaatatgaacatcagaattactttgaaggctactattaatatgcagacttacttttaatcatttgaatatctgaactcatttacctcatttcttgccaattactcacttgggtatttactgcgtaatctggaacatttagctaaaatatacacttttggcttaaaaattattgctgtcaattccaataataattcttagcttataaccaaagagcagtgtttaaaaggagagcttctatacaaaacctattcctggcgttacttttcatacaatttttgttctgttttacctggaaataatttaccaaaataactgagtgttgctgctaaagaacaaaagtggggaggtatcagggaacaagaaaacaagaaagggtatgatcaatcattttcttctgctccaaacagctggagtaaaattcatgggaaatggcccttcatttaaaaaaagatgtacctcactacccactacaaatttggaactttgttcttttcaataattagttttctattgtaaattacctactaaacagtggtagccatgacatggaaagtcaactgattctacaattggacattcatttgtgtgccctggaatttccaactagtaataaacaactactgttgatgtagttttaaaccacttgaagggactcatgaagcatcctgcaacataaatttgcatttttacatcagatttcttttttttcctgaaaaacaactaaccttctaacaactatctttcaaaagtaaatgtaataaaaatgcacaacataaaatgtttatgatcccagcaatacactttttaaaaaatgtgaaagtcaaagaattaagttctagttctgactcatcacaagaggtcaaaagtatttgctactgtaacattcaattcacatttgagaatcatggtaaaaataacttgcatttgccttaccatcatgatcctactgttgagttaggaaaatatggttagacagactcacattactttttttcagaggtaaactctagattactgtgtcaacccaatactatttggccatagatgtaaaaactaccaaataaaagtggattttgtggtct

SEQ ID NO: 9595 - DNA, 1354 bp, Homo sapiens
  source 1..1354: mol_type = unassigned DNA
ggagcgcgaagcggagggcgcctcgcggcaggagcgggatttccggggtcacgggaaccggcaggggaacgggataaagttcccggagaaaggaaaggagagcgtgggatagtaaaagagaagacgcggagaagaggagaggacctacaagaacggaggacaggggcgcacgatggtcccggggggagcggaaacaaaggcacgcaaaacggaaaagcgtgtgtaggggagcggaaaaggaagtcaccaccgtggcctgcgacgaaatggcgaaaagtcttttgaagacagcctctctgtctggaaggacaaaattgctacatcaaacaggattgtcactttatagtacatcccatggattttatgaggaagaagtgaaaaaaacacttcagcagtttcctggtggatccattgaccttcagaaggaagacaatggcattggcattcttactctgaacaatccaagtagaatgaatgccttttcaggtgttatgatgctacaacttctggaaaaagtaattgaattggaaaattggacagaggggaaaggcctcattgtccgtggggcaaaaaatactttctcttcaggatctgatctgaatgctgtgaaatcactaggaactccagagacttcctttaataagtgttgcgctggttcaaggttgggcattgggtggaggagcagaatttactacagcatgtgatttcaggttaatgactccagagagtaagatcagattcgtccacaaagagatgggcataataccaagctggggtggcaccacccggctagttgaaataatcggaagtagacaagctctcaaagtgttgagtggggcccttaaactggattcaaaaaatgctctaaacataggaatggttgaagaggtcttgcagtcttcagatgaaactaaatctctagaagaggcacaagaatggctaaagcaattcatccaagggccaccggaagtaattagagctttgaaaaaatctgtttgttcaggcagagagctatatttggaggaagcattacagaacgaaagagatcttttaggaacagtttggggtgggcctgcaaatttagaggctattgctaagaaaggaaaatttaataaataattggtttttcgtgtggatgtactccaagtaaagctccagtgactaatatgtataaatgttaaatgatattaaatatgaacatcagaattactttgaaggctactattaatatgcagacttacttttaatcatttgaatatctgaactcatttacctcatttcttgccaattactcacttgggtatttactgcgtaatctggaacatttagctaaaatatacacttttggcttaaa

SEQ ID NO: 9596 - DNA, 2455 bp, Homo sapiens
  source 1..2455: mol_type = unassigned DNA
gtgacacgagggagcgcgaagcggagggcgcctcgcggcaggagcgggatttccggggtcacgggaaccggcaggggaacgggataaagttcccggagaaaggaaaggagagcgtgggatagtaaaagagaagacgcggagaagaggagaggacctacaagaacggaggacaggggcgcacgatggtcccggggggagcggaaacaaaggcacgcaaaacggaaaagcgtgtgtaggggagcggaaaaggaagtcaccaccgtggcctgcgacgaaatggcgaaaagtcttttgaagacagcctctctgtctggaaggacaaaattgctacatcaaacaggattgtcactttatagtacatcccatggattttatgaggaagaagtgaaaaaaacacttcagcagtttcctggtggatccattgaccttcagaaggaagacaatggcattggcattcttactctgaacaatccaagtagaatgaatgccttttcaggtgttatgatgctacaacttctggaaaaagtaattgaattggaaaattggacagaggggaaaggcctcattgtccgtggggcaaaaaatactttctcttcaggatctgatctgaatgctgtgaaatcactaggaactccagaggaaagttgcagatggaatacagagttcctgtacaccctgcatccagtttccccttttattaacatcttatattcctatggatggaatggccgtatgcatgttcatgcaaaacaccttaacaagatttatgaggtaaagaagcaaagaggaaaaattcttcttggcctatcaagacttcctttaataagtgttgcgctggttcaaggttgggcattgggtggaggagcagaatttactacagcatgtgatttcaggttaatgactccagagagtaagatcagattcgtccacaaagagatgggcataataccaagctggggtggcaccacccggctagttgaaataatcggaagtagacaagctctcaaagtgttgagtggggcccttaaactggattcaaaaaatgctctaaacataggaatggttgaagaggtcttgcagtcttcagatgaaactaaatctctagaagaggcacaagaatggctaaagcaattcatccaagggccaccggaagtaattagagctttgaaaaaatctgtttgttcaggcagagagctatatttggaggaagcattacagaacgaaagagatcttttaggaacagtttggggtgggcctgcaaatttagaggctattgctaagaaaggaaaatttaataaataattggtttttcgtgtggatgtactccaagtaaagctccagtgactaatatgtataaatgttaaatgatattaaatatgaacatcagaattactttgaaggctactattaatatgcagacttacttttaatcatttgaatatctgaactcatttacctcatttcttgccaattactcacttgggtatttactgcgtaatctggaacatttagctaaaatatacacttttggcttaaaaattattgctgtcaattccaataataattcttagcttataaccaaagagcagtgtttaaaaggagagcttctatacaaaacctattcctggcgttacttttcatacaatttttgttctgttttacctggaaataatttaccaaaataactgagtgttgctgctaaagaacaaaagtggggaggtatcagggaacaagaaaacaagaaagggtatgatcaatcattttcttctgctccaaacagctggagtaaaattcatgggaaatggcccttcatttaaaaaaagatgtacctcactacccactacaaatttggaactttgttcttttcaataattagttttctattgtaaattacctactaaacagtggtagccatgacatggaaagtcaactgattctacaattggacattcatttgtgtgccctggaatttccaactagtaataaacaactactgttgatgtagttttaaaccacttgaagggactcatgaagcatcctgcaacataaatttgcatttttacatcagatttcttttttttcctgaaaaacaactaaccttctaacaactatctttcaaaagtaaatgtaataaaaatgcacaacataaaatgtttatgatcccagcaatacactttttaaaaaatgtgaaagtcaaagaattaagttctagttctgactcatcacaagaggtcaaaagtatttgctactgtaacattcaattcacatttgagaatcatggtaaaaataacttgcatttgccttaccatcatgatcctactgttgagttaggaaaatatggttagacagactcacattactttttttcagaggtaaactctagattactgtgtcaacccaatactatttggccatagatgtaaaaactaccaaataaaagtggattttgtggtct

SEQ ID NO: 9597 - DNA, 1009 bp, Homo sapiens
  source 1..1009: mol_type = unassigned DNA
acgcaaaacggaaaagcgtgtgtaggggagcggaaaaggaagtcaccaccgtggcctgcgacggaccctttccagctttttgcctgaaagctttgcagaagaaatggcgaaaagtcttttgaagacagcctctctgtctggaaggacaaaattgctacatcaaacaggattgtcactttatagtacatcccatggattttatgaggaagaagtgaaaaaaacacttcagcagtttcctggtggatccattgaccttcagaaggaagacaatggcattggcattcttactctgaacaatccaagtagaatgaatgccttttcaggtgttatgatgctacaacttctggaaaaagtaattgaattggaaaattggacagaggggaaaggcctcattgtccgtggggcaaaaaatactttctcttcaggatctgatctgaatgctgtgaaatcactaggaactccagaggatggaatggccgtatgcatgttcatgcaaaacaccttaacaagatttatgagacttcctttaataagtgttgcgctggttcaaggttgggcattgggtggaggagcagaatttactacagcatgtgatttcaggttaatgactccagagagtaagatcagattcgtccacaaagagatgggcataataccaagctggggtggcaccacccggctagttgaaataatcggaagtagacaagctctcaaagtgttgagtggggcccttaaactggattcaaaaaatgctctaaacataggaatggttgaagaggtcttgcagtcttcagatgaaactaaatctctagaagaggcacaagaatggctaaagcaattcatccaagggccaccggaagtaattagagctttgaaaaaatctgtttgttcaggcagagagctatatttggaggaagcattacagaacgaaagagatcttttaggaacagtttggggtgggcctgcaaatttagaggctattgctaagaaaggaaaatttaataaataa

SEQ ID NO: 9598 - DNA, 1515 bp, Homo sapiens
  source 1..1515: mol_type = unassigned DNA
gatttccggggtcacgggaaccggcaggggaacgggataaagttcccggagaaaggaaaggagagcgtgggatagtaaaagagaagacgcggagaagaggagaggacctacaagaacggaggacaggggcgcacgatggtcccggggggagcggaaacaaaggcacgcaaaacggaaaagcgtgtgtaggggagcggaaaaggaagtcaccaccgtggcctgcgacggtgttatgatgctacaacttctggaaaaagtaattgaattggaaaattggacagaggggaaaggcctcattgtccgtggggcaaaaaatactttctcttcaggatctgatctgaatgctgtgaaatcactaggaactccagaggatggaatggccgtatgcatgttcatgcaaaacaccttaacaagatttatgagacttcctttaataagtgttgcgctggttcaaggttgggcattgggtggaggagcagaatttactacagcatgtgatttcaggttaatgactccagagagtaagatcagattcgtccacaaagagatgggcataataccaagctggggtggcaccacccggctagttgaaataatcggaagtagacaagctctcaaagtgttgagtggggcccttaaactggattcaaaaaatgctctaaacataggaatggttgaagaggtcttgcagtcttcagatgaaactaaatctctagaagaggcacaagaatggctaaagcaattcatccaagggccaccggaagtaattagagctttgaaaaaatctgtttgttcaggcagagagctatatttggaggaagcattacagaacgaaagagatcttttaggaacagtttggggtgggcctgcaaatttagaggctattgctaagaaaggaaaatttaataaataattggtttttcgtgtggatgtactccaagtaaagctccagtgactaatatgtataaatgttaaatgatattaaatatgaacatcagaattactttgaaggctactattaatatgcagacttacttttaatcatttgaatatctgaactcatttacctcatttcttgccaattactcacttgggtatttactgcgtaatctggaacatttagctaaaatatacacttttggcttaaaaattattgctgtcaattccaataataattcttagcttataaccaaagagcagtgtttaaaaggagagcttctatacaaaacctattcctggcgttacttttcatacaatttttgttctgttttacctggaaataatttaccaaaataactgagtgttgctgctaaagaacaaaagtggggaggtatcagggaacaagaaaacaagaaagggtatgatcaatcattttcttctgctccaaacagctggagtaaaattcatgggaaatggcccttcatttaaaaaaagatgtacctcactacccactacaaatttggaactttgttcttttcaataattagttttctattgtaaattacctactaaaca

SEQ ID NO: 9599 - DNA, 2341 bp, Homo sapiens
  source 1..2341: mol_type = unassigned DNA
gtgacacgagggagcgcgaagcggagggcgcctcgcggcaggagcgggatttccggggtcacgggaaccggcaggggaacgggataaagttcccggagaaaggaaaggagagcgtgggatagtaaaagagaagacgcggagaagaggagaggacctacaagaacggaggacaggggcgcacgatggtcccggggggagcggaaacaaaggcacgcaaaacggaaaagcgtgtgtaggggagcggaaaaggaagtcaccaccgtggcctgcgacgaaatggcgaaaagtcttttgaagacagcctctctgtctggaaggacaaaattgctacatcaaacaggattgtcactttatagtacatcccatggattttatgaggaagaagtgaaaaaaacacttcagcagtttcctggtggatccattgaccttcagaaggaagacaatggcattggcattcttactctgaacaatccaagtagaatgaatgccttttcaggtgttatgatgctacaacttctggaaaaagtaattgaattggaaaattggacagaggggaaaggcctcattgtccgtggggcaaaaaatactttctcttcaggatctgatctgaatgctgtgaaatcactaggaactccagaggatggaatggccgtatgcatgttcatgcaaaacaccttaacaagatttatgagacttcctttaataagtgttgcgctggttcaaggttgggcattgggtggaggagcagaatttactacagcatgtgatttcaggttaatgactccagagagtaagatcagattcgtccacaaagagatgggcataataccaagctggggtggcaccacccggctagttgaaataatcggaagtagacaagctctcaaagtgttgagtggggcccttaaactggattcaaaaaatgctctaaacataggaatggttgaagaggtcttgcagtcttcagatgaaactaaatctctagaagaggcacaagaatggctaaagcaattcatccaagggccaccggaagtaattagagctttgaaaaaatctgtttgttcaggcagagagctatatttggaggaagcattacagaacgaaagagatcttttaggaacagtttggggtgggcctgcaaatttagaggctattgctaagaaaggaaaatttaataaataattggtttttcgtgtggatgtactccaagtaaagctccagtgactaatatgtataaatgttaaatgatattaaatatgaacatcagaattactttgaaggctactattaatatgcagacttacttttaatcatttgaatatctgaactcatttacctcatttcttgccaattactcacttgggtatttactgcgtaatctggaacatttagctaaaatatacacttttggcttaaaaattattgctgtcaattccaataataattcttagcttataaccaaagagcagtgtttaaaaggagagcttctatacaaaacctattcctggcgttacttttcatacaatttttgttctgttttacctggaaataatttaccaaaataactgagtgttgctgctaaagaacaaaagtggggaggtatcagggaacaagaaaacaagaaagggtatgatcaatcattttcttctgctccaaacagctggagtaaaattcatgggaaatggcccttcatttaaaaaaagatgtacctcactacccactacaaatttggaactttgttcttttcaataattagttttctattgtaaattacctactaaacagtggtagccatgacatggaaagtcaactgattctacaattggacattcatttgtgtgccctggaatttccaactagtaataaacaactactgttgatgtagttttaaaccacttgaagggactcatgaagcatcctgcaacataaatttgcatttttacatcagatttcttttttttcctgaaaaacaactaaccttctaacaactatctttcaaaagtaaatgtaataaaaatgcacaacataaaatgtttatgatcccagcaatacactttttaaaaaatgtgaaagtcaaagaattaagttctagttctgactcatcacaagaggtcaaaagtatttgctactgtaacattcaattcacatttgagaatcatggtaaaaataacttgcatttgccttaccatcatgatcctactgttgagttaggaaaatatggttagacagactcacattactttttttcagaggtaaactctagattactgtgtcaacccaatactatttggccatagatgtaaaaactaccaaataaaagtggattttgtggtctacaaca

SEQ ID NO: 9600 - DNA, 2443 bp, Homo sapiens
  source 1..2443: mol_type = unassigned DNA
ggcctgcgacggtaagtggtcgtaagggttggtcttagcgcttcagtttagtgttgtcagtgggagaatcctaaaatgtcgccgtggaatggactgtaccgctcgcttctccaaacgtgtcccagacggcgagcctccccggctccgcggcttgtcccttgcaagcgccgcgcaggcctgccccgcgctggacgtggagacgcggtgccgagcgccacgggccggctgtgcgccggccggggaaagagggcgaggggaagagatgaatcggtcttcccagagcgcgccgcgaggtcgcgagattacactttaaaaagcatgaggaggcttgctttctacatgctgatttaatttcggaatacattcgaggccctgtgctaagttagaaatggcgaaaagtcttttgaagacagcctctctgtctggaaggacaaaattgctacatcaaacaggattgtcactttatagtacatcccatggattttatgaggaagaagtgaaaaaaacacttcagcagtttcctggtggatccattgaccttcagaaggaagacaatggcattggcattcttactctgaacaatccaagtagaatgaatgccttttcaggtgttatgatgctacaacttctggaaaaagtaattgaattggaaaattggacagaggggaaaggcctcattgtccgtggggcaaaaaatactttctcttcaggatctgatctgaatgctgtgaaatcactaggaactccagaggatggaatggccgtatgcatgttcatgcaaaacaccttaacaagatttatgagacttcctttaataagtgttgcgctggttcaaggttgggcattgggtggaggagcagaatttactacagcatgtgatttcaggttaatgactccagagagtaagatcagattcgtccacaaagagatgggcataataccaagctggggtggcaccacccggctagttgaaataatcggaagtagacaagctctcaaagtgttgagtggggcccttaaactggattcaaaaaatgctctaaacataggaatggttgaagaggtcttgcagtcttcagatgaaactaaatctctagaagaggcacaagaatggctaaagcaattcatccaagggccaccggaagtaattagagctttgaaaaaatctgtttgttcaggcagagagctatatttggaggaagcattacagaacgaaagagatcttttaggaacagtttggggtgggcctgcaaatttagaggctattgctaagaaaggaaaatttaataaataattggtttttcgtgtggatgtactccaagtaaagctccagtgactaatatgtataaatgttaaatgatattaaatatgaacatcagaattactttgaaggctactattaatatgcagacttacttttaatcatttgaatatctgaactcatttacctcatttcttgccaattactcacttgggtatttactgcgtaatctggaacatttagctaaaatatacacttttggcttaaaaattattgctgtcaattccaataataattcttagcttataaccaaagagcagtgtttaaaaggagagcttctatacaaaacctattcctggcgttacttttcatacaatttttgttctgttttacctggaaataatttaccaaaataactgagtgttgctgctaaagaacaaaagtggggaggtatcagggaacaagaaaacaagaaagggtatgatcaatcattttcttctgctccaaacagctggagtaaaattcatgggaaatggcccttcatttaaaaaaagatgtacctcactacccactacaaatttggaactttgttcttttcaataattagttttctattgtaaattacctactaaacagtggtagccatgacatggaaagtcaactgattctacaattggacattcatttgtgtgccctggaatttccaactagtaataaacaactactgttgatgtagttttaaaccacttgaagggactcatgaagcatcctgcaacataaatttgcatttttacatcagatttcttttttttcctgaaaaacaactaaccttctaacaactatctttcaaaagtaaatgtaataaaaatgcacaacataaaatgtttatgatcccagcaatacactttttaaaaaatgtgaaagtcaaagaattaagttctagttctgactcatcacaagaggtcaaaagtatttgctactgtaacattcaattcacatttgagaatcatggtaaaaataacttgcatttgccttaccatcatgatcctactgttgagttaggaaaatatggttagacagactcacattactttttttcagaggtaaactctagattactgtgtcaacccaatactatttggccatagatgtaaaaactaccaaataaaagtggattttgtg

SEQ ID NO: 9601 - DNA, 531 bp, Homo sapiens
  source 1..531: mol_type = unassigned DNA
aacattccaggaagggaagccagcctgtgaagaagcatggcattgaaacaggtggcttggtagtgagcttgttcagctccactgaatcttctttgtggtggggctgcaagacatcctgcatgaaatggcgaaaagtcttttgaagacagcctctctgtctggaaggacaaaattgctacatcaaacaggattgtcactttatagtacatcccatggattttatgaggaagaagtgaaaaaaacacttcagcagtttcctggtggatccattgaccttcagaaggaagacaatggcattggcattcttactctgaacaatccaagtagaatgaatgccttttcaggtgttatgatgctacaacttctggaaaaagtaattgaattggaaaattggacagaggggaaaggcctcattgtccgtggggcaaaaaatactttctcttcaggatctgatctgaatgctgtgaaatcactaggaactccagaggatggaatggccgtatgcatgttcatgcaaaacaccttaacaag

SEQ ID NO: 9602 - DNA, 2585 bp, Homo sapiens
  source 1..2585: mol_type = unassigned DNA
caagaacgaaagatgagcaactcctttctggtagaggttctttcattggagaatttttgagctacaataatccttttaacgctgcgcacacatacagggattacacgtgtaggggattaaaaacacagttaagtttaggttgaaggtgctgttaaggacttcaggcaacattaaatcaacactcagttctttgctctgttccacatctgggctcctgtatagcagttgttgctctaggtgctagaggtatgcagaggaactggacaagggcaaggaaaacaaagggctccttctttagaagagctagcattctcttggaacagacaagcttgtggtgagaagtatatttgtgaaatctacgaggggagggagcagcgcagtaatagaacgggcgatcctttcttgattttttattgggttctggcctgaaaggcgactgtataatcagctgggattcctgcaatgattaacattccaggaagggaagccagcctgtgaagaagcatggcattgaaacaggaaatggcgaaaagtcttttgaagacagcctctctgtctggaaggacaaaattgctacatcaaacaggattgtcactttatagtacatcccatggattttatgaggaagaagtgaaaaaaacacttcagcagtttcctggtggatccattgaccttcagaaggaagacaatggcattggcattcttactctgaacaatccaagtagaatgaatgccttttcaggtgttatgatgctacaacttctggaaaaagtaattgaattggaaaattggacagaggggaaaggcctcattgtccgtggggcaaaaaatactttctcttcaggatctgatctgaatgctgtgaaatcactaggaactccagaggatggaatggccgtatgcatgttcatgcaaaacaccttaacaagatttatgagacttcctttaataagtgttgcgctggttcaaggttgggcattgggtggaggagcagaatttactacagcatgtgatttcaggttaatgactccagagagtaagatcagattcgtccacaaagagatgggcataataccaagctggggtggcaccacccggctagttgaaataatcggaagtagacaagctctcaaagtgttgagtggggcccttaaactggattcaaaaaatgctctaaacataggaatggttgaagaggtcttgcagtcttcagatgaaactaaatctctagaagaggcacaagaatggctaaagcaattcatccaagggccaccggaagtaattagagctttgaaaaaatctgtttgttcaggcagagagctatatttggaggaagcattacagaacgaaagagatcttttaggaacagtttggggtgggcctgcaaatttagaggctattgctaagaaaggaaaatttaataaataattggtttttcgtgtggatgtactccaagtaaagctccagtgactaatatgtataaatgttaaatgatattaaatatgaacatcagaattactttgaaggctactattaatatgcagacttacttttaatcatttgaatatctgaactcatttacctcatttcttgccaattactcacttgggtatttactgcgtaatctggaacatttagctaaaatatacacttttggcttaaaaattattgctgtcaattccaataataattcttagcttataaccaaagagcagtgtttaaaaggagagcttctatacaaaacctattcctggcgttacttttcatacaatttttgttctgttttacctggaaataatttaccaaaataactgagtgttgctgctaaagaacaaaagtggggaggtatcagggaacaagaaaacaagaaagggtatgatcaatcattttcttctgctccaaacagctggagtaaaattcatgggaaatggcccttcatttaaaaaaagatgtacctcactacccactacaaatttggaactttgttcttttcaataattagttttctattgtaaattacctactaaacagtggtagccatgacatggaaagtcaactgattctacaattggacattcatttgtgtgccctggaatttccaactagtaataaacaactactgttgatgtagttttaaaccacttgaagggactcatgaagcatcctgcaacataaatttgcatttttacatcagatttcttttttttcctgaaaaacaactaaccttctaacaactatctttcaaaagtaaatgtaataaaaatgcacaacataaaatgtttatgatcccagcaatacactttttaaaaaatgtgaaagtcaaagaattaagttctagttctgactcatcacaagaggtcaaaagtatttgctactgtaacattcaattcacatttgagaatcatggtaaaaataacttgcatttgccttaccatcatgatcctactgttgagttaggaaaatatggttagacagactcacattactttttttcagaggtaaactctagattactgtgtcaacccaatactatttggccatagatgtaaaaactaccaaataaaagtggattttgtggtctacaa

SEQ ID NO: 9603 - DNA, 577 bp, Homo sapiens
  source 1..577: mol_type = unassigned DNA
gtggcctgcgacgtggcttggtagtgagcttgttcagctccactgaatcttctttgtggtggggctgcaagacatcctgcatggaccctttccagctttttgcctgaaagctttgcagaagaaatggcgaaaagtcttttgaagacagcctctctgtctggaaggacaaaattgctacatcaaacaggattgtcactttatagtacatcccatggattttatgaggaagaagtgaaaaaaacacttcagcagtttcctggtggatccattgaccttcagaaggaagacaatggcattggcattcttactctgaacaatccaagtagaatgaatgccttttcaggtgttatgatgctacaacttctggaaaaagtaattgaattggaaaattggacagaggggaaaggcctcattgtccgtggggcaaaaaatactttctcttcaggatctgatctgaatgctgtgaaatcactaggaactccagaggatggaatggccgtatgcatgttcatgcaaaacaccttaacaagatttatgagacttcctttaataagtgttgcgctggttcaaggttggg

SEQ ID NO: 9604 - DNA, 1966 bp, Homo sapiens
  source 1..1966: mol_type = unassigned DNA
aaatggcgaaaagtcttttgaagacagcctctctgtctggaaggacaaaattgctacatcaaacaggattgtcactttatagtacatcccatggattttatgaggaagaagtgaaaaaaacacttcagcagtttcctggtggatccattgaccttcagaaggaagacaatggcattggcattcttactctgaacaatccaagtagaatgaatgccttttcaggtgttatgatgctacaacttctggaaaaagtaattgaattggaaaattggacagaggggaaaggcctcattgtccgtggggcaaaaaatactttctcttcaggatctgatctgaatgctgtgaaatcactaggaactccagaggcaaacttcctttaataagtgttgcgctggttcaaggttgggcattgggtggaggagcagaatttactacagcatgtgatttcaggttaatgactccagagagtaagatcagattcgtccacaaagagatgggcataataccaagctggggtggcaccacccggctagttgaaataatcggaagtagacaagctctcaaagtgttgagtggggcccttaaactggattcaaaaaatgctctaaacataggaatggttgaagaggtcttgcagtcttcagatgaaactaaatctctagaagaggcacaagaatggctaaagcaattcatccaagggccaccggaagtaattagagctttgaaaaaatctgtttgttcaggcagagagctatatttggaggaagcattacagaacgaaagagatcttttaggaacagtttggggtgggcctgcaaatttagaggctattgctaagaaaggaaaatttaataaataattggtttttcgtgtggatgtactccaagtaaagctccagtgactaatatgtataaatgttaaatgatattaaatatgaacatcagaattactttgaaggctactattaatatgcagacttacttttaatcatttgaatatctgaactcatttacctcatttcttgccaattactcacttgggtatttactgcgtaatctggaacatttagctaaaatatacacttttggcttaaaaattattgctgtcaattccaataataattcttagcttataaccaaagagcagtgtttaaaaggagagcttctatacaaaacctattcctggcgttacttttcatacaatttttgttctgttttacctggaaataatttaccaaaataactgagtgttgctgctaaagaacaaaagtggggaggtatcagggaacaagaaaacaagaaagggtatgatcaatcattttcttctgctccaaacagctggagtaaaattcatgggaaatggcccttcatttaaaaaaagatgtacctcactacccactacaaatttggaactttgttcttttcaataattagttttctattgtaaattacctactaaacagtggtagccatgacatggaaagtcaactgattctacaattggacattcatttgtgtgccctggaatttccaactagtaataaacaactactgttgatgtagttttaaaccacttgaagggactcatgaagcatcctgcaacataaatttgcatttttacatcagatttcttttttttcctgaaaaacaactaaccttctaacaactatctttcaaaagtaaatgtaataaaaatgcacaacataaaatgtttatgatcccagcaatacactttttaaaaaatgtgaaagtcaaagaattaagttctagttctgactcatcacaagaggtcaaaagtatttgctactgtaacattcaattcacatttgagaatcatggtaaaaataacttgcatttgccttaccatcatgatcctactgttgagttaggaaaatatggttagacagactcacattactttttttcagaggtaaactctagattactgtgtcaacccaatactattt

SEQ ID NO: 9605 - DNA, 1449 bp, Homo sapiens
  source 1..1449: mol_type = unassigned DNA
acgggaaccggcaggggaacgggataaagttcccggagaaaggaaaggagagcgtgggatagtaaaagagaagacgcggagaagaggagaggacctacaagaacggaggacaggggcgcacgatggtcccggggggagcggaaacaaaggcacgcaaaacggaaaagcgtgtgtaggggagcggaaaaggaagtcaccaccgtggcctgcgacggtgttatgatgctacaacttctggaaaaagtaattgaattggaaaattggacagaggggaaaggcctcattgtccgtggggcaaaaaatactttctcttcaggatctgatctgaatgctgtgaaatcactaggaactccagagacttcctttaataagtgttgcgctggttcaaggttgggcattgggtggaggagcagaatttactacagcatgtgatttcaggttaatgactccagagagtaagatcagattcgtccacaaagagatgggcataataccaagctggggtggcaccacccggctagttgaaataatcggaagtagacaagctctcaaagtgttgagtggggcccttaaactggattcaaaaaatgctctaaacataggaatggttgaagaggtcttgcagtcttcagatgaaactaaatctctagaagaggcacaagaatggctaaagcaattcatccaagggccaccggaagtaattagagctttgaaaaaatctgtttgttcaggcagagagctatatttggaggaagcattacagaacgaaagagatcttttaggaacagtttggggtgggcctgcaaatttagaggctattgctaagaaaggaaaatttaataaataattggtttttcgtgtggatgtactccaagtaaagctccagtgactaatatgtataaatgttaaatgatattaaatatgaacatcagaattactttgaaggctactattaatatgcagacttacttttaatcatttgaatatctgaactcatttacctcatttcttgccaattactcacttgggtatttactgcgtaatctggaacatttagctaaaatatacacttttggcttaaaaattattgctgtcaattccaataataattcttagcttataaccaaagagcagtgtttaaaaggagagcttctatacaaaacctattcctggcgttacttttcatacaatttttgttctgttttacctggaaataatttaccaaaataactgagtgttgctgctaaagaacaaaagtggggaggtatcagggaacaagaaaacaagaaagggtatgatcaatcattttcttctgctccaaacagctggagtaaaattcatgggaaatggcccttcatttaaaaaaagatgtacctcactacccactacaaatttggaactttgttcttttcaataattagttttctattgtaaattacctactaaaca

SEQ ID NO: 9606 - DNA, 1617 bp, Homo sapiens
  source 1..1617: mol_type = unassigned DNA
cggcgcagagcccggcaggcgccgccgttgcctccgcctccgcgcggtctccccggggccagctgggaccccgagggctggggcgggggcgggggcgcgggcgactgcggcggggcctggagggcgctggtcccagcccagggcggggtcccggggacgcccctcggccttagatccgcgagcggcagctcgggcctgggggcggggcctggcggagagcgacccgctcactctgcccgggctgatctcgcgagggccgcctggtctcgcggcgctggcctgtgggcggagcgagccctgaaaggctataggcgagggggcggctccgcggggccgggcgaggagtccagagagccatggccgccctgcgtgtcctgctgtcctgcgtccgcggcccgctgaggcccccggttcgctgtcccgcctggcgtcccttcgcctcgggtgctaactttgagtacatcatcgcagaaaaaagagggaagaataacaccgtggggttgatccaactgaaccgccccaaggccctcaatgcactttgcgatggcctgattgacgagctcaaccaggccctgaagaccttcgaggaggacccggccgtgggggccattgtcctcaccggcggggataaggcctttgcagctggagctgatatcaaggaaatgcagaacctgagtttccaggactgttactccagcaagttcttgaagcactgggaccacctcacccaggtcaagaagccagtcatcgctgctgtcaatggctatgcctttggcgggggctgtgagcttgccatgatgtgtgatatcatctatgccggtgagaaggcccagtttgcacagccggagatcttaataggaaccatcccaggtgcgggcggcacccagagactcacccgtgctgttgggaagtcgctggcgatggagatggtcctcactggtgaccggatctcagcccaggacgccaagcaagcaggtcttgtcagcaagatttgtcctgttgagacactggtggaagaagccatccagtgtgcagaaaaaattgccagcaattctaaaattgtagtagcgatggccaaagaatcagtgaatgcagcttttgaaatgacattaacagaaggaagtaagttggagaagaaactcttttattcaacctttgccactgatgaccggaaagaagggatgaccgcgtttgtggaaaagagaaaggccaacttcaaagaccagtgagaaccagctgcccctgcttcacacctctgcttggagaggacaagtgcagcctgtcagttttagaagcaagtaaatcatcctcttttcaagagcagtgtccgtggtgtgcagttcctctccaattgctgcgtggtcgtggcccgacctctcacggcatgacagccttcgtcacccagcctgtgagggtcctgactggagcaccttctaaatctaagattctgctgaggagcccccgctggtccctctgggcatgctgtgctcggacggaaagcggggcctgcgggtccttgtgtccctgccgctgaagaatggggctgctctgagggaaacgctgtctgctgccttcatacagatgctgattaaagtgatagcgattcagattacacca

SEQ ID NO: 9607 - DNA, 3850 bp, Homo sapiens
  source 1..3850: mol_type = unassigned DNA
gaggaggccgggcgcgcccggaaaagtggtttgcctgacggcgagaggcagaggtgccctcggtgatagaggaaacatggccgagtatacgcggctgcacaacgccttggcgctaatccgcctccgaaacccgccggtcaacgcgatcagtacgactttactccgtgacataaaagaaggactacagaaagctgtaatagaccatacaataaaagccattgtgatttgtggagcagagggcaaattttctgcaggtgctgatattcgtggcttcagtgctcctaggacatttggccttacactgggacatgtagtagatgaaatacagagaaatgagaagcccgtggtggcagcaatccaaggcatggctttcggagggggactagagctggccctgggctgtcactataggattgcccacgcagaggctcaagttggcttaccagaagttacactgggacttctccctggtgcaagaggaacccagcttctccccagactcactggagttcctgctgcacttgacttaattacctcaggaagacgtattttagcagatgaagcactcaagctgggcattctagataaagttgtaaactcagacccggttgaagaagcaatcagatttgctcagagagtttcagatcaacctctagaatcccgtagactctgcaacaagccaattcagagcttgcccaacatggacagcatttttagtgaggccctcttgaagatgcggaggcagcaccctgggtgtcttgcacaggaggcttgtgtccgtgcagtccaggctgctgtgcagtatccctatgaagtgggcatcaagaaggaggaggagctgtttctatatcttttgcaatcagggcaggctagagccctgcaatatgctttcttcgctgaaaggaaagcaaataagtggtcaactccctccggagcatcgtggaaaacagcatcagcgcggcctgtctcctcagttggtgttgttggcttgggaacaatgggccgaggcattgtcatttcttttgcaagggccaggattcctgtgattgctgtagactcggacaaaaaccagctagcaactgcaaacaagatgataacctctgtcttggaaaaagaagcctccaaaatgcaacagagcggccacccttggtcaggaccaaaacccaggttaacttcatctgtgaaggagcttggtggtgtagatttagtcattgaagcagtatttgaggaaatgagcctgaagaagcaggtctttgctgaactctcagctgtgtgcaaaccagaagcatttttgtgcactaatacttcagccctggatgttgatgagattgcttcttccactgatcgtcctcacttggtcattggcacccacttcttttcgccagctcatgtcatgaagttgttagaggttattcccagccaatactcttcccccactaccattgccactgttatgaacttatcaaaaaagattaaaaagattggagtcgttgtaggcaactgttttggatttgtggggaatcgaatgttgaatccttactacaatcaggcatatttcttgttagaagaaggcagcaaaccagaggaggtagatcaggtgctggaagagtttggttttaaaatgggaccttttagagtgtctgatcttgctgggttggatgtgggctggaaatctagaaaggggcaaggtcttactggacctacattgcttccaggaactcctgcccgaaaaaggggtaataggaggtactgcccaattcctgatgtgctctgtgaattaggacgatttggccagaagacaggtaagggttggtatcaatatgacaagccattgggtaggattcacaaacctgatccctggctttccaaattcctatcacggtatagaaaaacccatcacattgaaccacgtaccattagccaggatgagatccttgaacgctgcttatattcacttatcaatgaagcattccgtatcttgggagaagggatagctgctagcccagagcacattgatgttgtctatttacatggatatggatggccaaggcacaagggcgggcccatgttctatgcttccacagttgggttgcccacagttctagagaaattgcagaaatattacaggcagaaccctgatattccccaactggagccaagtgactatctaaaaaaactggcttctcagggaaaccctcccctgaaagaatggcaaagcttggcaggctcccctagcagtaaattgtgattcagtcttccagattatgcctcacatgctagcatcaggtaatgctgactgaatttcagtgaaattaaatcaaaaatccaaagtaagattgttctgaaatacaaagcaaaataaataatcattagaatcttctgtgtaacgactctaatggtcaaatctttaggaatgtgcttcctatgcctctgaatctgtccttatcagataaattcaatgcatgaacttgtgtgaatataataccataatagctaatgaaagaggctcaggcataagttgagattctcaaatgcttttatcattggataaatgtgtcatcaattaataaatgataaatgcagctaagtcatacattcattttgactcctttcaatgtcacacacatagtattgatcagaaatcttatgaatcatacatacactcaacaaacattaaagttgtaggaaaaagacagttggaaattggtaagggaactgagtacttcaaaccagcacagggaacttaggttagtgtggcaagcctttcctcttctggtctttcctcttctgtttatggagaaataatagaaagtagtaagtcgttaacttagtgtaagaagggtcttagagaacatctaaccttctaggatttcccaattctgtgatagagtaatgacaccagttttcctgtcatgacaagcctctgtgatgttacatatggaaatggttgaatcttgaaaaatctaaaattgttgcaaaacatattttgtatgattttgttgtaagagttcttctctttttactttttgccttgtgtagttaaaaattaaggggctggtcaatacaaaaacttgtacacaaatatttatagcagaattattcataatggccaaaagctgaatacaacccaaatgtctatgaactaatgaatagataaaccaaatctggtatatccatacaatggactatattattcagccataaaaagaaataaagggccaggcacagtggctcacacctgtaatcccagcactttgggaggctgaggcaggaggattgtttgaggccagaaatttgagaccagcctgggcaacatagcaaaaccctgtctctacaaaaaatactttccgtacattagtggttgcctaaggctagaattgggggtgatgaatggggagtacaggattcatctaatgggtacaggatttctttatggttcatgaaaatggtctaaacttattgtggtaatggtcacataacaatatattaaaaaccattgagttgtatattttaagtgggtgaattatatggtatgtgaattatatctcaataaagttgttagtaaataaatggggctgaagatgttatccttcattgtggtgtaaatgaactttcacaatattttcacctgtgaacccaaataaaatgattaaagttctgatggaaaaatcttgaatggagtataagttttccgttgttaaaaagcaaacaaaaaaccaacaaaaaatccaagtgtgccttgaattgtacagagcacaattattatgtttgaaatgtgtactacttaattttatataatttggtttgtgaaattaaagacatcaataaaaatgattcctgaaagtagtaa

SEQ ID NO: 9608 - DNA, 2577 bp, Homo sapiens
  source 1..2577: mol_type = unassigned DNA
gaggtgccctcggtgatagaggaaacatggccgagtatacgcggctgcacaacgccttggcgctaatccgcctccgaaacccgccggtcaacgcgatcaggtaacgggctcggtcgcctccagcccggggaccgtgcgggccttagccgccctctggctccggaggctttgactctcccccgtcggtttaaaccgagaaggacactcaagagttgagcaactgtacgactttactccgtgacataaaagaaggactacagaaagctgtaatagaccatacaataaaagccattgtgatttgtggagcagagggcaaattttctgcaggtgctgatattcgtggcttcagtgctcctaggacatttggccttacactgggacatgtagtagatgaaatacagagaaatgagaagcccgtggtggcagcaatccaaggcatggctttcggagggggactagagctggccctgggctgtcactataggattgcccacgcagaggctcaagttggcttaccagaagttacactgggacttctccctggtgcaagaggaacccagcttctccccagactcactggagttcctgctgcacttgacttaattacctcaggaagacgtattttagcagatgaagcactcaagctgggcattctagataaagttgtaaactcagacccggttgaagaagcaatcagatttgctcagagagtttcagatcaacctctagaatcccgtagactctgcaacaagccaattcagagcttgcccaacatggacagcatttttagtgaggccctcttgaagatgcggaggcagcaccctgggtgtcttgcacaggaggcttgtgtccgtgcagtccaggctgctgtgcagtatccctatgaagtgggcatcaagaaggaggaggagctgtttctatatcttttgcaatcagggcaggctagagccctgcaatatgctttcttcgctgaaaggaaagcaaataagtggtcaactccctccggagcatcgtggaaaacagcatcagcgcggcctgtctcctcagttggtgttgttggcttgggaacaatgggccgaggcattgtcatttcttttgcaagggccaggattcctgtgattgctgtagactcggacaaaaaccagctagcaactgcaaacaagatgataacctctgtcttggaaaaagaagcctccaaaatgcaacagagcggccacccttggtcaggaccaaaacccaggttaacttcatctgtgaaggagcttggtggtgtagatttagtcattgaagcagtatttgaggaaatgagcctgaagaagcaggtctttgctgaactctcagctgtgtgcaaaccagaagcatttttgtgcactaatacttcagccctggatgttgatgagattgcttcttccactgatcgtcctcacttggtcattggcacccacttcttttcgccagctcatgtcatgaagttgttagaggttattcccagccaatactcttcccccactaccattgccactgttatgaacttatcaaaaaagattaaaaagattggagtcgttgtaggcaactgttttggatttgtggggaatcgaatgttgaatccttactacaatcaggcatatttcttgttagaagaaggcagcaaaccagaggaggtagatcaggtgctggaagagtttggttttaaaatgggaccttttagagtgtctgatcttgctgggttggatgtgggctggaaatctagaaaggggcaaggtcttactggacctacattgcttccaggaactcctgcccgaaaaaggggtaataggaggtactgcccaattcctgatgtgctctgtgaattaggacgatttggccagaagacaggtaagggttggtatcaatatgacaagccattgggtaggattcacaaacctgatccctggctttccaaattcctatcacggtatagaaaaacccatcacattgaaccacgtaccattagccaggatgagatccttgaacgctgcttatattcacttatcaatgaagcattccgtatcttgggagaagggatagctgctagcccagagcacattgatgttgtctatttacatggatatggatggccaaggcacaagggcgggcccatgttctatgcttccacagttgggttgcccacagttctagagaaattgcagaaatattacaggcagaaccctgatattccccaactggagccaagtgactatctaaaaaaactggcttctcagggaaaccctcccctgaaagaatggcaaagcttggcaggctcccctagcagtaaattgtgattcagtcttccagattatgcctcacatgctagcatcaggtaatgctgactgaatttcagtgaaattaaatcaaaaatccaaagtaagattgttctgaaatacaaagcaaaataaataatcattagaatcttctgtgtaacgactctaatggtcaaatctttaggaatgtgcttcctatgcctctgaatctgtccttatcagataaattcaatgcatgaacttgtgtgaatataataccataatagctaatgaaaga

SEQ ID NO: 9609 - DNA, 1537 bp, Homo sapiens
  source 1..1537: mol_type = unassigned DNA
gaggaggccgggcgcgcccggaaaagtggtttgcctgacggcgagaggcagaggtgccctcggtgatagaggaaacatggccgagtatacgcggctgcacaacgccttggcgctaatccgcctccgaaacccgccggtcaacgcgatcagtacgactttactccgtgacataaaagaaggactacagaaagctgtaatagaccatacaataaaagccattgtgatttgtggagcagagggcaaattttctgcaggtgctgatattcgtggcttcagtgctcctaggacatttggccttacactgggacatgtagtagatgaaatacagagaaatgagaagcccgtggtggcagcaatccaaggcatggctttcggagggggactagagctggccctgggctgtcactataggattgcccacgcagaggctcaagttggcttaccagaagttacactgggacttctccctggtgcaagaggaacccagcttctccccagactcactggagttcctgctgcacttgacttaattacctcaggaagacgtattttagcagatgaagcactcaagctgggcattctagataaagttgtaaactcagacccggttgaagaagcaatcagatttgctcagagagtttcagatcaacctctagaatcccgtagactctgcaacaagccaattcagagcttgcccaacatggacagcatttttagtgaggccctcttgaagatgcggaggcagcaccctgggtgtcttgcacaggaggcttgtgtccgtgcagtccaggctgctgtgcagtatccctatgaagtgggcatcaagaaggaggaggagctgtttctatatcttttgcaatcagggcaggctagagccctgcaatatgctttcttcgctgaaaggaaagcaaataagtggtcaactccctccggagcatcgtggaaaacagcatcagcgcggcctgtctcctcagttggtgttgttggcttgggaacaatgggccgaggcattgtcatttcttttgcaagggccaggattcctgtgattgctgtagactcggacaaaaaccagctagcaactgcaaacaagatgataacctctgtcttggaaaaagaagcctccaaaatgcaacagagcggccacccttggtcaggaccaaaacccaggttaacttcatctgtgaaggagcttggtggtgtagatttagtcattgaagcagtatttgaggaaatgagcctgaagaagcaggtctttgctgaactctcagctgtgtgcaaaccagaagcatttttgtgcactaatacttcagccctggatgttgatgagattgcttcttccactgatcgtcctcacttggtcattggcacccacttcttttcgccagctcatgtcatgaagttgttagaggttattcccagccaatactcttcccccactaccattgccactgttatgaacttatcaaaaaagattaaaaagattggagtcgttgtaggcaactactctgtctcaaaaaaaaaaaaaaaaaaaaaaaag

SEQ ID NO: 9610 - DNA, 6587 bp, Homo sapiens
  source 1..6587: mol_type = unassigned DNA
agtgtggccgttgtgggtgcatgcgcgtcaggcctgggacccggccgcccgcccgctgcctcacctgcaaggaggggcctcccagaaactcccttccccagtgcccagccgccccacctcgccagacttagctgaccagccagtgaggacgcccgctgcctcccacctgccctcctgccgtctttcgccagccaagcccagcctgagccagcacttgcctttacgaccatgttcaaggggctgagcaaaggctcccaggggaaggggtcccccaagggctcccccgccaaggggtcccccaaaggctcccccagcaggcacagccgggctgccacccaggagctggcccttctcatctcccgcatgcaagccaacgccgaccaggtggagcgggacatcctggagacgcagaagaggctgcagcaggaccggctgaacagtgagcagagccaggccctgcagcaccagcaggagacgggccgcagcctgaaggaggctgaggtgctgctcaaggacctcttcctggacgtggacaaggcccggcggctcaagcacccgcaggctgaggagattgagaaggacatcaagcagctgcacgagcgggtgacccaggagtgtgcggagtaccgtgccctgtacgagaagatggtgctgccccccgacgtgggacccagggtcgactgggcacgcgtgctggagcagaaacagaagcaggtctgcgcaggccagtacgggccgggcatggcggagctggagcaacagatcgccgagcacaacatcctgcagaaggagatcgacgcctatgggcagcagctgcggagcctcgtggggccggatgcagccaccatccggagccaataccgagacctactgaaggcggcgtcgtggcgcgggcagagcctgggcagcctgtacacgcacctccagggctgcacgcggcagctgagcgccctggctgagcagcagcgccgcatcctgcagcaggactggagcgacctcatggccgaccctgcgggcgtgcggcgggagtacgagcacttcaagcagcacgagctgctgagccaggagcagagcgtgaaccagctggaggacgacggcgagcgcatggtggagctgcggcaccccgcggtggggcccatccaggcccaccaggaggccctgaagatggagtggcagaacttcctgaacctgtgtatctgccaggagacccagctgcagcacgtggaggactaccgccggttccaggaagaggccgactcagtcagccagaccctggcgaagctcaactccaacttggatgccaagtacagccctgcacctgggggcccccctggcgcccccacagagctgctgcaacagctggaggcagaggaaaaacggctggccgtcaccgagagggccactggggacctgcagcggcgaagccgggatgtggcccctctgccacagcgaagaaacccccctcagcagcccctgcacgtggacagcatctgcgactgggactcaggagaagtgcagctgctgcagggtgagcggtataagctggtagataacactgacccgcacgcctgggtcgtgcagggccctggcggggagaccaagcgtgctcccgccgcctgcttctgcatcccagcaccagaccctgatgctgtggccagggcctcccggctggcctcagagctgcaggccctgaagcagaaattggccacagtccagagccgcctgaaggccagtgctgtggagtctcttcggcccagccagcaggctccatctggctcagacctggccaacccacaggcccagaagctcctgacacagatgacccggctggatggagacctgggacagatagagaggcaggtgctggcctgggcgcgggccccgctgagccgccccacacccttggaggacttggagggccgcatccacagccatgagggcacagcccagcgcctgcagagcctgggaacggagaaggagacagcccagaaggagtgcgaggcgtttctgtccacgcggcccgtgggccccgctgccctgcagctgcccgtagccctcaacagcgtgaagaacaagttcagtgacgtgcaggttctgtgcagcctctacggggagaaagccaaggctgccctggatctggagcggcagatccaggatgcggacagggtcatccgaggcttcgaggccaccctggtgcaggaggcccccatccctgctgaaccgggggctctgcaggagagggtcagcgagctgcagcgccagcggagggagctgctggaacagcagacctgcgtgctgcggctacaccgcgcgctgaaggcctcggagcacgcatgcgctgccctgcagaacaacttccaggagttctgccaagacctgcctcgccagcagcgccaggtgcgagccctcaccgaccgctaccacgccgtaggggaccagctggacctgcgggagaaggtggtgcaggatgccgccctcacctaccagcagttcaagaactgcaaggataacctgagctcctggctggagcacctgccccgcagccaggtgcggcccagcgacggccccagccagatcgcctacaagctgcaggcgcagaagaggctgacgcaggagatccagagccgagagcgggacagggccacagcatcccacctctcccaggccctgcaggcagcgctccaggactatgagctccaggcagacacctaccgctgctctttggagcccaccctggcagtgtcagcccccaagagaccccgagtggctcccctgcaagagagcatccaagcccaggagaagaaccttgcaaaggcctatactgaggttgcagcagcacagcagcagctgctccagcagctggagtttgctagaaaaatgctggagaagaaggagctcagtgaggacatccgaaggacccatgatgcaaagcagggctccgagagccctgcccaagcagggagagagtcagaggccctgaaggcccagctggaagaggagaggaagcgggtggcccgggtgcagcatgagctggaggcgcagaggagccaactgctgcagctgaggacccagcggcccttggagaggctggaggagaaggaagtggtagagttctaccgggacccccagctggagggcagcctgtccagggtgaaggcccaggtggaggaggagggcaagcggcgggctggcctgcaggcagacctggaagtggcagcccagaaggtcgtgcagctggaaagcaagaggaagaccatgcagcctcatctgctgaccaaggaggtcacccaggtggagagggaccccggcctggacagccaggcggcccagctcaggatccagatccagcagctccgcggggaggatgccgtcatctcggcccggctggaagggctgaagaaggagctactggcccttgagaagagggaggtggacgtgaaggagaaggtcgtggtgaaagaggtagtcaaggtggagaagaatctggaaatggtcaaggcagcccaggctctgaggctgcagatggaggaggatgctgcgcggaggaagcaggcggaggaggctgtggccaagctacaggctcgcatcgaagacctggagcgggctatcagctcggtggagcccaaggtcatcgtgaaggaggtgaagaaggtggagcaggacccagggctcctccaggagtcctccaggctgaggagcctcctcgaggaggagaggaccaagaacgcgacgctggccagggagctgagcgacctgcacagcaagtacagcgtggtggagaagcagaggcccaaagtgcagctccaggagcgcgtccacgagatcttccaggtggatccggagacagagcaggagatcactcggctcaaggccaagctgcaggagatggcgggcaagaggagcggtgtggagaaggaggtggagaagctgctgcccgacctggaggtcctgcgggcccagaagcccacggtggagtacaaggaggtgacccaggaggtggtgaggcatgagaggagccccgaggtgctgcgtgagatcgaccgcctgaaggctcagctcaacgagctcgtcaacagccacgggcgctcccaggagcagctcatccgcctgcagggtgagcgcgacgagtggaggcgcgagcgggccaaggtggagaccaagacggtgagcaaggaggtggtgcgccacgagaaggacccggtgctggagaaagaagcagagcggctccgccaggaggtgcgggaggcggcccagaagaggcgggccgcggaggacgcggtgtacgagctgcagagcaagcgcctgctgctggagaggaggaagcccgaggagaaggtggtggtgcaggaggtggtggtcacccagaaggacccgaagctgcgcgaggagcacagccggctgagcgggagcctggatgaggaggtgggccggcggcgccagctagagcttgaggtgcagcagctgcgggccggcgtggaggagcaggagggcctgctcagcttccaggaggaccgcagcaagaagctggccgtggagagggagctgcggcagctgaccttgaggatccaggagctcgagaagcggcctcccacggtgcaggagaagatcatcatggaggaagtggtcaagctggagaaggacccggacctggagaagtccacggaagccctgcggtgggacctggaccaggagaagacccaggtaaccgagctgaatcgggagtgcaagaacctgcaggtccagattgacgtcctccagaaagccaaatcgcaggagaagaccatctacaaggaagtgatccgggtgcagaaggaccgcgtcctggaagatgagcgggcccgcgtgtgggagatgctcaacagggagcgcacggcccggcaggcccgggaggaggaggcacggcgcctgcgggagcgcattgaccgggccgagacgctggggagaacctggtcccgggaggagtccgagctgcagagggcccgggaccaggccgaccaggagtgtgggcggctgcagcaggagctgcgggctctggagaggcagaagcagcagcagacactgcagctgcaggaggagtcgaagctgctcagccagaagacggagagcgagcgacagaaggcggcccagcggggccaggagctctcgcggctggaggcggccatcctccgcgagaaggaccagatctacgagaaggagcggacgctccgggacctccacgccaaggtgagccgggaggagctcagccaggagacccagacgcgagagaccaacctttccaccaagatctccatcctggaacccgagacggggaaggacatgtccccatacgaggcctacaagaggggcatcatcgacaggggccagtacttgcagctgcaggagctcgagtgtgactgggaggaggtcaccacctcggggccctgtggggaggagtctgtgctcctggaccgcaagagcgggaagcagtactccatcgaggccgccctccgctgccggcgcatctctaaggaggagtaccatctgtacaaggacggccacctgcccatctccgagtttgcgctgcttgtagctggggagaccaagccaagctcctcactctccatcggctctatcatctccaagtccccgctcgcctccccggccccccagagcaccagtttcttctctcccagcttctctctcgggctcggtgatgacagcttccctatcgccgggatctatgacacaaccacagacaacaagtgcagcatcaagacggccgtggccaagaacatgctggaccccatcactgggcagaagctactggaggcccaggcggccacagggggcatcgtggacctgctcagccgtgagcgctactctgtgcacaaggcgatggagaggggcctgatcgagaacacctccacacagaggctgcttaacgcccagaaggccttcaccggcatcgaggaccccgtcaccaagaagaggctctcggtgggcgaggccgtccagaagggctggatgccccgggagagcgtgctcccacacctgcaggtgcagcacctgaccggggggctcatcgaccccaagaggacaggccgcatccccatccagcaggccctcctctccgggatgatcagtgaagagctggcccagctcctgcaggacgagtccagctacgagaaggatttgacagaccccatctccaaggaacggctgagctacaaggaggccatgggccgctgccgcaaagaccccctgagcggcctgctgctcctgccagcggcactggaggggtaccgctgctaccgctccgcctcccccaccgtcccgcgctcccttcgctgacacgggccaaggagccagtggggaagtgcgtgtgttgggccaggtaggatacgtacacctcttgcctcagagcagcctcatcccaggcagtgggtcttccctctgtccaaccactgttttattattttactaacatggtgatgggctccctcccctaaccttggtgcctgatccatccccagaccaggacagcagccactcagttcttcctccacctccacccagtgatcccaataaacgaattctgtctccccgtg

SEQ ID NO: 9611 - DNA, 3386 bp, Homo sapiens
  source 1..3386: mol_type = unassigned DNA
tttccttccggaaaggacgctggattcagggcgcgccagtacgcgcagtagcggcccgcgagtcggcaggtgggtagccccggcgcgggaggaaggggaagttaccttcccctcggaagagggcgctggctcccccatcctgcctttataataaggccaccggaggagaggaagcagccagctgccgtctgcgctttgcaaagcatgcagttaggggagcagctcttggtgagctcagtgaacctgcctggcgcgcacttctacccgctggagagtgcgcgaggcggcagcggcgggagcgctggccacctccccagcgcggccccctctcctcagaagttggacttagacaaagcgtccaagaagttttccggcagtctctcctgcgaggcggtgagcggggagcccgcagccgccagcgcaggggcccccgcggccatgcttagtgacaccgacgccggggacgcatttgccagcgctgcggcagtggccaagccggggcccccggacggccgcaagggctccccctgcggggaggaggagctgccctccgccgctgcagccgccgccgccgccgccgccgcggctgcggccactgcgcgctactccatggacagcctgagctccgagcggtactacctccagtcccccggtcctcaggggtcggagctggctgcgccctgctcactcttcccgtaccaggcggcggctggggcgccccacggacctgtgtacccggctcctaacggggcgcgctacccctacggctccatgctgccccccggcggcttccccgcggctgtgtgcccacccgggagggcgcagttcggcccaggagccggtgcgggcagtggcgcgggcggtagcagcggcgggggcggcggcccgggcacctatcagtacagccagggggctccgctctacgggccgtaccctggagccgcagcggcgggatcttgcggaggactggggggcctgggggttccaggttctggcttccgtgcccacgtctacctgtgcaaccggcctctgtggctcaaattccaccgccaccaaactgagatgatcattacgaaacagggcaggcgcatgtttcctttcttgagcttcaacataaacggactcaatcccactgcccactacaatgtgttcgtagaggtggtgctggcggaccccaaccactggcgcttccaggggggcaaatgggtgacctgtggcaaagccgacaataacatgcagggcaacaaaatgtatgttcacccagagtctcctaatactggttcccactggatgagacaggagatttcattcgggaaattaaaactcaccaataacaaaggcgcaaataacaacaacacccagatgatagtcttacaatccttacacaaataccaaccccgactgcatattgttgaagttacagaggatggcgtggaggacttgaatgagccctcaaagacccagacttttaccttctcagaaacgcaattcattgcagtgactgcctaccaaaacaccgatattactcaactaaagattgatcataacccctttgcaaaaggcttcagagacaactatgattcatcccatcagattgtccctggaggtcggtacggcgttcaatccttcttcccggagccctttgtcaacactttacctcaagcccgctattataatggcgagagaaccgtgccacagaccaacggcctcctttcaccccaacagagcgaagaggtggccaaccctccccagcggtggcttgtcacgcctgtccagcaacctgggaccaacaaactagacatcagttcctatgaatctgaatatacttctagcacattgctcccatatggcattaaatccttgccccttcagacatcccatgccctggggtattacccagacccaacctttcctgcaatggcagggtggggaggtcgaggttcttaccagaggaagatggcagctggactaccatggacctccagaacaagccccactgtgttctctgaagatcagctctccaaggagaaagtgaaagaggaaattggctcttcttggatagagacacccccttccatcaaatctctagattccaatgattcaggagtatacaccagtgcttgtaagcgaaggcggctgtctcctagcaactccagtaatgaaaattcaccctccataaagtgtgaggacattaatgctgaagagtatagtaaagacacctcaaaaggcatgggagggtattatgctttttacacaactccctaaagagttattttaacctcaaaaattagctaactttttgcagatggacttggtggtgttttttgttgtcttctttgcctaggttgccaaaaagatgtttgccttccaccttgatgcatcctgttttgtgcaattctctaaaagaaggtgccaaagctttttgattgctgcaggtaactgaaacaaacctagcatttttaaaaaataagattaatggaagactttaaggtattttaaaattcgaagggtatccaaggttctgtatttatttattggggagacactaacccttcaaagaagcaggctgtgaacattgggtgcccagtgctatcagatgagttaaaacctttgattctcatttctatttgtaaattcttaagcaaatagaagccgagtgttaaggtgttttgcttctgaaagagggctgtgccttccgtttcagaaggagacattttgctgttacattctgccaggggcaaaagatactaggcccaggagtcaagaaaagcttttgtgaaagtgatagtttcacctgactttgattccttaacccccggcttttggaacaagccatgtttgccctagtccaggattgcctcacttgagacttgctaggcctctgctgtgtgctggggtggccagtgggactcaggagagagcaagctaaggagtcaccaaaaaaaaaaaaaaaaaaaagggagaatttaaaagtgtacagttgtgtgtttagatacactatagaataatgtggtatatattgtacaaatagtctacataggtgtctgggataatgtaaaactggtgctttggctttgtaaagaatttgcaaatcacttaacagctgcaggggcaaggggagagtttcatcatccccatgatatttgggaatattctgtttacttcttagatagttaagaatgtattcagctactatgtactaacttgaaccgtgtttaaggaaaactcctatttcatcctcttcttgcgccatcccctctccctaacttggtaatgtgaagaaactaaaacctgataccacagctcctataggcattttagagatcttggatttttatgtacagtcttagtcatttttaataaatgtggttcagtaagggaacgga

SEQ ID NO: 9612 - DNA, 2829 bp, Homo sapiens
  source 1..2829: mol_type = unassigned DNA
gtctgcgctttgcaaagcatgcagttaggggagcagctcttggtgagctcagtgaacctgcctggcgcgcacttctacccgctggagagtgcgcgaggcggcagcggcgggagcgctggccacctccccagcgcggccccctctcctcagaagttggacttagacaaagcgtccaagaagttttccggcagtctctcctgcgaggcggtgagcggggagcccgcagccgccagcgcaggggcccccgcggccatgcttagtgacaccgacgccggggacgcatttgccagcgctgcggcagtggccaagccggggcccccggacggccgcaagggctccccctgcggggaggaggagctgccctccgccgctgcagccgccgccgccgccgccgccgcggctgcggccactgcgcgctactccatggacagcctgagctccgagcggtactacctccagtcccccggtcctcaggggtcggagctggctgcgccctgctcactcttcccgtaccaggcggcggctggggcgccccacggacctgtgtacccggctcctaacggggcgcgctacccctacggctccatgctgccccccggcggcttccccgcggctgtgtgcccacccgggagggcgcagttcggcccaggagccggtgcgggcagtggcgcgggcggtagcagcggcgggggcggcggcccgggcacctatcagtacagccagggggctccgctctacgggccgtaccctggagccgcagcggcgggatcttgcggaggactggggggcctgggggttccaggttctggcttccgtgcccacgtctacctgtgcaaccggcctctgtggctcaaattccaccgccaccaaactgagatgatcattacgaaacagggcaggcgcatgtttcctttcttgagcttcaacataaacggactcaatcccactgcccactacaatgtgttcgtagaggtggtgctggcggaccccaaccactggcgcttccaggggggcaaatgggtgacctgtggcaaagccgacaataacatgcagggcaacaaaatgtatgttcacccagagtctcctaatactggttcccactggatgagacaggagatttcattcgggaaattaaaactcaccaataacaaaggcgcaaataacaacaacacccagatgatagtcttacaatccttacacaaataccaaccccgactgcatattgttgaagttacagaggatggcgtggaggacttgaatgagccctcaaagacccagacttttaccttctcagaaacgcaattcattgcagtgactgcctaccaaaacaccgatattactcaactaaagattgatcataacccctttgcaaaaggcttcagagacaactatgattccatgtacaccgcttcagaaaatgacaggttaactccatctcccacggattctcctagatcccatcagattgtccctggaggtcggtacggcgttcaatccttcttcccggagccctttgtcaacactttacctcaagcccgctattataatggcgagagaaccgtgccacagaccaacggcctcctttcaccccaacagagcgaagaggtggccaaccctccccagcggtggcttgtcacgcctgtccagcaacctgggaccaacaaactagacatcagttcctatgaatctgaatatacttctagcacattgctcccatatggcattaaatccttgccccttcagacatcccatgccctggggtattacccagacccaacctttcctgcaatggcagggtggggaggtcgaggttcttaccagaggaagatggcagctggactaccatggacctccagaacaagccccactgtgttctctgaagatcagctctccaaggagaaagtgaaagaggaaattggctcttcttggatagagacacccccttccatcaaatctctagattccaatgattcaggagtatacaccagtgcttgtaagcgaaggcggctgtctcctagcaactccagtaatgaaaattcaccctccataaagtgtgaggacattaatgctgaagagtatagtaaagacacctcaaaaggcatgggagggtattatgctttttacacaactccctaaagagttattttaacctcaaaaattagctaactttttgcagatggacttggtggtgttttttgttgtcttctttgcctaggttgccaaaaagatgtttgccttccaccttgatgcatcctgttttgtgcaattctctaaaagaaggtgccaaagctttttgattgctgcaggtaactgaaacaaacctagcatttttaaaaaataagattaatggaagactttaaggtattttaaaattcgaagggtatccaaggttctgtatttatttattggggagacactaacccttcaaagaagcaggctgtgaacattgggtgcccagtgctatcagatgagttaaaacctttgattctcatttctatttgtaaattcttaagcaaatagaagccgagtgttaaggtgttttgcttctgaaagagggctgtgccttccgtttcagaaggagacattttgctgttacattctgccaggggcaaaagatactaggcccaggagtcaagaaaagcttttgtgaaagtgatagtttcacctgactttgattccttaacccccggcttttggaacaagccatgtttgccctagtccaggattgcctcacttgagacttgctaggcctctgctgtgtgctggggtggccagtgggactcaggagagagcaagctaaggagtcaccaaaaaaaaaaaaaaaaaaaa

SEQ ID NO: 9613 - DNA, 2354 bp, Homo sapiens
  source 1..2354: mol_type = unassigned DNA
aagtggtcaacttgaccgatgctttggcaattgaaaaagggcagaaaggcgcgggctagtgggtggatggggacaaagatctaagtcaccttcttccagcgtgtgagcctgggaggagggtgggggtcctgaggagctgccctccgccgctgcagccgccgccgccgccgccgccgcggctgcggccactgcgcgctactccatggacagcctgagctccgagcggtactacctccagtcccccggtcctcaggggtcggagctggctgcgccctgctcactcttcccgtaccaggcggcggctggggcgccccacggacctgtgtacccggctcctaacggggcgcgctacccctacggctccatgctgccccccggcggcttccccgcggctgtgtgcccacccgggagggcgcagttcggcccaggagccggtgcgggcagtggcgcgggcggtagcagcggcgggggcggcggcccgggcacctatcagtacagccagggggctccgctctacgggccgtaccctggagccgcagcggcgggatcttgcggaggactggggggcctgggggttccaggttctggcttccgtgcccacgtctacctgtgcaaccggcctctgtggctcaaattccaccgccaccaaactgagatgatcattacgaaacagggcaggcgcatgtttcctttcttgagcttcaacataaacggactcaatcccactgcccactacaatgtgttcgtagaggtggtgctggcggaccccaaccactggcgcttccaggggggcaaatgggtgacctgtggcaaagccgacaataacatgcagggcaacaaaatgtatgttcacccagagtctcctaatactggttcccactggatgagacaggagatttcattcgggaaattaaaactcaccaataacaaaggcgcaaataacaacaacacccagatgatagtcttacaatccttacacaaataccaaccccgactgcatattgttgaagttacagaggatggcgtggaggacttgaatgagccctcaaagacccagacttttaccttctcagaaacgcaattcattgcagtgactgcctaccaaaacaccgatattactcaactaaagattgatcataacccctttgcaaaaggcttcagagacaactatgattccatgtacaccgcttcagaaaatgacaggttaactccatctcccacggattctcctagatcccatcagattgtccctggaggtcggtacggcgttcaatccttcttcccggagccctttgtcaacactttacctcaagcccgctattataatggcgagagaaccgtgccacagaccaacggcctcctttcaccccaacagagcgaagaggtggccaaccctccccagcggtggcttgtcacgcctgtccagcaacctgggaccaacaaactagacatcagttcctatgaatctgaatatacttctagcacattgctcccatatggcattaaatccttgccccttcagacatcccatgccctggggtattacccagacccaacctttcctgcaatggcagggtggggaggtcgaggttcttaccagaggaagatggcagctggactaccatggacctccagaacaagccccactgtgttctctgaagatcagctctccaaggagaaagtgaaagaggaaattggctcttcttggatagagacacccccttccatcaaatctctagattccaatgattcaggagtatacaccagtgcttgtaagcgaaggcggctgtctcctagcaactccagtaatgaaaattcaccctccataaagtgtgaggacattaatgctgaagagtatagtaaagacacctcaaaaggcatgggagggtattatgctttttacacaactccctaaagagttattttaacctcaaaaattagctaactttttgcagatggacttggtggtgttttttgttgtcttctttgcctaggttgccaaaaagatgtttgccttccaccttgatgcatcctgttttgtgcaattctctaaaagaaggtgccaaagctttttgattgctgcaggtaactgaaacaaacctagcatttttaaaaaataagattaatggaagactttaaggtattttaaaattcgaagggtatccaaggttctgtatttatttattggggagacactaacccttcaaagaagcaggctgtgaacattgggtgcccagtgctatcagatgagttaaaacctttgattctcatttctatttgtaaattcttaagcaaatagaagccgagtgttaaggtgttttgcttctgaaagagggctgtgccttccgtttcag

SEQ ID NO: 9614 - DNA, 2084 bp, Homo sapiens
  source 1..2084: mol_type = unassigned DNA
aagtttccaagtggtcaacttgaccgatgctttggcaattgaaaaagggcagaaaggcgcgggctagtgggtggatggggacaaagatctaagtcaccttcttccagcgtgtgagcctgggaggagggtgggggtcctgaggagcaagaggtacgaggaaggaaaaggagagggcttctgggttagtttccacctcctgctttccaactcacggcgctttccttccggaaaggacgctggattcagggcgcgccagtacgcgcagtagcggcccgcgagtcggcaggcgcatgtttcctttcttgagcttcaacataaacggactcaatcccactgcccactacaatgtgttcgtagaggtggtgctggcggaccccaaccactggcgcttccaggggggcaaatgggtgacctgtggcaaagccgacaataacatgcagggcaacaaaatgtatgttcacccagagtctcctaatactggttcccactggatgagacaggagatttcattcgggaaattaaaactcaccaataacaaaggcgcaaataacaacaacacccagatgatagtcttacaatccttacacaaataccaaccccgactgcatattgttgaagttacagaggatggcgtggaggacttgaatgagccctcaaagacccagacttttaccttctcagaaacgcaattcattgcagtgactgcctaccaaaacaccgatattactcaactaaagattgatcataacccctttgcaaaaggcttcagagacaactatgattccatgtacaccgcttcagaaaatgacaggttaactccatctcccacggattctcctagatcccatcagattgtccctggaggtcggtacggcgttcaatccttcttcccggagccctttgtcaacactttacctcaagcccgctattataatggcgagagaaccgtgccacagaccaacggcctcctttcaccccaacagagcgaagaggtggccaaccctccccagcggtggcttgtcacgcctgtccagcaacctgggaccaacaaactagacatcagttcctatgaatctgaatatacttctagcacattgctcccatatggcattaaatccttgccccttcagacatcccatgccctggggtattacccagacccaacctttcctgcaatggcagggtggggaggtcgaggttcttaccagaggaagatggcagctggactaccatggacctccagaacaagccccactgtgttctctgaagatcagctctccaaggagaaagtgaaagaggaaattggctcttcttggatagagacacccccttccatcaaatctctagattccaatgattcaggagtatacaccagtgcttgtaagcgaaggcggctgtctcctagcaactccagtaatgaaaattcaccctccataaagtgtgaggacattaatgctgaagagtatagtaaagacacctcaaaaggcatgggagggtattatgctttttacacaactccctaaagagttattttaacctcaaaaattagctaactttttgcagatggacttggtggtgttttttgttgtcttctttgcctaggttgccaaaaagatgtttgccttccaccttgatgcatcctgttttgtgcaattctctaaaagaaggtgccaaagctttttgattgctgcaggtaactgaaacaaacctagcatttttaaaaaataagattaatggaagactttaaggtattttaaaattcgaagggtatccaaggttctgtatttatttattggggagacactaacccttcaaagaagcaggctgtgaacattgggtgcccagtgctatcagatgagttaaaacctttgattctcatttctatttgtaaattcttaagcaaatagaagccgagtgttaaggtgttttgcttctgaaagagggctgtgccttccgtttcagaaggagacattttgctgttacattctgccaggggcaaaagatactaggcccaggagtcaagaaaagcttttgtgaaagtgatagtttcacctgactttgattccttaacccccggcttttgg

SEQ ID NO: 9615 - DNA, 2716 bp, Homo sapiens
  source 1..2716: mol_type = unassigned DNA
agagctggaggaagtgagaggtcggctgggggtcctcaaagtgagaggggagcagaggatcctcccgtgcaggctgtggatgtcactcacttcccagctggtgaagcctcgctgcagagatgcatctgctcccagccctggcaggggtcctggccacactcgtcctcgcccagccctgtgagggcactgacccagcctcccctggggcagtggagacctcggtcctgcgagactgcatagcagaggccaagttgctggtggatgctgcctacaattggacccagaagagcatcaagcagcggcttcgcagcggttcagccagccccatggacctcctgtcctacttcaaacaaccggtagcagccaccaggacagttgttcgggccgcagattatatgcatgtggctttggggctgcttgaagagaagttacaaccccagcggtccggacccttcaatgtcactgatgtgctaacagaaccacagctgcggctgctgtcccaggccagtggctgtgctctccgggaccaggccgagcgctgcagcgacaagtaccgcaccatcactggacggtgcaacaacaagaggagacccttgctaggggcctccaaccaggctctggctcgctggctgcccgccgagtatgaggatgggctgtcgctccccttcggctggacccccagcaggaggcgcaatggcttccttctccctcttgtccgggctgtctccaaccagattgtgcgcttccccaatgagagactgacctccgaccgtggccgagccctcatgttcatgcagtggggccagttcattgaccatgacctggacttctccccggagtccccggccagagtggccttcactgcaggcgttgactgtgagaggacctgcgcccagctgcccccctgctttcccatcaagatcccacccaatgacccccgcatcaagaaccagcgtgactgcatccctttcttccgctcggcaccctcatgcccccaaaacaagaacagagtccgcaaccagatcaacgcgctcacctcctttgtggacgccagcatggtgtatggcagtgaggtctccctctcgctgcggctccgcaaccggaccaactacctggggctgctggccatcaaccagcgctttcaagacaacggccgggccctgctgcccttcgacaacctgcacgatgacccctgtctcctcaccaaccgctcggcgcgcatcccctgcttcctggcaggtgacacccgatcaacggaaacccccaaactggcagccatgcacaccctctttatgcgagagcacaaccggctggccaccgagctgagacgcctgaatccccggtggaatggagacaaactgtacaatgaggctcggaagatcatgggggccatggtccagatcatcacctaccgagactttctgcccctggttctgggcaaggcccgggccaggagaaccctggggcactacagggggtactgctccaatgtggacccacgggtggccaatgtcttcaccctggccttccgctttggccacacaatgctccagcccttcatgttccgcttggacagtcagtaccgggcctccgcacccaactcgcatgtcccacttagctctgccttctttgccagctggcggatcgtgtatgaagggggcatcgaccccatcctccggggcctcatggccacccctgccaagctgaaccgtcaggatgccatgttagtggatgagctccgggaccggctgtttcggcaagtgaggaggattgggctggacctggcagctctcaacatgcaacgaagccgggaccacggccttccagggtacaatgcttggaggcgcttctgtgggctctcccagccccggaatttggcacagcttagccgggtgctgaaaaaccaggacttggcaaggaagttcctgaatttgtatggaacacctgacaacattgacatctggattggggccatcgctgagcctcttttgccgggggctcgagtggggcctcttctggcttgtctgttcgagaaccagttcagaagagcccgagacggagacaggttctggtggcagaaacgaggtgttttcaccaaaagacagcgcaaggccctgagcagaatttccttgtctcgaattatatgtgacaataccggtatcaccacggtttcaagggacatcttcagagccaacatctaccctcggggctttgtgaactgcagccgtatccccaggttgaacctatcagcctggcgagggacatgaggcttctgcaggagtctatcccaagtctccaacttttggagacaaggggaaggggaggaccatgaggctgccttgtctccctggagcaagtgcaggctgctgacgcttctgctggctacagctcagagctgggttccccagccaggagtgaaggctgggggctcctatcagcaatggaccttcccgccttgggagcctcttaggtattaggctatgaatcagcgccacgtgcaaaggcttgggagccaagccatgtggtcttgcaccccaggcaagaaaagtcagctggagggtttacagcactttctactgtttcccagccctccctcccctccctcaccatgactaagagaccactcggtcctagcctccagacaccccacaatactcctctgagcctgaggccaggcagcatgctctgcttctaccaataaagcactgctaagggc

SEQ ID NO: 9616 - DNA, 2298 bp, Homo sapiens
  source 1..2298: mol_type = unassigned DNA
agcagcagtagggttaagtaacacagaaactgttacgctcttgcatgcagggtccctagatacgaagttcgaatcgatggaaacgtagctcaaaaggcgacgccaacaccccggagaaaacactgagctactccaaccacagtggcgcgccaagtaggaggcggtacctgaggaccacgcctgcgcgcggggttacgcaagcgcgcagcctttgcgcacgcgcacgaacgcacggccgcgcagcatctgtcttgctggaagctttttcctagaggttgagcggtttgcacaatgtcggaaatggctgagttgtccgagctgtatgaagagagcagtgacctgcagatggatgtgatgcctggcgagggtgaccttccgcagatggaggtaggcagcgggagccgggagctatccctgcgtccctcccgcagcggggcccaacagctcgaggaggaaggcccaatggaggaggaggaggcccagccaatggcggcgccagaggggaaacggagccttgctaacgggcccaacgctggggagcagccaggccaggtggcgggcgcagacttcgagagcgaggacgagggcgaggaatttgatgactgggaggacgactacgactatcccgaagaggagcagctcagtggtgccggctacagagtatcagccgctcttgaagaagccgacaagatgtttctgagaacaagagaaccagccctggatggcgggtttcagatgcattatgagaagaccccgtttgatcagttagcttttatcgaagagcttttttcactgatggttgtcaatcgtctgaccgaagaactcggctgtgatgagattattgatagagagtagttagatgctgttaaaagaggaggaaactacttgaggagggacccaactttccgctatcttttgggttcattccaaatagttttgtgccattgaaaaacttgaccttcaaaaaaatttgtttttcagaatagaacacaataggacagtgactgcacagttgtgaaaaaggaagagaatcattaaagaaaaagaaaaaagattttaagaccgttgaaatcaattatcaagaacgtcctaaaacacctatggctttgactttgttattgatccagattattttccttgcattggggaaaatatctttcatatttgtttgctgtaaagatggttttgcaagaataagtcatgaccaagacaaactgccaatacaaaagcccactgatactaattatataatgagaaaaaaatgtatccaactaggacacatatcttttgagttatttggactgaaagcttaagaaaacttggaaaattctattttgtgatctagtcaagccacagttatcaaaggctacattttcagtgtaagataaatggatgagtaaactcaaatatgtatcacgtgtgctttgtatcttaagatgtgtttccaagagcatctgaaattttgtttgtacatgtatcttgatcatttataaagccactgtgatctataaatcaagaaaatccattgtcataaccatttttaaaagtcaaaaattaagacatccttaattaaaaagtttcaaatctagacactaaatgtgtgtgaatgtacaaagaaaacaaaccattgcttatgctgttatatactagagaaattttgttttgcttgctgttttaacttgacagatgaaggactttagttgaacttcatattgtaagaactgttaataaaagttgtcaagtaaaaagcgctatatctaaaaagactttatgaacagttattctatcaacttttaaaggttttaaacctgcccagaaattaccttggtatctgaagtttccctctgtctcctcctctaattaagcttgttatttgtcatgcaccagcattggagataataaaatttcttgttctgtgtattttgtttggctaatagtattgcatacatactttctctgtatactactttctattgtatgtgttaaccagtattaagggaaaatgatccagcttcagctatctaattcacaaattaatttctggaaattaaactttgtaaattaagtttttgcctataagaatttgctggtctgggaaaacctgccctatcaatgagtatgttgccgtggttaccttactaagatgctgaagttctaggagagtaatgattacatcagaaggctaggttcagcaaaataagtgtatcagcaggttttatcatgatcagtaaaaatgttccaaatgcttctgctccattatagcagtaaagaacgaatatccaatgcaacaggacaatt

SEQ ID NO: 9617 - DNA, 1981 bp, Homo sapiens
  source 1..1981: mol_type = unassigned DNA
gtaagaatctatgctctcgcgcccggttacgcacactgcatttacagcgcgcatagcgcccacgcacgcgcactggggtgtccgccgggcatcgctctgtccagttattccagtttctctgggagcagccgagttgaccccacggtctgagatgtccaagctgcccgcagacagcagtgtcccgcagacaggcgcggcgaatggtgacagagacgtcccgcaggcggaggtaggccgcgggaggcgggagccggccccggcacagcctgaggaggccggggaaggcgcgatggcggcggccaggggaggcccggtgccggcggccagggaaggtcggatggcggcggccagggcagccccggcggcggcagccaggggagccccggtggcagcggcggcgttggccagggcagccgcggcgggcagggaaagcccggcggcggcggcggccagggaagcccggatggcggaggtcgcccgcttgctgggggagccagtggacgaagagggtcccgagggcaggcccaggtccagacacgggaacggaggcctggctgcgttgccctatctccgtctccgccacccacttagcgttttaggcatcaattaccagcagtttctccgccactatctggaaaattacccgattgctcccggcagaatacaagagcttgaagaacgccgcaggcgattcgtggaagcctgcagagcaagggaagcagcgtttgatgccgaatatcagcgaaatcctcacagggtggacctcgatattttaacctttacgatagctctgactgcctctgaagttatcaaccctctgatagaagaacttggttgcgataagtttatcaatagagaatagttatgtggtgacactacttcaagagaacctctgcattccagtcataccaatcctgcaacttgattttcagaagtcaagagtatatcgcgataagacagtgcacaggtggaggggaaaaaaagggggagggggaagcttatcttgaaaaagcatcacagaagtagaaaaaaatgtcgaaagcattataactgtaacgttctttgagtttgtgattgatccacatttttccccctgcattatggaaaatgtctctcagcattgctttattacaaagtaaaggatggttttataaaattgagactgatgaaacatcaatactagagcccatgaggatgaaagaaattatcaaatagtgctgaacagaataagatgttaacgctgagttattaggactggaaggctatgaaaagaacttgaaattgtcggaatatgtgctctcttcatgtcatattcaatagaagtttctagtttaagattgattttgtgttttcttaggcatttcaagtgacaagcaaagtaaatgtatatattatgtgataaatcatgttttcaagaacgtcaaatttctggacttttttctttcaatttttaatttttaaagtttttttggtattaaaaaatctattcacaagccaaaaaatatataaaatatacagcgaaaagccttccattcttgttttcctccatccagtaccaacgatgacctctaatagccacagtttcctttccgtccttctagtttccttacgtgtacacaggcacatataaatctgggtttacttgttttatttcttcacagaagtcggcatattatatttactggtttatacattgctttctcattaagaacatatgttgacccttccaaaccactgtatttcctcattattttttaaagtggcattttattccattctgaggttatgtccaaatttacttaaccagggatatattgacggacatttaggttgtttcccatctctttctttgggcagaataaaaaattgctagagtagttcatcttgtacaattgctagagtagttcatcttgtatatcatgtggcatgtgcacaaatatagtattgcttcaattcaaaattcacttcatatttgaacatc

SEQ ID NO: 9618 - DNA, 1243 bp, Homo sapiens
  source 1..1243: mol_type = unassigned DNA
acactgcatttacagcgcgcatagcgcccacgcacgcgcactggggtgtccgccgggcatcgctctgtccagttattccagtttctctgggagcagccgagttgaccccacggtctgagatgtccaagctgcccgcagacagcagtgtcccgcagacaggcgcggcgaatggtgacagagacgtcccgcaggcggaggtaggccgcgggaggcgggagccggccccggcacagcctgaggaggccggggaaagcccggcggcggcggcggccagggaagcccggatggcggaggtcgcccgcttgctgggggagccagtggacgaagagggtcccgagggcaggcccaggtccagacacgggaacggaggcctggctgcgttgccctatctccgtctccgccacccacttagcgttttaggcatcaattaccagcagtttctccgccactatctggaaaattacccgattgctcccggcagaatacaagagcttgaagaacgccgcaggcgattcgtggaagcctgcagagcaagggaagcagcgtttgatgccgaatatcagcgaaatcctcacagggtggacctcgatattttaacctttacgatagctctgactgcctctgaagttatcaaccctctgatagaagaacttggttgcgataagtttatcaatagagaatagttatgtggtgacactacttcaagagaacctctgcattccagtcataccaatcctgcaacttgattttcagaagtcaagagtatatcgcgataagacagtgcacaggtggaggggaaaaaaagggggagggggaagcttatcttgaaaaagcatcacagaagtagaaaaaaatgtcgaaagcattataactgtaacgttctttgagtttgtgattgatccacatttttccccctgcattatggaaaatgtctctcagcattgctttattacaaagtaaaggatggttttataaaattgagactgatgaaacatcaatactagagcccatgaggatgaaagaaattatcaaatagtgctgaacagaataagatgttaacgctgagttattaggactggaaggctatgaaaagaacttgaaattgtcggaatatgtgctctcttcatgtcatattcaatagaagtttctagtttaagattgattttgtgttttcttaggcatttcaagtgacaagcaaagtaaatgtatatattatgtgataaatcatgttttcaagaacgtc

SEQ ID NO: 9619 - DNA, 1464 bp, Homo sapiens
  source 1..1464: mol_type = unassigned DNA
atgggcgggcgtcctcggctctaactgccgccactttccacacgctgggagggccgttacctcagagatacccgtggccggcatgttggttgaaaaagcttcccggaagggagacgaagagaaaggagaggagcagctcgtgatcatccccggtagcgagtacgcggcgaagtaggcggcggcggagggagcgctgatgaagatggatgtgtcagtgagggccgcgggctgctccgacgacctcagctctggggaggccgacgtagacccaaagctcctggagctcaccgctgacgaggagaagtgccgcagcatccgcaggcagtaccggcagctcatgtactgcgtgcggcagaaccgggaggacatcgtgagctcggcgaacaactccttaaccgaggctctggaggaagccaacgtcctctttgatggcgtgagccgaaccagagaagcagccctcgacgcccggtttcttgttatggcttctgatttgggtaaagaaaaggcaaagcagttaaactcagatatgaacttctttaatcagttagcattttgtgactttctgtttctgttcgtgggtctgaattggatggaaggcgatcctgacaagttgagtgattgtgatgatagcatagctctttccttctggaaggcaatagaaaaggaagcaacatcctggatggtaaaagctgagacattccattttgtttttggttcattcaagctagaacgttctgcaccaaagccccgacttgaacaccagaaaaaagttcgcaagatggaagaaaatggcaacatgcctacaaagttgcagaagttggacctgagtagttatccagaagcgacagaaaaaaacgtagaaaggattttgggattgttgcaaacctactttcgaaagtatcctgatactcctgtgtcctattttgagtttgtgattgatccaaactctttttctcgtactgtggagaatatattttatgtttcttttattgtaagagatggttttgcaagaataaggcttgatgaagacaggctgccaatattagagccgatgaatgttaaccaaatgggtgagggaaatgattccagttgccatggcaggaaacagggagttatatctttgactttacaggagtggaaaaacattgtggcagcttttgaaatttctgaggctatgattacatactcctcatactaaagatttcttagtatagcatcctttttgtgttttttttctgaagttagatggagagtaaaatgtaaactgaagcacatattgtatctcttgtaaagtgaaaaagtattttcaagaacatcagacattgttttactgtgcagcatatttttcttagtaatttataaggtcatgatcttctgttattaaaacaaattcactggcatatttatgggaacgttttattgaatgccctttaagactattaataaaaacaagttttggatacc

SEQ ID NO: 9620 - DNA, 3363 bp, Homo sapiens
  source 1..3363: mol_type = unassigned DNA
gcccccgcccggcccgcccggctctcctagtcccttgcaacctggcgctgccatccgggccactgtcccaggtcccggcccggagctatggagcggcgctggcccctggggctagggctggtgctgctgctctgcgccccgctgcccccgggggcgcgcgccaaggaagttactctgatggacacaagcaaggcacagggagagctgggctggctgctggatcccccaaaagatgggtggagtgaacagcaacagatactgaatgggacacccctgtacatgtaccaggactgcccaatgcaaggacgcagagacactgaccactggcttcgctccaattggatctaccgcggggaggaggcttcccgcgtccacgtggagctgcagttcaccgtgcgggactgcaagagtttccctgggggagccgggcctctgggctgcaaggagaccttcaaccttctgtacatggagagtgaccaggatgtgggcattcagctccgacggcccttgttccagaaggtaaccacggtggctgcagaccagagcttcaccattcgagaccttgtgtctggctccgtgaagctgaatgtggagcgctgctctctgggccgcctgacccgccgtggcctctacctcgctttccacaacccgggtgcctgtgtggccctggtgtctgtccgggtcttctaccagcgctgtcctgagaccctgaatggcttggcccaattcccagacactctgcctggccccgctgggttggtggaagtggcggggacctgcttgccccacgcgcgggccagccccaggccctcaggtgcaccccgcatgcactgcagccctgatggcgagtggctggtgcctgtaggacggtgccactgtgagcctggctatgaggaaggtggcagtggcgaagcatgtgttgcctgccctagcggctcctaccggatggacatggacacaccccattgtctcacgtgcccccagcagagcactgctgagtctgagggggccaccatctgtacctgtgagagcggccattacagagctcccggggagggcccccaggtggcatgcacaggtcccccctcggccccccgaaacctgagcttctctgcctcagggactcagctctccctgcgttgggaacccccagcagatacggggggacgccaggatgtcagatacagtgtgaggtgttcccagtgtcagggcacagcacaggacggggggccctgccagccctgtggggtgggcgtgcacttctcgccgggggcccgggggctcaccacacctgcagtgcatgtcaatggccttgaaccttatgccaactacacctttaatgtggaagcccaaaatggagtgtcagggctgggcagctctggccatgccagcacctcagtcagcatcagcatggggcatgcagagtcactgtcaggcctgtctctgagactggtgaagaaagaaccgaggcaactagagctgacctgggcggggtcccggccccgaagccctggggcgaacctgacctatgagctgcacgtgctgaaccaggatgaagaacggtaccagatggttctagaacccagggtcttgctgacagagctgcagcctgacaccacatacatcgtcagagtccgaatgctgaccccactgggtcctggccctttctcccctgatcatgagtttcggaccagcccaccagtgtccaggggcctgactggaggagagattgtagccgtcatctttgggctgctgcttggtgcagccttgctgcttgggattctcgttttccggtccaggagagcccagcggcagaggcagcagaggcagcgtgaccgcgccaccgatgtggatcgagaggacaagctgtggctgaagccttatgtggacctccaggcatacgaggaccctgcacagggagccctggactttacccgggagcttgatccagcgtggctgatggtggacactgtcataggagaaggagagtttggggaagtgtatcgagggaccctgaggctccccagccaggactgcaagactgtggccattaagaccttaaaagacacatccccaggtggccagtggtggaacttccttcgagaggcaactatcatgggccagtttagccacccgcatattctgcatctggaaggcgtcgtcacaaagcgaaagccgatcatgatcatcacagaatttatggagaatggagccctggatgccttcctgagggagcgggaggaccagctggtccctgggcagctagtggccatgctgcagggcatagcatctggcatgaactacctcagtaatcacaattatgtccaccgggacctggctgccagaaacatcttggtgaatcaaaacctgtgctgcaaggtgtctgactttggcctgactcgcctcctggatgactttgatggcacatacgaaacccagggaggaaagatccctatccgttggacagcccctgaagccattgcccatcggatcttcaccacagccagcgatgtgtggagctttgggattgtgatgtgggaggtgctgagctttggggacaagccttatggggagatgagcaatcaggaggttatgaagagcattgaggatgggtaccggttgccccctcctgtggactgccctgcccctctgtatgagctcatgaagaactgctgggcatatgaccgtgcccgccggccacacttccagaagcttcaggcacatctggagcaactgcttgccaacccccactccctgcggaccattgccaactttgaccccaggatgactcttcgcctgcccagcctgagtggctcagatgggatcccatatcgaaccgtctctgagtggctcgagtccatacgcatgaaacgctacatcctgcacttccactcggctgggctggacaccatggagtgtgtgctggagctgaccgctgaggacctgacgcagatgggaatcacactgcccgggcaccagaagcgcattctttgcagtattcagggattcaaggactgatccctcctctcaccccatgcccaatcagggtgcaaggagcaaggacggggccaaggtcgctcatggtcactccctgcgccccttcccacaacctgccagactaggctatcggtgctgcttctgcccactttcaggagaaccctgctctgcaccccagaaaacctctttgttttaaaagggaggtgggggtagaagtaaaaggatgatcatgggagggagctgaggggttaatatatatacatacatacacatatatatatttttgtaaataaacaggaactgattttctgcctccatcccacccatgagggctgcaggcactacaaaagagctgactactgagaa

SEQ ID NO: 9621 - DNA, 2050 bp, Homo sapiens
  source 1..2050: mol_type = unassigned DNA
attgctcagcggtgctaggctggcgcggcttgagccgccgccggactgacagctcggtctgcggaccatggagacctgcgccggtccacacccgctgcgcctcttcctctgccggatgcagctctgtctcgcgctgcttttgggaccctggcggcctgggaccgccgaggaagttatcctcctggattccaaagcctcccaggccgagctgggctggactgcactgccaagtaatgggtgggaggagatcagcggcgtggatgaacacgaccgtcccatccgcacgtaccaagtgtgcaatgtgctggagcccaaccaggacaactggctgcagactggctggataagccgtggccgcgggcagcgcatcttcgtggaactgcagttcacactccgtgactgcagcagcatccctggcgccgcgggtacctgcaaggagaccttcaacgtctactacctggaaactgaggccgacctgggccgtgggcgtccccgcctaggcggcagccggccccgcaaaatcgacacgatcgcggcggacgagagcttcacgcagggcgacctgggtgagcgcaagatgaagctgaacacagaggtgcgcgagatcggaccgctcagccggcggggtttccacctggcctttcaggacgtgggcgcatgcgtggcgcttgtctcggtgcgcgtctactacaagcagtgccgcgccaccgtgcggggcctggccacgttcccagccaccgcagccgagagcgccttctccacactggtggaagtggccggaacgtgcgtggcgcactcggaaggggagcctggcagccccccacgcatgcactgcggcgccgacggcgagtggctggtgcctgtgggccgctgcagctgcagcgcgggattccaggagcgtggtgacttctgcgaaggtatccagttggctgggggccgtggggtgggagtgtagagcgtaggtggcaattgagagagagtgtgccctagaggaaagaggcgggtgtggggtcggggggcggtggagaagccttggactctggagcccaaggagagccctgaagtcttgtggagtttccagtgagtccagtcagggccaatgagtgaacttactagatgaaattgactggctaaggaggcattagggatctatatcttaggcaccttgcacaggccttctcgtttatttattttcatggcaataaaggaagtcattgtttttttttttttttaaaataaggagtctctcttgctctgttgcccaggctggagtgcactggcttgatcttggctaactgcaacttccacctcctgggttcaagcaattctcctgcctcagcctcctgagtagctgggattataggcgtgcaccaccatgcccagctaatttttgtatttttagtagagacggggtttcaccatgttggccaggctggtctcaaactcctgacctcaagtgatccacctacctaggccttccagagtgctgggattataggcgtgagccaccgtgcctggcctaaaggaagtcattcttatctctatttcacagatgaagaaacagagcctcagagagattagtacctcacttgcaaagttaggaaatggggagctaggatttgaattcaggcttgcccaactcacattctatgacatcatgaggtctcctcagtgcataaggaagaactctacagcagcccaatcttcaggctagtgggattggttgcattacagagaggaatctcccagtcacggaccaaatacttgcaagttagaggctggcaggggggatttttatgctggagagagggattgggaagttgcactagatgattacgaagatcacatcccactctctgaactacaatcactgtgctccctgggggagatccttcatgttgagggttttgctgggttctcaggctagtgggggcattaggaacagacctctcattctctctcttgcctgtggctttggatacagagggtgatgatggggttattaatgtgtgtacttaatatagaaagatcaaggtatgctttttctaaa

SEQ ID NO: 9622 - DNA, 2258 bp, Homo sapiens
  source 1..2258: mol_type = unassigned DNA
tcctaagaagcactttctgccagcattgttcaacaaaggcagcctcagaagcgggtgaatgcctcatgataaagtatgtgacaaagactgtggctactgctggggaagctgccggaggaccaggccagtgggagctgagctagattatctctgaagcgccctgggaggaggatgagatccgcagggaccgagtggaaccccagagcgtgtccctgtcgtggcgggagcccatccctgccggagcccctggggccaatgacacggagtacgagatccgatactacgagaagggtcagagtgagcagacttactccatggtgaagacaggggcgcccacagtcaccgtcaccaacctgaagccggctacccgctacgtctttcagatccgggccgcttccccggggccatcctgggaggcccagagttttaaccccagcattgaagtacagaccctgggggaggctgcctcagggtccagggaccagagccccgccattgtcgtcaccgtagtgaccatctcggccctcctcgtcctgggctccgtgatgagtgtgctggccatttggaggaggccctgcagctatggcaaaggaggaggggatgcccatgatgaagaggagctgtatttccacttcaaagtcccaacacgtcgcacattcctggacccccagagctgtggggacctgctgcaggctgtgcatctgttcgccaaggaactggatgcgaaaagcgtcacgctggagaggagccttggaggagggcggtttggggagctgtgctgtggctgcttgcagctccccggtcgccaggagctgctcgtagccgtgcatatgctgagggacagcgcctccgactcacagaggctcggcttcctggccgaggccctcacgctgggccagtttgaccatagccacatcgtgcggctggagggcgttgttacccgaggaagcaccttgatgattgtcaccgagtacatgagccatggggccctggacggcttcctcaggcggcacgaggggcagctggtggctgggcaactgatggggttgctgcctgggctggcatcagccatgaagtatctgtcagagatgggctacgttcaccggggcctggcagctcgccatgtgctggtcagcagcgaccttgtctgcaagatctctggcttcgggcggggcccccgggaccgatcagaggctgtctacaccactatgagtggccggagcccagcgctatgggccgctcccgagacacttcagtttggccacttcagctctgccagtgacgtgtggagcttcggcatcatcatgtgggaggtgatggcctttggggagcggccttactgggacatgtctggccaagacgtgatcaaggctgtggaggatggcttccggctgccaccccccaggaactgtcctaaccttctgcaccgactaatgctcgactgctggcagaaggacccaggtgagcggcccaggttctcccagatccacagcatcctgagcaagatggtgcaggacccagagccccccaagtgtgccctgactacctgtcccaggcctcccaccccactagcggaccgtgccttctccaccttcccctcctttggctctgtgggcgcgtggctggaggccctggacctgtgccgctacaaggacagcttcgcggctgctggctatgggagcctggaggccgtggccgagatgactgcccaggacctggtgagcctaggcatctctttggctgaacatcgagaggccctcctcagcgggatcagcgccctgcaggcacgagtgctccagctgcagggccagggggtgcaggataataaaaacttgtctgtgatatggtgcctctttgagtggcagttgcttgatcattgtatagctggtgtggaagggcttctgcccccttcctcgaggacaggggtgtccagaatctgcgtctgagatctctctgcatagagggatttactgtcccacagctctggaggctggaagccaagatcaagatgtgcgcaaggttgtttcctgctgagagctgtgaggggagcttctgctctgggcctctctccccggcttgcctgtggccatcttcccactctctcttcgcatcatcttccctctatgccattgagtgtaagatgtcctaccaagaaagaaacatcacagccaactatgttgtgccatccaactgaaagatgcatcccagtttcagagatgttaacatgtacgtcttcaataaatgagatgccgcgcatc

SEQ ID NO: 9623 - DNA, 5425 bp, Homo sapiens
  source 1..5425: mol_type = unassigned DNA
atggagacctgcgccggtccacacccgctgcgcctcttcctctgccggatgcagctctgtctcgcgctgcttttgggaccctggcggcctgggaccgccgaggaagttatcctcctggattccaaagcctcccaggccgagctgggctggactgcactgccaagtaatgggtgggaggagatcagcggcgtggatgaacacgaccgtcccatccgcacgtaccaagtgtgcaatgtgctggagcccaaccaggacaactggctgcagactggctggataagccgtggccgcgggcagcgcatcttcgtggaactgcagttcacactccgtgactgcagcagcatccctggcgccgcgggtacctgcaaggagaccttcaacgtctactacctggaaactgaggccgacctgggccgtgggcgtccccgcctaggcggcagccggccccgcaaaatcgacacgatcgcggcggacgagagcttcacgcagggcgacctgggtgagcgcaagatgaagctgaacacagaggtgcgcgagatcggaccgctcagccggcggggtttccacctggcctttcaggacgtgggcgcatgcgtggcgcttgtctcggtgcgcgtctactacaagcagtgccgcgccaccgtgcggggcctggccacgttcccagccaccgcagccgagagcgccttctccacactggtggaagtggccggaacgtgcgtggcgcactcggaaggggagcctggcagccccccacgcatgcactgcggcgccgacggcgagtggctggtgcctgtgggccgctgcagctgcagcgcgggattccaggagcgtggtgacttctgcgaagcctgtcccccagggttttacaaggtgtccccgcggcggcccctctgctcaccgtgcccagagcacagccgggccctggaaaacgcctccaccttctgcgtgtgccaggacagctatgcgcgctcacccaccgacccgccctcggcttcctgcacccggccgccgtcggcgccgcgggacctgcagtacagcctgagccgctcgccgctggtgctgcgactgcgctggctgccgccggccgactcgggaggccgctcggacgtcacctactcgctgctgtgcctgcgctgcggccgcgagggcccggcgggcgcctgcgagccgtgcgggccgcgcgtggccttcctaccgcgccaggcagggctgcgggagcgagccgccacgctgctgcacctgcggcccggcgcgcgctacaccgtgcgcgtggccgcgctcaacggcgtctcgggcccggcggccgccgcgggaaccacctacgcgcaggtcaccgtctccaccgggcccggggcgccctgggaggaggatgagatccgcagggaccgagtggaaccccagagcgtgtccctgtcgtggcgggagcccatccctgccggagcccctggggccaatgacacggagtacgagatccgatactacgagaagggtcagagtgagcagacttactccatggtgaagacaggggcgcccacagtcaccgtcaccaacctgaagccggctacccgctacgtctttcagatccgggccgcttccccggggccatcctgggaggcccagagttttaaccccagcattgaagtacagaccctgggggaggctgcctcagggtccagggaccagagccccgccattgtcgtcaccgtagtgaccatctcggccctcctcgtcctgggctccgtgatgagtgtgctggccatttggaggaggccctgcagctatggcaaaggaggaggggatgcccatgatgaagaggagctgtatttccacttcaaagtcccaacacgtcgcacattcctggacccccagagctgtggggacctgctgcaggctgtgcatctgttcgccaaggaactggatgcgaaaagcgtcacgctggagaggagccttggaggagggcggtttggggagctgtgctgtggctgcttgcagctccccggtcgccaggagctgctcgtagccgtgcatatgctgagggacagcgcctccgactcacagaggctcggcttcctggccgaggccctcacgctgggccagtttgaccatagccacatcgtgcggctggagggcgttgttacccgaggaagcaccttgatgattgtcaccgagtacatgagccatggggccctggacggcttcctcaggcggcacgaggggcagctggtggctgggcaactgatggggttgctgcctgggctggcatcagccatgaagtatctgtcagagatgggctacgttcaccggggcctggcagctcgccatgtgctggtcagcagcgaccttgtctgcaagatctctggcttcgggcggggcccccgggaccgatcagaggctgtctacaccactatgagtggccggagcccagcgctatgggccgctcccgagacacttcagtttggccacttcagctctgccagtgacgtgtggagcttcggcatcatcatgtgggaggtgatggcctttggggagcggccttactgggacatgtctggccaagacgtgatcaaggctgtggaggatggcttccggctgccaccccccaggaactgtcctaaccttctgcaccgactaatgctcgactgctggcagaaggacccaggtgagcggcccaggttctcccagatccacagcatcctgagcaagatggtgcaggacccagagccccccaagtgtgccctgactacctgtcccaggcctcccaccccactagcggaccgtgccttctccaccttcccctcctttggctctgtgggcgcgtggctggaggccctggacctgtgccgctacaaggacagcttcgcggctgctggctatgggagcctggaggccgtggccgagatgactgcccaggacctggtgagcctaggcatctctttggctgaacatcgagaggccctcctcagcgggatcagcgccctgcaggcacgagtgctccagctgcagggccagggggtgcaggtgtgagtggaccccattcttccaaggcaggactccggtgggggtccagtcccccagccctgcccaaggaccgtggcaagctgcgctccagcagtgtgggagggagcgctctcttcctctgcttgggcccagatctggtggggccacagcttccccgctttcactgcctgcccctcccattttcacgagtctgaacgccttggctaactcagtgcccctgaaaagaggttcaaatccctagggaggacccctgagataacagcaggaggaaattcggggtctcagagaaaagctggggcagggatgggagggaagacagtgggttgagattgccctggctcatgccctactgccatttgtacccactgggggctggggcctaccccgtggggtgttcccttttcccacagacccattgaccagtcagacagcgtgggtcctgggggggtcttcttctacctggcagtgactgcagctgcctggtggctcaggcgtcgggggctgggccagaggtgcatccacctcagctccctgtgccttggcaggggctgactggacactggccaaggctcaggcaggcaaagatggtgctgagctcaggggctgatacccaagagccctagactcaggatctggtttctgtgtccccctgccttgggctgacagttcagggtgaggccaaaagtcctggccaggccgggccatgagaggccctggtgctccctggggccccatgaggccctcgtgtgcattccttttatgaacttagtggccaggacatctgggaaaagcataaagggccatgttatctccccagggacccaagagcttttctctccagccatggggagggtgaagaggagactcagagatgggtcctctctctcaaacaggctggtctaacccccagtgtacagatgggggaaactgaggccaagtgaggagtcaggagcagagctgaggtcagaacccaatccaggggtaaggctggctctggggagagagtccttggtcctgccctatggcaccaccacttccctgtacagcccttggggactctagaggcgactcccctccagccagctccgtgccttgggcactacccagccttccatggagcccctccctgctctgactttgaagagccctggcagaagtggttgtgctgagcccaccgtggagttccttatccacaagggcccccgggaatggtggggcccagtatgccagagctttcgtagggtggcaggaaggcagctggatctcagcagggccacagggactgagtttgtttaggccgcccgtgacacttgtctgctctgcttggctgtgtgttggtggggtgggatggggcgggaaagaggagacaagaggtaaagatgaaaaagacacacagcctgcccttggggggctcagactagaccaggagaagagctcaggtaccaagaagtaattccagggcaccatccacagtgcccagggccccccaggagccctctgggtcagtgggtaggtgggctggagggggagatagccactctcttaatgtgtgaagttgagatgtaagttgaacagggccttgcaggtgggaaagggaaggttctttccttggggtgggtggagttttcggcaggcaagatggcaggcctcggacaaaaggagtccatgcagagaggctagcatgagaaagagcccagaggcgggaaggtgcagtgcctctttgcagagcacccagaggtgggggacagtgactcacagaggtgcctttggccttaccctgccagcagcagctcccctgctcttggaatctccccccagccccctgcctccctgtctcctgagcacctgccccagctcagtgactctgggggtactggggagaccaagatgttgctaccaccttagtcagggttgggggagcccccggccaggtgccctccaggatccgccttccccacccctcctgggaagcctggaccagcatcccttcttgggtggatggagcctcgtcctcatctccagctacatcagtcattctctgcagggcaaaatctcctccccctaccccagctgtttctgcagaagggcccctggctgtgttggcaggacttcggtgtccagggtagatctcccctccactgaggagtgaggtcccagaatcctgttgggtcccaggcctcagccctgcacagatgtgatgtggggcgatggctctctgggaaccctctacagatctatttttatatggaacttgttcactggacagaggtggcctgcaagcccccattaccctggtctgagctcaccctgggagggagggggccagtcggagggggttccttctggagatgtttttatatttcttgggttctctatgcaggataataaaaacttgtctgtgata

SEQ ID NO: 9624 - DNA, 3461 bp, Homo sapiens
  source 1..3461: mol_type = unassigned DNA
atggagacctgcgccggtccacacccgctgcgcctcttcctctgccggatgcagctctgtctcgcgctgcttttgggaccctggcggcctgggaccgccgaggaagttatcctcctggattccaaagcctcccaggccgagctgggctggactgcactgccaagtaatgggtgggaggagatcagcggcgtggatgaacacgaccgtcccatccgcacgtaccaagtgtgcaatgtgctggagcccaaccaggacaactggctgcagactggctggataagccgtggccgcgggcagcgcatcttcgtggaactgcagttcacactccgtgactgcagcagcatccctggcgccgcgggtacctgcaaggagaccttcaacgtctactacctggaaactgaggccgacctgggccgtgggcgtccccgcctaggcggcagccggccccgcaaaatcgacacgatcgcggcggacgagagcttcacgcagggcgacctgggtgagcgcaagatgaagctgaacacagaggtgcgcgagatcggaccgctcagccggcggggtttccacctggcctttcaggacgtgggcgcatgcgtggcgcttgtctcggtgcgcgtctactacaagcagtgccgcgccaccgtgcggggcctggccacgttcccagccaccgcagccgagagcgccttctccacactggtggaagtggccggaacgtgcgtggcgcactcggaaggggagcctggcagccccccacgcatgcactgcggcgccgacggcgagtggctggtgcctgtgggccgctgcagctgcagcgcgggattccaggagcgtggtgacttctgcgaagcctgtcccccagggttttacaaggtgtccccgcggcggcccctctgctcaccgtgcccagagcacagccgggccctggaaaacgcctccaccttctgcgtgtgccaggacagctatgcgcgctcacccaccgacccgccctcggcttcctgcacccggccgccgtcggcgccgcgggacctgcagtacagcctgagccgctcgccgctggtgctgcgactgcgctggctgccgccggccgactcgggaggccgctcggacgtcacctactcgctgctgtgcctgcgctgcggccgcgagggcccggcgggcgcctgcgagccgtgcgggccgcgcgtggccttcctaccgcgccaggcagggctgcgggagcgagccgccacgctgctgcacctgcggcccggcgcgcgctacaccgtgcgcgtggccgcgctcaacggcgtctcgggcccggcggccgccgcgggaaccacctacgcgcaggtcaccgtctccaccgggcccggggcgccctgggaggaggatgagatccgcagggaccgagtggaaccccagagcgtgtccctgtcgtggcgggagcccatccctgccggagcccctggggccaatgacacggagtacgagatccgatactacgagaagggtcagagtgagcagacttactccatggtgaagacaggggcgcccacagtcaccgtcaccaacctgaagccggctacccgctacgtctttcagatccgggccgcttccccggggccatcctgggaggcccagagttttaaccccagcattgaagtacagaccctgggggaggctgcctcagggtccagggaccagagccccgccattgtcgtcaccgtagtgaccatctcggccctcctcgtcctgggctccgtgatgagtgtgctggccatttggaggaggccctgcagctatggcaaaggaggaggggatgcccatgatgaagaggagctgtatttccacttcaaagtcccaacacgtcgcacattcctggacccccagagctgtggggacctgctgcaggctgtgcatctgttcgccaaggaactggatgcgaaaagcgtcacgctggagaggagccttggaggagggcggtttggggagctgtgctgtggctgcttgcagctccccggtcgccaggagctgctcgtagccgtgcatatgctgagggacagcgcctccgactcacagaggctcggcttcctggccgaggccctcacgctgggccagtttgaccatagccacatcgtgcggctggagggcgttgttacccgaggaagcaccttgatgattgtcaccgagtacatgagccatggggccctggacggcttcctcaggcggcacgaggggcagctggtggctgggcaactgatggggttgctgcctgggctggcatcagccatgaagtatctgtcagagatgggctacgttcaccggggcctggcagctcgccatgtgctggtcagcagcgaccttgtctgcaagatctctggcttcgggcggggcccccgggaccgatcagaggctgtctacaccactatgagtggccggagcccagcgctatgggccgctcccgagacacttcagtttggccacttcagctctgccagtgacgtgtggagcttcggcatcatcatgtgggaggtgatggcctttggggagcggccttactgggacatgtctggccaagacgtgatcaaggctgtggaggatggcttccggctgccaccccccaggaactgtcctaaccttctgcaccgactaatgctcgactgctggcagaaggacccaggtgagcggcccaggttctcccagatccacagcatcctgagcaagatggtgcaggacccagagccccccaagtgtgccctgactacctgtcccaggcctcccaccccactagcggaccgtgccttctccaccttcccctcctttggctctgtgggcgcgtggctggaggccctggacctgtgccgctacaaggacagcttcgcggctgctggctatgggagcctggaggccgtggccgagatgactgcccaggacctggtgagcctaggcatctctttggctgaacatcgagaggccctcctcagcgggatcagcgccctgcaggcacgagtgctccagctgcagggccagggggtgcaggtgataataaaaacttgtctgtgatatggtgcctctttgagtggcagttgcttgatcattgtatagctggtgtggaagggcttctgcccccttcctcgaggacaggggtgtccagaatctgcgtctgagatctctctgcatagagggatttactgtcccacagctctggaggctggaagccaagatcaagatgtgcgcaaggttgtttcctgctgagagctgtgaggggagcttctgctctgggcctctctccccggcttgcctgtggccatcttcccactctctcttcgcatcatcttccctctatgccattgagtgtaagatgtcctaccaagaaagaaacatcacagccaactatgttgtgccatccaactgaaagatgcatcccagtttcagagatgttaacatgtacgtcttcaataaatgagatgccgcgcatc

SEQ ID NO: 9625 - DNA, 2332 bp, Homo sapiens
  source 1..2332: mol_type = unassigned DNA
gcgcaggtcaccgtctccaccgggcccggggcgccctgggaggaggatgagatccgcagggaccgagtggaaccccagagcgtgtccctgtcgtggcgggagcccatccctgccggagcccctggggccaatgacacggagtacgagatccgatactacgagaagggtcagagtgagcagacttactccatggtgaagacaggggcgcccacagtcaccgtcaccaacctgaagccggctacccgctacgtctttcagatccgggccgcttccccggggccatcctgggaggcccagagttttaaccccagcattgaagtacagaccctgggggaggctgcctcagggtccagggaccagagccccgccattgtcgtcaccgtagtgaccatctcggccctcctcgtcctgggctccgtgatgagtgtgctggccatttggaggaggccctgcagctatggcaaaggaggaggggatgcccatgatgaagaggagctgtatttccacttcaaagtcccaacacgtcgcacattcctggacccccagagctgtggggacctgctgcaggctgtgcatctgttcgccaaggaactggatgcgaaaagcgtcacgctggagaggagccttggaggaggcttggaaacctccccccactgaggaaggcagagaggaatccccatttcacagaggagacaggccaagaaaaggaaagagatggaattcgaggtcacactgctggtactcagtttaccaggatttaagctggaaacagtccatgatctggagtcacttttttttttgagaccgagtcttgctctgtcacccagtctgaagtgcagtggcacaatctcagctcactgaaacctctgcctcctgggttcaagtgattttcctgcctcagcttctcaagtagctgggattacagggcggtttggggagctgtgctgtggctgcttgcagctccccggtcgccaggagctgctcgtagccgtgcatatgctgagggacagcgcctccgactcacagaggctcggcttcctggccgaggccctcacgctgggccagtttgaccatagccacatcgtgcggctggagggcgttgttacccgaggaagcaccttgatgattgtcaccgagtacatgagccatggggccctggacggcttcctcaggcggcacgaggggcagctggtggctgggcaactgatggggttgctgcctgggctggcatcagccatgaagtatctgtcagagatgggctacgttcaccggggcctggcagctcgccatgtgctggtcagcagcgaccttgtctgcaagatctctggcttcgggcggggcccccgggaccgatcagaggctgtctacaccactatgagtggccggagcccagcgctatgggccgctcccgagacacttcagtttggccacttcagctctgccagtgacgtgtggagcttcggcatcatcatgtgggaggtgatggcctttggggagcggccttactgggacatgtctggccaagacgtgatcaaggctgtggaggatggcttccggctgccaccccccaggaactgtcctaaccttctgcaccgactaatgctcgactgctggcagaaggacccaggcctcccaccccactagcggaccgtgccttctccaccttcccctcctttggctctgtgggcgcgtggctggaggccctggacctgtgccgctacaaggacagcttcgcggctgctggctatgggagcctggaggccgtggccgagatgactgcccaggacctggtgagcctaggcatctctttggctgaacatcgagaggccctcctcagcgggatcagcgccctgcaggcacgagtgctccagctgcagggccagggggtgcaggtgataataaaaacttgtctgtgatatggtgcctctttgagtggcagttgcttgatcattgtatagctggtgtggaagggcttctgcccccttcctcgaggacaggggtgtccagaatctgcgtctgagatctctctgcatagagggatttactgtcccacagctctggaggctggaagccaagatcaagatgtgcgcaaggttgtttcctgctgagagctgtgaggggagcttctgctctgggcctctctccccggcttgcctgtggccatcttcccactctctcttcgcatcatcttccctctatgccattgagtgtaagatgtcctaccaagaaagaaacatcacagccaactatgttgtgccatccaactgaaagatgcatcccagtttcagagatgttaacatgtacgtcttcaataaatgagatgccgcgcatc

SEQ ID NO: 9626 - DNA, 3964 bp, Homo sapiens
  source 1..3964: mol_type = unassigned DNA
ggttctcacccaacttccattaaggactcggggcaggaggggcagaagttgcgcgcaggccggcgggcgggagcggacaccgaggccggcgtgcaggcgtgcgggtgtgcgggagccgggctcggggggatcggaccgagagcgagaagcgcggcatggagctccaggcagcccgcgcctgcttcgccctgctgtggggctgtgcgctggccgcggccgcggcggcgcagggcaaggaagtggtactgctggactttgctgcagctggaggggagctcggctggctcacacacccgtatggcaaagggtgggacctgatgcagaacatcatgaatgacatgccgatctacatgtactccgtgtgcaacgtgatgtctggcgaccaggacaactggctccgcaccaactgggtgtaccgaggagaggctgagcgtatcttcattgagctcaagtttactgtacgtgactgcaacagcttccctggtggcgccagctcctgcaaggagactttcaacctctactatgccgagtcggacctggactacggcaccaacttccagaagcgcctgttcaccaagattgacaccattgcgcccgatgagatcaccgtcagcagcgacttcgaggcacgccacgtgaagctgaacgtggaggagcgctccgtggggccgctcacccgcaaaggcttctacctggccttccaggatatcggtgcctgtgtggcgctgctctccgtccgtgtctactacaagaagtgccccgagctgctgcagggcctggcccacttccctgagaccatcgccggctctgatgcaccttccctggccactgtggccggcacctgtgtggaccatgccgtggtgccaccggggggtgaagagccccgtatgcactgtgcagtggatggcgagtggctggtgcccattgggcagtgcctgtgccaggcaggctacgagaaggtggaggatgcctgccaggcctgctcgcctggattttttaagtttgaggcatctgagagcccctgcttggagtgccctgagcacacgctgccatcccctgagggtgccacctcctgcgagtgtgaggaaggcttcttccgggcacctcaggacccagcgtcgatgccttgcacacgacccccctccgccccacactacctcacagccgtgggcatgggtgccaaggtggagctgcgctggacgccccctcaggacagcgggggccgcgaggacattgtctacagcgtcacctgcgaacagtgctggcccgagtctggggaatgcgggccgtgtgaggccagtgtgcgctactcggagcctcctcacggactgacccgcaccagtgtgacagtgagcgacctggagccccacatgaactacaccttcaccgtggaggcccgcaatggcgtctcaggcctggtaaccagccgcagcttccgtactgccagtgtcagcatcaaccagacagagccccccaaggtgaggctggagggccgcagcaccacctcgcttagcgtctcctggagcatccccccgccgcagcagagccgagtgtggaagtacgaggtcacttaccgcaagaagggagactccaacagctacaatgtgcgccgcaccgagggtttctccgtgaccctggacgacctggccccagacaccacctacctggtccaggtgcaggcactgacgcaggagggccagggggccggcagcaaggtgcacgaattccagacgctgtccccggagggatctggcaacttggcggtgattggcggcgtggctgtcggtgtggtcctgcttctggtgctggcaggagttggcttctttatccaccgcaggaggaagaaccagcgtgcccgccagtccccggaggacgtttacttctccaagtcagaacaactgaagcccctgaagacatacgtggacccccacacatatgaggaccccaaccaggctgtgttgaagttcactaccgagatccatccatcctgtgtcactcggcagaaggtgatcggagcaggagagtttggggaggtgtacaagggcatgctgaagacatcctcggggaagaaggaggtgccggtggccatcaagacgctgaaagccggctacacagagaagcagcgagtggacttcctcggcgaggccggcatcatgggccagttcagccaccacaacatcatccgcctagagggcgtcatctccaaatacaagcccatgatgatcatcactgagtacatggagaatggggccctggacaagttccttcgggagaaggatggcgagttcagcgtgctgcagctggtgggcatgctgcggggcatcgcagctggcatgaagtacctggccaacatgaactatgtgcaccgtgacctggctgcccgcaacatcctcgtcaacagcaacctggtctgcaaggtgtctgactttggcctgtcccgcgtgctggaggacgaccccgaggccacctacaccaccagtggcggcaagatccccatccgctggaccgccccggaggccatttcctaccggaagttcacctctgccagcgacgtgtggagctttggcattgtcatgtgggaggtgatgacctatggcgagcggccctactgggagttgtccaaccacgaggtgatgaaagccatcaatgatggcttccggctccccacacccatggactgcccctccgccatctaccagctcatgatgcagtgctggcagcaggagcgtgcccgccgccccaagttcgctgacatcgtcagcatcctggacaagctcattcgtgcccctgactccctcaagaccctggctgactttgacccccgcgtgtctatccggctccccagcacgagcggctcggagggggtgcccttccgcacggtgtccgagtggctggagtccatcaagatgcagcagtatacggagcacttcatggcggccggctacactgccatcgagaaggtggtgcagatgaccaacgacgacatcaagaggattggggtgcggctgcccggccaccagaagcgcatcgcctacagcctgctgggactcaaggaccaggtgaacactgtggggatccccatctgagcctcgacagggcctggagccccatcggccaagaatacttgaagaaacagagtggcctccctgctgtgccatgctgggccactggggactttatttatttctagttctttcctccccctgcaacttccgctgaggggtctcggatgacaccctggcctgaactgaggagatgaccagggatgctgggctgggccctctttccctgcgagacgcacacagctgagcacttagcaggcaccgccacgtcccagcatccctggagcaggagccccgccacagccttcggacagacatatgggatattcccaagccgaccttccctccgccttctcccacatgaggccatctcaggagatggagggcttggcccagcgccaagtaaacagggtacctcaagccccatttcctcacactaagagggcagactgtgaacttgactgggtgagacccaaagcggtccctgtccctctagtgccttctttagaccctcgggccccatcctcatccctgactggccaaacccttgctttcctgggcctttgcaagatgcttggttgtgttgaggtttttaaatatatattttgtactttgtggagagaatgtgtgtgtgtggcagggggccccgccagggctggggacagagggtgtcaaacattcgtgagctggggactcagggaccggtgctgcaggagtgtcctgcccatgccccagtcggccccatctctcatccttttggataagtttctattctgtcagtgttaaagattttgttttgttggacatttttttcgaatcttaatttattattttttttatatttattgttagaaaatgacttatttctgctctggaataaagttgcagatgattcaaaccga

SEQ ID NO: 9627 - DNA, 5809 bp, Homo sapiens
  source 1..5809: mol_type = unassigned DNA
cccgctctgcttcagcgcacgctgaagacggcactaggacccagggaagtccccgagcggggttcgcggaaaggcagccagactcctccttatctccagtgtcaaacttgacatcagcctgcgagcggagcatggtaacttctccagcaatcagagcgctccccctcacatcagtggcatgcttcatggagatatgctcctctcactgccctctgcaccagcaacatggattgtcagctctccatcctcctccttctcagctgctctgttctcgacagcttcggggaactgattccgcagccttccaatgaagtcaatctactggattcaaaaacaattcaaggggagctgggctggatctcttatccatcacatgggtgggaagagatcagtggtgtggatgaacattacacacccatcaggacttaccaggtgtgcaatgtcatggaccacagtcaaaacaattggctgagaacaaactgggtccccaggaactcagctcagaagatttatgtggagctcaagttcactctacgagactgcaatagcattccattggttttaggaacttgcaaggagacattcaacctgtactacatggagtctgatgatgatcatggggtgaaatttcgagagcatcagtttacaaagattgacaccattgcagctgatgaaagtttcactcaaatggatcttggggaccgtattctgaagctcaacactgagattagagaagtaggtcctgtcaacaagaagggattttatttggcatttcaagatgttggtgcttgtgttgccttggtgtctgtgagagtatacttcaaaaagtgcccatttacagtgaagaatctggctatgtttccagacacggtacccatggactcccagtccctggtggaggttagagggtcttgtgtcaacaattctaaggaggaagatcctccaaggatgtactgcagtacagaaggcgaatggcttgtacccattggcaagtgttcctgcaatgctggctatgaagaaagaggttttatgtgccaagcttgtcgaccaggtttctacaaggcattggatggtaatatgaagtgtgctaagtgcccgcctcacagttctactcaggaagatggttcaatgaactgcaggtgtgagaataattacttccgggcagacaaagaccctccatccatggcttgtacccgacctccatcttcaccaagaaatgttatctctaatataaacgagacctcagttatcctggactggagttggcccctggacacaggaggccggaaagatgttaccttcaacatcatatgtaaaaaatgtgggtggaatataaaacagtgtgagccatgcagcccaaatgtccgcttcctccctcgacagtttggactcaccaacaccacggtgacagtgacagaccttctggcacatactaactacacctttgagattgatgccgttaatggggtgtcagagctgagctccccaccaagacagtttgctgcggtcagcatcacaactaatcaggctgctccatcacctgtcctgacgattaagaaagatcggacctccagaaatagcatctctttgtcctggcaagaacctgaacatcctaatgggatcatattggactacgaggtcaaatactatgaaaagcaggaacaagaaacaagttataccattctgagggcaagaggcacaaatgttaccatcagtagcctcaagcctgacactatatacgtattccaaatccgagcccgaacagccgctggatatgggacgaacagccgcaagtttgagtttgaaactagtccagactctttctccatctctggtgaaagtagccaagtggtcatgatcgccatttcagcggcagtagcaattattctcctcactgttgtcatctatgttttgattgggaggttctgtggctataagtcaaaacatggggcagatgaaaaaagacttcattttggcaatgggcatttaaaacttccaggtctcaggacttatgttgacccacatacatatgaagaccctacccaagctgttcatgagtttgccaaggaattggatgccaccaacatatccattgataaagttgttggagcaggtgaatttggagaggtgtgcagtggtcgcttaaaacttccttcaaaaaaagagatttcagtggccattaagaccctgaaagttggctacacagaaaagcagaggagagacttcctgggagaagcaagcattatgggacagtttgaccaccccaatatcattcgactggaaggagttgttaccaaaagtaagccagttatgattgtcacagaatacatggagaatggttccttggatagtttcctacgtaaacacgatgcccagtttactgtcattcagctagtggggatgcttcgagggatagcatctggcatgaagtacctgtcagacatgggctatgttcaccgagacctcgctgctcggaacatcttgatcaacagtaacttggtgtgtaaggtttctgatttcggactttcgcgtgtcctggaggatgacccagaagctgcttatacaacaagaggagggaagatcccaatcaggtggacatcaccagaagctatagcctaccgcaagttcacgtcagccagcgatgtatggagttatgggattgttctctgggaggtgatgtcttatggagagagaccatactgggagatgtccaatcaggatgtaattaaagctgtagatgagggctatcgactgccaccccccatggactgcccagctgccttgtatcagctgatgctggactgctggcagaaagacaggaacaacagacccaagtttgagcagattgttagtattctggacaagcttatccggaatcccggcagcctgaagatcatcaccagtgcagccgcaaggccatcaaaccttcttctggaccaaagcaatgtggatatcactaccttccgcacaacaggtgactggcttaatggtgtctggacagcacactgcaaggaaatcttcacgggtgtggagtacagttcttgtgacacaatagccaagatttccacagatgacatgaaaaaggttggtgtcaccgtggttgggccacagaagaagatcatcagtagcattaaagctctagaaacgcaatcaaagaatggcccagttcccgtgtaaagcacgggacggaagtgcttctggacggaagtggtggctgtggaaggcgtagcatcatcctgcagacagacaataattctggagatactggtggaagttccaagtccaataagacactcaaatatgagtacaaatgccttaaaatggaattgaaaaactctttattttcccctatcatttattggatgggtgggtggggtatttttttgtaattgcttttttaaatattagttaatggattaaatttaattcttcagcgtaaaatggtgaagaactagcatatagccattgatcataaactgactatcataaaatcaaaacaagtgaaataacaaaatggacatggtggctttgtttaggtagagccacaaaagaaaagacttgtaatatttttatatacagaggaaatctgtaacaggtattttgtttcttttaaagcaagcaacacagaggaatttatacctcaaactatctggccatatttactaccttatcactgcattattctcttttatctgtttaaagcatatagagatgaagtttgtagttgttttaagtactacacatttttaaattgttagcttccttaagtatatcatgtaaagaaatgtcttaatttttgaaaaaagtacatatttattttcttttgaattgtttttattgttttctatttatgccttgatgatttaatatggatttgttacagccaagtgccaaatgctctctcaaattgtcagcaatttaactagacacagataataatgggtttctttcagattttttgaaccatccacttacatatatttttaaaaaatgaaatccttttcctgttcatacactaaccaaatctctcaaatctgttatcccaatcattgttgcctctccgtttattataaactgtatgctcacaacttagtgtaatataccagcttgtatgcaatggattttcaaccagataacatacctttcctgctctggtgcttagagactatcaactccctcctttagtgaaggagccgtgttagagcttccgagaatagctccactggagagaagtggaatcctatatagaatgctgcactaattgacaacacagcctataggccaatgcatgagtaaaaaaaaaaacaattactggctcactggctttgaaaagtcacttactattgttgctgaaacttgctgagctgtttatagagaatgatgataacagaacttttcctctgtatcactggtgtttaggtgaattaattaaacattgtgatcattagtaccaggtattattatctttaagagtcttccacttcaatgcacatggtgcagttttggtgtgtaacttagaaggattgaacttctttgaatttactggacataacattttcagaatagttggtcatctagcaaccgcctcaaaatgtgtaagcaggagagaaatttctcatcacagggatttagacttactattacataaaggctaactatgagcttgctcattaattttgaaaagatgtacctggtggatatctagctagtaatatattctgaagcaacattttagctctattgatactctttctaatgctgatatgatcttgagtataagaaatgcatatgtcactagaatggataaaataatgctgcaaacttaatgttcttatgcaaaatggaacgctaatgaaacacagcttacaatcgcaaatcaaaactcacaagtgctcatctgttgtagatttagtgtaataagacttagattgtgctccttcggatatgattgtttctcaaatcttggcaatattccttagtcaaatcaggctactagaattctgtattggatatataagagcatgaaatttttaaaaatacacttgtgattataaaattaatcacaaatttcacttatacctgctatcagcagctagaaaacattttttttttaaatcaagtattttgtgtttggaatgttagaatgagatctgaatgtggtttcaatctaattttttcccagactactattttcttttttaggtactattctgagcatactcaacaaaacccatgcatttcataaactaatagaagttgaggattgttgaatctatttcacttattttggctgtggtttccatctgaaagtagaggttgtatacaccatatactgttcttcattttattaatatttttctccttgacctctcataaatttactttacacaattcttaccctgtacatatgtaaacataagtgtacgattcttaaccatggagtagaggtactagaatgcttacggccatctctttgtacaggaactgcattgactttcagtaaacataaagccacaactcctacatgatgttatgtaccatatgatctgttttgtatcttaaatttgatttacatatattatttatttctggtaactcactcagtttatgctgtgctaaatatcaatcaagccatgtataaatgtgatatgattggcaatatgtgtttactttaaacttgtcttttcaaaatattactcagtttatgttgtacaatgtagatggcctcttactaatgtaaaatgatttgtagtggaaacatttatatttttataataaacataatgaaaatattttttacagattggaa

SEQ ID NO: 9628 - DNA, 2546 bp, Homo sapiens
  source 1..2546: mol_type = unassigned DNA
cttctccagcaatcagagcgctccccctcacatcagtggcatgcttcatggagatatgctcctctcactgccctctgcaccagcaacatggattgtcagctctccatcctcctccttctcagctgctctgttctcgacagcttcggggaactgattccgcagccttccaatgaagtcaatctactggattcaaaaacaattcaaggggagctgggctggatctcttatccatcacatgggtgggaagagatcagtggtgtggatgaacattacacacccatcaggacttaccaggtgtgcaatgtcatggaccacagtcaaaacaattggctgagaacaaactgggtccccaggaactcagctcagaagatttatgtggagctcaagttcactctacgagactgcaatagcattccattggttttaggaacttgcaaggagacattcaacctgtactacatggagtctgatgatgatcatggggtgaaatttcgagagcatcagtttacaaagattgacaccattgcagctgatgaaagtttcactcaaatggatcttggggaccgtattctgaagctcaacactgagattagagaagtaggtcctgtcaacaagaagggattttatttggcatttcaagatgttggtgcttgtgttgccttggtgtctgtgagagtatacttcaaaaagtgcccatttacagtgaagaatctggctatgtttccagacacggtacccatggactcccagtccctggtggaggttagagggtcttgtgtcaacaattctaaggaggaagatcctccaaggatgtactgcagtacagaaggcgaatggcttgtacccattggcaagtgttcctgcaatgctggctatgaagaaagaggttttatgtgccaagcttgtcgaccaggtttctacaaggcattggatggtaatatgaagtgtgctaagtgcccgcctcacagttctactcaggaagatggttcaatgaactgcaggtgtgagaataattacttccgggcagacaaagaccctccatccatggcttgtacccgacctccatcttcaccaagaaatgttatctctaatataaacgagacctcagttatcctggactggagttggcccctggacacaggaggccggaaagatgttaccttcaacatcatatgtaaaaaatgtgggtggaatataaaacagtgtgagccatgcagcccaaatgtccgcttcctccctcgacagtttggactcaccaacaccacggtgacagtgacagaccttctggcacatactaactacacctttgagattgatgccgttaatggggtgtcagagctgagctccccaccaagacagtttgctgcggtcagcatcacaactaatcaggctgctccatcacctgtcctgacgattaagaaagatcggacctccagaaatagcatctctttgtcctggcaagaacctgaacatcctaatgggatcatattggactacgaggtcaaatactatgaaaagcaggaacaagaaacaagttataccattctgagggcaagaggcacaaatgttaccatcagtagcctcaagcctgacactatatacgtattccaaatccgagcccgaacagccgctggatatgggacgaacagccgcaagtttgagtttgaaactagtccagactgtatgtattatttcaatgcagtctagaggagggggcagggatcttgcaaaagatgtctgatcgtttattctcactgtttctaagttttaaacaaatgtgatacatttaaggtatattgcttgggacattgcaatttgcagagccctgtgtctgtatacagtatttgtgtttgtgtgggtgtacattttgtgtttctttttttcttgtatgcaaatcaaacatattctaatgcctgaaatgcttctgttttttttttttagccataaattgcttttgaggaacattatttaatatagtaacacacttccagtgtctgtcatttcagatattccaggttcattgcgtgattcaatgaaccacaaaaaagaaacttgctgatccatgagaatcttaattttgttttaatccttaacacattcaatagcatatcacagagagaataaggattttctaaaatgtgttttatcacttcattcacattcagaagtaatttgaatagcctgttcctttaaccccaaatttggctaaaattggcctaaaactggcaaacatttttccagtaacttttctttttttcaaatgaattttcttcatacttaaaaaagccctttgctaaaatataattttcaaaaaggtaaaattatgtctatggcactaatataaaatgagtagaagttaatgattttacttaactcatttttttctttctttctttttttttttttttttttgagacggagtcttgctctgtcacccaggctggagtacagcagagcgatctcggctcactgcaagctcctgcaagctccgcctcctggcttcacgccattctccccctcagcctcccgagtagctgggactacag

SEQ ID NO: 9629 - DNA, 8266 bp, Homo sapiens
  source 1..8266: mol_type = unassigned DNA
tccctcccctcttcagcactcagcccgcagctatttccttctgccagtctctttgaactctggatctttgcttttgctcgctgctctcctgtttttcattctccacattttctcaagtcctctttctttatccttagccaccctgcttttttcctccttttttaaaaaatcggagatttcgtcttaaaatgatttgccttccttaccttcgtccatttcaacactgaaggctgcaaagaaccttcacctttcccctagtggtatttaaaaattctcaatccgtaaaaagtctttttgaaaggcaaaggaacaggacccaggaccctctcgacacccttgatccgagtccagatctgcactagcaaccagaactaatatttcatttaaccccaccaaagggggaggcgagaggagccagaagcaaacttcagctgtctcagccggatccgtggttcctacatttggaggagccgcgtgccagaaggcgtaggaccccaaggggggacaaggaggactcccgagtctcccttcgccgctctgcgaggccgaagcggtggactgagccgctcgggacagcggcaccggaggaggctcggagaagatgcggggctcggggccccggggtgcgggacgccggcggcccccaagcggcggcggcgacacccccatcaccccagcgtccctggccggctgctactctgcacctcgacgggctcccctctggacgtgccttctcctgtgcgccgcactccggaccctcctggccagccccagcaacgaagtgaatttattggattcacgcactgtcatgggggacctgggatggattgcttttccaaaaaatgggtgggaagagattggtgaagtggatgaaaattatgcccctatccacacataccaagtatgcaaagtgatggaacagaatcagaataactggcttttgaccagttggatctccaatgaaggtgcttccagaatcttcatagaactcaaatttaccctgcgggactgcaacagccttcctggaggactggggacctgtaaggaaacctttaatatgtattactttgagtcagatgatcagaatgggagaaacatcaaggaaaaccaatacatcaaaattgataccattgctgccgatgaaagctttacagaacttgatcttggtgaccgtgttatgaaactgaatacagaggtcagagatgtaggacctctaagcaaaaagggattttatcttgcttttcaagatgttggtgcttgcattgctctggtttctgtgcgtgtatactataaaaaatgcccttctgtggtacgacacttggctgtcttccctgacaccatcactggagctgattcttcccaattgctcgaagtgtcaggctcctgtgtcaaccattctgtgaccgatgaacctcccaaaatgcactgcagcgccgaaggggagtggctggtgcccatcgggaaatgcatgtgcaaggcaggatatgaagagaaaaatggcacctgtcaagtgtgcagacctgggttcttcaaagcctcacctcacatccagagctgcggcaaatgtccacctcacagttatacccatgaggaagcttcaacctcttgtgtctgtgaaaaggattatttcaggagagagtctgatccacccacaatggcatgcacaagacccccctctgctcctcggaatgccatctcaaatgttaatgaaactagtgtctttctggaatggattccgcctgctgacactggtggaaggaaagacgtgtcatattatattgcatgcaagaagtgcaactcccatgcaggtgtgtgtgaggagtgtggcggtcatgtcaggtaccttccccggcaaagcggcctgaaaaacacctctgtcatgatggtggatctactcgctcacacaaactatacctttgagattgaggcagtgaatggagtgtccgacttgagcccaggagcccggcagtatgtgtctgtaaatgtaaccacaaatcaagcagctccatctccagtcaccaatgtgaaaaaagggaaaattgcaaaaaacagcatctctttgtcttggcaagaaccagatcgtcccaatggaatcatcctagagtatgaaatcaagtattttgaaaaggaccaagagaccagctacacgattatcaaatctaaagagacaactattactgcagagggcttgaaaccagcttcagtttatgtcttccaaattcgagcacgtacagcagcaggctatggtgtcttcagtcgaagatttgagtttgaaaccaccccagtgtttgcagcatccagcgatcaaagccagattcctgtaattgctgtgtctgtgacagtgggagtcattttgttggcagtggttatcggcgtcctcctcagtggaagttgctgcgaatgtggctgtgggagggcttcttccctgtgcgctgttgcccatccaagcctaatatggcggtgtggctacagcaaagcaaaacaagatccagaagaggaaaagatgcattttcataatgggcacattaaactgccaggagtaagaacttacattgatccacatacctatgaggatcccaatcaagctgtccacgaatttgctaaggagatagaagcatcatgtatcaccattgagagagttattggagcaggtgaatttggtgaagtttgtagtggacgtttgaaactaccaggaaaaagagaattacctgtggctatcaaaacccttaaagtaggctatactgaaaagcaacgcagagatttcctaggtgaagcaagtatcatgggacagtttgatcatcctaacatcatccatttagaaggtgtggtgaccaaaagtaaaccagtgatgatcgtgacagagtatatggagaatggctctttagatacatttttgaagaaaaacgatgggcagttcactgtgattcagcttgttggcatgctgagaggtatctctgcaggaatgaagtacctttctgacatgggctatgtgcatagagatcttgctgccagaaacatcttaatcaacagtaaccttgtgtgcaaagtgtctgactttggactttcccgggtactggaagatgatcccgaggcagcctacaccacaaggggaggaaaaattccaatcagatggactgccccagaagcaatagctttccgaaagtttacttctgccagtgatgtctggagttatggaatagtaatgtgggaagttgtgtcttatggagagagaccctactgggagatgaccaatcaagatgtgattaaagcggtagaggaaggctatcgtctgccaagccccatggattgtcctgctgctctctatcagttaatgctggattgctggcagaaagagcgaaatagcaggcccaagtttgatgaaatagtcaacatgttggacaagctgatacgtaacccaagtagtctgaagacgctggttaatgcatcctgcagagtatctaatttattggcagaacatagcccactaggatctggggcctacagatcagtaggtgaatggctagaggcaatcaagatgggccggtatacagagattttcatggaaaatggatacagttcaatggacgctgtggctcaggtgaccttggaggatttgagacggcttggagtgactcttgtcggtcaccagaagaagatcatgaacagccttcaagaaatgaaggtgcagctggtaaacggaatggtgccattgtaacttcatgtaaatgtcgcttcttcaagtgaatgattctgcactttgtaaacagcactgagatttattttaacaaaaaaagggggaaaagggaaaacagtgatttctaaaccttagaaaacatttgcctcagccacagaatttgtaatcatggttttactgaagtatccagttcttagtccttagtcttcatttttcatgaagcaaacatatcttgcattaaaagggacatgaagttagacatcatcttaagttacaacaacagaatccttcccactacttctacaaaattttgtacatgaaatatataattatatagcacttttatagactgaattaaggcaacccctttcaaaacttccagggatctacttgaaaggaaatgttttatagccatttgtgagctaacaaaagctacagtttactgaagtttacttcaagtcttaattgtctacaaaagtgtattgaagagcaatatgattagattatttcttaatagatatcttcttttgtaattttaaaatgctgttacacagcgttaagttatagaaactagtgtgtaaacatgttgcttgatcaagaaaaagtacaatacagggtgtatatttattttttgtgttataaagtttacttttagttgctcttctagagattattaggtaataaatgtgtatatactgtataatttgcaatatacccaggaactgatttaagatggaattgtgtgtgtgtttgcttgcacatgtgtgtgttaccattctgcttgcatttctaatagtgtttcaattttagcaacatataggagcaagtgttccagaatgtaatatgaataggagaaatagggaagcagtaaaacaaaatttaacacaagcttgtgtctcttttcctctcatgtgtccaaaagctaatctctttattcactaaaaggaaatgtgtataagactaaatcccctttggctttttaaaaacattttgtgatatcagtgacaatgcagttcttctagccattaatcttgtacccctgtaagaaatttcacctttctgagtcctgaaaagtatcttgtcaagcaaagttgacaccgaagggcacattttcagcaggatgtagaaggatttaactgtgcaggcttctgttaatgttgttaaatccaggcacatagcacgaagcatcacccttaagtgttaatccgttgtaaccattcccattttgactcagttctagaaattttgactctaaggcagcaatggaattatgacaaatatatatatatacacatacacacacacaaatatatatatatgcttatttcccttcagaattttatttcaataattgataagttttatttttaatggatgtttattcatttgttaatttcagtttgtattcagttacatggctttgagtttattttattgaaccaatccaaggtattatgtaattaggcttattaaggaatataacatatcttctatgtatgctctatataccacacatgatgaagacttatatttgtgatacaaattatgcagtgtattagaaattgtccaaaactgagctcctgagataaccaacatttttgtattattacactttataaaaattatggaatgtcatgtgattagtcaaaatcagagcatttaaataaaatacagcctactcatgattatcaatgttaatagtacagtagatcagagaagcctggattaatgaaatttatcagaaatatagccacgttatattaatggtattcttttttccaagcacttgttttatttgaatattagcacatataagaataaacttttgggaaataactacttcctattctgcccaccctttacttaagcagtaaagtacctcttttctaaagaaccaggaaacatcaaaataaccacaacaaaaatctaaacagttttcaaataatacattcagttctcataataataagggctatataccatgggtccacacaaactgtgctgcaaacatataatctattagtttagtaaaatttccagagatgtgaatttaatattttcttgataaaatcataaaaaagcatcaccattattaaagatgcatttgttcatttcaataaacagaaattaatgaaacaaattacttttgtacaaaataaatgatgattatgtggcactttattgaattttatagaaatattccaatctaagtgataaagtaacaactgagaaacttcagaatgaaagccttattgattcaaaaggaaaattaccatatgctttagggctgatgaacttgccacaattgcttagacataacaaagatattttctacattgttttccaactttatatgctgaaagataattaggaggtccgggtggagtgtatctaaatgactagaactttaagttgcaatatagattttctctttttaacaaaggaagaatataaattaatttggatcaaatttatttgccttctttgcaatcttggtgatcattttggaaagtaaattgaaaggaaagttaaatagccacatagttttcttttgcatctcaatttggttgagaatttctaaggaaggttaatatgactttagaatgaataaagagactgtcaaacaacaagtactctccctaaaaaagaggaaagaatgccttcctaaaatatttgtttcctattgtatatgtcaccaattggaaaatgccaatctcatctgcaagtgtgagaaatggaacaaggagaggagccaactctagtaaaatgtagtgaggccataatccaaggcaaagtttaacaaatcttgattgtgtaatttcttattctgttgattcattttgtcacccaccagactaccaaaaataaagcacagacatgacaattttagtatatacaacagatttggcaaataatacataatcttattgtaattgccagtagcaatatcttaaggggcatgagtctttcacagtattggactttgaaaaattggtacagggagtaattttcaacagactgatacttgaagtcactcaattactactttgacctatcataatttgtttctaatcttgtcatttgctcatatatactattaatataaccagttgctcttttcataatgtactatttctatgtaaagatgtaaagattttgattttcctatgttttaaaattgtaatgtgcatgatcttttatttcttgtgtttcaattaccaagtcagtattctaaggttgtaagattactgtaaaaattatattccaatattttatctaaacttaagtgtggccagcattattggtttcagagttgcctaaacaacacagaatatccttaattcagtttgtaaaagagttttgaccagtgtaaaaaagtgaagacacagtttcatgtttcaagtttaaaatggaaagttaatatcatttgagcacttatgtgttttcatgtcttctacttaatctgtatgtgaaagtaaaatatttttaacaccattatttatgccatgtaaagtgggttctcagaagcacaagcacagatatttaccttctgaagacatttttggctataaaagtgcattggatggcaaacactatttgagtcaggtgttagaaatttattagatgtattatattacatagtagaataaggtccctttctcattttgtttttcctaaaaataagaaaaaaaagaagtgtgatagtaaactgtctttgctaatgtcctgccagatgtttaacttcaaattaagcaaaaagtaggtacaatatgatgatgatcctgatgatgatgatgatgatgatgatgaagaataaatggaatcaaaatgctagctttatttgacattaataagtaaaataagtcatcattttttcaactctgtagcacagctgtttacattgaataattttctctattgtgctgttaattatatagtaatgtatcaaaatagaaataggaactttcttttcatttcttattcatttatgaagaaatcttttcacacataaatgattgaatgttcttgttcagaatgaccacataatcattgcttagaagaagataccaattcttttaaaagaaaaaaagtctgtttataataatcagaatcaaatgttgtttgtttcttctaaacgttaatggagaaaattgaaggtggtaaaatgtcatgtttattcaggctgggaactgtattcacagtagaagtttcagtggtcaacatatctatgactctttaggctgctgtagttttacagtcaattatttaaaagtgagtagttacatttataagagcctgagaatacttagactcagtcatttgttagtatttttaccaaaatctcttagtttcagacatgtcagaagcagctatatagcatatcttattctatgatatacatcaggctatctcaagttcctgtctcacagttaattcaaagaaggattaggatttctgtattttttctcatttgaatctttatgtgcatttggtttgtgtacatgctttttgtagtgtaagatatgaaattttatattttttcagaaaataaaaaccctttgaatacagtta

SEQ ID NO: 9630 - DNA, 3427 bp, Homo sapiens
  source 1..3427: mol_type = unassigned DNA
gaggagccagaagcaaacttcagctgtctcagccggatccgtggttcctacatttggaggagccgcgtgccagaaggcgtaggaccccaaggggggacaaggaggactcccgagtctcccttcgccgctctgcgaggccgaagcggtggactgagccgctcgggacagcggcaccggaggaggctcggagaagatgcggggctcggggccccggggtgcgggacgccggcggcccccaagcggcggcggcgacacccccatcaccccagcgtccctggccggctgctactctgcacctcgacgggctcccctctggacgtgccttctcctgtgcgccgcactccggaccctcctggccagccccagcaacgaagtgaatttattggattcacgcactgtcatgggggacctgggatggattgcttttccaaaaaatgggtgggaagagattggtgaagtggatgaaaattatgcccctatccacacataccaagtatgcaaagtgatggaacagaatcagaataactggcttttgaccagttggatctccaatgaaggtgcttccagaatcttcatagaactcaaatttaccctgcgggactgcaacagccttcctggaggactggggacctgtaaggaaacctttaatatgtattactttgagtcagatgatcagaatgggagaaacatcaaggaaaaccaatacatcaaaattgataccattgctgccgatgaaagctttacagaacttgatcttggtgaccgtgttatgaaactgaatacagaggtcagagatgtaggacctctaagcaaaaagggattttatcttgcttttcaagatgttggtgcttgcattgctctggtttctgtgcgtgtatactataaaaaatgcccttctgtggtacgacacttggctgtcttccctgacaccatcactggagctgattcttcccaattgctcgaagtgtcaggctcctgtgtcaaccattctgtgaccgatgaacctcccaaaatgcactgcagcgccgaaggggagtggctggtgcccatcgggaaatgcatgtgcaaggcaggatatgaagagaaaaatggcacctgtcaagtgtgcagacctgggttcttcaaagcctcacctcacatccagagctgcggcaaatgtccacctcacagttatacccatgaggaagcttcaacctcttgtgtctgtgaaaaggattatttcaggagagagtctgatccacccacaatggcatgcacaagacccccctctgctcctcggaatgccatctcaaatgttaatgaaactagtgtctttctggaatggattccgcctgctgacactggtggaaggaaagacgtgtcatattatattgcatgcaagaagtgcaactcccatgcaggtgtgtgtgaggagtgtggcggtcatgtcaggtaccttccccggcaaagcggcctgaaaaacacctctgtcatgatggtggatctactcgctcacacaaactatacctttgagattgaggcagtgaatggagtgtccgacttgagcccaggagcccggcagtatgtgtctgtaaatgtaaccacaaatcaagcagctccatctccagtcaccaatgtgaaaaaagggaaaattgcaaaaaacagcatctctttgtcttggcaagaaccagatcgtcccaatggaatcatcctagagtatgaaatcaagtattttgaaaaggaccaagagaccagctacacgattatcaaatctaaagagacaactattactgcagagggcttgaaaccagcttcagtttatgtcttccaaattcgagcacgtacagcagcaggctatggtgtcttcagtcgaagatttgagtttgaaaccaccccagtgtttgcagcatccagcgatcaaagccagattcctgtaattgctgtgtctgtgacagtgggagtcattttgttggcagtggttatcggcgtcctcctcagtggaaggcggtgtggctacagcaaagcaaaacaagatccagaagaggaaaagatgcattttcataatgggcacattaaactgccaggagtaagaacttacattgatccacatacctatgaggatcccaatcaagctgtccacgaatttgctaaggagatagaagcatcatgtatcaccattgagagagttattggagcaggtgaatttggtgaagtttgtagtggacgtttgaaactaccaggaaaaagagaattacctgtggctatcaaaacccttaaagtaggctatactgaaaagcaacgcagagatttcctaggtgaagcaagtatcatgggacagtttgatcatcctaacatcatccatttagaaggtgtggtgaccaaaagtaaaccagtgatgatcgtgacagagtatatggagaatggctctttagatacatttttgaagaaaaacgatgggcagttcactgtgattcagcttgttggcatgctgagaggtatctctgcaggaatgaagtacctttctgacatgggctatgtgcatagagatcttgctgccagaaacatcttaatcaacagtaaccttgtgtgcaaagtgtctgactttggactttcccgggtactggaagatgatcccgaggcagcctacaccacaaggggaggaaaaattccaatcagatggactgccccagaagcaatagctttccgaaagtttacttctgccagtgatgtctggagttatggaatagtaatgtgggaagttgtgtcttatggagagagaccctactgggagatgaccaatcaagatgtgattaaagcggtagaggaaggctatcgtctgccaagccccatggattgtcctgctgctctctatcagttaatgctggattgctggcagaaagagcgaaatagcaggcccaagtttgatgaaatagtcaacatgttggacaagctgatacgtaacccaagtagtctgaagacgctggttaatgcatcctgcagagtatctaatttattggcagaacatagcccactaggatctggggcctacagatcagtaggtgaatggctagaggcaatcaagatgggccggtatacagagattttcatggaaaatggatacagttcaatggacgctgtggctcaggtgaccttggaggatttgagacggcttggagtgactcttgtcggtcaccagaagaagatcatgaacagccttcaagaaatgaaggtgcagctggtaaacggaatggtgccattgtaacttcatgtaaatgtcgcttcttcaagtgaatgattctgcactttgtaaacagcactgagatttattttaacaaaaaaagggggaaaagggaaaacagtgatttctaaaccttagaaaacatttgcctcagccacagaatttgtaatcatggttttactgaagtatccagttcttagtccttagtct

SEQ ID NO: 9631 - DNA, 5176 bp, Homo sapiens
  source 1..5176: mol_type = unassigned DNA
ccagacacagcaggagcgcgccttggcggtgcagtttcaacctcgacttcgcagccgcgcacacaccgcctgctccccgagcagcgggaaccgcagcagctcctgggccgccgcagcgcagctccgcgctcctaccggccggcagccgtcagtccctcccctcttcagcactcagcccgcagctatttccttctgccagtctctttgaactctggatctttgcttttgctcgctgctctcctgtttttcattctccacattttctcaagtcctctttctttatccttagccaccctgcttttttcctccttttttaaaaaatcggagatttcgtcttaaaatgatttgccttccttaccttcgtccatttcaacactgaaggctgcaaagaaccttcacctttcccctagtggtatttaaaaattctcaatccgtaaaaagtctttttgaaaggcaaaggaacaggacccaggaccctctcgacacccttgatccgagtccagatctgcactagcaaccagaactaatatttcatttaaccccaccaaagggggaggcgagaggagccagaagcaaacttcagctgtctcagccggatccgtggttcctacatttggaggagccgcgtgccagaaggcgtaggaccccaaggggggacaaggaggactcccgagtctcccttcgccgctctgcgaggccgaagcggtggactgagccgctcgggacagcggcaccggaggaggctcggagaagatgcggggctcggggccccggggtgcgggacgccggcggcccccaagcggcggcggcgacacccccatcaccccagcgtccctggccggctgctactctgcacctcgacgggctcccctctggacgtgccttctcctgtgcgccgcactccggaccctcctggccagccccagcaacgaagtgaatttattggattcacgcactgtcatgggggacctgggatggattgcttttccaaaaaatgggtgggaagagattggtgaagtggatgaaaattatgcccctatccacacataccaagtatgcaaagtgatggaacagaatcagaataactggcttttgaccagttggatctccaatgaaggtgcttccagaatcttcatagaactcaaatttaccctgcgggactgcaacagccttcctggaggactggggacctgtaaggaaacctttaatatgtattactttgagtcagatgatcagaatgggagaaacatcaaggaaaaccaatacatcaaaattgataccattgctgccgatgaaagctttacagaacttgatcttggtgaccgtgttatgaaactgaatacagaggtcagagatgtaggacctctaagcaaaaagggattttatcttgcttttcaagatgttggtgcttgcattgctctggtttctgtgcgtgtatactataaaaaatgcccttctgtggtacgacacttggctgtcttccctgacaccatcactggagctgattcttcccaattgctcgaagtgtcaggctcctgtgtcaaccattctgtgaccgatgaacctcccaaaatgcactgcagcgccgaaggggagtggctggtgcccatcgggaaatgcatgtgcaaggcaggatatgaagagaaaaatggcacctgtcaagtgtgcagacctgggttcttcaaagcctcacctcacatccagagctgcggcaaatgtccacctcacagttatacccatgaggaagcttcaacctcttgtgtctgtgaaaaggattatttcaggagagagtctgatccacccacaatggcatgcacaagacccccctctgctcctcggaatgccatctcaaatgttaatgaaactagtgtctttctggaatggattccgcctgctgacactggtggaaggaaagacgtgtcatattatattgcatgcaagaagtgcaactcccatgcaggtgtgtgtgaggagtgtggcggtcatgtcaggtaccttccccggcaaagcggcctgaaaaacacctctgtcatgatggtggatctactcgctcacacaaactatacctttgagattgaggcagtgaatggagtgtccgacttgagcccaggagcccggcagtatgtgtctgtaaatgtaaccacaaatcaagcagctccatctccagtcaccaatgtgaaaaaagggaaaattgcaaaaaacagcatctctttgtcttggcaagaaccagatcgtcccaatggaatcatcctagagtatgaaatcaagtattttgaaaaggaccaagagaccagctacacgattatcaaatctaaagagacaactattactgcagagggcttgaaaccagcttcagtttatgtcttccaaattcgagcacgtacagcagcaggctatggtgtcttcagtcgaagatttgagtttgaaaccaccccagtgtcagttgcagcatccagcgatcaaagccagattcctgtaattgctgtgtctgtgacagtgggagtcattttgttggcagtggttatcggcgtcctcctcagtggaagttgctgcgaatgtggctgtgggagggcttcttccctgtgcgctgttgcccatccaagcctaatatggcggtgtggctacagcaaagcaaaacaagatccagaagaggaaaagatgcattttcataatgggcacattaaactgccaggagtaagaacttacattgatccacatacctatgaggatcccaatcaagctgtccacgaatttgctaaggagatagaagcatcatgtatcaccattgagagagttattggagcaggtgaatttggtgaagtttgtagtggacgtttgaaactaccaggaaaaagagaattacctgtggctatcaaaacccttaaagtaggctatactgaaaagcaacgcagagatttcctaggtgaagcaagtatcatgggacagtttgatcatcctaacatcatccatttagaaggtgtggtgaccaaaagtaaaccagtgatgatcgtgacagagtatatggagaatggctctttagatacatttttgaagaaaaacgatgggcagttcactgtgattcagcttgttggcatgctgagaggtatctctgcaggaatgaagtacctttctgacatgggctatgtgcatagagatcttgctgccagaaacatcttaatcaacagtaaccttgtgtgcaaagtgtctgactttggactttcccgggtactggaagatgatcccgaggcagcctacaccacaaggggaggaaaaattccaatcagatggactgccccagaagcaatagctttccgaaagtttacttctgccagtgatgtctggagttatggaatagtaatgtgggaagttgtgtcttatggagagagaccctactgggagatgaccaatcaagatgtgattaaagcggtagaggaaggctatcgtctgccaagccccatggattgtcctgctgctctctatcagttaatgctggattgctggcagaaagagcgaaatagcaggcccaagtttgatgaaatagtcaacatgttggacaagctgatacgtaacccaagtagtctgaagacgctggttaatgcatcctgcagagtatctaatttattggcagaacatagcccactaggatctggggcctacagatcagtaggtgaatggctagaggcaatcaagatgggccggtatacagagattttcatggaaaatggatacagttcaatggacgctgtggctcaggtgaccttggagtgagtaatttttctgataatttttacataattgctggggcaagaaaaattgttcaaaaaccaatctggatgaggtaagggaaatcagttaacctttgcggatgtgtggcagctctcaaagaagcctcatcatctttagcctgtattgttaacaactgcatggttaatgctacatgtggccagtatctttgcttctttgcttcaaacaaataacattggcatacttgaataattggaataacagctccttggcaaaatactggtgttttgtgttgtggaaaagatgttttcttgacaagtttttttatactggtatctatgttatatgaatgtaaatacaaaacaaaataaactgtaagcacaattggtgtggctagtcctacataaggaccaaacatatttgtacattttggctctctacgatgaatatcaaggtaacagtagcttaaacaaagcttccctggcaggatctcatttaatttctaaatggtgcaccttacattctttcaatctaaggatgtatcagatcccgcctctgatttgttatttggtacaatctcagtggaaccaattgtgcccttttctgtttgcacgtttaagataaaatttatcaaaccttattaaataaaaatcactagagttaaatattaagttctttaaggttgtaagttgtttgtattttattatatactctgtacatgtggttgttttagcctaattgttatttgtgaaaattaactgtctttatggtggttccatctagattacattaacattaatgttttaacctgtgaatataatgataacttacttcaaattacctgccaattcaaaggttaaaatattgtaaggtttagaaaatggtagaatattctgaagcactaaaccatagttgttattttatttgtacacatgatatgaacattgagcagttcttgctcacccatctctattattctgacattctttgattcattgaattcattgttcctccccacagaaggtaacagggtaccaccatttatcaccaattaatgtcacattctcagcattctcttccttcataccgataactaaaaggacctgaaaccaaccactcagcttgctttctaaatttactgaatctcattctcacggtccaccagatcatatctacttgataacacatatgctttgtccattatttctttggacactcaaggaacccatttgtgctatatttaaactggtatactgaaaaatttactgataatttaaaactatttttacatgattgctatttaatttttcagtaaaaatggtcattttaatttattaaagtcatttgtcattttatattaaaatgatattgtaggtatttcttctacccaatgtcagattacttgtaaatatataataaaattatttgcatt

SEQ ID NO: 9632 - DNA, 4943 bp, Homo sapiens
  source 1..4943: mol_type = unassigned DNA
tcccgacgcgcgggccgcagcggccaagcccgagggtgcgtggcgcccccgcccgcccggcccggcccggccatggcccccgcccggggccgcctgccccctgcgctctgggtcgtcacggccgcggcggcggcggccacctgcgtgtccgcggcgcgcggcgaagtgaatttgctggacacgtcgaccatccacggggactggggctggctcacgtatccggctcatgggtgggactccatcaacgaggtggacgagtccttccagcccatccacacgtaccaggtttgcaacgtcatgagccccaaccagaacaactggctgcgcacgagctgggtcccccgagacggcgcccggcgcgtctatgctgagatcaagtttaccctgcgcgactgcaacagcatgcctggtgtgctgggcacctgcaaggagaccttcaacctctactacctggagtcggaccgcgacctgggggccagcacacaagaaagccagttcctcaaaatcgacaccattgcggccgacgagagcttcacaggtgccgaccttggtgtgcggcgtctcaagctcaacacggaggtgcgcagtgtgggtcccctcagcaagcgcggcttctacctggccttccaggacataggtgcctgcctggccatcctctctctccgcatctactataagaagtgccctgccatggtgcgcaatctggctgccttctcggaggcagtgacgggggccgactcgtcctcactggtggaggtgaggggccagtgcgtgcggcactcagaggagcgggacacacccaagatgtactgcagcgcggagggcgagtggctcgtgcccatcggcaaatgcgtgtgcagtgccggctacgaggagcggcgggatgcctgtgtggcctgtgagctgggcttctacaagtcagcccctggggaccagctgtgtgcccgctgccctccccacagccactccgcagctccagccgcccaagcctgccactgtgacctcagctactaccgtgcagccctggacccgccgtcctcagcctgcacccggccaccctcggcaccagtgaacctgatctccagtgtgaatgggacatcagtgactctggagtgggcccctcccctggacccaggtggccgcagtgacatcacctacaatgccgtgtgccgccgctgcccctgggcactgagccgctgcgaggcatgtgggagcggcacccgctttgtgccccagcagacaagcctggtgcaggccagcctgctggtggccaacctgctggcccacatgaactactccttctggatcgaggccgtcaatggcgtgtccgacctgagccccgagccccgccgggccgctgtggtcaacatcaccacgaaccaggcagccccgtcccaggtggtggtgatccgtcaagagcgggcggggcagaccagcgtctcgctgctgtggcaggagcccgagcagccgaacggcatcatcctggagtatgagatcaagtactacgagaaggacaaggagatgcagagctactccaccctcaaggccgtcaccaccagagccaccgtctccggcctcaagccgggcacccgctacgtgttccaggtccgagcccgcacctcagcaggctgtggccgcttcagccaggccatggaggtggagaccgggaaaccccggccccgctatgacaccaggaccattgtctggatctgcctgacgctcatcacgggcctggtggtgcttctgctcctgctcatctgcaagaagaggcactgtggctacagcaaggccttccaggactcggacgaggagaagatgcactatcagaatggacaggcacccccacctgtcttcctgcctctgcatcaccccccgggaaagctcccagagccccagttctatgcggaaccccacacctacgaggagccaggccgggcgggccgcagtttcactcgggagatcgaggcctctaggatccacatcgagaaaatcatcggctctggagactccggggaagtctgctacgggaggctgcgggtgccagggcagcgggatgtgcccgtggccatcaaggccctcaaagccggctacacggagagacagaggcgggacttcctgagcgaggcgtccatcatggggcaattcgaccatcccaacatcatccgcctcgagggtgtcgtcacccgtggccgcctggcaatgattgtgactgagtacatggagaacggctctctggacaccttcctgaggacccacgacgggcagttcaccatcatgcagctggtgggcatgctgagaggagtgggtgccggcatgcgctacctctcagacctgggctatgtccaccgagacctggccgcccgcaacgtcctggttgacagcaacctggtctgcaaggtgtctgacttcgggctctcacgggtgctggaggacgacccggatgctgcctacaccaccacgggcgggaagatccccatccgctggacggccccagaggccatcgccttccgcaccttctcctcggccagcgacgtgtggagcttcggcgtggtcatgtgggaggtgctggcctatggggagcggccctactggaacatgaccaaccgggatgtcatcagctctgtggaggaggggtaccgcctgcccgcacccatgggctgcccccacgccctgcaccagctcatgctcgactgttggcacaaggaccgggcgcagcggcctcgcttctcccagattgtcagtgtcctcgatgcgctcatccgcagccctgagagtctcagggccaccgccacagtcagcaggtgcccaccccctgccttcgtccggagctgctttgacctccgagggggcagcggtggcggtgggggcctcaccgtgggggactggctggactccatccgcatgggccggtaccgagaccacttcgctgcgggcggatactcctctctgggcatggtgctacgcatgaacgcccaggacgtgcgcgccctgggcatcaccctcatgggccaccagaagaagatcctgggcagcattcagaccatgcgggcccagctgaccagcacccaggggccccgccggcacctctgatgtacagccagcagggcccaggcagccaccaagcccaccccaggtcatgccagcggcagaggacgtgaggggctggcagcaggcagggcggccccaggcctctgccctcctctcaggtgctggaggagctgaaggcttcgccacaggacctggagttatcaggggtcaggcgcctgggaaggggcctttggtggccaccctggtgaggacacctgtcccccagggcaggcaccttctcttttccagagcctggggcctccacgtcacagagtccaacagggacatcactcgcctgcctctgtgtgcgtgcatgtgtgtgtgtggtggggggtgttctcacaaggtcatgggatctcatgtgaacagtgtgtgatcaagtgtgtccaccccttcgggtctcagcatggacgtgtgcatgttatgagcgtgtgcttatccgttaaggctggaggcacatgtgggtgatggtggatgatgtgtcatgaatgaggaggtgtgtgagcagggaactcagtgtgacaccgccaggtccagcacccatgggggcgggggagaggctcacccctacgtccccccacacctggaggctggagccaggggccacttctgaactgcaccagcaccaggcccaccctcgtctctgcctgggtgagcccaccccggctgtatctcaggtctgggtcctccctctagccgaggaggccacctgcagcctccacccggctctcaccgctgcttcaacaggaaaacagggttcccggtcagtccggctggccgccttcatggaggcatcatggcagagcacatgagatgtcctcagctgggcttggctgcctggccagggccgggggctcagcagcctcctctagcctctgatgccttccctccacggcccaggtctcctcactcaaagtcccttcgccaacctttcaatgcccagccctgacacctgccctttgtcccccaggcctaggatcagggaccagaggatcctatcttctcagcacccagcccaccccttcctgtagcatatggggagactaaggcctggagagaggggtgatgccccgtcccaggttgcactgcaaccaagtgtcagagtcggggctccggcctcctgccaaggctcttgtccccatacaccatcccacaagggcgctgggggtggaagtgccctggaagcccctcccctctcacactgacctccccccttacggcccaccagggtatgtaaatatctcttttctaccatgtcagaatattttttcctcactcctgacaatgcaaaaatggtcttcaaagcacataaaaagcacccagggtgagaaagccccatcccgggggccgttggcaggcagggaagcaggaaccccaccgtgtgccccctgccagccccagagggagtggcgagcccagctgcccagccctgccccccctccccatagccagcacagctatcccgcggggacaccagcactgagccccctctccctcctgcaataattcggggagtctcagccccatccaggtgccgcggccagctctctacacctctatatattatattactatatagccgagctgttcttccttcctatggaagtcggaaacatggtcagaacacgatctgggggggggatcctgtcttcctccccaccccaccccactcttacccaatttctgggctctggatcctcacagtcatggaggcaccgtgggcctggcacttgcaaaagtgtggcccctcactctagtgtgtggtccctctcagggtcctggggatctgcctctctgtggtctccatcctgactcttgaacttacccacaataagaataaattctgcctcatcttt

SEQ ID NO: 9633 - DNA, 1802 bp, Homo sapiens
  source 1..1802: mol_type = unassigned DNA
tcccgacgcgcgggccgcagcggccaagcccgagggtgcgtggcgcccccgcccgcccggcccggcccggccatggcccccgcccggggccgcctgccccctgcgctctgggtcgtcacggccgcggcggcggcggccacctgcgtgtccgcggcgcgcggcgaagtgaatttgctggacacgtcgaccatccacggggactggggctggctcacgtatccggctcatgggtgggactccatcaacgaggtggacgagtccttccagcccatccacacgtaccaggtttgcaacgtcatgagccccaaccagaacaactggctgcgcacgagctgggtcccccgagacggcgcccggcgcgtctatgctgagatcaagtttaccctgcgcgactgcaacagcatgcctggtgtgctgggcacctgcaaggagaccttcaacctctactacctggagtcggaccgcgacctgggggccagcacacaagaaagccagttcctcaaaatcgacaccattgcggccgacgagagcttcacaggtgccgaccttggtgtgcggcgtctcaagctcaacacggaggtgcgcagtgtgggtcccctcagcaagcgcggcttctacctggccttccaggacataggtgcctgcctggccatcctctctctccgcatctactataagaagtgccctgccatggtgcgcaatctggctgccttctcggaggcagtgacgggggccgactcgtcctcactggtggaggtgaggggccagtgcgtgcggcactcagaggagcgggacacacccaagatgtactgcagcgcggagggcgagtggctcgtgcccatcggcaaatgcgtgtgcagtgccggctacgaggagcggcgggatgcctgtgtggcctgtgagctgggcttctacaagtcagcccctggggaccagctgtgtgcccgctgccctccccacagccactccgcagctccagccgcccaagcctgccactgtgacctcagctactaccgtgcagccctggacccgccgtcctcagcctgcacccggccaccctcggcaccagtgaacctgatctccagtgtgaatgggacatcagtgactctggagtgggcccctcccctggacccaggtggccgcagtgacatcacctacaatgccgtgtgccgccgctgcccctgggcactgagccgctgcgaggcatgtgggagcggcacccgctttgtgccccagcagacaagcctggtgcaggccagcctgctggtggccaacctgctggcccacatgaactactccttctggatcgaggccgtcaatggcgtgtccgacctgagccccgagccccgccgggccgctgtggtcaacatcaccacgaaccaggcaggtaggcggagaaactccgtcccgcagcgtcctggtcccccagcttcccctgcctcagacccatccagggatcagagctctgccggggacgtgctgtgggcctttaggcaagtgcctctctggccctgcgctcctcaccaggacccagagctggaggctcttcattgcctttagaaaagtggaacacattctataagtaagagaaatcccaaaagctcagaggcaggctagtgtggccgtcgaaagcctaggttccagaactttccctctctgtgcctcagtttcctccctggtgcaatgggaataatagtacctgcctgaggtcctctcaggaggcttaaatgagaggaatgaaattgcttagcccagcacctggcccgtggtaaatgctcaataaatgtcattaaaaaataaaa

SEQ ID NO: 9634 - DNA, 1773 bp, Homo sapiens
  source 1..1773: mol_type = unassigned DNA
gccgcagcggccaagcccgagggtgcgtggcgcccccgcccgcccggcccggccatggcccccgcccggggccgcctgccccctgcgctctgggtcgtcacggccgcggcggcggcggccacctgcgtgtccgcggcgcgcggcgaagtgaatttgctggacacgtcgaccatccacggggactggggctggctcacgtatccggctcatgggtgggactccatcaacgaggtggacgagtccttccagcccatccacacgtaccaggtttgcaacgtcatgagccccaaccagaacaactggctgcgcacgagctgggtcccccgagacggcgcccggcgcgtctatgctgagatcaagtttaccctgcgcgactgcaacagcatgcctggtgtgctgggcacctgcaaggagaccttcaacctctactacctggagtcggaccgcgacctgggggccagcacacaagaaagccagttcctcaaaatcgacaccattgcggccgacgagagcttcacaggtgccgaccttggtgtgcggcgtctcaagctcaacacggaggtgcgcagtgtgggtcccctcagcaagcgcggcttctacctggccttccaggacataggtgcctgcctggccatcctctctctccgcatctactataagaagtgccctgccatggtgcgcaatctggctgccttctcggaggcagtgacgggggccgactcgtcctcactggtggaggtgaggggccagtgcgtgcggcactcagaggagcgggacacacccaagatgtactgcagcgcggagggcgagtggctcgtgcccatcggcaaatgcgtgtgcagtgccggctacgaggagcggcgggatgcctgtgtggcctgtgagctgggcttctacaagtcagcccctggggaccagctgtgtgcccgctgccctccccacagccactccgcagctccagccgcccaagcctgccactgtgacctcagctactaccgtgcagccctggacccgccgtcctcagcctgcacccggccaccctcggcaccagtgaacctgatctccagtgtgaatgggacatcagtgactctggagtgggcccctcccctggacccaggtggccgcagtgacatcacctacaatgccgtgtgccgccgctgcccctgggcactgagccgctgcgaggcatgtgggagcggcacccgctttgtgccccagcagacaagcctggtgcaggccagcctgctggtggccaacctgctggcccacatgaactactccttctggatcgaggccgtcaatggcgtgtccgacctgagccccgagccccgccgggccgctgtggtcaacatcaccacgaaccaggcaggtaggcggagaaactccgtcccgcagcgtcctggtcccccagcttcccctgcctcagacccatccagggatcagagctctgccggggacgtgctgtgggcctttaggcaagtgcctctctggccctgcgctcctcaccaggacccagagctggaggctcttcattgcctttagaaaagtggaacacattctataagtaagagaaatcccaaaagctcagaggcaggctagtgtggccgtcgaaagcctaggttccagaactttccctctctgtgcctcagtttcctccctggtgcaatgggaataatagtacctgcctgaggtcctctcaggaggcttaaatgagaggaatgaaattgcttagcccagcacctggcccgtggtaaatgctcaataaatgtcatt

SEQ ID NO: 9635 - DNA, 4672 bp, Homo sapiens
  source 1..4672: mol_type = unassigned DNA
tctggccggctccgtcctcccgtaggctccgctgtagctagcaatgtgacaccaggacgcactcgctctcgcgcgctctcccaggctcgttctccctcgccctctctctctcacacacgcacgcacacacccacctctcccataaacacacacacacacatgcacacccacacccacgcgcgcccgcaccgccccacgcgcacacactcctgcccacgcccacgcagcgctccgggaagtccggtccgggcgagagcgcgaaaggataccgagaagccacccgcggagagcgcagcggcgccctgggacgcggcgctctcccggcgctgctgcctcggcttggtctcggcctgcgggccgtcggccggcgatggccctggattatctactactgctcctcctggcatccgcagtggctgcgatggaagaaacgttaatggacaccagaacggctactgcagagctgggctggacggccaatcctgcgtccgggtgggaagaagtcagtggctacgatgaaaacctgaacaccatccgcacctaccaggtgtgcaatgtcttcgagcccaaccagaacaattggctgctcaccaccttcatcaaccggcggggggcccatcgcatctacacagagatgcgcttcactgtgagagactgcagcagcctccctaatgtcccaggatcctgcaaggagaccttcaacttgtattactatgagactgactctgtcattgccaccaagaagtcagccttctggtctgaggccccctacctcaaagtagacaccattgctgcagatgagagcttctcccaggtggactttgggggaaggctgatgaaggtaaacacagaagtcaggagctttgggcctcttactcggaatggtttttacctcgcttttcaggattatggagcctgtatgtctcttctttctgtccgtgtcttcttcaaaaagtgtcccagcattgtgcaaaattttgcagtgtttccagagactatgacaggggcagagagcacatctctggtgattgctcggggcacatgcatccccaacgcagaggaagtggacgtgcccatcaaactctactgcaacggggatggggaatggatggtgcctattgggcgatgcacctgcaagcctggctatgagcctgagaacagcgtggcatgcaaggcttgccctgcagggacattcaaggccagccaggaagctgaaggctgctcccactgcccctccaacagccgctcccctgcagaggcgtctcccatctgcacctgtcggaccggttattaccgagcggactttgaccctccagaagtggcatgcactagcgtcccatcaggtccccgcaatgttatctccatcgtcaatgagacgtccatcattctggagtggcaccctccaagggagacaggtgggcgggatgatgtgacctacaacatcatctgcaaaaagtgccgggcagaccgccggagctgctcccgctgtgacgacaatgtggagtttgtgcccaggcagctgggcctgacggagtgccgcgtctccatcagcagcctgtgggcccacaccccctacacctttgacatccaggccatcaatggagtctccagcaagagtcccttccccccacagcacgtctctgtcaacatcaccacaaaccaagccgccccctccaccgttcccatcatgcaccaagtcagtgccactatgaggagcatcaccttgtcatggccacagccggagcagcccaatggcatcatcctggactatgagatccggtactatgagaaggaacacaatgagttcaactcctccatggccaggagtcagaccaacacagcaaggattgatgggctgcggcctggcatggtatatgtggtacaggtgcgtgcccgcactgttgctggctacggcaagttcagtggcaagatgtgcttccagactctgactgacgatgattacaagtcagagctgagggagcagctgcccctgattgctggctcggcagcggccggggtcgtgttcgttgtgtccttggtggccatctctatcgtctgtagcaggaaacgggcttatagcaaagaggctgtgtacagcgataagctccagcattacagcacaggccgaggctccccagggatgaagatctacattgaccccttcacttacgaggatcccaacgaagctgtccgggagtttgccaaggagattgatgtatcttttgtgaaaattgaagaggtcatcggagcaggggagtttggagaagtgtacaaggggcgtttgaaactgccaggcaagagggaaatctacgtggccatcaagaccctgaaggcagggtactcggagaagcagcgtcgggactttctgagtgaggcgagcatcatgggccagttcgaccatcctaacatcattcgcctggagggtgtggtcaccaagagtcggcctgtcatgatcatcacagagttcatggagaatggtgcattggattctttcctcaggcaaaatgacgggcagttcaccgtgatccagcttgtgggtatgctcaggggcatcgctgctggcatgaagtacctggctgagatgaattatgtgcatcgggacctggctgctaggaacattctggtcaacagtaacctggtgtgcaaggtgtccgactttggcctctcccgctacctccaggatgacacctcagatcccacctacaccagctccttgggagggaagatccctgtgagatggacagctccagaggccatcgcctaccgcaagttcacttcagccagcgacgtttggagctatgggatcgtcatgtgggaagtcatgtcatttggagagagaccctattgggatatgtccaaccaagatgtcatcaatgccatcgagcaggactaccggctgcccccacccatggactgtccagctgctctacaccagctcatgctggactgttggcagaaggaccggaacagccggccccggtttgcggagattgtcaacaccctagataagatgatccggaacccggcaagtctcaagactgtggcaaccatcaccgccgtgccttcccagcccctgctcgaccgctccatcccagacttcacggcctttaccaccgtggatgactggctcagcgccatcaaaatggtccagtacagggacagcttcctcactgctggcttcacctccctccagctggtcacccagatgacatcagaagacctcctgagaataggcatcaccttggcaggccatcagaagaagatcctgaacagcattcattctatgagggtccagataagtcagtcaccaacggcaatggcatgagaactcttgtttcttggggaaggagaggagggaaaaggaccagggtcaagggggaccagaggttgaccactgtggaatgtactggagagactggcttctcagctgaggaatgcatttccatcagtgaagaatcaaccggacctgttgctagcaggcaatctccatttctcagtgacagaagcatgtttgagatgccgtgggaaaccaaatatataataataaaaatataaaaaggtgatgttcaacagaagtgaagacaaaacaatatgcatcaggagaacaagagtaaacccagctcccattctcagtgggctgcagttgcccaaccacaggaagaaagggaaggaggtagagggaagaaacagaagcagtgttccattttcttcctcaccaatgacattcttttcttttctcctttcgtactcctccctgagagtcccctcccttctcccacactcgtttccctttgctcatgactcctgtagggaagtttcttcaaacaaaacccagctcctgagtctccagatgttgttctgtcagttgccaaaggactttgctgaccactgcatggggatccaaccaattcaattaatgtcttcatattgaagaagagatgtaccttcaattgaaaacctcgtttttcttttgtttgcattttctgcaaaaaggaaaaagaaaccacaaattggggaaaaaaaaagaagaaaaacctgtttccgtgtgcaaaagcacacatatgtatgtctgtgttataaaatgactgtgcttgttcgtaacagatgcaaacaagaaagaagaactgggaagtctttgtccctaggaaatccaaaggggctggaatatggtgttggtttggctttctggttggcccaatcggcctattggctcaatgggaagagaggagagggagaaaaataaaatgaaaggaaaaaaaaaagtttgcaaattcagacaggaaacaggtgagtggtttgaattggatgcagtgtgggccatcctggaatgatactgactgattaattattcctgataacatctcaagaaaaggagaaggaaagtgtttctggagaatgttctttcacatcactggaatctgcaattcaagaagtgacaagggagaattcttgctttacctatggactggcttaagccgtgtggcatccgaggaatgtttcaaatgtgtctgtgtttctctttacattccttgttgtacctcattgttcaattcacttttgtaaattccacctaacatttaattattttaaatttctccttttaccttaatctccttgctaattttatctgtctaattaaaaagagcagaagcatgtctgggtttacgtaaaa

SEQ ID NO: 9636 - DNA, 2786 bp, Homo sapiens
  source 1..2786: mol_type = unassigned DNA
actcccaccatccccctctaacagcacggagtcagtttccaggcagtgggcaaggagggctaagaacttgccccaggctacctgcctcccagctgaaaagggctttagttcttcccctgcctgtggagtctgcatgccagattcgcaccctcccctgagttctggccaggaggcttctgaacaagttcatattgttacaaagttcagctggagacttccttctccctgtggcattttcccagtgcctctggctgccctcctgagggatccctgtggtgccaggcaggaatttcctgcttggggaacccagtgggctcccagagcctttctcgcagcttcctctacccctgtatttcgctcggctctctaaattgactcagctccagcttgccctgcagggacattcaaggccagccaggaagctgaaggctgctcccactgcccctccaacagccgctcccctgcagaggcgtctcccatctgcacctgtcggaccggttattaccgagcggactttgaccctccagaagtggcatgcactagcgtcccatcaggtccccgcaatgttatctccatcgtcaatgagacgtccatcattctggagtggcaccctccaagggagacaggtgggcgggatgatgtgacctacaacatcatctgcaaaaagtgccgggcagaccgccggagctgctcccgctgtgacgacaatgtggagtttgtgcccaggcagctgggcctgacggagtgccgcgtctccatcagcagcctgtgggcccacaccccctacacctttgacatccaggccatcaatggagtctccagcaagagtcccttccccccacagcacgtctctgtcaacatcaccacaaaccaagccgccccctccaccgttcccatcatgcaccaagtcagtgccactatgaggagcatcaccttgtcatggccacagccggagcagcccaatggcatcatcctggactatgagatccggtactatgagaaggaacacaatgagttcaactcctccatggccaggagtcagaccaacacagcaaggattgatgggctgcggcctggcatggtatatgtggtacaggtgcgtgcccgcactgttgctggctacggcaagttcagtggcaagatgtgcttccagactctgactgacgatgattacaagtcagagctgagggagcagctgcccctgattgctggctcggcagcggccggggtcgtgttcgttgtgtccttggtggccatctctatcgtctgtagcaggaaacgggcttatagcaaagaggctgtgtacagcgataagctccagcattacagcacaggccgaggctccccagggatgaagatctacattgaccccttcacttacgaggatcccaacgaagctgtccgggagtttgccaaggagattgatgtatcttttgtgaaaattgaagaggtcatcggagcaggggagtttggagaagtgtacaaggggcgtttgaaactgccaggcaagagggaaatctacgtggccatcaagaccctgaaggcagggtactcggagaagcagcgtcgggactttctgagtgaggcgagcatcatgggccagttcgaccatcctaacatcattcgcctggagggtgtggtcaccaagagtcggcctgtcatgatcatcacagagttcatggagaatggtgcattggattctttcctcaggcaaaatgacgggcagttcaccgtgatccagcttgtgggtatgctcaggggcatcgctgctggcatgaagtacctggctgagatgaattatgtgcatcgggacctggctgctaggaacattctggtcaacagtaacctggtgtgcaaggtgtccgactttggcctctcccgctacctccaggatgacacctcagatcccacctacaccagctccttgggagggaagatccctgtgagatggacagctccagaggccatcgcctaccgcaagttcacttcagccagcgacgtttggagctatgggatcgtcatgtgggaagtcatgtcatttggagagagaccctattgggatatgtccaaccaagatgtcatcaatgccatcgagcaggactaccggctgcccccacccatggactgtccagctgctctacaccagctcatgctggactgttggcagaaggaccggaacagccggccccggtttgcggagattgtcaacaccctagataagatgatccggaacccggcaagtctcaagactgtggcaaccatcaccgccgtgccttcccagcccctgctcgaccgctccatcccagacttcacggcctttaccaccgtggatgactggctcagcgccatcaaaatggtccagtacagggacagcttcctcactgctggcttcacctccctccagctggtcacccagatgacatcagaagacctcctgagaataggcatcaccttggcaggccatcagaagaagatcctgaacagcattcattctatgagggtccagataagtcagtcaccaacggcaatggcatgagaactcttgtttcttggggaaggagaggagggaaaaggaccagggtcaagggggaccagaggttgaccactgtggaatgtactggagagactggcttctcagctgaggaatgcatttccatcagtgaagaatcaaccggacctgttgctagcaggcaatctccatttctcagtgacagaagcatgtttgagatgccgtgggaaaccaaatatataataataaaaatataaaaaggtgatgttcaacagaa

SEQ ID NO: 9637 - DNA, 4236 bp, Homo sapiens
  source 1..4236: mol_type = unassigned DNA
cagcagaagtgagtacgtgagcggcgcagcaagatcccagctcggaccccggacggcgcgcgcccccgaagccccggatcccagtcgggcccgcagctgaccgccagattactgtgcatcccgaatcacgaccacctgcaccctcctgccccggcccgccccccaagtcctcaggcacccagctccccggcgccccggatcctcctggaccggtccgtccagattcccgcgggaccgacctgtccgcatccccaggaccgccgggctcggtgcaccgcctcggtcccggagccgcccgcctggattgcattccctcctctcctggatctcctgggacccgacgcgagcctgccccggagcccgccgagcgcaccctctctcgggtgcctgcagccccgccggcgcggcccggcccggcgcggcccggctcggctcctagagctgccacggccatggccagagcccgcccgccgccgccgccgtcgccgccgccggggcttctgccgctgctccctccgctgctgctgctgccgctgctgctgctgcccgccggctgccgggcgctggaagagaccctcatggacacaaaatgggtaacatctgagttggcgtggacatctcatccagaaagtgggtgggaagaggtgagtggctacgatgaggccatgaatcccatccgcacataccaggtgtgtaatgtgcgcgagtcaagccagaacaactggcttcgcacggggttcatctggcggcgggatgtgcagcgggtctacgtggagctcaagttcactgtgcgtgactgcaacagcatccccaacatccccggctcctgcaaggagaccttcaacctcttctactacgaggctgacagcgatgtggcctcagcctcctcccccttctggatggagaacccctacgtgaaagtggacaccattgcacccgatgagagcttctcgcggctggatgccggccgtgtcaacaccaaggtgcgcagctttgggccactttccaaggctggcttctacctggccttccaggaccagggcgcctgcatgtcgctcatctccgtgcgcgccttctacaagaagtgtgcatccaccaccgcaggcttcgcactcttccccgagaccctcactggggcggagcccacctcgctggtcattgctcctggcacctgcatccctaacgccgtggaggtgtcggtgccactcaagctctactgcaacggcgatggggagtggatggtgcctgtgggtgcctgcacctgtgccaccggccatgagccagctgccaaggagtcccagtgccgcccctgtccccctgggagctacaaggcgaagcagggagaggggccctgcctcccatgtccccccaacagccgtaccacctccccagccgccagcatctgcacctgccacaataacttctaccgtgcagactcggactctgcggacagtgcctgtaccaccgtgccatctccaccccgaggtgtgatctccaatgtgaatgaaacctcactgatcctcgagtggagtgagccccgggacctgggtggccgggatgacctcctgtacaatgtcatctgcaagaagtgccatggggctggaggggcctcagcctgctcacgctgtgatgacaacgtggagtttgtgcctcggcagctgggcctgacggagcgccgggtccacatcagccatctgctggcccacacgcgctacacctttgaggtgcaggcggtcaacggtgtctcgggcaagagccctctgccgcctcgttatgcggccgtgaatatcaccacaaaccaggctgccccgtctgaagtgcccacactacgcctgcacagcagctcaggcagcagcctcaccctatcctgggcacccccagagcggcccaacggagtcatcctggactacgagatgaagtactttgagaagagcgagggcatcgcctccacagtgaccagccagatgaactccgtgcagctggacgggcttcggcctgacgcccgctatgtggtccaggtccgtgcccgcacagtagctggctatgggcagtacagccgccctgccgagtttgagaccacaagtgagagaggctctggggcccagcagctccaggagcagcttcccctcatcgtgggctccgctacagctgggcttgtcttcgtggtggctgtcgtggtcatcgctatcgtctgcctcaggaagcagcgacacggctctgattcggagtacacggagaagctgcagcagtacattgctcctggaatgaaggtttatattgacccttttacctacgaggaccctaatgaggctgttcgggagtttgccaaggagatcgacgtgtcctgcgtcaagatcgaggaggtgatcggagctggggaatttggggaagtgtgccgtggtcgactgaaacagcctggccgccgagaggtgtttgtggccatcaagacgctgaaggtgggctacaccgagaggcagcggcgggacttcctaagcgaggcctccatcatgggtcagtttgatcaccccaatataatccggctcgagggcgtggtcaccaaaagtcggccagttatgatcctcactgagttcatggaaaactgcgccctggactccttcctccggctcaacgatgggcagttcacggtcatccagctggtgggcatgttgcggggcattgctgccggcatgaagtacctgtccgagatgaactatgtgcaccgcgacctggctgctcgcaacatccttgtcaacagcaacctggtctgcaaagtctcagactttggcctctcccgcttcctggaggatgacccctccgatcctacctacaccagttccctgggcgggaagatccccatccgctggactgccccagaggccatagcctatcggaagttcacttctgctagtgatgtctggagctacggaattgtcatgtgggaggtcatgagctatggagagcgaccctactgggacatgagcaaccaggatgtcatcaatgccgtggagcaggattaccggctgccaccacccatggactgtcccacagcactgcaccagctcatgctggactgctgggtgcgggaccggaacctcaggcccaaattctcccagattgtcaataccctggacaagctcatccgcaatgctgccagcctcaaggtcattgccagcgctcagtctggcatgtcacagcccctcctggaccgcacggtcccagattacacaaccttcacgacagttggtgattggctggatgccatcaagatggggcggtacaaggagagcttcgtcagtgcggggtttgcatcttttgacctggtggcccagatgacggcagaagacctgctccgtattggggtcaccctggccggccaccagaagaagatcctgagcagtatccaggacatgcggctgcagatgaaccagacgctgcctgtgcaggtctgacaccggctcccacggggaccctgaggaccgtgcagggatgccaagcagccggctggactttcggactcttggacttttggatgcctggccttaggctgtggcccagaagctggaagtttgggaaaggcccaagctgggacttctccaggcctgtgttccctccccaggaagtgcgccccaaacctcttcatattgaagatggattaggagagggggtgatgacccctccccaagcccctcagggcccagaccttcctgctctccagcaggggatccccacaacctcacacttgtctgttcttcagtgctggaggtcctggcagggtcaggctggggtaagccggggttccacagggcccagccctggcaggggtctggccccccaggtaggcggagagcagtccctccctcaggaactggaggaggggactccaggaatggggaaatgtgacaccaccatcctgaagccagcttgcacctccagtttgcacagggatttgttctgggggctgagggccctgtccccacccccgcccttggtgctgtcataaaagggcaggcaggggcaggctgaggagttgccctttgccccccagagactgactctcagagccagagatgggatgtgtgagtgtgtgtgtgtgtgtgtgtgtgtgcgcgcgcgcgcgcgtgtgtgtgtgcacgcactggcctgcacagagagcatgggtgagcgtgtaaaagcttggccctgtgccctacaatggggccagctgggccgacagcagaataaaggcaataagatgat

SEQ ID NO: 9638 - DNA, 4043 bp, Homo sapiens
  source 1..4043: mol_type = unassigned DNA
ggggcgggccgggccggcttgggaggggacgcggagggggcgggccgggctgcgttcgctccagccgcggctctacagcagcgggcggcgggacccgggacccagcttggcgacggcgatctcgacgcgggcccccaggatctcccggcgccccacctctggagcagcccctgccgccagcgtcaggtccaccccggaatcccagggactctcggcgccgaacggacccgggccgggtgcaacggggtccccggactggagaagacgcgggtggcaccgtgcgagctccaggagccccgggtccactgcgaggcctcggggggcgcagacctgcagagactgcggccaacgggaagaaataaagggattatagtccacccaattcacagacttctgagactcagacacgaggagagatagagaaccgccaatctctagatcaacaagcaaaggaggtgccaagcctgtttgtcttcattgtgacactggagtctagatgctgggaagtccaagatcagggtgccggcatggtcagttcctggcgaagcctctcttctaggtttcagactgccctcttctttgttgtgtcctcgaatggcagaaaaaggggtggctgttggaggaagggaggagagtaaatgaagagaaagaactggaataaccccttgcagaaaaaaaaaaaaagggaagcaagcttagctgtacaccctgagtcttgcaaaagctgcagccccacccaggagcagggtggtggctggggcgatggtggacgccctgaagatgtcccatggctactgaaggggctgcccagttagggaacagagtggcgggcatggtgtgtagcctatgggtgctgctcctggtgtcttcagttctggctctggaagaggtattgctggacaccaccggagagacatctgagattggctggctcacctacccaccaggggggtgggacgaggtgagtgttctggacgaccagcgacgcctgactcggacctttgaggcatgtcatgtggcaggggcccctccaggcaccgggcaggacaattggttgcagacacactttgtggagcggcgcggggcccagagggcgcacattcgactccacttctctgtgcgggcatgctccagcctgggtgtgagcggcggcacctgccgggagaccttcaccctttactaccgtcaggctgaggagcccgacagccctgacagcgtttcctcctggcacctcaaacgctggaccaaggtggacacaattgcagcagacgagagctttccctcctcctcctcctcctcctcctcttcttcctctgcagcgtgggctgtgggaccccacggggctgggcagcgggctggactgcaactgaacgtcaaagagcggagctttgggcctctcacccaacgcggcttctacgtggccttccaggacacgggggcctgcctggccctggtcgctgtcaggctcttctcctacacctgccctgccgtgctccgatcctttgcttcctttccagagacgcaggccagtggggctgggggggcctccctggtggcagctgtgggcacctgtgtggctcatgcagagccagaggaggatggagtagggggccaggcaggaggcagcccccccaggctgcactgcaacggggagggcaagtggatggtagctgtcgggggctgccgctgccagcctggataccaaccagcacgaggagacaaggcctgccaagcctgcccacgggggctctataagtcttctgctgggaatgctccctgctcaccatgccctgcccgcagtcacgctcccaacccagcagcccccgtttgcccctgcctggagggcttctaccgggccagttccgacccaccagaggccccctgcactggtcctccatcggctccccaggagctttggtttgaggtgcaaggctcagcactcatgctacactggcgcctgcctcgggagctggggggtcgaggggacctgctcttcaatgtcgtgtgcaaggagtgtgaaggccgccaggaacctgccagcggtggtgggggcacttgtcaccgctgcagggatgaggtccacttcgaccctcgccagagaggcctgactgagagccgagtgttagtggggggactccgggcacacgtaccctacatcttagaggtgcaggctgttaatggggtgtctgagctcagccctgaccctcctcaggctgcagccatcaatgtcagcaccagccatgaagtgccctctgctgtccctgtggtgcaccaggtgagccgggcatccaacagcatcacggtgtcctggccgcagcccgaccagaccaatgggaacatcctggactatcagctccgctactatgaccaggcagaagacgaatcccactccttcaccctgaccagcgagaccaacactgccaccgtgacacagctgagccctggccacatctatggtttccaggtgcgggcccggactgctgccggccacggcccctacgggggcaaagtctatttccagacacttcctcaaggggagctgtcttcccagcttccggaaagactctccttggtgatcggctccatcctgggggctttggccttcctcctgctggcagccatcaccgtgctggcggtcgtcttccagcggaagcggcgtgggactggctacacggagcagctgcagcaatacagcagcccaggactcggggtgaagtattacatcgacccctccacctacgaggacccctgtcaggccatccgagaacttgcccgggaagtcgatcctgcttatatcaagattgaggaggtcattgggacaggctcttttggagaagtgcgccagggccgcctgcagccacggggacggagggagcagactgtggccatccaggccctgtgggccgggggcgccgaaagcctgcagatgaccttcctgggccgggccgcagtgctgggtcagttccagcaccccaacatcctgcggctggagggcgtggtcaccaagagccgacccctcatggtgctgacggagttcatggagcttggccccctggacagcttcctcaggcagcgggagggccagttcagcagcctgcagctggtggccatgcagcggggagtggctgctgccatgcagtacctgtccagctttgccttcgtccatcgctcgctgtctgcccacagcgtgctggtgaatagccacttggtgtgcaaggtggcccgtcttggccacagtcctcagggcccaagttgtttgcttcgctgggcagccccagaggtcattgcacatggaaagcatacaacatccagtgatgtctggagctttgggatactcatgtgggaagtgatgagttatggagaacggccttactgggacatgagtgagcaggaggtactaaatgcaatagagcaggagttccggctgcccccgcctccaggctgtcctcctggattacatctacttatgttggacacttggcagaaggaccgtgcccggcggcctcattttgaccagctggtggctgcatttgacaagatgatccgcaagccagataccctgcaggctggcggggacccaggggaaaggccttcccaggcccttctgacccctgtggccctggactttccttgtctggactcaccccaggcctggctttcagccattggactggagtgctaccaggacaacttctccaagtttggcctctgtaccttcagtgatgtggctcagctcagcctagaagacctgcctgccctgggcatcaccctggctggccaccagaagaagctgctgcaccacatccagctccttcagcaacacctgaggcagcagggctcagtggaggtctgagaatgacgatacccgtgactcagccctggacactggtccgagaagggacatgtgggacgtgagccgggctccaacagcctctgtgagagatgccccacaccaaacccaaccctcccgatggctgcattccctggtcctccgcctctccaccagccccctcctcattaaagggaaagaagggaatttgcaa

SEQ ID NO: 9639 - DNA, 2425 bp, Homo sapiens
  source 1..2425: mol_type = unassigned DNA
atggctactgaaggggctgcccagttagggaacagagtggcgggcatggtgtctgtcgggggctgccgctgccagcctggataccaaccagcacgaggagacaaggcctgccaagcctgcccacgggggctctataagtcttctgctgggaatgctccctgctcaccatgccctgcccgcagtcacgctcccaacccagcagcccccgtttgcccctgcctggagggcttctaccgggccagttccgacccaccagaggccccctgcactggtcctccatcggctccccaggagctttggtttgaggtgcaaggctcagcactcatgctacactggcgcctgcctcgggagctggggggtcgaggggacctgctcttcaatgtcgtgtgcaaggagtgtgaaggccgccaggaacctgccagcggtggtgggggcacttgtcaccgctgcagggatgaggtccacttcgaccctcgccagagaggcctgactgagagccgagtgttagtggggggactccgggcacacgtaccctacatcttagaggtgcaggctgttaatggggtgtctgagctcagccctgaccctcctcaggctgcagccatcaatgtcagcaccagccatgaagtgccctctgctgtccctgtggtgcaccaggtgagccgggcatccaacagcatcacggtgtcctggccgcagcccgaccagaccaatgggaacatcctggactatcagctccgctactatgaccaggcagaagacgaatcccactccttcaccctgaccagcgagaccaacactgccaccgtgacacagctgagccctggccacatctatggtttccaggtgcgggcccggactgctgccggccacggcccctacgggggcaaagtctatttccagacacttcctcaaggggagctgtcttcccagcttccggaaagactctccttggtgatcggctccatcctgggggctttggccttcctcctgctggcagccatcaccgtgctggcggtcgtcttccagcggaagcggcgtgggactggctacacggagcagctgcagcaatacagcagcccaggactcggggtgaagtattacatcgacccctccacctacgaggacccctgtcaggccatccgagaacttgcccgggaagtcgatcctgcttatatcaagattgaggaggtcattgggacaggctcttttggagaagtgcgccagggccgcctgcagccacggggacggagggagcagactgtggccatccaggccctgtgggccgggggcgccgaaagcctgcagatgaccttcctgggccgggccgcagtgctgggtcagttccagcaccccaacatcctgcggctggagggcgtggtcaccaagagccgacccctcatggtgctgacggagttcatggagcttggccccctggacagcttcctcaggcagcgggagggccagttcagcagcctgcagctggtggccatgcagcggggagtggctgctgccatgcagtacctgtccagctttgccttcgtccatcgctcgctgtctgcccacagcgtgctggtgaatagccacttggtgtgcaaggtggcccgtcttggccacagtcctcagggcccaagttgtttgcttcgctgggcagccccagaggtcattgcacatggaaagcatacaacatccagtgatgtctggagctttgggatactcatgtgggaagtgatgagttatggagaacggccttactgggacatgagtgagcaggaggtactaaatgcaatagagcaggagttccggctgcccccgcctccaggctgtcctcctggattacatctacttatgttggacacttggcagaaggaccgtgcccggcggcctcattttgaccagctggtggctgcatttgacaagatgatccgcaagccagataccctgcaggctggcggggacccaggggaaaggccttcccaggcccttctgacccctgtggccctggactttccttgtctggactcaccccaggcctggctttcagccattggactggagtgctaccaggacaacttctccaagtttggcctctgtaccttcagtgatgtggctcagctcagcctagaagacctgcctgccctgggcatcaccctggctggccaccagaagaagctgctgcaccacatccagctccttcagcaacacctgaggcagcagggctcagtggaggtctgagaatgacgatacccgtgactcagccctggacactggtccgagaagggacatgtgggacgtgagccgggctccaacagcctctgtgagagatgccccacaccaaacccaaccctcccgatggctgcattccctggtcctccgcctctccaccagccccctcctcattaaagggaaagaagggaatttgcaa

SEQ ID NO: 9640 - DNA, 4008 bp, Homo sapiens
  source 1..4008: mol_type = unassigned DNA
cggagggggcgggccgggctgcgttcgctccagccgcggctctacagcagcgggcggcgggacccgggacccagcttggcgacggcgatctcgacgcgggcccccaggatctcccggcgccccacctctggagcagcccctgccgccagcgtcaggtccaccccggaatcccagggactctcggcgccgaacggacccgggccgggtgcaacggggtccccggactggagaagacgcgggtggcaccgtgcgagctccaggagccccgggtccactgcgaggcctcggggggcgcagacctgcagagactgcggccaacgggaagaaataaagggattatagtccacccaattcacagacttctgagactcagacacgaggagagatagagaaccgccaatctctagatcaacaagcaaaggaggtgccaagcctgtttgtcttcattgtgacactggagtctagatgctgggaagtccaagatcagggtgccggcatggtcagttcctggcgaagcctctcttctaggtttcagactgccctcttctttgttgtgtcctcgaatggcagaaaaaggggtggctgttggaggaagggaggagagtaaatgaagagaaagaactggaataaccccttgcagaaaaaaaaaaaaaggcaagcttagctgtacaccctgagtcttgcaaaagctgcagccccacccaggagcagggtggtggctggggcgatggtggacgccctgaagatgtcccatggctactgaaggggctgcccagttagggaacagagtggcgggcatggtgtgtagcctatgggtgctgctcctggtgtcttcagttctggctctggaagaggtattgctggacaccaccggagagacatctgagattggctggctcacctacccaccaggggggtgggacgaggtgagtgttctggacgaccagcgacgcctgactcggacctttgaggcatgtcatgtggcaggggcccctccaggcaccgggcaggacaattggttgcagacacactttgtggagcggcgcggggcccagagggcgcacattcgactccacttctctgtgcgggcatgctccagcctgggtgtgagcggcggcacctgccgggagaccttcaccctttactaccgtcaggctgaggagcccgacagccctgacagcgtttcctcctggcacctcaaacgctggaccaaggtggacacaattgcagcagacgagagctttccctcctcctcctcctcctcctcctcttcttcctctgcagcgtgggctgtgggaccccacggggctgggcagcgggctggactgcaactgaacgtcaaagagcggagctttgggcctctcacccaacgcggcttctacgtggccttccaggacacgggggcctgcctggccctggtcgctgtcaggctcttctcctacacctgccctgccgtgctccgatcctttgcttcctttccagagacgcaggccagtggggctgggggggcctccctggtggcagctgtgggcacctgtgtggctcatgcagagccagaggaggatggagtagggggccaggcaggaggcagcccccccaggctgcactgcaacggggagggcaagtggatggtagctgtcgggggctgccgctgccagcctggataccaaccagcacgaggagacaaggcctgccaagcctgcccacgggggctctataagtcttctgctgggaatgctccctgctcaccatgccctgcccgcagtcacgctcccaacccagcagcccccgtttgcccctgcctggagggcttctaccgggccagttccgacccaccagaggccccctgcactggtcctccatcggctccccaggagctttggtttgaggtgcaaggctcagcactcatgctacactggcgcctgcctcgggagctggggggtcgaggggacctgctcttcaatgtcgtgtgcaaggagtgtgaaggccgccaggaacctgccagcggtggtgggggcacttgtcaccgctgcagggatgaggtccacttcgaccctcgccagagaggcctgactgagagccgagtgttagtggggggactccgggcacacgtaccctacatcttagaggtgcaggctgttaatggggtgtctgagctcagccctgaccctcctcaggctgcagccatcaatgtcagcaccagccatgaagtgccctctgctgtccctgtggtgcaccaggtgagccgggcatccaacagcatcacggtgtcctggccgcagcccgaccagaccaatgggaacatcctggactatcagctccgctactatgaccaggcagaagacgaatcccactccttcaccctgaccagcgagaccaacactgccaccgtgacacagctgagccctggccacatctatggtttccaggtgcgggcccggactgctgccggccacggcccctacgggggcaaagtctatttccagacacttcctcaaggggagctgtcttcccagcttccggaaagactctccttggtgatcggctccatcctgggggctttggccttcctcctgctggcagccatcaccgtgctggcggtcgtcttccagcggaagcggcgtgggactggctacacggagcagctgcagcaatacagcagcccaggactcggggtgaagtattacatcgacccctccacctacgaggacccctgtcaggccatccgagaacttgcccgggaagtcgatcctgcttatatcaagattgaggaggtcattgggacaggctcttttggagaagtgcgccagggccgcctgcagccacggggacggagggagcagactgtggccatccaggccctgtgggccgggggcgccgaaagcctgcagatgaccttcctgggccgggccgcagtgctgggtcagttccagcaccccaacatcctgcggctggagggcgtggtcaccaagagccgacccctcatggtgctgacggagttcatggagcttggccccctggacagcttcctcaggcagcgggagggccagttcagcagcctgcagctggtggccatgcagcggggagtggctgctgccatgcagtacctgtccagctttgccttcgtccatcgctcgctgtctgcccacagcgtgctggtgaatagccacttggtgtgcaaggtggcccgtcttggccacagtcctcagggcccaagttgtttgcttcgctgggcagccccagaggtcattgcacatggaaagcatacaacatccagtgatgtctggagctttgggatactcatgtgggaagtgatgagttatggagaacggccttactgggacatgagtgagcaggaggtactaaatgcaatagagcaggagttccggctgcccccgcctccaggctgtcctcctggattacatctacttatgttggacacttggcagaaggaccgtgcccggcggcctcattttgaccagctggtggctgcatttgacaagatgatccgcaagccagataccctgcaggctggcggggacccaggggaaaggccttcccaggcccttctgacccctgtggccctggactttccttgtctggactcaccccaggcctggctttcagccattggactggagtgctaccaggacaacttctccaagtttggcctctgtaccttcagtgatgtggctcagctcagcctagaagacctgcctgccctgggcatcaccctggctggccaccagaagaagctgctgcaccacatccagctccttcagcaacacctgaggcagcagggctcagtggaggtctgagaatgacgatacccgtgactcagccctggacactggtccgagaagggacatgtgggacgtgagccgggctccaacagcctctgtgagagatgccccacaccaaacccaaccctcccgatggctgcattccctggtcctccgcctctccaccagccccctcctcattaaagggaaagaagggaatttgcaa

SEQ ID NO: 9641 - DNA, 642 bp, Homo sapiens
  source 1..642: mol_type = unassigned DNA
atggcgcccgcgcagcgcccgctgctcccgctgctgctcctgctgttaccgctgccgccgccgcccttcgcgcgcgccgaggacgccgcccgcgccaactcggaccgctacgccgtctactggaaccgcagcaaccccaggttccacgcaggcgcgggggacgacggcgggggctacacggtggaggtgagcatcaatgactacctggacatctactgcccgcactatggggcgccgctgccgccggccgagcgcatggagcactacgtgctgtacatggtcaacggcgagggccacgcctcctgcgaccaccgccagcgcggcttcaagcgctgggagtgcaaccggcccgcggcgcccggggggccgctcaagttctcggagaagttccagctcttcacgcccttctccctgggcttcgagttccggcccggccacgagtattactacatctctgccacgcctcccaatgctgtggaccggccctgcctgcgactgaaggtgtacgtgcggccgaccaacgagaccctgtacgaggctcctgagcccatcttcaccagcaataactcgtgtagcagcccgggcggctgccgcctcttcctcagcaccatccccgtgctctggaccctcctgggttcctag

SEQ ID NO: 9642 - DNA, 1782 bp, Homo sapiens
  source 1..1782: mol_type = unassigned DNA
ggagctgggaagcggagaagccgggagcgcggggctcagtcggggggcggcggcggcggcggctccggggatggcggcggctccgctgctgctgctgctgctgctcgtgcccgtgccgctgctgccgctgctggcccaagggcccggaggggcgctgggaaaccggcatgcggtgtactggaacagctccaaccagcacctgcggcgagagggctacaccgtgcaggtgaacgtgaacgactatctggatatttactgcccgcactacaacagctcgggggtgggccccggggcgggaccggggcccggaggcggggcagagcagtacgtgctgtacatggtgagccgcaacggctaccgcacctgcaacgccagccagggcttcaagcgctgggagtgcaaccggccgcacgccccgcacagccccatcaagttctcggagaagttccagcgctacagcgccttctctctgggctacgagttccacgccggccacgagtactactacatctccacgcccactcacaacctgcactggaagtgtctgaggatgaaggtgttcgtctgctgcgcctccacatcgcactccggggagaagccggtccccactctcccccagttcaccatgggccccaatgtgaagatcaacgtgctggaagactttgagggagagaaccctcaggtgcccaagcttgagaagagcatcagcgggaccagccccaaacgggaacacctgcccctggccgtgggcatcgccttcttcctcatgacgttcttggcctcctagctctgccccctcccctggggggggagagatggggcggggcttggaaggagcagggagcctttggcctctccaagggaagcctagtgggcctagacccctcctcccatggctagaagtggggcctgcaccatacatctgtgtccgccccctctaccccttccccccacgtagggcactgtagtggaccaagcacggggacagccatgggtcccgggcggccttgtggctctggtaatgtttggtaccaaacttgggggccaaaaagggcagtgctcaggactccctggcccctggtacctttccctgactcctggtgccctctccctttgtccccccagagagacatatgcccccagagagagcaaatcgaagcgtgggaggcacccccattgctctcctccaggggcagaacatggggaggggactagatgggcaaggggcagcactgcctgctgcttccttcccctgtttacagcaataagcacgtcctcctcccccactcccacttccaggattgtggtttggattgaaaccaagtttacaagtagacacccctgggggggcgggcagtggacaaggatggcaaggggtgggcattggggtgccaggcaggcatgtacagactctatatctctatatataatgtacagacagacagagtcccttccctctttaaccccctgacctttcttgacttccccttcagcttcagaccccttccccaccaggctaggccccccacacctgggggaccccctggcccctcttttgtcttctgtgaagacaggacctatgcaacgcacagacacttttggagaccgtaaaacaacaacgccccctcccttccagccctgagccgggaaccatctcccaggaccttgccctgctcaccctatgtggtcccacctatcctcctgggcctttttcaagtgctttggctgtgactttcatactctgctcttagtctaaaaaaaataaactggagataaaaataa

SEQ ID NO: 9643 - DNA, 1035 bp, Homo sapiens
  source 1..1035: mol_type = unassigned DNA
agtcggggggcggcggcggcggcggctccggggatggcggcggctccgctgctgctgctgctgctgctcgtgcccgtgccgctgctgccgctgctggcccaagggcccggaggggcgctgggaaaccggcatgcggtgtactggaacagctccaaccagcacctgcggcgagagggctacaccgtgcaggtgaacgtgaacgactatctggatatttactgcccgcactacaacagctcgggggtgggccccggggcgggaccggggcccggaggcggggcagagcagtacgtgctgtacatggtgagccgcaacggctaccgcacctgcaacgccagccagggcttcaagcgctgggagtgcaaccggccgcacgccccgcacagccccatcaagttctcggagaagttccagcgctacagcgccttctctctgggctacgagttccacgccggccacgagtactactacatctccacgcccactcacaacctgcactggaagtgtctgaggatgaaggtgttcgtctgctgcgcctccaaagactttgagggagagaaccctcaggtgcccaagcttgagaagagcatcagcgggaccagccccaaacgggaacacctgcccctggccgtgggcatcgccttcttcctcatgacgttcttggcctcctagctctgccccctcccctggggggggagagatggggcggggcttggaaggagcagggagcctttggcctctccaagggaagcctagtgggcctagacccctcctcccatggctagaagtggggcctgcaccatacatctgtgtccgccccctctaccccttccccccacgtagggcactgtagtggaccaagcacggggacagccatgggtcccgggcggccttgtggctctggtaatgtttggtaccaaacttgggggccaaaaagggcagtgctcaggactccctggcccctggtacctttccctgactcctggtgccctctccctttgtccccccagagagacatatgcccccagagagagc

SEQ ID NO: 9644 - DNA, 1037 bp, Homo sapiens
  source 1..1037: mol_type = unassigned DNA
actttgtacctttctctcctcgactgtgaagcgggccgggacctgccaggccagaccaaaccggacctcgggggcgatgcggctgctgcccctgctgcggactgtcctctgggccgcgttcctcggctcccctctgcgcgggggctccagcctccgccacgtagtctactggaactccagtaaccccagcctgcggcgagagggctacaccgtgcaggtgaacgtgaacgactatctggatatttactgcccgcactacaacagctcgggggtgggccccggggcgggaccggggcccggaggcggggcagagcagtacgtgctgtacatggtgagccgcaacggctaccgcacctgcaacgccagccagggcttcaagcgctgggagtgcaaccggccgcacgccccgcacagccccatcaagttctcggagaagttccagcgctacagcgccttctctctgggctacgagttccacgccggccacgagtactactacatctccacgcccactcacaacctgcactggaagtgtctgaggatgaaggtgttcgtctgctgcgcctccacatcgcactccggggagaagccggtccccactctcccccagttcaccatgggccccaatgtgaagatcaacgtgctggaagactttgagggagagaaccctcaggtgcccaagcttgagaagagcatcagcgggaccagccccaaacgggaacacctgcccctggccgtgggcatcgccttcttcctcatgacgttcttggcctcctagctctgccccctcccctggggggggagagatggggcggggcttggaaggagcagggagcctttggcctctccaagggaagcctagtgggcctagacccctcctcccatggctagaagtggggcctgcaccatacatctgtgtccgccccctctaccccttccccccacgtagggcactgtagtggaccaagcacggggacagccatgggtcccgggcggccttgtggctctggtaatgtttggtaccaaacttgggggcc

SEQ ID NO: 9645 - DNA, 1096 bp, Homo sapiens
  source 1..1096: mol_type = unassigned DNA
cttccctcttcactttgtacctttctctcctcgactgtgaagcgggccgggacctgccaggccagaccaaaccggacctcgggggcgatgcggctgctgcccctgctgcggactgtcctctgggccgcgttcctcggctcccctctgcgcgggggctccagcctccgccacgtagtctactggaactccagtaaccccaggttgcttcgaggagacgccgtggtggagctgggcctcaacgattacctagacattgtctgcccccactacgaaggcccagggccccctgagggccccgagacgtttgctttgtacatggtggactggccaggctatgagtcctgccaggcagagggcccccgggcctacaagcgctgggtgtgctccctgccctttggccatgttcaattctcagagaagattcagcgcttcacacccttctccctcggctttgagttcttacctggagagacttactactacatctcggtgcccactccagagagttctggccagtgcttgaggctccaggtgtctgtctgctgcaaggagaggaaccttccctctcatcccaaggagccagagtcctcccaagatcccctggaggaggagggatccctgctgcctgcactgggggtgccaattcagaccgacaagatggagcattgatgggggagatcagagggtctgaggtgactcttgcaggagcctgtcccctcatcacaggctaaagaagagcagtagacagccctggacactctgaagcagaggcaagacaaacacaggcgctttgcaggctgctctgagggtctcagcccatcccccaggaggactgggatttggtatgatcaaatcctcaagccagctgggggcccaggctgaagacctggggacaggtcgattgctggaccagggcaaagaagaagccctgccatctgtgccctgtgggccttttccctggggcagcaccttgccctccccaggggatcactcacttgtcttctatgaagacggactcttcatgaggttgaatttcatgccagtttgtatttttataagtatctagaccaaaccttcaataaaccactcatctttt

SEQ ID NO: 9646 - DNA, 1263 bp, Homo sapiens
  source 1..1263: mol_type = unassigned DNA
ccgcaacttccctcttcactttgtacctttctctcctcgactgtgaagcgggccgggacctgccaggccagaccaaaccggacctcgggggcgatgcggctgctgcccctgctgcggactgtcctctgggccgcgttcctcggctcccctctgcgcgggggctccagcctccgccacgtagtctactggaactccagtaaccccaggttgcttcgaggagacgccgtggtggagctgggcctcaacgattacctagacattgtctgcccccactacgaaggcccagggccccctgagggccccgagacgtttgctttgtacatggtggactggccaggctatgagtcctgccaggcagagggcccccgggcctacaagcgctgggtgtgctccctgccctttggccatgttcaattctcagagaagattcagcgcttcacacccttctccctcggctttgagttcttacctggagagacttactactacatctcggtgcccactccagagagttctggccagtgcttgaggctccaggtgtctgtctgctgcaaggagaggaagtctgagtcagcccatcctgttgggagccctggagagagtggcacatcagggtggcgagggggggacactcccagccccctctgtctcttgctattactgctgcttctgattcttcgtcttctgcgaattctgtgagccaagcagaccttccctctcatcccaaggagccagagtcctcccaagatcccctggaggaggagggatccctgctgcctgcactgggggtgccaattcagaccgacaagatggagcattgatgggggagatcagagggtctgaggtgactcttgcaggagcctgtcccctcatcacaggctaaagaagagcagtagacagccctggacactctgaagcagaggcaagacaaacacaggcgctttgcaggctgctctgagggtctcagcccatcccccaggaggactgggatttggtatgatcaaatcctcaagccagctgggggcccaggctgaagacctggggacaggtcgattgctggaccagggcaaagaagaagccctgccatctgtgccctgtgggccttttccctggggcagcaccttgccctccccaggggatcactcacttgtcttctatgaagacggactcttcatgaggttgaatttcatgccagtttgtatttttataagtatctagaccaaaccttcaataaaccactcatctttttgttgccctccccaa

SEQ ID NO: 9647 - DNA, 1052 bp, Homo sapiens
  source 1..1052: mol_type = unassigned DNA
ctctcctcgactgtgaagcgggccgggacctgccaggccagaccaaaccggacctcgggggcgatgcggctgctgcccctgctgcggactgtcctctgggccgcgttcctcggctcccctctgcgcgggggctccagcctccgccacgtagtctactggaactccagtaaccccaggttgcttcgaggagacgccgtggtggagctgggcctcaacgattacctagacattgtctgcccccactacgaaggcccagggccccctgagggccccgagacgtttgctttgtacatggtggactggccaggctatgagtcctgccaggcagagggcccccgggcctacaagcgctgggtgtgctccctgccctttggccatgttcaattctcagagaagattcagcgcttcacacccttctccctcggctttgagttcttacctggagagacttactactacatctcggtgcccactccagagagttctggccagtgcttgaggctccaggtgtctgtctgctgcaaggagaggagagccagagtcctcccaagatcccctggaggaggagggatccctgctgcctgcactgggggtgccaattcagaccgacaagatggagcattgatgggggagatcagagggtctgaggtgactcttgcaggagcctgtcccctcatcacaggctaaagaagagcagtagacagccctggacactctgaagcagaggcaagacaaacacaggcgctttgcaggctgctctgagggtctcagcccatcccccaggaggactgggatttggtatgatcaaatcctcaagccagctgggggcccaggctgaagacctggggacaggtcgattgctggaccagggcaaagaagaagccctgccatctgtgccctgtgggccttttccctggggcagcaccttgccctccccaggggatcactcacttgtcttctatgaagacggactcttcatgaggttgaatttcatgccagtttgtatttttataagtatctagaccaaaccttcaataaaccactcatctttt

SEQ ID NO: 9648 - DNA, 3314 bp, Homo sapiens
  source 1..3314: mol_type = unassigned DNA
gcacagcggcagcggagggagtctatgcgagctggacagcagtgggaggtttgtgaggctcgcactggccgcagaccctcgggctcgatcgcccgggagccaggactcggcgacgcgaggctgccgggctacccggccgaggcttcgggggcgcaaactaatgggactggctcgctcggcagcatctccccgctcttctaagtacactgagcagggcccgcgctgaagtagaagctgtccgggggcgcgtagcccggagtcccagtgtggcccggaggaacggagcccgtgccagggcggcccagtcgggagcccggggaccgagcttgtgctgtggggaaacccccacttcttccaagggacagcgatcccgggacggtcgaggcgtcggggcggtcaccgagacctctgcgggaagaccccgtcggggagagggcgcgcagccccgaagcgtctcgggaagtcgagcggaatcgggcgggatcacccgggggcgcagagcccccgtcgcgcctcgtgcggcagcggagagcccaggagaacgagccctcgggggccgaagcccatgcccgggttgggggcggctgcccagtgagtcctcctggccggccgggcggagaagagcgacaccgaagccggcgggaggggagcacttcaaggccggcggctgcggaggatgggcgcctgagcggctccgagcgcagcgcggcagaggaaggcgaggcgagctttggtgaggaggcgccaagggatcccgaagtgcagtctgcccccgggaagatggctcggcctgggcagcgttggctcggcaagtggcttgtggcgatggtcgtgtgggcgctgtgccggctcgccacaccgctggccaagaacctggagcccgtatcctggagctccctcaaccccaagttcctgagtgggaagggcttggtgatctatccgaaaattggagacaagctggacatcatctgcccccgagcagaagcagggcggccctatgagtactacaagctgtacctggtgcggcctgagcaggcagctgcctgtagcacagttctcgaccccaacgtgttggtcacctgcaataggccagagcaggaaatacgctttaccatcaagttccaggagttcagccccaactacatgggcctggagttcaagaagcaccatgattactacattacctcaacatccaatggaagcctggaggggctggaaaaccgggagggcggtgtgtgccgcacacgcaccatgaagatcatcatgaaggttgggcaagatcccaatgctgtgacgcctgagcagctgactaccagcaggcccagcaaggaggcagacaacactgtcaagatggccacacaggcccctggtagtcggggctccctgggtgactctgatggcaagcatgagactgtgaaccaggaagagaagagtggcccaggtgcaagtgggggcagcagcggggaccctgatggcttcttcaactccaaggtggcattgttcgcggctgtcggtgccggttgcgtcatcttcctgctcatcatcatcttcctgacggtcctactactgaagctacgcaagcggcaccgcaagcacacacagcagcgggcggctgccctctcgctcagtaccctggccagtcccaaggggggcagtggcacagcgggcaccgagcccagcgacatcatcattcccttacggactacagagaacaactactgcccccactatgagaaggtgagtggggactacgggcaccctgtctacatcgtccaagagatgccgccccagagcccggcgaacatctactacaaggtctgagtgcccggcacggcctcaggcccccgagggacagtcggcctggaccggacctctcctttcgcccccacaccccctccccttgccagctgtgcccacctttgtatttagttttgtagtttcttggcttttataatccccctttttccctgccccctgggcttcggaggggggtgcttgtgcccctaacccccatgctcttgtgccttccccctctggccaggcctctgggctccgtgggggcgccccttcttggaaggcagggctggacactgatggacagcaggcagggagacagtcccctggccctgcccctccctcgccccccttgccaccttcccaggactgcttgtccgctatcatcactgtttttaatgcttttgtgttcattttttagctgtcaactcattttcatctgttttttgaagaaaaatggaaaaatgtaaaaggcagcccctccccaggctttgtgagcctggcccaagccagtacaagagggcctggggcacgatgtggtcagccaggaagcataggatgccatttcttttatagattccttggtatttctggtggggtaaggggcaggccagggctgttcacgcccatgagggaagaggaaagtgccactgggcaaggtgtcccaccctcccctcctgaccctcctacgaggcttatcctggcaatggggtagtcactgccacccttccacacacacacacacacacacacacacaaaaaaaaatcccttccttgtgggattcttgggcatctcctgcctccctcactctcacggtaattaatgtcttaattggctgttgcctggggaacaggagagctgctgcaggcagatgacctcatggggggtggagggaggtgaggtgcccaggtggctatttgccctgcagagctgggagtttcacccccaccccccaccctgttctctccttacctttggcatcctttggcctggtggggaaacagaggcccagggtggagacctaagcgggtataagaccaggtggcctgctccttttctgggccctagcacaggtgggtaacccccacccaacccagctcctgctgctgtcccagtcttgggctggggcctggaaagaggaagaggctgcctggggctgggccagcccgctgtgcactttgaccccagttccttgccagcacggctgctaacagactgccacttgagtgcgccttgcaggcactcccagagcagccatggaaggagctggccctcacaccatccacctccacactgcctcctggccagctgcccaccccagtgccaggtgggagagggagcagaacagccagccccttccaggtggcagtcggaagggtttttgtttttgtttctgttgccatttgtgtaaatactagtctttttggaaaaaaaataatgtaaagatgttttgtataaactctgaattattttcttgttgcttttttcttagaaaaaaatgagaactaaaaaaaaaaaa

SEQ ID NO: 9649 - DNA, 3222 bp, Homo sapiens
  source 1..3222: mol_type = unassigned DNA
ggtttcctcccttagcccgctgccctcaatcccagcgaggctggggctccggctcggcgcccccttcctcgctccctggtccggcgccccatgccgcccccgcccggtccccggctcccccagtcccccacttaggcgggctcacagatcccggggtgctggcgcgtgggccgggggcgcgtagggcgcctgcagacggcccctggaagggctctggtggggctgagcgctctgccgcgggggcgcgggcacagcaggaagcaggtccgcgtgggcgctgggggcatcagctaccggggtggtccgggctgaagagccaggcagccaaggcagccaccccggggggtgggcgactttgggggagttggtgccccgccccccaggccttggcggggtcatggggcccccccattctgggccggggggcgtgcgagtcggggccctgctgctgctgggggttttggggctggtgtctgggctcagcctggagcctgtctactggaactcggcgaataagaggttccaggcagagggtggttatgtgctgtaccctcagatcggggaccggctagacctgctctgcccccgggcccggcctcctggccctcactcctctcctaattatgagttctacaagctgtacctggtagggggtgctcagggccggcgctgtgaggcaccccctgccccaaacctccttctcacttgtgatcgcccagacctggatctccgcttcaccatcaagttccaggagtatagccctaatctctggggccacgagttccgctcgcaccacgattactacatcattgccacatcggatgggacccgggagggcctggagagcctgcagggaggtgtgtgcctaaccagaggcatgaaggtgcttctccgagtgggacaaagtccccgaggaggggctgtcccccgaaaacctgtgtctgaaatgcccatggaaagagaccgaggggcagcccacagcctggagcctgggaaggagaacctgccaggtgaccccaccagcaatgcaacctcccggggtgctgaaggccccctgccccctcccagcatgcctgcagtggctggggcagcaggggggctggcgctgctcttgctgggcgtggcaggggctgggggtgccatgtgttggcggagacggcgggccaagccttcggagagtcgccaccctggtcctggctccttcgggaggggagggtctctgggcctggggggtggaggtgggatgggacctcgggaggctgagcctggggagctagggatagctctgcggggtggcggggctgcagatccccccttctgcccccactatgagaaggtgagtggtgactatgggcatcctgtgtatatcgtgcaggatgggcccccccagagccctccaaacatctactacaaggtatgagggctcctctcacgtggctatcctgaatccagcccttcttggggtgctcctccagtttaattcctggtttgagggacacctctaacatctcggccccctgtgcccccccagccccttcactcctcccggctgctgtcctcgtctccacttttaggattccttaggattcccactgccccacttcctgccctcccgtttggccatgggtgcccccctctgtctcagtgtccctggatcctttttccttggggaggggcacaggctcagcctcctctctgaccatgacccaggcatccttgtccccctcacccacccagagctaggggcgggaacagcccaccttttggttggcaccgccttctttctgcctctcactggttttctcttctctatctcttattctttccctctcttccgtctctaggtctgttcttcttccctagcatcctcctccccacatctcctttcaccctcttggcttcttatcctgtgcctctcccatctcctgggtgggggcatcaaagcatttctccccttagctttcagccccccttctgacctctcataccaaccactcccctcagtctgccaaaaatgggggccttatggggaaggctctgacactccaccccagctcaggccatgggcagcagggctccattctctggcctggcccaggcctctacatacttactccagccatttggggtggttgggtcatgacagctaccatgagaagaagtgtcccgttttgtccagtggccaatagcaagatatgaaccggtcgggacatgtatggacttggtctgatgctgaatgggccacttgggaccggaagtgacttgctccagacaagaggtgaccaggcccggacagaaatggcctgggaagtagcagaagcagtgcagcaggaactggaagtgccttcatccaggacaggaagtagcacttctgaaacaggaagtggtctggctggaactccaagtggcttagtctgggggatcaggaggtgggaggtggatggttcttattctgtggagaagaagggcgggaagaacttcctttcaggaggaagctggaacttactgactgtaagaggttagaggtggaccgagaaggacttttcccagtcttcagtggcacttcccaagatctcccttcccttgtgctctgtgctgattttaggacagctaagatgactgccatgtgctgtggcaggcctaatttgtcttgttctttcctttccatatcccagtataatctctgttaatcaacaggactaccccaagaacccatgtgctctcccgagtaacccagatggctgtcttgttcattccatcctacatttctgactcctttcagactcaacacagttcccttcttagtgaccaaaatggtggcctactggctggtctagctgacagtggtacttagcaaaggccactgtttccatagtgaccagctgatacctcttcctgccctctagtgtgcaattgggtgttgcctcagtttcctcccagctcagttttattagatcaaagctgttgttgggcaccaggttggccacctcaatcaccagccaagatggttgctttgtccaccagaggtcaagttcacctctctggtgctgtagttcccagctccttcctgatttttctaatcgctccttctggggaacaggaagttgatattgccatggtggcggggtatgccgtcacctcagtagttttactgtaaaagggaaatttgaacaacaaaaaccaaaaaaaataaaaataaaaaacttcaaaagttgacaagaa

SEQ ID NO: 9650 - DNA, 1773 bp, Homo sapiens
  source 1..1773: mol_type = unassigned DNA
atgatggaaacaccatggctgcggcggcccagctctctctgacacagttatcaagtgggaatcctgtatatgaaaaatactatagacaggttgatacaggcaatactggaagggtgttggcttctgatgctgctgctttcctgaaaaaatcagggcttccagacttgatacttggaaagatttgggatttagccgacacagatggcaaaggtatcctgaacaaacaagaattctttgttgctttgcgtcttgtggcatgtgcccagaatggattggaagtttcactaagtagtttgaacctggctgttcctccaccaagatttcatgataccagtagtcctttgctaatcagtggaacctctgcagctgagctcccatgggctgtaaaacctgaagataaggccaaatatgatgcaatatttgatagtttaagcccagtgaatggatttctgtctggtgataaagtgaaaccagtgttgctcaactctaagttacctgtggatatccttggaagagtttgggagttgagtgatattgaccatgatggaatgcttgacagagatgagtttgcagttacggagtctcactctgtcactcaggctggagtgcagtggcgggatctcagctcactgcagcctcggcctcctggattcaagttattcttccacctcagcctcctgaggagctgggattacaggcatgcaccaccacccccggctaatttttatatttttagtagagacagcgtttcgccgtgtttgccagactggtctcgagctcctgataataggtgatccactcgcctcggcctcccaaagtgccgggattacaggcatgagccacctcttcaggcccaagacaaaaatatagttagagtagatggggaatagtagtgtcatcatttgataaacagtagtgcatgctaaggtaaatgaataaacacaatttatcttatatgcctggagcctattcccaggtaactggccttttttttttttaataaaaagctttattaaaaataatttttgaataataaatacatttgtaggaaattactaccttgaattttgttttaaatagtagacacccctttatcttctcctagatttacttgttaaccattttgtcacatttgctttctccctgtatccatattcttcagaattttttcctagttttaaactctagcttgtgtgattttaatactgcttctcctgttccctctttttttgaattacctgatatttcttatgtttgttgtgtatgtctcttgaaaatggcagatttctgtattttaatgctttacctaattggatagtttttaagataatagcacttatattgatttgattttcccttctttaccgatttattttacatttttattttctctgtttcttactgttgcttattatcaacttgtgattcattcccttaccccgcctcccagttaatgtggaaattttgttataatgtcttgtttcattaatatagttaatacaggttgagcatccctaatctgaaaatccaaaacttgaaatgcttcaaaatctgaaacttttgagtactgacatgacccacaaagtggaaaattccactcctggtctcatgtgataagttacagtcaaaacttttgtttcatgcacaaaattattaaaaagattgtataaaattatcttagattatgtgtataaagtttatatgaaacataaatgaatttcatgtttagacttgggtcccatccccaagataggataatattccagaatctgg

SEQ ID NO: 9651 - DNA, 4736 bp, Homo sapiens
  source 1..4736: mol_type = unassigned DNA
tggaaacaccatggctgcggcggcccagctctctctgacacagttatcaagtgggaatcctgtatatgaaaaatactatagacaggttgatacaggcaatactggaagggtgttggcttctgatgctgctgctttcctgaaaaaatcagggcttccagacttgatacttggaaagatttgggatttagccgacacagatggcaaaggtatcctgaacaaacaagaattctttgttgctttgcgtcttgtggcatgtgcccagaatggattggaagtttcactaagtagtttgaacctggctgttcctccaccaagatttcatgataccagtagtcctttgctaatcagtggaacctctgcagctgagctcccatgggctgtaaaacctgaagataaggccaaatatgatgcaatatttgatagtttaagcccagtgaatggatttctgtctggtgataaagtgaaaccagtgttgctcaactctaagttacctgtggatatccttggaagagtttgggagttgagtgatattgaccatgatggaatgcttgacagagatgagtttgcagttgccatgtttttggtatactgtgcactggagaaagaacctgtgccaatgtccttgcctccagccttggtgccaccatctaagagaaaaacgtgggttgtatcccctgcagaaaaagctaaatatgatgaaatcttcctgaaaactgataaagatatggacggatttgtgtctggattggaggtccgtgaaatattcttgaaaacaggtttaccttctaccttactagcccatatatggtcattatgcgacacaaaggactgtgggaagctttcaaaggatcagtttgccttggcttttcacttaatcagtcagaagttaatcaagggcattgatcctcctcacgttcttactcctgaaatgattccaccatcagacagggccagtttacaaaagaacatcataggatcaagtcctgttgcagatttctctgctattaaggaactagatactcttaacaatgaaatagttgacctacagagggaaaagaataatgtggaacaggaccttaaggagaaggaagatactattaaacagaggacaagtgaggttcaggatcttcaagatgaagttcaaagggagaatactaatctgcaaaaactacaggcccagaaacagcaggtacaggaactccttgatgaactggatgagcagaaagcccagctggaggagcaactcaaggaagtcagaaagaaatgtgctgaggaggcccaactggcaagaagtagtcctgaactactgccttctggtgtgactgatgaaaatgaggtgactacagctgttactgaaaaagtttgttctgaactcgacaataatagacattcaaaagaggaagatccatttaatgtagactcaagttcgctgacaggtccagttgcagatacaaacttggattttttccagtctgatccttttgttggcagtgatcctttcaaggatgatccttttggaaaaatcgatccatttggtggtgatcctttcaaaggttcagatccatttgcatcagactgtttcttcaggcaatctactgatccttttgccacttcaagcactgaccctttcagtgcagccaacaatagcagtattacatcggtagaaacgttgaagcacaatgatccttttgctcctggtggaacagttgttgcagcaagcgattcagccacagacccctttgcttctgtttttgggaatgaatcatttggaggtggatttgctgacttcagcacattgtcaaaggtcaacaatgaagatccttttcgttcagccacatcgagctctgtcagcaacgtagtgattacaaaaaatgtatttgaggaaacatcggtcaaaagtgaagatgaacccccagcactgccaccaaagatcggaactccaacaagaccctgccctctaccacctgggaaaagatccatcaacaaattggattctcctgatccctttaaactgaatgatccatttcagcctttcccaggcaacgatagccccaaagaaaaagatcctgaaatattttgtgatccattcacttctgctactaccactaccaataaagaggctgatccaagcaattttgccaacttcagtgcttatccctctgaagaagatatgatcgaatgggccaagagggaaagtgagagagaggaagagcagaggcttgcccgactaaatcagcaggaacaagaagacttagaactggctattgcactcagcaaatctgagatatcagaagcatgaagaattctcttgttctttggcaacaatatagtattcttcttcctgaatactgaaactatttacaatgtgtatcaaaactacctgtgagcatgggaatacaaaaggtttgagattcctgtaaatgtgacaaaattttaggattttttttttttcttcattacagattcgtctttttttttttttcttataaaagccgtaacccagtcagacaaattcaccttcacttaggcccctgttctggtatacatttactgtgagcttttgcctgcctgtgctattttacttgtaaagctagagcacccaagcttctgccttctggaatatagagaaatagtttcaccctgcactaccctgttctgtagttattctgatgatagccagtgaggttcttaaagtttgcagtattctcccctgattggaatggttgagtgagggtaagggaaagaatatcttatttcttttatgattggtgcaaattggctaaagtgcatttttaaatttcctctacttaatttgtttttcagagataaggaaaaatattttgcacagatttactccactatggaaaagggatgctgtaggttgaaccattatagcctcagattcgatcttttcctaactaaaaatattaaagcctcatgtgtgaaataaatttttaaaaagatttatctggatttagagaattttagatcaacagatacctctcagtgtgtttgctaattaataaaaatcagtttcttacaaataaagtttgtaagaaaatgttcattttaagtgatagatagtggagaaaatttatcacctaaaatatacccatcagtataaggcaagcaaaagtcttaacatggcagccattctgcctttgccgtggccctgtcctgtttagttcttagtgggttaatttttgtacttttgcagaagaaacttcagcaagctagaactggaaggtactttaatttttcatatatatttgtttttttttttttaatgaaggctcatttacttgaaatgtaaaaactttcactgaatacaaatagaaaaagtgatgtgttttatatcatattgctttttgtccatctttgtggtttagtttatttactcacttcatgtttttcacctataaaattgtcaagctagcaaaaaaactcttgtttttttaattgggagagaagagacctgccagattatcagacctcttcatgttaaaagaccatctcctgtaaaactgacctagtggacaagctgaatttgaaatagactgtgaagtaagctgtaacttgtcattttaattttgtttaacacggttactgacttagatgatgtattaaataccaagataaagaaaaatgcacctaaaatctaattagaattctctgggtcaacaagtcaaggtggtattgatctgtgttaatctgagtaacttattgcctagcctataaataaattccaaaatatccaattcatttcttcttgaaatggtgcttgttttgttttctttccattacacaattagactcctacagtttaaaacaaactttaaaccactatcttgcactgctaacttttttctacctttgtaaatagaaacatttctgcataaaagtcatacatatgaagcaagggctgaatcataatcacaaggcttaattttgataaacgaatccagtgacctaaggattttctgcaaaatttgactgggagttgtgataggtggtatttttgtttattttcttcctcttactccttaggataaaggtaagttgacttgaacaactttcttttgcactgggaaaataagcaaatgtttaaatgcttcaaaaaaattttcaattaaactcaaatattaaatatctataacttataaacaccaactttcaatgtaataaatgtatcctaatcttatgtatgtttaactggattacatagatttttatcttttgttaaaatgtgtataccccgtggaccaacataatattaaagtatgtatatattatataaatatatatgtatatgtgctcgcttgtgtaggatgaatgtcttagagtcgtttgtggtattttatgttgttgactctggctccagggcctgtgcttgaaaaggacagataagtattgcccagagctaagtggcactacttacaaagttttaaatgtcttctacatactgattcatgtttatttgagctctctttatagaattttctcttaaagtttcaaacctctaagttgtagcctgtaattatgagaacagtaaactttaagtaataataaagaatcccatccatatatccaatttgcaattgagttttgcatggttctctgattatgtccatgctgtgtccaaggaggagtaggtacatacaatcagcacagattaatatatgtaaagggtttgggacagcacctggtatagaataaataataaatgtaaactatta

SEQ ID NO: 9652 - DNA, 5225 bp, Homo sapiens
  source 1..5225: mol_type = unassigned DNA
gccccggcctcgcctgcggccgctccctccgcctcctccccgccccgagccccagtcagcccgtcttccttcccctcccttgcatgatggaaacaccatggctgcggcggcccagctctctctgacacagttatcaagtgggaatcctgtatatgaaaaatactatagacaggttgatacaggcaatactggaagggtgttggcttctgatgctgctgctttcctgaaaaaatcagggcttccagacttgatacttggaaagatttgggatttagccgacacagatggcaaaggtatcctgaacaaacaagaattctttgttgctttgcgtcttgtggcatgtgcccagaatggattggaagtttcactaagtagtttgaacctggctgttcctccaccaagatttcatgataccagtagtcctttgctaatcagtggaacctctgcagctgagctcccatgggctgtaaaacctgaagataaggccaaatatgatgcaatatttgatagtttaagcccagtgaatggatttctgtctggtgataaagtgaaaccagtgttgctcaactctaagttacctgtggatatccttggaagagtttgggagttgagtgatattgaccatgatggaatgcttgacagagatgagtttgcagttgccatgtttttggtatactgtgcactggagaaagaacctgtgccaatgtccttgcctccagccttggtgccaccatctaagagaaaaacgtgggttgtatcccctgcagaaaaagctaaatatgatgaaatcttcctgaaaactgataaagatatggacggatttgtgtctggattggaggtccgtgaaatattcttgaaaacaggtttaccttctaccttactagcccatatatggtcattatgcgacacaaaggactgtgggaagctttcaaaggatcagtttgccttggcttttcacttaatcagtcagaagttaatcaagggcattgatcctcctcacgttcttactcctgaaatgattccaccatcagacagggccagtttacaaaagaacatcataggatcaagtcctgttgcagatttctctgctattaaggaactagatactcttaacaatgaaatagttgacctacagagggaaaagaataatgtggaacaggaccttaaggagaaggaagatactattaaacagaggacaagtgaggttcaggatcttcaagatgaagttcaaagggagaatactaatctgcaaaaactacaggcccagaaacagcaggtacaggaactccttgatgaactggatgagcagaaagcccagctggaggagcaactcaaggaagtcagaaagaaatgtgctgaggaggcccaactgatctcttctctgaaagctgaattaactagtcaggaatcgcagatctccacttacgaagaagaattggcaaaagctagagaagagctgagccgtctacagcaagaaacagcagaattggaggagagtgtagagtcagggaaggctcagttggaacctcttcagcagcacctacaagattcacaacaggaaattagttcaatgcaaatgaaactgatggaaatgaaagatttggaaaatcataatagtcagttaaattggtgcagtagcccacacagcattcttgtaaacggagctacagattattgcagcctcagcaccagcagcagtgaaacagccaaccttaatgaacatgttgaaggccagagcaacctagagtctgagcccatacaccaggaatctccagcaagaagtagtcctgaactactgccttctggtgtgactgatgaaaatgaggtgactacagctgttactgaaaaagtttgttctgaactcgacaataatagacattcaaaagaggaagatccatttaatgtagactcaagttcgctgacaggtccagttgcagatacaaacttggattttttccagtctgatccttttgttggcagtgatcctttcaaggatgatccttttggaaaaatcgatccatttggtggtgatcctttcaaaggttcagatccatttgcatcagactgtttcttcaggcaatctactgatccttttgccacttcaagcactgaccctttcagtgcagccaacaatagcagtattacatcggtagaaacgttgaagcacaatgatccttttgctcctggtggaacagttgttgcagcaagcgattcagccacagacccctttgcttctgtttttgggaatgaatcatttggaggtggatttgctgacttcagcacattgtcaaaggtcaacaatgaagatccttttcgttcagccacatcgagctctgtcagcaacgtagtgattacaaaaaatgtatttgaggaaacatcggtcaaaagtgaagatgaacccccagcactgccaccaaagatcggaactccaacaagaccctgccctctaccacctgggaaaagatccatcaacaaattggattctcctgatccctttaaactgaatgatccatttcagcctttcccaggcaacgatagccccaaagaaaaagatcctgaaatattttgtgatccattcacttctgctactaccactaccaataaagaggctgatccaagcaattttgccaacttcagtgcttatccctctgaagaagatatgatcgaatgggccaagagggaaagtgagagagaggaagagcagaggcttgcccgactaaatcagcaggaacaagaagacttagaactggctattgcactcagcaaatctgagatatcagaagcatgaagaattctcttgttctttggcaacaatatagtattcttcttcctgaatactgaaactatttacaatgtgtatcaaaactacctgtgagcatgggaatacaaaaggtttgagattcctgtaaatgtgacaaaattttaggattttttttttttcttcattacagattcgtctttttttttttttcttataaaagccgtaacccagtcagacaaattcaccttcacttaggcccctgttctggtatacatttactgtgagcttttgcctgcctgtgctattttacttgtaaagctagagcacccaagcttctgccttctggaatatagagaaatagtttcaccctgcactaccctgttctgtagttattctgatgatagccagtgaggttcttaaagtttgcagtattctcccctgattggaatggttgagtgagggtaagggaaagaatatcttatttcttttatgattggtgcaaattggctaaagtgcatttttaaatttcctctacttaatttgtttttcagagataaggaaaaatattttgcacagatttactccactatggaaaagggatgctgtaggttgaaccattatagcctcagattcgatcttttcctaactaaaaatattaaagcctcatgtgtgaaataaatttttaaaaagatttatctggatttagagaattttagatcaacagatacctctcagtgtgtttgctaattaataaaaatcagtttcttacaaataaagtttgtaagaaaatgttcattttaagtgatagatagtggagaaaatttatcacctaaaatatacccatcagtataaggcaagcaaaagtcttaacatggcagccattctgcctttgccgtggccctgtcctgtttagttcttagtgggttaatttttgtacttttgcagaagaaacttcagcaagctagaactggaaggtactttaatttttcatatatatttgtttttttttttttaatgaaggctcatttacttgaaatgtaaaaactttcactgaatacaaatagaaaaagtgatgtgttttatatcatattgctttttgtccatctttgtggtttagtttatttactcacttcatgtttttcacctataaaattgtcaagctagcaaaaaaactcttgtttttttaattgggagagaagagacctgccagattatcagacctcttcatgttaaaagaccatctcctgtaaaactgacctagtggacaagctgaatttgaaatagactgtgaagtaagctgtaacttgtcattttaattttgtttaacacggttactgacttagatgatgtattaaataccaagataaagaaaaatgcacctaaaatctaattagaattctctgggtcaacaagtcaaggtggtattgatctgtgttaatctgagtaacttattgcctagcctataaataaattccaaaatatccaattcatttcttcttgaaatggtgcttgttttgttttctttccattacacaattagactcctacagtttaaaacaaactttaaaccactatcttgcactgctaacttttttctacctttgtaaatagaaacatttctgcataaaagtcatacatatgaagcaagggctgaatcataatcacaaggcttaattttgataaacgaatccagtgacctaaggattttctgcaaaatttgactgggagttgtgataggtggtatttttgtttattttcttcctcttactccttaggataaaggtaagttgacttgaacaactttcttttgcactgggaaaataagcaaatgtttaaatgcttcaaaaaaattttcaattaaactcaaatattaaatatctataacttataaacaccaactttcaatgtaataaatgtatcctaatcttatgtatgtttaactggattacatagatttttatcttttgttaaaatgtgtataccccgtggaccaacataatattaaagtatgtatatattatataaatatatatgtatatgtgctcgcttgtgtaggatgaatgtcttagagtcgtttgtggtattttatgttgttgactctggctccagggcctgtgcttgaaaaggacagataagtattgcccagagctaagtggcactacttacaaagttttaaatgtcttctacatactgattcatgtttatttgagctctctttatagaattttctcttaaagtttcaaacctctaagttgtagcctgtaattatgagaacagtaaactttaagtaataataaagaatcccatccatatatccaatttgcaattgagttttgcatggttctctgattatgtccatgctgtgtccaaggaggagtaggtacatacaatcagcacagattaatatatgtaaagggtttgggacagcacctggtatagaataaataataaatgtaaactatta

SEQ ID NO: 9653 - DNA, 2153 bp, Homo sapiens
  source 1..2153: mol_type = unassigned DNA
tgataaataggttgaggtatggaaggatcgggctgcaacaatgattctcatggtaagggactgtttaaaatcacaacatcgcgacccacattgcgacccatctgacaaacgggaaaagaataatgtggaacaggaccttaaggagaaggaagatactattaaacagaggacaagtgaggttcaggatcttcaagatgaagttcaaagggagaatactaatctgcaaaaactacaggcccagaaacagcaggtacaggaactccttgatgaactggatgagcagaaagcccagctggaggagcaactcaaggaagtcagaaagaaatgtgctgaggaggcccaactgatctcttctctgaaagctgaattaactagtcaggaatcgcagatctccacttacgaagaagaattggcaaaagctagagaagagctgagccgtctacagcaagaaacagcagaattggaggagagtgtagagtcagggaaggctcagttggaacctcttcagcagcacctacaagattcacaacaggaaattagttcaatgcaaatgaaactgatggaaatgaaagatttggaaaatcataatagtcagttaaattggtgcagtagcccacacagcattcttgtaaacggagctacagattattgcagcctcagcaccagcagcagtgaaacagccaaccttaatgaacatgttgaaggccagagcaacctagagtctgagcccatacaccaggaatctccagcaagaagtagtcctgaactactgccttctggtgtgactgatgaaaatgaggtgactacagctgttactgaaaaagtttgttctgaactcgacaataatagacattcaaaagaggaagatccatttaatgtagactcaagttcgctgacaggtccagttgcagatacaaacttggattttttccagtctgatccttttgttggcagtgatcctttcaaggatgatccttttggaaaaatcgatccatttggtggtgatcctttcaaaggttcagatccatttgcatcagactgtttcttcaggcaatctactgatccttttgccacttcaagcactgaccctttcagtgcagccaacaatagcagtattacatcggtagaaacgttgaagcacaatgatccttttgctcctggtggaacagttgttgcagcaagcgattcagccacagacccctttgcttctgtttttgggaatgaatcatttggaggtggatttgctgacttcagcacattgtcaaaggtcaacaatgaagatccttttcgttcagccacatcgagctctgtcagcaacgtagtgattacaaaaaatgtatttgaggaaacatcggtcaaaagtgaagatgaacccccagcactgccaccaaagatcggaactccaacaagaccctgccctctaccacctgggaaaagatccatcaacaaattggattctcctgatccctttaaactgaatgatccatttcagcctttcccaggcaacgatagccccaaagaaaaagatcctgaaatattttgtgatccattcacttctgctactaccactaccaataaagaggctgatccaagcaattttgccaacttcagtgcttatccctctgaagaagatatgatcgaatgggccaagagggaaagtgagagagaggaagagcagaggcttgcccgactaaatcagcaggaacaagaagacttagaactggctattgcactcagcaaatctgagatatcagaagcatgaagaattctcttgttctttggcaacaatatagtattcttcttcctgaatactgaaactatttacaatgtgtatcaaaactacctgtgagcatgggaatacaaaaggtttgagattcctgtaaatgtgacaaaattttaggattttttttttttcttcattacagattcgtctttttttttttttcttataaaagccgtaacccagtcagacaaattcaccttcacttaggcccctgttctggtatacatttactgtgagcttttgcctgcctgtgctattttacttgtaaagctagagcacccaagcttctgccttctggaatatagagaaatagtttcaccctgcactaccctgttctgtagttattctgatgatagccagtgaggttctt

SEQ ID NO: 9654 - DNA, 4061 bp, Homo sapiens
  source 1..4061: mol_type = unassigned DNA
cacttcgcctcaagcgctggagtcgaccagaactctgcggctcggctgccggcaagacccggatagcggatttcgctcctggctgcggggcgcgcactcgcccgcccgcccgctcgctcgttcctcgcgcgggcactgggcatgcgcggcgcgcggttggcactggctgcgagcgggcgggcggctccagacttcacaggcagcagctagcgaggcggtctcgcccggcgcgaggccggcgctgtgctcgcctcggagatcgctgctctttagctgggtgcagaaggcggctccgcggctcgcggacgactggctgggcgcgaatcagattggggggctttctcccggtcccctcccacctcgtctgggctcgcggcgtctccggggaaagccgtggccccgagggcggatccgagaacacacaagtgaaagacacaatgaatggtcatatttctaatcatcccagtagttttggaatgtacccatctcagatgaatggctacggatcatcacctaccttttcccagacggacagagaacatggttcaaaaacaagtgcaaaggccctttatgaacaaaggaagaattatgcacgggacagtgtcagcagtgtgtcagatatatctcaataccgtgttgaacacttgactacctttgtcctggatcggaaagatgctatgatcactgttgatgatggaataaggaaattgaaattgcttgatgccaagggcaaagtgtggactcaagatatgattcttcaagtggatgacagagctgtgagcctgattgatttagaatcaaagaatgaactggagaattttcctttaaacacaatccagcactgccaagctgtgatgcattcatgcagctatgattcagttcttgcactggtgtgcaaagagccaacccagaacaagccagatcttcatctcttccagtgtgatgaggttaaggcaaacctaattagtgaagatattgaaagtgcaatcagtgacagtaaaggagggaaacagaagaggcggcccgacgccctgaggatgatttccaatgcagaccctagtataccgcctccacccagagctcctgcccctgcgccccctgggaccgtcacccaggtggatgttagaagtcgagtggcagcctggtctgcatgggcagccgaccaaggggactttgagaaaccaaggcagtatcatgagcaggaagaaacacctgagatgatggcagcccgcattgacagagatgtgcaaatcttaaaccacattttggatgacattgaattttttatcacaaaactccaaaaagcagcagaagcattttctgagctttctaaaaggaagaaaaacaagaaaggtaaaaggaaaggaccaggagagggtgttttaacgctgcgggcaaaacctccacctcctgatgaatttcttgactgtttccaaaagtttaaacacggatttaaccttctggccaaactgaagtctcatattcagaatcctagtgctgcagatttggttcactttttgtttactccattaaatatggtggtgcaggcaacaggaggtcctgaactagccagttcagtacttagtcccctattgaataaggacacaattgatttcttaaattatactgtcaatggtgatgaacggcagctgtggatgtcattgggaggaacttggatgaaagccagagcagagtggccaaaagaacagtttattccaccatatgttccacgattccgcaatggctgggagcccccaatgctgaactttatgggagccacaatggaacaagatctttatcaactggcagaatctgtggcaaatgtagcagaacatcagcgcaaacaggaaataaaaagattatccacagagcattccagtgtatcagagtatcatccagccgatggctatgcgttcagtagcaacatttacacaagaggatcccacctggaccaaggggaagctgctgttgcttttaagccaacttctaatcgccatatagatagaaattatgaaccactcaaaacacaacccaagaaatatgccaaatccaagtatgactttgtagcaaggaacaacagtgagctctcggttctaaaggatgatattttagagatacttgatgatcggaagcaatggtggaaagttcgaaatgcaagtggagactctggatttgtgccaaataacattttggatattgtgagacctccagaatctggattggggcgtgctgatccaccttatactcatactatacagaaacaaaggatggagtatggcccaagaccagctgatactccccctgctccatcacctcctccaacaccagctcctgttcctgttccccttcccccttccactccagcacctgttcctgtgtcaaaggtcccagcaaatataacacgtcaaaacagcagctccagtgacagtggtggcagtatcgtgcgagacagccagagacacaaacaacttccggtggaccgaaggaaatctcagatggaggaagtgcaagatgaactcatccacagactgaccattggtcggagtgccgctcagaagaaattccatgtgccacggcagaacgtgccagttatcaatatcacttacgactccacaccagaggatgtgaagacgtggttacagtcaaagggattcaaccctgtgactgtcaatagtcttggagtattaaatggtgcacaacttttctctctcaataaggatgaactgaggacagtctgccctgaaggggcgagagtctatagccaaatcactgtacaaaaagctgcattggaggatagcagtggcagctccgagttacaagaaattatgagaagacgacaggaaaaaatcagtgctgccgctagtgattcaggagtggaatcttttgatgaaggaagcagtcactaatttgtttgtttgtatttaaactccattgtttttggcattattccaacatgctttgttttaagaagccttgaagggaatgtcagattcatttttcttgatgtaatttatcaccataaaaaaaaacccatgcaaacctgagtgagcacaggatttgcttctaggcccattatttttattaaaactgaaaaaatttaaactgaattttttgaccttggaaaatatttttcttactttaccaaggtgaagtttccttaattagactaattattttatccccatcccagggtataaacaggaattgttttgatagtggtggagttattcactgcaacaaagcaacaatgttgtccatgattcaaaatctaagcagtttcgattttgcctgtgaatatggtgtctgtcattcagggcatagctcactgtaggctagcctctgcttacttaagtctcttctctgacatactcaatggaagaatatttagatttatttaaagttcttaatgccaacagtttaaaaaaaaattaaaacatttgaatgaactgtaaagtacagccataccttggacatgcaaatataaatctatggagcattctcaagagagtttgtcatggctctgttgattgcaactccttgtatagcttgtattttgatttagtttatattctgcttattatgtatactgtgttcttatatatgagaaagcacaaatgcgaaagaggtcatgtcttctcaaaatctagcaaaggaagtagtctgcattggtgtgcattacagtattttgcttaatgaaagcctcagttctgaatgttgatatgagtagttaaaaggaagtggggccattttatgtgtttatctgtgtcaagtatttctggtaataagaagcacttaatttacacatattttaatcctgtgaaagattccacatagagaaaagaaagatacctaaccttcaacaaatgttatttttggaaacacaatttttgtcattaaatgttatattatttcacatatataaaacagatgttatgtaagaatgttgtatattttaacataaatcatttagagaaattatctagattcattaattttcatagtgcctttttcacatgagtcagctggaaagtctgcaataaacagtatttgctgtctgttaa

SEQ ID NO: 9655 - DNA, 543 bp, Homo sapiens
  source 1..543: mol_type = unassigned DNA
gtagaagtgacttgaagaaagagcgagaagtatagaagggcgcaggcgctagttcagtgctcgtgagcaaacaccgtctacaagattcgagtcaaacaacgtgagaacttgaaatacgtctccattctttttccttagtactctcgttcattcacttacgaacacacaagtgaaagacacaatgaatggtcatatttctaatcatcccagtagttttggaatgtacccatctcagatgaatggctacggatcatcacctaccttttcccagacggacagagaacatggttcaaaaacaagtgcaaaggccctttatgaacaaaggaagaattatgcacgggacagtgtcagcagtgtgtcagatatatctcaataccgtgttgaacacttgactacctttgtcctggatcggaaagatgctatgatcactgttgatgatggaataaggaaattgaaattgcttgatgccaagggcaaagtgtggactcaagatatgattcttcaagtggatgacagagctgtgagcctgattgatttagaatc

SEQ ID NO: 9656 - DNA, 559 bp, Homo sapiens
  source 1..559: mol_type = unassigned DNA
agacttcacaggcagcagctagcgaggcggtctcgcccggcgcgaggccggcgctgtgctcgcctcggagatcgctgctctttagctgggtgcagaaggcggctccgcggctcgcggacgactggctgggcgcgaatcagattggggggctttctcccggtcccctcccacctcgtctgggctcgcggcgtctccggggaaagccgtggccccgagggcggatccgaggacggtcagtaaaatcttcccctgaggacattgtgattgaactgagatctgaagaatgagacagaattaactcgaagtgaccagatcttgaatattatttctttataacacacaagtgaaagacacaatgaatggtcatatttctaatcatcccagtagttttggaatgtacccatctcagatgaatggctacggatcatcacctaccttttcccagacggacagagaacatggttcaaaaacaagtgcaaaggccctttatgaacaaaggaagaattatgcacgggacagtgtcagcagtgtgtcagatatatctcaataccgtgttgaa

SEQ ID NO: 9657 - DNA, 2204 bp, Homo sapiens
  source 1..2204: mol_type = unassigned DNA
aataccctgaatggtcttaagacatttattttttaatgtgaaaatttctgtctgcttttaaagcatgtagcttaaaattaatgagcccaacattgtgggttttaagcttaattacactagaattttaagaagcactctgctgtcagaactccgaaagctttattgtagtcacagtgttggaatgtataaaaattatagctctgttgcattagaacttagttgaccagcttttgagaagtaaaagcttgactgctggtttatatttctggcttgtgtaggaattaaagggtgctaagttaaggttggttctacaggtagctgactcagggaagagagagaatggggtgatattacaagttgagaaaccaaggcagtatcatgagcaggaagaaacacctgagatgatggcagcccgcattgacagagatgtgcaaatcttaaaccacattttggatgacattgaattttttatcacaaaactccaaaaagcagcagaagcattttctgagctttctaaaaggaagaaaaacaagaaaggtaaaaggaaaggaccaggagagggtgttttaacgctgcgggcaaaacctccacctcctgatgaatttcttgactgtttccaaaagtttaaacacggatttaaccttctggccaaactgaagtctcatattcagaatcctagtgctgcagatttggttcactttttgtttactccattaaatatggtggtgcaggcaacaggaggtcctgaactagccagttcagtacttagtcccctattgaataaggacacaattgatttcttaaattatactgtcaatggtgatgaacggcagctgtggatgtcattgggaggaacttggatgaaagccagagcagagtggccaaaagaacagtttattccaccatatgttccacgattccgcaatggctgggagcccccaatgctgaactttatgggagccacaatggaacaagatctttatcaactggcagaatctgtggcaaatgtagcagaacatcagcgcaaacaggaaataaaaagattatccacagagcattccagtgtatcagagtatcatccagccgatggctatgcgttcagtagcaacatttacacaagaggatcccacctggaccaaggggaagctgctgttgcttttaagccaacttctaatcgccatatagatagaaattatgaaccactcaaaacacaacccaagaaatatgccaaatccaagtatgactttgtagcaaggaacaacagtgagctctcggttctaaaggatgatattttagagatacttgatgatcggaagcaatggtggaaagttcgaaatgcaagtggagactctggatttgtgccaaataacattttggatattgtgagacctccagaatctggattggggcgtgctgatccaccttatactcatactatacagaaacaaaggatggagtatggcccaagaccagctgatactccccctgctccatcacctcctccaacaccagctcctgttcctgttccccttcccccttccactccagcacctgttcctgtgtcaaaggtcccagcaaatataacacgtcaaaacagcagctccagtgacagtggtggcagtatcgtgcgagacagccagagacacaaacaacttccggtggaccgaaggaaatctcagatggaggaagtgcaagatgaactcatccacagactgaccattggtcggagtgccgctcagaagaaattccatgtgccacggcagaacgtgccagttatcaatatcacttacgactccacaccagaggatgtgaagacgtggttacagtcaaagggattcaaccctgtgactgtcaatagtcttggagtattaaatggtgcacaacttttctctctcaataaggatgaactgaggacagtctgccctgaaggggcgagagtctatagccaaatcactgtacaaaaagctgcattggaggatagcagtggcagctccgagttacaagaaattatgagaagacgacaggaaaaaatcagtgctgccgctagtgattcaggagtggaatcttttgatgaaggaagcagtcactaatttgtttgtttgtatttaaactccattgtttttggcattattccaacatgctttgttttaagaagccttgaagggaatgtcagattcatttttcttgatgtaatttatcaccat

SEQ ID NO: 9658 - DNA, 1858 bp, Homo sapiens
  source 1..1858: mol_type = unassigned DNA
agtattgacaaggatgcatttcatggctgatgagcacagttttgacttgtgtatccagtggaggtgttccctttggcaaatgttgagaaaccaaggcagtatcatgagcaggaagaaacacctgagatgatggcagcccgcattgacagagatgtgcaaatcttaaaccacattttggatgacattgaattttttatcacaaaactccaaaaagcagcagaagcattttctgagctttctaaaaggaagaaaaacaagaaaggtaaaaggaaaggaccaggagagggtgttttaacgctgcgggcaaaacctccacctcctgatgaatttcttgactgtttccaaaagtttaaacacggatttaaccttctggccaaactgaagtctcatattcagaatcctagtgctgcagatttggttcactttttgtttactccattaaatatggtggtgcaggcaacaggaggtcctgaactagccagttcagtacttagtcccctattgaataaggacacaattgatttcttaaattatactgtcaatggtgatgaacggcagctgtggatgtcattgggaggaacttggatgaaagccagagcagagtggccaaaagaacagtttattccaccatatgttccacgattccgcaatggctgggagcccccaatgctgaactttatgggagccacaatggaacaagatctttatcaactggcagaatctgtggcaaatgtagcagaacatcagcgcaaacaggaaataaaaagattatccacagagcattccagtgtatcagagtatcatccagccgatggctatgcgttcagtagcaacatttacacaagaggatcccacctggaccaaggggaagctgctgttgcttttaagccaacttctaatcgccatatagatagaaattatgaaccactcaaaacacaacccaagaaatatgccaaatccaagtatgactttgtagcaaggaacaacagtgagctctcggttctaaaggatgatattttagagatacttgatgatcggaagcaatggtggaaagttcgaaatgcaagtggagactctggatttgtgccaaataacattttggatattgtgagacctccagaatctggattggggcgtgctgatccaccttatactcatactatacagaaacaaaggatggagtatggcccaagaccagctgatactccccctgctccatcacctcctccaacaccagctcctgttcctgttccccttcccccttccactccagcacctgttcctgtgtcaaaggtcccagcaaatataacacgtcaaaacagcagctccagtgacagtggtggcagtatcgtgcgagacagccagagacacaaacaacttccggtggaccgaaggaaatctcagatggaggaagtgcaagatgaactcatccacagactgaccattggtcggagtgccgctcagaagaaattccatgtgccacggcagaacgtgccagttatcaatatcacttacgactccacaccagaggatgtgaagacgtggttacagtcaaagggattcaaccctgtgactgtcaatagtcttggagtattaaatggtgcacaacttttctctctcaataaggatgaactgaggacagtctgccctgaaggggcgagagtctatagccaaatcactgtacaaaaagctgcattggaggatagcagtggcagctccgagttacaagaaattatgagaagacgacaggaaaaaatcagtgctgccgctagtgattcaggagtggaatcttttgatgaaggaagcagtcactaatttgtttgtttgtatttaaactccattgtttttggcattattc

SEQ ID NO: 9659 - DNA, 2574 bp, Homo sapiens
  source 1..2574: mol_type = unassigned DNA
cacttcgcctcaagcgctggagtcgaccagaactctgcggctcggctgccggcaagacccggatagcggatttcgctcctggctgcggggcgcgcactcgcccgcccgcccgctcgctcgttcctcgcgcgggcactgggcatgcgcggcgcgcggttggcactggctgcgagcgggcgggcggctccagacttcacaggcagcagctagcgaggcggtctcgcccggcgcgaggccggcgctgtgctcgcctcggagatcgctgctctttagctgggtgcagaaggcggctccgcggctcgcggacgactggctgggcgcgaatcagattggggggctttctcccggtcccctcccacctcgtctgggctcgcggcgtctccggggaaagccgtggccccgagggcggatccgagaacacacaagtgaaagacacaatgaatggtcatatttctaatcatcccagtagttttggaatgtacccatctcagatgaatggctacggatcatcacctaccttttcccagacggacagagaacatggttcaaaaacaagtgcaaaggccctttatgaacaaaggaagaattatgcacgggacagtgtcagcagtgtgtcagatatatctcaataccgtgttgaacacttgactacctttgtcctggatcggaaagatgctatgatcactgttgatgatggaataaggaaattgaaattgcttgatgccaagggcaaagtgtggactcaagatatgattcttcaagtggatgacagagctgtgagcctgattgatttagaatcaaagaatgaactggagaattttcctttaaacacaatccagcactgccaagctgtgatgcattcatgcagctatgattcagttcttgcactggtgtgcaaagagccaacccagaacaagccagatcttcatctcttccagtgtgatgaggttaaggcaaacctaattagtgaagatattgaaagtgcaatcagtgacagtaaaggagggaaacagaagaggcggcccgacgccctgaggatgatttccaatgcagaccctagtataccgcctccacccagagctcctgcccctgcgccccctgggaccgtcacccaggtggatgttagaagtcgagtggcagcctggtctgcatgggcagccgaccaaggggactttgagaaaccaaggcagtatcatgagcaggaagaaacacctgagatgatggcagcccgcattgacagagatgtgcaaatcttaaaccacattttggatgacattgaattttttatcacaaaactccaaaaagcagcagaagcattttctgagctttctaaaaggaagaaaaacaagaaaggtaaaaggaaaggaccaggagagggtgttttaacgctgcgggcaaaacctccacctcctgatgaatttcttgactgtttccaaaagtttaaacacggatttaaccttctggccaaactgaagtctcatattcagaatcctagtgctgcagatttggttcactttttgtttactccattaaatatggtggtgcaggcaacaggaggtcctgaactagccagttcagtacttagtcccctattgaataaggacacaattgatttcttaaattatactgtcaatggtgatgaacggcagctgtggatgtcattgggaggaacttggatgaaagccagagcagagtggccaaaagaacagtttattccaccatatgttccacgattccgcaatggctgggagcccccaatgctgaactttatgggagccacaatggaacaagatctttatcaactggcagaatctgtggcaaatgtagcagaacatcagcgcaaacaggaaataaaaagattatccacagagcattccagtgtatcagagtatcatccagccgatggctatgcgttcagtagcaacatttacacaagaggatcccacctggaccaaggggaagctgctgttgcttttaagccaacttctaatcgccatatagatagaaattatgaaccactcaaaacacaacccaagaaatatgccaaatccaagtatgactttgtagcaaggaacaacagtgagctctcggttctaaaggatgatattttagagatacttgatgatcggaagcaatggtggaaagttcgaaatgcaagtggagactctggatttgtgccaaataacattttggatattgtgagacctccagaatctggattggggcgtgctgatccaccttatactcatactatacagaaacaaaggatggagtatggcccaagaccagctgatactccccctgctccatcacctcctccaacaccagctcctgttcctgttccccttcccccttccactccagcacctgttcctgtgtcaaaggtcccagcaaatataacacgtcaaaacagcagctccagtgacagtggtggcagtatcgtgcgagacagccagagacacaaaacttccggtggaccgaaggaaatctcagatggaggaagtgcaagatgaactcatccacagactgaccattggtcggagtgccgctcagaagaaattccatgtgccacgg

SEQ ID NO: 9660 - DNA, 374 bp, Homo sapiens
  source 1..374: mol_type = unassigned DNA
agaaggctcagagaatggaggcagccagacacccgttttagtacagtgtggagctgaaggaagtatatattaaaaaacaaacaaacaatggactttggaatcagaccttatctgccttggttttcttatcaaagaggtggaaatgtcaaaacacacaagtgaaagacacaatgaatggtcatatttctaatcatcccagtagttttggaatgtacccatctcagatgaatggctacggatcatcacctaccttttcccagacggacagagaacatggttcaaaaacaagtgcaaaggccctttatgaacaaaggaagaattatgcacgggacagtgtcagcagtgtgtcagatatatctcaataccgtgttgaa

SEQ ID NO: 9661 - DNA, 3925 bp, Homo sapiens
  source 1..3925: mol_type = unassigned DNA
agacttcacaggcagcagctagcgaggcggtctcgcccggcgcgaggccggcgctgtgctcgcctcggagatcgctgctctttagctgggtgcagaaggcggctccgcggctcgcggacgactggctgggcgcgaatcagattggggggctttctcccggtcccctcccacctcgtctgggctcgcggcgtctccggggaaagccgtggccccgagggcggatccgagctccttgggttctggaaagtgagcactagtaatggacgtcatgtggtaaacacacaagtgaaagacacaatgaatggtcatatttctaatcatcccagtagttttggaatgtacccatctcagatgaatggctacggatcatcacctaccttttcccagacggacagagaacatggttcaaaaacaagtgcaaaggccctttatgaacaaaggaagaattatgcacgggacagtgtcagcagtgtgtcagatatatctcaataccgtgttgaacacttgactacctttgtcctggatcggaaagatgctatgatcactgttgatgatggaataaggaaattgaaattgcttgatgccaagggcaaagtgtggactcaagatatgattcttcaagtggatgacagagctgtgagcctgattgatttagaatcaaagaatgaactggagaattttcctttaaacacaatccagcactgccaagctgtgatgcattcatgcagctatgattcagttcttgcactggtgtgcaaagagccaacccagaacaagccagatcttcatctcttccagtgtgatgaggttaaggcaaacctaattagtgaagatattgaaagtgcaatcagtgacagtaaaggagggaaacagaagaggcggcccgacgccctgaggatgatttccaatgcagaccctagtataccgcctccacccagagctcctgcccctgcgccccctgggaccgtcacccaggtggatgttagaagtcgagtggcagcctggtctgcatgggcagccgaccaaggggactttgagaaaccaaggcagtatcatgagcaggaagaaacacctgagatgatggcagcccgcattgacagagatgtgcaaatcttaaaccacattttggatgacattgaattttttatcacaaaactccaaaaagcagcagaagcattttctgagctttctaaaaggaagaaaaacaagaaaggtaaaaggaaaggaccaggagagggtgttttaacgctgcgggcaaaacctccacctcctgatgaatttcttgactgtttccaaaagtttaaacacggatttaaccttctggccaaactgaagtctcatattcagaatcctagtgctgcagatttggttcactttttgtttactccattaaatatggtggtgcaggcaacaggaggtcctgaactagccagttcagtacttagtcccctattgaataaggacacaattgatttcttaaattatactgtcaatggtgatgaacggcagctgtggatgtcattgggaggaacttggatgaaagccagagcagagtggccaaaagaacagtttattccaccatatgttccacgattccgcaatggctgggagcccccaatgctgaactttatgggagccacaatggaacaagatctttatcaactggcagaatctgtggcaaatgtagcagaacatcagcgcaaacaggaaataaaaagattatccacagagcattccagtgtatcagagtatcatccagccgatggctatgcgttcagtagcaacatttacacaagaggatcccacctggaccaaggggaagctgctgttgcttttaagccaacttctaatcgccatatagatagaaattatgaaccactcaaaacacaacccaagaaatatgccaaatccaagtatgactttgtagcaaggaacaacagtgagctctcggttctaaaggatgatattttagagatacttgatgatcggaagcaatggtggaaagttcgaaatgcaagtggagactctggatttgtgccaaataacattttggatattgtgagacctccagaatctggattggggcgtgctgatccaccttatactcatactatacagaaacaaaggatggagtatggcccaagaccagctgatactccccctgctccatcacctcctccaacaccagctcctgttcctgttccccttcccccttccactccagcacctgttcctgtgtcaaaggtcccagcaaatataacacgtcaaaacagcagctccagtgacagtggtggcagtatcgtgcgagacagccagagacacaaacaacttccggtggaccgaaggaaatctcagatggaggaagtgcaagatgaactcatccacagactgaccattggtcggagtgccgctcagaagaaattccatgtgccacggcagaacgtgccagttatcaatatcacttacgactccacaccagaggatgtgaagacgtggttacagtcaaagggattcaaccctgtgactgtcaatagtcttggagtattaaatggtgcacaacttttctctctcaataaggatgaactgaggacagtctgccctgaaggggcgagagtctatagccaaatcactgtacaaaaagctgcattggaggatagcagtggcagctccgagttacaagaaattatgagaagacgacaggaaaaaatcagtgctgccgctagtgattcaggagtggaatcttttgatgaaggaagcagtcactaatttgtttgtttgtatttaaactccattgtttttggcattattccaacatgctttgttttaagaagccttgaagggaatgtcagattcatttttcttgatgtaatttatcaccataaaaaaaaacccatgcaaacctgagtgagcacaggatttgcttctaggcccattatttttattaaaactgaaaaaatttaaactgaattttttgaccttggaaaatatttttcttactttaccaaggtgaagtttccttaattagactaattattttatccccatcccagggtataaacaggaattgttttgatagtggtggagttattcactgcaacaaagcaacaatgttgtccatgattcaaaatctaagcagtttcgattttgcctgtgaatatggtgtctgtcattcagggcatagctcactgtaggctagcctctgcttacttaagtctcttctctgacatactcaatggaagaatatttagatttatttaaagttcttaatgccaacagtttaaaaaaaaattaaaacatttgaatgaactgtaaagtacagccataccttggacatgcaaatataaatctatggagcattctcaagagagtttgtcatggctctgttgattgcaactccttgtatagcttgtattttgatttagtttatattctgcttattatgtatactgtgttcttatatatgagaaagcacaaatgcgaaagaggtcatgtcttctcaaaatctagcaaaggaagtagtctgcattggtgtgcattacagtattttgcttaatgaaagcctcagttctgaatgttgatatgagtagttaaaaggaagtggggccattttatgtgtttatctgtgtcaagtatttctggtaataagaagcacttaatttacacatattttaatcctgtgaaagattccacatagagaaaagaaagatacctaaccttcaacaaatgttatttttggaaacacaatttttgtcattaaatgttatattatttcacatatataaaacagatgttatgtaagaatgttgtatattttaacataaatcatttagagaaattatctagattcattaattttcatagtgcctttttcacatgagtcagctggaaagtctgcaataaacagtatttgctgtctgttaataaa

SEQ ID NO: 9662 - DNA, 2965 bp, Homo sapiens
  source 1..2965: mol_type = unassigned DNA
acaatgccgaaactgacgcttagagtcccaccctttctgacgttgtgccaaaggtcacttggcacataagtaaactgagtggaatggcctctcaatattgcctggacgattgcttagaggagtatttcctgaactgtgtggaacacacaagtgaaagacacaatgaatggtcatatttctaatcatcccagtagttttggaatgtacccatctcagatgaatggctacggatcatcacctaccttttcccagacggacagagaacatggttcaaaaacaagtgcaaaggccctttatgaacaaaggaagaattatgcacgggacagtgtcagcagtgtgtcagatatatctcaataccgtgttgaacacttgactacctttgtcctggatcggaaagatgctatgatcactgttgatgatggaataaggaaattgaaattgcttgatgccaagggcaaagtgtggactcaagatatgattcttcaagtggatgacagagctgtgagcctgattgatttagaatcaaagaatgaactggagaattttcctttaaacacaatccagcactgccaagctgtgatgcattcatgcagctatgattcagttcttgcactggtgtgcaaagagccaacccagaacaagccagatcttcatctcttccagtgtgatgaggttaaggcaaacctaattagtgaagatattgaaagtgcaatcagtgacagtaaaggagggaaacagaagaggcggcccgacgccctgaggatgatttccaatgcagaccctagtataccgcctccacccagagctcctgcccctgcgccccctgggaccgtcacccaggtggatgttagaagtcgagtggcagcctggtctgcatgggcagccgaccaaggggactttgagaaaccaaggcagtatcatgagcaggaagaaacacctgagatgatggcagcccgcattgacagagatgtgcaaatcttaaaccacattttggatgacattgaattttttatcacaaaactccaaaaagcagcagaagcattttctgagctttctaaaaggaagaaaaacaagaaaggtaaaaggaaaggaccaggagagggtgttttaacgctgcgggcaaaacctccacctcctgatgaatttcttgactgtttccaaaagtttaaacacggatttaaccttctggccaaactgaagtctcatattcagaatcctagtgctgcagatttggttcactttttgtttactccattaaatatggtggtgcaggcaacaggaggtcctgaactagccagttcagtacttagtcccctattgaataaggacacaattgatttcttaaattatactgtcaatggtgatgaacggcagctgtggatgtcattgggaggaacttggatgaaagccagagcagagtggccaaaagaacagtttattccaccatatgttccacgattccgcaatggctgggagcccccaatgctgaactttatgggagccacaatggaacaagatctttatcaactggcagaatctgtggcaaatgtagcagaacatcagcgcaaacaggaaataaaaagattatccacagagcattccagtgtatcagagtatcatccagccgatggctatgcgttcagtagcaacatttacacaagaggatcccacctggaccaaggggaagctgctgttgcttttaagccaacttctaatcgccatatagatagaaattatgaaccactcaaaacacaacccaagaaatatgccaaatccaagtatgactttgtagcaaggaacaacagtgagctctcggttctaaaggatgatattttagagatacttgatgatcggaagcaatggtggaaagttcgaaatgcaagtggagactctggatttgtgccaaataacattttggatattgtgagacctccagaatctggattggggcgtgctgatccaccttatactcatactatacagaaacaaaggatggagtatggcccaagaccagctgatactccccctgctccatcacctcctccaacaccagctcctgttcctgttccccttcccccttccactccagcacctgttcctgtgtcaaaggtcccagcaaatataacacgtcaaaacagcagctccagtgacagtggtggcagtatcgtgcgagacagccagagacacaaacaacttccggtggaccgaaggaaatctcagatggaggaagtgcaagatgaactcatccacagactgaccattggtcggagtgccgctcagaagaaattccatgtgccacggcagaacgtgccagttatcaatatcacttacgactccacaccagaggatgtgaagacgtggttacagtcaaagggattcaaccctgtgactgtcaatagtcttggagtattaaatggtgcacaacttttctctctcaataaggatgaactgaggacagtctgccctgaaggggcgagagtctatagccaaatcactgtacaaaaagctgcattggaggatagcagtggcagctccgagttacaagaaattatgagaagacgacaggaaaaaatcagtgctgccgctagtgattcaggagtggaatcttttgatgaaggaagcagtcactaatttgtttgtttgtatttaaactccattgtttttggcattattccaacatgctttgttttaagaagccttgaagggaatgtcagattcatttttcttgatgtaatttatcaccataaaaaaaaacccatgcaaacctgagtgagcacaggatttgcttctaggcccattatttttattaaaactgaaaaaatttaaactgaattttttgaccttggaaaatatttttcttactttaccaaggtgaagtttccttaattagactaattattttatccccatcccagggtataaacaggaattgttttgatagtggtggagttattcactgcaacaa

SEQ ID NO: 9663 - DNA, 577 bp, Homo sapiens
  source 1..577: mol_type = unassigned DNA
acaggcagcagctagcgaggcggtctcgcccggcgcgaggccggcgctgtgctcgcctcggagatcgctgctctttagctgggtgcagaaggcggctccgcggctcgcggacgactggctgggcgcgaatcagattggggggctttctcccggtcccctcccacctcgtctgggctcgcggcgtctccggggaaagccgtggccccgagggcggatccgaggacggtcagtaaaatcttcccctgaggacattgtgattgaactgagatctgaagaatgagacagaattaactcgaagtgaccagatcttgaatattatttctttatgtaggctttctgtgctcttccaatcagaaacacacaagtgaaagacacaatgaatggtcatatttctaatcatcccagtagttttggaatgtacccatctcagatgaatggctacggatcatcacctaccttttcccagacggacagagaacatggttcaaaaacaagtgcaaaggccctttatgaacaaaggaagaattatgcacgggacagtgtcagcagtgtgtcagatatatctcaataccgtgtt

SEQ ID NO: 9664 - DNA, 542 bp, Homo sapiens
  source 1..542: mol_type = unassigned DNA
attgccatggtgatgaataatctgctgagttttatggttggcatgattcttctggattaggtcacttgtgttttctttctataataccagtcgactacgcttttggtaacagttaaagttccatcactaaaaagctaaacacacaagtgaaagacacaatgaatggtcatatttctaatcatcccagtagttttggaatgtacccatctcagatgaatggctacggatcatcacctaccttttcccagacggacagagaacatggttcaaaaacaagtgcaaaggccctttatgaacaaaggaagaattatgcacgggacagtgtcagcagtgtgtcagatatatctcaataccgtgttgaacacttgactacctttgtcctggatcggaaagatgctatgatcactgttgatgatggaataaggaaattgaaattgcttgatgccaagggcaaagtgtggactcaagatatgattcttcaagtggatgacagagctgtgagcctgattgatttagaatcaaagaatgaactggagaatttt

SEQ ID NO: 9665 - DNA, 3100 bp, Homo sapiens
  source 1..3100: mol_type = unassigned DNA
atgcgcttccgctttggggtggtggtgccacccgccgtggccggcgcccggccggagctgctggtggtggggtcgcggcccgagctggggcgttgggagccgcgcggtgccgtccgcctgaggccggccggcaccgcggcgggcgacggggccctggccctgcaggagccgggcctgtggctcggggaggtggagctggcggccgaggaggcggcgcaggacggggcggagattggggccacccctaagttacccagcaccatctttccttggtttgttttgagacagggtctcattctaggcaatggacctcatcatgaccgttgctgtacttacaatgaaaacaacttggtggatggtgtgtattgtctcccaataggacactggattgaggccactgggcacaccaatgaaatgaagcacacaacagacttctattttaatattgcaggccaccaagccatgcattattcaagaattctaccaaatatctggctgggtagctgccctcgtcaggtggaacatgtaaccatcaaactgaagcatgaattggggattacagctgtaatgaatttccagactgaatgggatattgtacagaattcctcaggctgtaaccgctacccagagcccatgactccagacactatgattaaactatatagggaagaaggcttggcctacatctggatgccaacaccagatatgagcaccgaaggccgagtacagatgctgccccaggcggtgtgcctgctgcatgcgctgctggagaagggacacatcgtgtacgtgcactgcaacgctggggtgggccgctccaccgcggctgtctgcggctggctccagtatgtgatgggctggaatctgaggaaggtgcagtatttcctcatggccaagaggccggctgtctacattgacgaagaggccttggcccgggcacaagaagattttttccagaaatttgggaaggttcgttcttctgtgtgtagcctgtagctggtcagcctgcttctgccccctcctgatttccctaaggagcctgggatgatgttggtcaaatgacctagaaacaaggattctacctgaactgaaaggactgtgtgacctcccccaagccaaccactttcacctgggatgactttcgattatgctttgttttggggctgtatttttgaaatactctacaagaaagctgtggctcaacacatgagaagaagcacgaagcagttaggctgtacatcagacagaagggtaatgcgtgcagttcctgctgcctgcaggcagacgaggcctttgctttacagcactgtatgtgttgcacgatggatccgtgacagcactttcctgttgcactgaaactcttggccatgtagaggaaaagatatggagttatgtggatttcatcactagtatgtgtgcgtgagctggtcagttgccaaaggaggaaataaggttagaagcctgaaccgttacaaaagaagagctcactatggtcaaaaagtgatggctttcaggacttgttttttatcctgcctcacagttgttaaagtctgttccaaggcatcaccttccttctctacccaacaaccctgtgtaacaactaaagtagaattatctctcatttgttgttgtttttcctcaaaattaccaaacaaagcaaaaaatacccttgttttttatagttgagatgtcaagaagttaaattgaggcttaatgagcataggtagcttgtccaaggtctcatgaccagtcaagggcaagctggagttaataatctatatttatttgactcagcactgttttcatcacaacttgttttcccagcatcatgtagtgcatttagttttgtctttctcagggtatagtcaatatgcctgcaggagtttctatagcgagacatagaatagtattctgatcagttgccaaagaatctaggaaattagttgtattttgtgcaagctaatttaaaaacatgatgggctgttttaagaccagagtggaaattcatgagaggaactatactaccaaaagagcccaaatgaccaaatccatggataattgcttcacagccttggccatcctggctcagctctcaatttagtataatatgcagttcctgtgcctccagactatgcagctcatcaccctaggttctacaggaaatacagagatgaacaactttgccttcaaaaatgtgctgcctagaaacagacctgcattcaaccaactgtaatgcaggattggaccatgaatgatatgctagaatagaagaaagagaagtgtttttttaattgagagcctctatgtgcaaggtgatatataatcatatccagtttaatcttcacaatatccaatgaagaaggtctcattatctccatgataaagatggggaaactaaggtcagaagggttaactcaactgtctattgtcacatgatgaataaatagatgaagtgagatacaaagctgggtttgattcaaagcccttactttcctaattaaactatgatgcgtatttatttttctgcaccttcctttcttccacaaacacatattgatagatgcaagagactcttatttagaaggcgtgggggacaagaaggatacaaggtaagtttcagtggagctcagaggacggggagatagaactgtggcacttaggggagatgacatttgctttgggcagaggcagctagccaggacacatttccactataattttacaaagttaaatttataagctagcattaagtaaagtgaagtccagctcccttgctaaaaataactagaggtaataattggtattcaggtaactcatttacagtcataatgtgttgtgaaaatttaatcttaaaaattaaatttttaaactatgtgggtctgtgaatttctttaatgtctaagaaatccagcttcataatttccatgatacaaagatcttttttcaggtggatttttacctttgttccttttgctctgatagacaaaatcagtttaggactattaaagaatgttttggaataaactgtctttttcctcaatgaatgggatgtctaatgtatttcaaaatcacccaaaacttttggcaaataaaagcattt

SEQ ID NO: 9666 - DNA, 3633 bp, Homo sapiens
  source 1..3633: mol_type = unassigned DNA
tacagacaaagaacctgagacctgctagagtaagtgacttggttaagatagggagcgctccagagaccaggtccaagatcttcccccgtttcacaattagaaggcggctgtctagaggtcattcccttccttatgatcctcataaagttaatttccagtctcttggagagagaactggacgatcgcctggcttagaagttttcctccctccccgaaccccgttttctcttccatttcttccggtcgcgtgtccccagcgcccacaggtggaaatcaaccgcccgcggggttgcggggcacaaagaggcagctagcggctccgctgaccccttcccgccggcctggacgaagtctgggctcgggagccgcgtgatgcatcccaaagaaggcgcagaacagcacgtgttctccccggtgcccggggctcccacaccaccgcccaatcgctgcggccgcctagtgctcgggccgcgcctgccggccgcggggactccgggcccgggtattcgcgccgccgccgcccgccatgcgcttccgctttggggtggtggtgccacccgccgtggccggcgcccggccggagctgctggtggtggggtcgcggcccgagctggggcgttgggagccgcgcggtgccgtccgcctgaggccggccggcaccgcggcgggcgacggggccctggccctgcaggagccgggcctgtggctcggggaggtggagctggcggccgaggaggcggcgcaggacggggcggagccgggccgcgtggacacgttctggtacaagttcctgaagcgggagccgggaggagagctctcctgggaaggcaatggacctcatcatgaccgttgctgtacttacaatgaaaacaacttggtggatggtgtgtattgtctcccaataggacactggattgaggccactgggcacaccaatgaaatgaagcacacaacagacttctattttaatattgcaggccaccaagccatgcattattcaagaattctaccaaatatctggctgggtagctgccctcgtcaggtggaacatgtaaccatcaaactgaagcatgaattggggattacagctgtaatgaatttccagactgaatgggatattgtacagaattcctcaggctgtaaccgctacccagagcccatgactccagacactatgattaaactatatagggaagaaggcttggcctacatctggatgccaacaccagatatgagcaccgaaggccgagtacagatgctgccccaggcggtgtgcctgctgcatgcgctgctggagaagggacacatcgtgtacgtgcactgcaacgctggggtgggccgctccaccgcggctgtctgcggctggctccagtatgtgatgggctggaatctgaggaaggtgcagtatttcctcatggccaagaggccggctgtctacattgacgaagaggccttggcccgggcacaagaagattttttccagaaatttgggaaggttcgttcttctgtgtgtagcctgtagctggtcagcctgcttctgccccctcctgatttccctaaggagcctgggatgatgttggtcaaatgacctagaaacaaggattctacctgaactgaaaggactgtgtgacctcccccaagccaaccactttcacctgggatgactttcgattatgctttgttttggggctgtatttttgaaatactctacaagaaagctgtggctcaacacatgagaagaagcacgaagcagttaggctgtacatcagacagaagggtaatgcgtgcagttcctgctgcctgcaggcagacgaggcctttgctttacagcactgtatgtgttgcacgatggatccgtgacagcactttcctgttgcactgaaactcttggccatgtagaggaaaagatatggagttatgtggatttcatcactagtatgtgtgcgtgagctggtcagttgccaaaggaggaaataaggttagaagcctgaaccgttacaaaagaagagctcactatggtcaaaaagtgatggctttcaggacttgttttttatcctgcctcacagttgttaaagtctgttccaaggcatcaccttccttctctacccaacaaccctgtgtaacaactaaagtagaattatctctcatttgttgttgtttttcctcaaaattaccaaacaaagcaaaaaatacccttgttttttatagttgagatgtcaagaagttaaattgaggcttaatgagcataggtagcttgtccaaggtctcatgaccagtcaagggcaagctggagttaataatctatatttatttgactcagcactgttttcatcacaacttgttttcccagcatcatgtagtgcatttagttttgtctttctcagggtatagtcaatatgcctgcaggagtttctatagcgagacatagaatagtattctgatcagttgccaaagaatctaggaaattagttgtattttgtgcaagctaatttaaaaacatgatgggctgttttaagaccagagtggaaattcatgagaggaactatactaccaaaagagcccaaatgaccaaatccatggataattgcttcacagccttggccatcctggctcagctctcaatttagtataatatgcagttcctgtgcctccagactatgcagctcatcaccctaggttctacaggaaatacagagatgaacaactttgccttcaaaaatgtgctgcctagaaacagacctgcattcaaccaactgtaatgcaggattggaccatgaatgatatgctagaatagaagaaagagaagtgtttttttaattgagagcctctatgtgcaaggtgatatataatcatatccagtttaatcttcacaatatccaatgaagaaggtctcattatctccatgataaagatggggaaactaaggtcagaagggttaactcaactgtctattgtcacatgatgaataaatagatgaagtgagatacaaagctgggtttgattcaaagcccttactttcctaattaaactatgatgcgtatttatttttctgcaccttcctttcttccacaaacacatattgatagatgcaagagactcttatttagaaggcgtgggggacaagaaggatacaaggtaagtttcagtggagctcagaggacggggagatagaactgtggcacttaggggagatgacatttgctttgggcagaggcagctagccaggacacatttccactataattttacaaagttaaatttataagctagcattaagtaaagtgaagtccagctcccttgctaaaaataactagaggtaataattggtattcaggtaactcatttacagtcataatgtgttgtgaaaatttaatcttaaaaattaaatttttaaactatgtgggtctgtgaatttctttaatgtctaagaaatccagcttcataatttccatgatacaaagatcttttttcaggtggatttttacctttgttccttttgctctgatagacaaaatcagtttaggactattaaagaatgttttggaataaactgtctttttcctcaatgaatgggatgtctaatgtatttcaaaatcacccaaaacttttggcaaataaaagcatttaaaaaga

SEQ ID NO: 9667 - DNA, 1694 bp, Homo sapiens
  source 1..1694: mol_type = unassigned DNA
gagaactggacgatcgcctggcttagaagttttcctccctccccgaaccccgttttctcttccatttcttccggtcgcgtgtccccagcgcccacaggtggaaatcaaccgcccgcggggttgcggggcacaaagaggcagctagcggctccgctgaccccttcccgccggcctggacgaagtctgggctcgggagccgcgtgatgcatcccaaagaaggcgcagaacagcacgtgttctccccggtgcccggggctcccacaccaccgcccaatcgctgcggccgcctagtgctcgggccgcgcctgccggccgcggggactccgggcccgggtattcgcgccgccgccgcccgccatgcgcttccgctttggggtggtggtgccacccgccgtggccggcgcccggccggagctgctggtggtggggtcgcggcccgagctggggcgttgggagccgcgcggtgccgtccgcctgaggccggccggcaccgcggcgggcgacggggccctggccctgcaggagccgggcctgtggctcggggaggtggagctggcggccgaggaggcggcgcaggacggggcggagccgggccgcgtggacacgttctggtacaagttcctgaagcgggagccgggaggagagctctcctgggaaggcaatggacctcatcatgaccgttgctgtacttacaatgaaaacaacttggtggatggtgtgtattgtctcccaataggacactggattgaggccactgggcacaccaatgaaatgaagcacacaacagacttctattttaatattgcaggccaccaagccatgcattattcaagaattctaccaaatatctggctgggtagctgccctcgtcaggtggaacatgtaaccatcaaactgaagcatgaattggggattacagctgtaatgaatttccagactgaatgggatattgtacagaattcctcaggctgtaaccgctacccagagcccatgactccagacactatgattaaactatatagggaagaaggcttggcctacatctggatgccaacaccagatatgagcaccgaaggccgagtacagatgctgccccaggcggtgtgcctgctgcatgcgctgctggagaagggacacatcgtgtacgtgcactgcaacgctggggtgggccgctccaccgcggctgtctgcggctggctccagtatgtgatgggctggaatctgaggaaggtgcagtatttcctcatggccaagaggccggctgtctacattgacgaagaggcagctagccaggacacatttccactataattttacaaagttaaatttataagctagcattaagtaaagtgaagtccagctcccttgctaaaaataactagaggtaataattggtattcaggtaactcatttacagtcataatgtgttgtgaaaatttaatcttaaaaattaaatttttaaactatgtgggtctgtgaatttctttaatgtctaagaaatccagcttcataatttccatgatacaaagatcttttttcaggtggatttttacctttgttccttttgctctgatagacaaaatcagtttaggactattaaagaatgttttggaataaactgtctttttcctcaatgaatgggatgtctaatgtatttcaaaatcacccaaaacttttggcaaataaaagcattt

SEQ ID NO: 9668 - DNA, 1037 bp, Homo sapiens
  source 1..1037: mol_type = unassigned DNA
tggacacgttctggtacaagttcctgaagcgggagccgggaggagagctctcctgggaaggcaatggacctcatcatgaccgttgctgtacttacaatgaaaacaacttggtggatggtgtgtattgtctcccaataggacactggattgaggccactgggcacaccaatgaaatgaagcacacaacagacttctattttaatattgcaggccaccaagccatgcattattcaagaattctaccaaatatctggctgggtagctgccctcgtcaggtggaacatgtaaccatcaaactgaagcatgaattggggattacagctgtaatgaatttccagactgaatgggatattgtacagaattcctcaggctgtaaccgctacccagagcccatgactccagacactatgattaaactatatagggaagaaggcttggcctacatctggatgccaacaccagatatgagcaccgaaggccgagtacagatgctgccccaggcggtgtgcctgctgcatgcgctgctggagaagggacacatcgtgtacgtgcactgcaacgctggggtgggccgctccaccgcggctgtctgcggctggctccagtatgtgatgggctggaatctgaggaaggtgcagtatttcctcatggccaagaggccggctgtctacattgacgaagaggcagctagccaggacacatttccactataattttacaaagttaaatttataagctagcattaagtaaagtgaagtccagctcccttgctaaaaataactagaggtaataattggtattcaggtaactcatttacagtcataatgtgttgtgaaaatttaatcttaaaaattaaatttttaaactatgtgggtctgtgaatttctttaatgtctaagaaatccagcttcataatttccatgatacaaagatcttttttcaggtggatttttacctttgttccttttgctctgatagacaaaatcagtttaggactattaaagaatgttttggaataaactgtctttttcctcaat

SEQ ID NO: 9669 - DNA, 736 bp, Homo sapiens
  source 1..736: mol_type = unassigned DNA
gcaatggacctcatcatgaccgttgctgtacttacaatgaaaacaacttggtggatggtgtgtattgtctcccaataggacactggattgaggccactgggcacaccaatgaaatgaagcacacaacagacttctattttaatattgcaggccaccaagccatgcattattcaagaattctaccaaatatctggctgggtagctgccctcgtcaggtggaacatgtaaccatcaaactgaagcatgaattggggattacagctgtaatgaatttccagactgaatgggatattgtacagaattcctcaggctgtaaccgctacccagagcccatgactccagacactatgattaaactatatagggaagaaggcttggcctacatctggatgccaacaccagatatgagcaccgaagatgagaagaggacagctgacatgtgctgctcggggatgtgggaagagactgcagattttggccttgggattctggattacttaaaacaaaagtaagacacaaatatctccctaaccttattatatctcgtagaagatggcagatgggtgacgactggtgcaagctcacacaggaaagaaaaatttcataagcattgaatagttgtgttactaattagtgggacaatcttcgtaactccttcttcccccacttctgcccaatatgtaataataggcatgctctgaataattgtactcaaataagaaattactcctccaaa

SEQ ID NO: 9670 - DNA, 1170 bp, Homo sapiens
  source 1..1170: mol_type = unassigned DNA
gagaactggacgatcgcctggcttagaagttttcctccctccccgaaccccgttttctcttccatttcttccggtcgcgtgtccccagcgcccacaggtggaaatcaaccgcccgcggggttgcggggcacaaagaggcagctagcggctccgctgaccccttcccgccggcctggacgaagtctgggctcgggagccgcgtgatgcatcccaaagaaggcgcagaacagcacgtgttctccccggtgcccggggctcccacaccaccgcccaatcgctgcggccgcctagtgctcgggccgcgcctgccggccgcggggactccgggcccgggtattcgcgccgccgccgcccgccatgcgcttccgctttggggtggtggtgccacccgccgtggccggcgcccggccggagctgctggtggtggggtcgcggcccgagctggggcgttgggagccgcgcggtgccgtccgcctgaggccggccggcaccgcggcgggcgacggggccctggccctgcaggagccgggcctgtggctcggggaggtggagctggcggccgaggaggcggcgcaggacggggcggagccgggccgcgtggacacgttctggtacaagttcctgaagcgggagccgggaggagagctctcctgggaaggcaatggacctcatcatgaccgttgctgtacttacaatgaaaacaacttggtggatggtgtgtattgtctcccaataggacactggattgaggccactgggcacaccaatgaaatgaagcacacaacagacttctattttaatattgcaggccaccaagccatgcattattcaagaattctaccaaatatctggctgggtagctgccctcgtcaggtggaacatgtaaccatcaaactgaagcatgaattggggattacagctgtaatgaatttccagactgaatgggatattgtacagaattcctcaggctgtaaccgctacccagagcccatgactccagacactatgattaaactatatagggaagaaggcttggcctacatctggatgccaacaccagatatgagcaccgaagatgagaagaggacagctgacatgtgctgctcggggatgtgggaagagactgcagattttggccttgggattctggattacttaaaacaaaagtaa

SEQ ID NO: 9671 - DNA, 1724 bp, Homo sapiens
  source 1..1724: mol_type = unassigned DNA
aactgcagcgccggggctgggggaggggagcctactcactcccccaactcccgggcggtgactcatcaacgagcaccagcggccagaggtgagcagtcccgggaaggggccgagaggcggggccgccaggtcgggcaggtgtgcgctccgccccgccgcgcgcacagagcgctagtccttcggcgagcgagcaccttcgacgcggtccggggaccccctcgtcgctgtcctcccgacgcggacccgcgtgccccaggcctcgcgctgcccggccggctcctcgtgtcccactcccggcgcacgccctcccgcgagtcccgggcccctcccgcgcccctcttctcggcgcgcgcgcagcatggcgcccccgcaggtcctcgcgttcgggcttctgcttgccgcggcgacggcgacttttgccgcagctcaggaagaatgtgtctgtgaaaactacaagctggccgtaaactgctttgtgaataataatcgtcaatgccagtgtacttcagttggtgcacaaaatactgtcatttgctcaaagctggctgccaaatgtttggtgatgaaggcagaaatgaatggctcaaaacttgggagaagagcaaaacctgaaggggccctccagaacaatgatgggctttatgatcctgactgcgatgagagcgggctctttaaggccaagcagtgcaacggcacctccatgtgctggtgtgtgaacactgctggggtcagaagaacagacaaggacactgaaataacctgctctgagcgagtgagaacctactggatcatcattgaactaaaacacaaagcaagagaaaaaccttatgatagtaaaagtttgcggactgcacttcagaaggagatcacaacgcgttatcaactggatccaaaatttatcacgagtattttgtatgagaataatgttatcactattgatctggttcaaaattcttctcaaaaaactcagaatgatgtggacatagctgatgtggcttattattttgaaaaagatgttaaaggtgaatccttgtttcattctaagaaaatggacctgacagtaaatggggaacaactggatctggatcctggtcaaactttaatttattatgttgatgaaaaagcacctgaattctcaatgcagggtctaaaagctggtgttattgctgttattgtggttgtggtgatagcagttgttgctggaattgttgtgctggttatttccagaaagaagagaatggcaaagtatgagaaggctgagataaaggagatgggtgagatgcatagggaactcaatgcataactatataatttgaagattatagaagaagggaaatagcaaatggacacaaattacaaatgtgtgtgcgtgggacgaagacatctttgaaggtcatgagtttgttagtttaacatcatatatttgtaatagtgaaacctgtactcaaaatataagcagcttgaaactggctttaccaatcttgaaatttgaccacaagtgtcttatatatgcagatctaatgtaaaatccagaacttggactccatcgttaaaattatttatgtgtaacattcaaatgtgtgcattaaatatgcttccacagtaaaatctgaaaaactgatttgtgattgaaagctgcctttctatttacttgagtcttgtacatacatacttttttatgagctatgaaataaaacattttaaactgaatttcttaactttga

SEQ ID NO: 9672 - DNA, 2756 bp, Homo sapiens
  source 1..2756: mol_type = unassigned DNA
accgcccattacacaccccagtacaccagcagaggaaacttataacctcgggaggcaggtccttcccctcagtgcggtcacatacttccagaagagcggaccagggctgctgccagcacctgccactcagagcgcctctgtcgctgggacccttcagaactctctttgctcacaagttaccaaaaaaaaaagagccaacatgttggtattgctggctggtatctttgtggtccacatcgctactgttattatgctatttgttagcaccattgccaatgtctggttggtttccaatacggtagatgcatcagtaggtctttggaaaaactgtaccaacattagctgcagtgacagcctgtcatatgccagtgaagatgccctcaagacagtgcaggccttcatgattctctctatcatcttctgtgtcattgccctcctggtcttcgtgttccagctcttcaccatggagaagggaaaccggttcttcctctcaggggccaccacactggtgtgctggctgtgcattcttgtgggggtgtccatctacactagtcattatgcgaatcgtgatggaacgcagtatcaccacggctattcctacatcctgggctggatctgcttctgcttcagcttcatcatcggcgttctctatctggtcctgagaaagaaataaggccggacgagttcatggggatctggggggtggggaggaggaagccgttgaatctgggagggaagtggaggttgctgtacaggaaaaaccgagataggggaggggggagggggaagcaaaggggggaggtcaaatcccaaaccattactgaggggattctctactgccaagcccctgccctggggagaaagtagttggctagtactttgatgctcccttgatggggtccagagagcctccctgcagccaccagacttggcctccagctgttcttagtgacacacactgtctggggccccatcagctgccacaacaccagccccacttctgggtcatgcactgaggtccacagacctactgcactgagttaaaatagcggtacaagttctggcaagagcagatactgtctttgtgctgaatacgctaagcctggaagccatcctgcccttctgacccaaagcaaaacatcacattccagtctgaagtgcctactggggggctttggcctgtgagccattgtccctctttggaacagatatttagctctgtggaattcagtgacaaaatgggaggaggaaagagagtttgtaaggtcatgctggtgggttagctaaaccaagaaggagaccttttcacaatggaaaacctgggggatggtcagagcccagtcgagacctcacacacggctgtccctcatggagacctcatgccatggtctttgctaggcctcttgctgaaagccaaggcagctcttctggagtttctctaaagtcactagtgaacaattcggtggtaaaagtaccacacaaactatgggatccaaggggcagtcttgcaacagtgccatgttagggttatgtttttaggattcccctcaatgcagtcagtgtttcttttaagtatacaacaggagagagatggacatggctcattgtagcacaatcctattactcttcctctaacatttttgaggaagttttgtctaattatcaatattgaggatcagggctcctaggctcagtggtagctctggcttagacaccacctggagtgatcacctcttggggaccctgcctatcccacttcacaggtgaggcatggcaattctggaagctgattaaaacacacataaaccaaaaccaaacaacaggcccttgggtgaaaggtgctatataattgtgaagtattaagcctaccgtatttcagccatgataagaacagagtgcctgcattcccaggaaaatacgaaaatcccatgagataaataaaaatataggtgatgggcagatcttttctttaaaataaaaaagcaaaaactcttgtggtacctagtcagatggtagacgagctgtctgctgccgcaggagcacctctatacaggacttagaagtagtatgttattcctggttaagcaggcattgctttgccctggagcagctattttaagccatctcagattctgtctaaaggggttttttgggaagacgttttctttatcgccctgagaagatctaccccagggagaatctgagacatcttgcctacttttctttattagctttctcctcatccatttcttttatacctttcctttttggggagttgttatgccatgatttttggtatttatgtaaaaggattattactaattctatttctctatgtttattctagttaaggaaatgttgagggcaagccaccaaattacctaggctgaggttagagagattggccagcaaaaactgtgggaagatgaactttgtcattatgatttcattatcacatgattatagaaggctgtcttagtgcaaaaaacatacttacatttcagacatatccaaagggaatactcacattttgttaagaagttgaactatgactggagtaaaccatgtattcccttatcttttactttttttctgtgacatttatgtctcatgtaatttgcattactctggtggattgttctagtactgtattgggcttcttcgttaatagattatttcatatactataattgtaaatattttgatacaaatgtttataactctagggatataaaaacagattctgattcccttca

SEQ ID NO: 9673 - DNA, 675 bp, Homo sapiens
  source 1..675: mol_type = unassigned DNA
agtgcggtcacatacttccagaagagcggaccagggctgctgccagcacctgccactcagagcgcctctgtcgctgggacccttcagaactctctttgctcacaagttaccaaaaaaaaaagagccaacatgttggtattgctggctggtatctttgtggtccacatcgctactgttattatgctatttgttagcaccattgccaatgtctggttggtttccaatacggtagatgcatcagtaggtctttggaaaaactgtaccaacattagctgcagtgacagcctgtcatatgccagtgaagatgccctcaagacagtgcaggccttcatgattctctctatcatcttctgtgtcattgccctcctggtcttcgtgttccagctcttcaccatggagaagggaaaccggttcttcctctcaggggccaccacactggtgtgcttcattatgcgaatcgtgatggaacgcagtatcaccacggctattcctacatcctgggctggatctgcttctgcttcagcttcatcatcggcgttctctatctggtcctgagaaagaaataaggccggacgagttcatggggatctggggggtggggaggaggaagccgttgaatctgggagggaagtggaggttgctgtacaggaaaaaccgagataggggaggggggag

SEQ ID NO: 9674 - DNA, 555 bp, Homo sapiens
  source 1..555: mol_type = unassigned DNA
acacaccccagtacaccagcagaggaaacttataacctcgggaggcaggtccttcccctcagtgcggtcacatacttccagaagagcggaccagggctgctgccagcacctgccactcagagcgcctctgtcgctgggacccttcaggactgctgggcagaccgctggggaaaggaaagagatcccttctgtggagagtggaaaggactcactgtgccttcctcagcccttcctgcttcctccagagaccagattaggcccatcaagttcccagccttgtcagtgggcttcatggagacccctcacccgggaatgtagaccctcttggcttgctctgggtggctctagggatttcaggtagtgccagacccacagggactactggagagagacacgttgaagaccggggaaaacttgtggatgaggcaagactgcttttctgtagactctatggagcctggtggggcacataactgaaacgtggacacaggaaagggcaggagaactctctttgctcacaagttaccaaaaaaaaaagagccaacatgttggtat

SEQ ID NO: 9675 - DNA, 5197 bp, Homo sapiens
  source 1..5197: mol_type = unassigned DNA
ggcgggatcggggaaggaggggccccgccgcctagagggtggagggagggcgcgcagtcccagcccagagcttcaaaacagcccggcggcctcgcctcgcacccccagccagtccgtcgatccagctgccagcgcagccgccagcgccggcacatcccgctctgggctttaaacgtgacccctcgcctcgactcgccctgccctgtgaaaatgttggtgcttcttgctttcatcatcgccttccacatcacctctgcagccttgctgttcattgccaccgtcgacaatgcctggtgggtaggagatgagttttttgcagatgtctggagaatatgtaccaacaacacgaattgcacagtcatcaatgacagctttcaagagtactccacgctgcaggcggtccaggccaccatgatcctctccaccattctctgctgcatcgccttcttcatcttcgtgctccagctcttccgcctgaagcagggagagaggtttgtcctaacctccatcatccagctaatgtcatgtctgtgtgtcatgattgcggcctccatttatacagacaggcgtgaagacattcacgacaaaaacgcgaaattctatcccgtgaccagagaaggcagctacggctactcctacatcctggcgtgggtggccttcgcctgcaccttcatcagcggcatgatgtacctgatactgaggaagcgcaaatagagttccggagctgggttgcttctgctgcagtacagaatccacattcagataaccattttgtatataatcattattttttgaggtttttctagcaaacgtattgtttcctttaaaagccaaaaaaaaaaaaaaaaaaaaaaaaaaaagaaaaaagaaaaaaaaaatccaaaagagagaagagtttttgcattcttgagatcagagaatagactatgaaggctggtattcagaactgctgcccactcaaaagtctcaacaagacacaagcaaaaatccagcaatgctcaaatccaaaagcactcggcaggacatttcttaaccatggggctgtgatgggaggagaggagaggctgggaaagccgggtctctggggacgtgcttcctatgggtttcagctggcccaagcccctcccgaatctctctgctagtggtgggtggaagagggtgaggtggggtataggagaagaatgacagcttcctgagaggtttcacccaagttccaagtgagaagcaggtgtagtccctggcattctgtctgtatccaaaccagagcccagccatccctccggtatcggggtgggtcagaaaaagtctcacctcaatttgccgacagtgtcacctgcttgccttaggaatggtcatccttaacctgcgtgccagatttagactcgtctttaggcaaaacctacagcgccccccccctcaccccagacctacagaatcagagtcttcaagggatggggccagggaatctgcatttctaacgcgctccctgggcaacgcttcagatgcgttgaagttggggaccacggtgcctgggccaggtcagcagagctgcctcgtaaatgctggggtatcgtcatgtggagatggggaggtgaatgcaacccccacagcaggccaaaaccttggcctccatcgccacagctgtctacatctagggccccaaaactccattcctgagccatgtgaactcatagacaccttcagggtgtggggtacagcctccttcccatcttatcccagaaggcctctcccttcttgtccagcccttcatgctacacctggctggcctctcacccctatttctagagcctcagaggacccatccaccattcattcattcattcattcattcattcattcattcattcatcaacataaatcataacttgcatgcatgtgccaggcacaggggataccctctagagacaatctcctcctagggctcatggcctagtggaggagacagattaaaacttaattagaaaaactggctgggtacagtggctcatgcttgtaatcccagcactttgggaggctgaggcgggtggatcacctgaggtcaggagttcaagaccagcctggccaaaatggtaaaacctgtctctactaaaaatacaaaaatgagctgggcgtggtggtgcatgcctgtaatcccagctatcaggtggctgaggcaggagaatcacttgaaatgggaggtggaggttgcagtgagccgagaccgtgccactgcactccagcctgggtgacagagtgagactccatctcaaaaaaagaaaaaaaagaaaagaaactaattacacactgtgatggaggctgcaaagaacaccactaagaattcaaaatcagctgggtgcggtggctcacacctgtaatcccagcactttgggaggctgaggcaggtggatcacaaggtcaggagttcaagaccagcctggccaacatggtgaaaccccgtctctaccgaaaatacaacaaaattagcccggtgtggtggcaggtgcctgtaatcccagctacttaggaggctgaggcaggagaatcgcttgaaactgggaggcggaggtcgcagtgagccgagattcaccactgcactccagcccaggcgacagtctgagactccgtctcaaaaataaaacgattcaaaatcgaggcctgtggcatggtagggaggctgctttacgcgtgcctattattaaatgctcctggaggcatttaggtatttagatcagtctaaatatagctccattcagttcgtgcagatgacagttattgggcagtacctgtctgtgtaacacccagaaaacatgtctgtggaggggcccatggtcccgacagtaaatgcggtgagagggtcccatagagctggagttttcaagctttaggggttcccgtgctgcttgggacaggctgattcagagggtctgggtgaatgatttccaggtgattttaagactgtgctgagaaatagggcttttggggccttgtccttcaggatcaaagcatgatgctgtgtggcaatgcagaccacccaggaaccatcccaggagataagctctttgcacctcattgtctttttctgcttatgttggagcaggatgctgggggctgtcctgggatggggtgtgggacctcgtgctatttaaatacttttgcacttgaccttctgctgagtggagtggtggtttgccatcagctcagttccagtggagctgaagagacatctggtttgagtagttttagggccaccatggatatctcttcaatgcaggattggctctttccatctgctctttcattcatttgtttttgacagatagtattaaatgtttaccatgttccaggcactgtgtgaggctctgaaaatacaggggtgagcaaatccagatatcctccctgccatcatgaagtttggagtctatgagataggaccccctccctatggagaagccaccaatgcagtacagggtgacctggggccagagacaggacaaatgtcacctcctgcctccatgagatactctcactagtcatattgtgggcaagaatgtggcttacacccctagggttaacaggatgctacccaagctcatggaggaagttgaatcttaagttcccttgaaactttctaccttggtggcttttctataattttcttttttctttttcttttttttttttttttttgagactgagttttgctcttgttgcccaggctggagtgcagtggcaccatcttggctcaccgcaacctctgcctcctgggttcaagtgattctcctgcctcagcctcccgagtagctgggattacaggcatgtcccaccatgcccagctaatttttgtatttttagtagagatggggtttctccatgttggtcaggctggtttcgaactcccaacctcaggtgatccgcccacctcagccttccaaagtgctgggattacaggcatgagccactgcgtctggccttctataattttctggtagtcacgatggaaacaaacaaaacaccttagaaccagagatcgaccccctcaagcaatacatcaattcccttcacaagaaacgtcggggctacatgagtatctgtgttgaatgcggtctgaaatgatcctatggattttcccggctggttgccactgctgtacaacattcagtgcccacatccacctgtgccattaagcttttttgagacatgagagatgcctcttccctgctgtatgacatgcatttgggaagttggaaagaaatgacaaaatcagggagaaaacatccaagcttcttacctgtagatagaatcagccctcacttggtgcttattaccagttattcaagaacaataacaacaacaaaattagtagacatccaagaagcacatattaggaccaaagatagcatcaactgtatttgaaggaactgtagtttgcgcattttatgacatttttataaagtactgtaattctttcattgaggggctatgtgatggagacagactaactcattttgttatttgcattaaaattattttgggtctctgttcaaatgagtttggagaatgcttgacttgttggtctgtgtgaatgtgtatatatatatacctgaatacaggaacatcggagacctattcactcccacacactctgctatagtttgcgtgcttttgtggacacccctcatgaacaggctggcgctctaggacgctctgtgttcactgatgatgaagaaacctagaactccaagcctgtttgtaaacacactaaacacagtggcctagatagaaactgtatcgtagtttaaaatctgcctcgcgggatgttactaaactcgctaatagtttaaaggttacttacaatagagcaagttggacaattttgtggtgttggggaaatgttagggcaaggcctagaggttcattttgaatcttggtttgtgactttagggtagttagaaactttctacttaatgtacctttaaaatagtccattttctatgttttgtataatctgaaactgtacatggaaaataaagtttaaaaccagattgcccagagcaagactctaatgttcccaacggtgatgacatctagggcagaatgctgccattttgaggggcagggggtcagctgatttctcatcaagataataatgtatggtttttacactaagcaactgataaatggacaatttatcactgga

SEQ ID NO: 9676 - DNA, 781 bp, Homo sapiens
  source 1..781: mol_type = unassigned DNA
ggcctgggagtccttgcagggtggcctgggtgactgctcaccagcccggccctccccagggttctgggccagagcctccctggccgttggagcgggagctgtgggtggaacacttctgaattgggagattgcctcggacctccagacgccgaacatctcagcacatcccgctctgggctttaaacgtgacccctcgcctcgactcgccctgccctgtgaaaatgttggtgcttcttgctttcatcatcgccttccacatcacctctgcagccttgctgttcattgccaccgtcgacaatgcctggtgggtaggagatgagttttttgcagatgtctggagaatatgtaccaacaacacgaattgcacagtcatcaatgacagctttcaagagtactccacgctgcaggcggtccaggccaccatgatcctctccaccattctctgctgcatcgccttcttcatcttcgtgctccagctcttccgcctgaagcagggagagaggtttgtcctaacctccatcatccagctaatgtcatgtctgtgtgtcatgattgcggcctccatttatacagacaggcgtgaagacattcacgacaaaaacgcgaaattctatcccgtgaccagagaaggcagctacggctactcctacatcctggcgtgggtggccttcgcctgcaccttcatcagcggcatgatgtacctgatactgaggaagcgcaaatagagttccggagctgggttgcttctgctgcagtacagaatccacattcagataaccat

SEQ ID NO: 9677 - DNA, 829 bp, Homo sapiens
  source 1..829: mol_type = unassigned DNA
cgggagcaagagagaaggaggcccagacagtgagggcaggagggagagaagagacgcagaaggagagcgagcgagagagaaagggttctggattggaggggagagcaagggagggaggaaggcggtgagagaggcgggggcctcgggagggtgaaaggagggaggagaagggcggggcacggaggcccgagcgagggacaagactccgactccagctctgacttttttcgcggctctcggcttccactgcagccatgtcactcctcttgctggtggtctcagcccttcacatcctcattcttatactgcttttcgtggccactttggacaagtcctggtggactctccctgggaaagagtccctgaatctctggtacgactgcacgtggaacaacgacaccaaaacatgggcctgcagtaatgtcagcgagaatggctggctgaaggcggtgcaggtcctcatggtgctctccctcattctctgctgtctctccttcatcctgttcatgttccagctctacaccatgcgacgaggaggtctcttctatgccaccggcctctgccagctttgcaccagcgtggcggtgtttactggcgccttgatctatgccattcacgccgaggagatcctggagaagcacccgcgagggggcagcttcggatactgcttcgccctggcctgggtggccttccccctcgccctggtcagcggcatcatctacatccacctacggaagcgggagtgagcgccccgcctcgctcggctgcccccgccccttcccggcccccctcgccgcgcgtcctccaaaaaataaaaccttaaccgcgg

SEQ ID NO: 9678 - DNA, 3756 bp, Homo sapiens
  source 1..3756: mol_type = unassigned DNA
cttttgcactagcagtagcaaggaaggggggtgggcgctctttctttttctcttagaagagggtttagcacaggttttttcgttctcacttccacaccaccttaccgcctcccgaccccccctctccccctccccacctatcgtcatgacggcctctccggattacttggtggtgctttttgggatcactgctggggccaccggggccaagctaggctcggatgagaaggagttgatcctgctgttctggaaagtcgtggatctggccaacaagaaggtgggacagttgcacgaagtgctagttagaccggatcagttggaactgacggaggactgcaaagaagaaactaaaatagacgtcgaaagcctgtcctcggcgtcgcagctggaccaagccctccgacagtttaaccagtcagtgagcaatgaactgaatattggagtagggacttccttctgtctctgtactgatgggcagcttcatgtcaggcaaatcctgcatcctgaggcttccaagaagaatgtactattacctgaatgcttctattccttttttgatcttcgaaaagaattcaagaaatgttgccctggttcacctgatattgacaaactggacgttgccacaatgacagagtatttaaattttgagaagagtagttcagtctctcgatatggagcctctcaagttgaagatatggggaatataattttagcaatgatttcagagccttataatcacaggttttcagatccagagagagtgaattacaagtttgaaagtggaacttgcagcaagatggaacttattgatgataacaccgtagtcagggcacgaggtttaccatggcagtcttcagatcaagatattgcaagattcttcaaaggactcaatattgccaagggaggtgcagcactttgtctgaatgctcagggtcgaaggaacggagaagctctggttaggtttgtaagtgaggagcaccgagacctagcactacagaggcacaaacatcacatggggacccggtatattgaggtttacaaagcaacaggtgaagatttccttaaaattgctggtggtacttccaatgaggtagcccagtttctctccaaggaaaatcaagtcattgtccgcatgcgggggctccctttcacggccacagctgaagaagtggtggccttctttggacagcattgccctattactgggggaaaggaaggcatcctctttgtcacctacccagatggtaggccaacaggggacgcttttgtcctctttgcctgtgaggaatatgcacagaatgcgttgaggaagcataaagacttgttgggtaaaagatacattgaactcttcaggagcacagcagctgaagttcagcaggtgctgaatcgattctcctcggcccctctcattccacttccaacccctcccattattccagtactacctcagcaatttgtgccccctacaaatgttagagactgtatacgccttcgaggtcttccctatgcagccacaattgaggacatcctggatttcctgggggagttcgccacagatattcgtactcatggggttcacatggttttgaatcaccagggccgcccatcaggagatgcctttatccagatgaagtctgcggacagagcatttatggctgcacagaagtgtcataaaaaaaacatgaaggacagatatgttgaagtctttcagtgttcagctgaggagatgaactttgtgttaatggggggcactttaaatcgaaatggcttatccccaccgccatgcctgtctcctccctcctacacatttccagctcctgctgcagttattcctacagaagctgccatttaccagccctctgtgattttgaatccacgagcactgcagccctccacagcgtactacccagcaggcactcagctcttcatgaattacacagcgtactatcccagccccccaggttcgcctaatagtcttggctacttccctacagctgctaatcttagcggtgtccctccacagcctggcacggtggtcagaatgcagggcctggcctacaatactggagttaaggaaattcttaacttcttccaaggttaccagtatgcaaccgaggatggacttatacacacaaatgaccaggccaggactctacccaaagaatgggtttgtatttaagggccccagcagttagaacatcctcagaaaagaagtgtttgaaagatgtatggtgatcttgaaacctccagacacaagaaaacttctagcaaattcaggggaagtttgtctacactcaggctgcagtattttcagcaaacttgattggacaaacgggcctgtgccttatcttttggtggagtgaaaaaatttgagctagtgaagccaaatcgtaacttacagcaagcagcatgcagcatacctggctctttgctgattgcaaataggcatttaaaatgtgaatttggaatcagatgtctccattacttccagttaaagtggcatcataggtgtttcctaagttttaagtcttggataaaaactccaccagtgtctaccatctccaccatgaactctgttaaggaagcttcatttttgtatattcccgctcttttctcttcatttccctgtcttctgcataatcatgccttcttgctaagtaattcaagcataagatcttggaataataaaatcacaatcttaggagaaagaataaaattgttattttcccagtctcttggccatgatgatatcttatgattaaaaacaaattaaattttaaaacacctgaagataaattagaagaaattgtgcaccctccacaaaacatacaaagtttaaaagtttggatctttttctcagcaggtatcagttgtaaataatgaattaggggccaaaatgcaaaacgaaaaatgaagcagctacatgtagttagtaatttctagtttgaactgtaattgaatattgtggcttcatatgtattattttatattgtacttttttcattattgatggtttggactttaataagagaaattccatagtttttaatatcccagaagtgagacaatttgaacagtgtattctagaaaacaatacactaactgaacagaagtgaatgcttatatatattatgatagccttaaacctttttcctctaatgccttaactgtcaaataattataaccttttaaagcataggactatagtcagcatgctagactgagaggtaaacactgatgcaattagaacaggtactgatgctgtcagtgtttaacactatgtttagctgtgtttatgctataaaagtgcaatattagacactagctagtactgctgcctcatgtaactccaaagaaaacaggatttcattaagtgcattgaatgtggatatttctctaagttactcatattgtcctttgcttgaatgcaatgccgtgcagatttatgaggctgctatttttattttctgtgcattactttaacaccttaaagggagaagcaaacatttccttcttcagctgactggcaatggccctttaactgcaataggaagaaaaaaaaaaaggtttgtgtgaaaattggtgataactggcacttaagatcgaaaagaaatttctgtatacttgatgccttaagatgcccaaagctgcccaaagctctgaaagactttaagataggcagtaatgcttactacaatactactgagtttttgtagagttaacatttgataataaaacttgcctgtttaatctcaa

SEQ ID NO: 9679 - DNA, 3746 bp, Homo sapiens
  source 1..3746: mol_type = unassigned DNA
atacaaaaagggcaggcctcctgcgccctccttcccaccccccttcctgccctgggcgtggagcaccgaccaggtgtgggcttgggtggttggttaccgccttttgcactagcagtagcaaggaaggggggtgggcgctctttctttttctcttagaagagggtttagcacaggttttttcgttctcacttccacaccaccttaccgcctcccgaccccccctctccccctccccacctatcgtcatgacggcctctccggattacttggtggtgctttttgggatcactgctggggccaccggggccaagctaggctcggatgagaaggagttgatcctgctgttctggaaagtcgtggatctggccaacaagaaggtgggacagttgcacgaagtgctagttagaccggatcagttggaactgacggaggactgcaaagaagaaactaaaatagacgtcgaaagcctgtcctcggcgtcgcagctggaccaagccctccgacagtttaaccagtcagtgagcaatgaactgaatattggagtagggacttccttctgtctctgtactgatgggcagcttcatgtcaggcaaatcctgcatcctgaggcttccaagaagaatgtactattacctgaatgcttctattccttttttgatcttcgaaaagaattcaagaaatgttgccctggttcacctgatattgacaaactggacgttgccacaatgacagagtatttaaattttgagaagagtagttcagtctctcgatatggagcctctcaagttgaagatatggggaatataattttagcaatgatttcagagccttataatcacaggttttcagatccagagagagtgaattacaagtttgaaagtggaacttgcagcaagatggaacttattgatgataacaccgtagtcagggcacgaggtttaccatggcagtcttcagatcaagatattgcaagattcttcaaaggactcaatattgccaagggaggtgcagcactttgtctgaatgctcagggtcgaaggaacggagaagctctggttaggtttgtaagtgaggagcaccgagacctagcactacagaggcacaaacatcacatggggacccggtatattgaggtttacaaagcaacaggtgaagatttccttaaaattgctggtggtacttccaatgaggtagcccagtttctctccaaggaaaatcaagtcattgtccgcatgcgggggctccctttcacggccacagctgaagaagtggtggccttctttggacagcattgccctattactgggggaaaggaaggcatcctctttgtcacctacccagatggtaggccaacaggggacgcttttgtcctctttgcctgtgaggaatatgcacagaatgcgttgaggaagcataaagacttgttgggtaaaagatacattgaactcttcaggagcacagcagctgaagttcagcaggtgctgaatcgattctcctcggcccctctcattccacttccaacccctcccattattccagtactacctcagcaatttgtgccccctacaaatgttagagactgtatacgccttcgaggtcttccctatgcagccacaattgaggacatcctggatttcctgggggagttcgccacagatattcgtactcatggggttcacatggttttgaatcaccagggccgcccatcaggagatgcctttatccagatgaagtctgcggacagagcatttatggctgcacagaagtgtcataaaaaaaacatgaaggacagatatgttgaagtctttcagtgttcagctgaggagatgaactttgtgttaatggggggcactttaaatcgaaatggcttatccccaccgccatgcctgtctcctccctcctacacatttccagctcctgctgcagttattcctacagaagctgccatttaccagccctctgtgattttgaatccacgagcactgcagccctccacagcgtactacccagcaggcactcagctcttcatgaattacacagcgtactatcccagccccccaggttcgcctaatagtcttggctacttccctacagctgctaatcttagcggtgtccctccacagcctggcacggtggtcagaatgcagggcctggcctacaatactggagttaaggaaattcttaacttcttccaaggttaccagtgtttgaaagatgtatggtgatcttgaaacctccagacacaagaaaacttctagcaaattcaggggaagtttgtctacactcaggctgcagtattttcagcaaacttgattggacaaacgggcctgtgccttatcttttggtggagtgaaaaaatttgagctagtgaagccaaatcgtaacttacagcaagcagcatgcagcatacctggctctttgctgattgcaaataggcatttaaaatgtgaatttggaatcagatgtctccattacttccagttaaagtggcatcataggtgtttcctaagttttaagtcttggataaaaactccaccagtgtctaccatctccaccatgaactctgttaaggaagcttcatttttgtatattcccgctcttttctcttcatttccctgtcttctgcataatcatgccttcttgctaagtaattcaagcataagatcttggaataataaaatcacaatcttaggagaaagaataaaattgttattttcccagtctcttggccatgatgatatcttatgattaaaaacaaattaaattttaaaacacctgaagataaattagaagaaattgtgcaccctccacaaaacatacaaagtttaaaagtttggatctttttctcagcaggtatcagttgtaaataatgaattaggggccaaaatgcaaaacgaaaaatgaagcagctacatgtagttagtaatttctagtttgaactgtaattgaatattgtggcttcatatgtattattttatattgtacttttttcattattgatggtttggactttaataagagaaattccatagtttttaatatcccagaagtgagacaatttgaacagtgtattctagaaaacaatacactaactgaacagaagtgaatgcttatatatattatgatagccttaaacctttttcctctaatgccttaactgtcaaataattataaccttttaaagcataggactatagtcagcatgctagactgagaggtaaacactgatgcaattagaacaggtactgatgctgtcagtgtttaacactatgtttagctgtgtttatgctataaaagtgcaatattagacactagctagtactgctgcctcatgtaactccaaagaaaacaggatttcattaagtgcattgaatgtggatatttctctaagttactcatattgtcctttgcttgaatgcaatgccgtgcagatttatgaggctgctatttttattttctgtgcattactttaacaccttaaagggagaagcaaacatttccttcttcagctgactggcaatggccctttaactgcaataggaagaaaaaaaaaaaggtttgtgtgaaaattggtgataactggcacttaagatcgaaaagaaatttctgtatacttgatgccttaagatgcccaaagctgcccaaagctctgaaagactttaagataggcagtaatgcttactacaatactactgagtttttgtagagttaacatttgataataaaacttgcctgtttaatctcaa

SEQ ID NO: 9680 - DNA, 3770 bp, Homo sapiens
  source 1..3770: mol_type = unassigned DNA
gcgtggagcaccgaccaggtgtgggcttgggtggttggttaccgccttttgcactagcagtagcaaggaaggggggtgggcgctctttctttttctcttagaagagggtttagcacaggttttttcgttctcacttccacaccaccttaccgcctcccgaccccccctctccccctccccacctatcgtcatgacggcctctccggattacttggtggtgctttttgggatcactgctggggccaccggggccaagctaggctcggatgagaaggagttgatcctgctgttctggaaagtcgtggatctggccaacaagaaggtgggacagttgcacgaagtgctagttagaccggatcagttggaactgacggaggactgcaaagaagaaactaaaatagacgtcgaaagcctgtcctcggcgtcgcagctggaccaagccctccgacagtttaaccagtcagtgagcaatgaactgaatattggagtagggacttccttctgtctctgtactgatgggcagcttcatgtcaggcaaatcctgcatcctgaggcttccaagaagaatgtactattacctgaatgcttctattccttttttgatcttcgaaaagaattcaagaaatgttgccctggttcacctgatattgacaaactggacgttgccacaatgacagagtatttaaattttgagaagagtagttcagtctctcgatatggagcctctcaagttgaagatatggggaatataattttagcaatgatttcagagccttataatcacaggttttcagatccagagagagtgaattacaagtttgaaagtggaacttgcagcaagatggaacttattgatgataacaccgtagtcagggcacgaggtttaccatggcagtcttcagatcaagatattgcaagattcttcaaaggactcaatattgccaagggaggtgcagcactttgtctgaatgctcagggtcgaaggaacggagaagctctggttaggtttgtaagtgaggagcaccgagacctagcactacagaggcacaaacatcacatggggacccggtatattgaggtttacaaagcaacaggtgaagatttccttaaaattgctggtggtacttccaatgaggtagcccagtttctctccaaggaaaatcaagtcattgtccgcatgcgggggctccctttcacggccacagctgaagaagtggtggccttctttggacagcattgccctattactgggggaaaggaaggcatcctctttgtcacctacccagatggtaggccaacaggggacgcttttgtcctctttgcctgtgaggaatatgcacagaatgcgttgaggaagcataaagacttgttgggtaaaagatacattgaactcttcaggagcacagcagctgaagttcagcaggtgctgaatcgattctcctcggcccctctcattccacttccaacccctcccattattccagtactacctcagcaatttgtgccccctacaaatgttagagactgtatacgccttcgaggtcttccctatgcagccacaattgaggacatcctggatttcctgggggagttcgccacagatattcgtactcatggggttcacatggttttgaatcaccagggccgcccatcaggagatgcctttatccagatgaagtctgcggacagagcatttatggctgcacagaagtgtcataaaaaaaacatgaaggacagatatgttgaagtctttcagtgttcagctgaggagatgaactttgtgttaatggggggcactttaaatcgaaatggcttatccccaccgccatgtaagttaccatgcctgtctcctccctcctacacatttccagctcctgctgcagttattcctacagaagctgccatttaccagccctctgtgattttgaatccacgagcactgcagccctccacagcgtactacccagcaggcactcagctcttcatgaattacacagcgtactatcccagccccccaggttcgcctaatagtcttggctacttccctacagctgctaatcttagcggtgtccctccacagcctggcacggtggtcagaatgcagggcctggcctacaatactggagttaaggaaattcttaacttcttccaaggttaccagtatgcaaccgaggatggacttatacacacaaatgaccaggccaggactctacccaaagaatgggtttgtatttaagggccccagcagttagaacatcctcagaaaagaagtgtttgaaagatgtatggtgatcttgaaacctccagacacaagaaaacttctagcaaattcaggggaagtttgtctacactcaggctgcagtattttcagcaaacttgattggacaaacgggcctgtgccttatcttttggtggagtgaaaaaatttgagctagtgaagccaaatcgtaacttacagcaagcagcatgcagcatacctggctctttgctgattgcaaataggcatttaaaatgtgaatttggaatcagatgtctccattacttccagttaaagtggcatcataggtgtttcctaagttttaagtcttggataaaaactccaccagtgtctaccatctccaccatgaactctgttaaggaagcttcatttttgtatattcccgctcttttctcttcatttccctgtcttctgcataatcatgccttcttgctaagtaattcaagcataagatcttggaataataaaatcacaatcttaggagaaagaataaaattgttattttcccagtctcttggccatgatgatatcttatgattaaaaacaaattaaattttaaaacacctgaagataaattagaagaaattgtgcaccctccacaaaacatacaaagtttaaaagtttggatctttttctcagcaggtatcagttgtaaataatgaattaggggccaaaatgcaaaacgaaaaatgaagcagctacatgtagttagtaatttctagtttgaactgtaattgaatattgtggcttcatatgtattattttatattgtacttttttcattattgatggtttggactttaataagagaaattccatagtttttaatatcccagaagtgagacaatttgaacagtgtattctagaaaacaatacactaactgaacagaagtgaatgcttatatatattatgatagccttaaacctttttcctctaatgccttaactgtcaaataattataaccttttaaagcataggactatagtcagcatgctagactgagaggtaaacactgatgcaattagaacaggtactgatgctgtcagtgtttaacactatgtttagctgtgtttatgctataaaagtgcaatattagacactagctagtactgctgcctcatgtaactccaaagaaaacaggatttcattaagtgcattgaatgtggatatttctctaagttactcatattgtcctttgcttgaatgcaatgccgtgcagatttatgaggctgctatttttattttctgtgcattactttaacaccttaaagggagaagcaaacatttccttcttcagctgactggcaatggccctttaactgcaataggaagaaaaaaaaaaaggtttgtgtgaaaattggtgataactggcacttaagatcgaaaagaaatttctgtatacttgatgccttaagatgcccaaagctgcccaaagctctgaaagactttaagataggcagtaatgcttactacaatactactgagtttttg

SEQ ID NO: 9681 - DNA, 3482 bp, Homo sapiens
  source 1..3482: mol_type = unassigned DNA
ggggggtgggcgctctttctttttctcttagaagagggtttagcacaggttttttcgttctcacttccacaccaccttaccgcctcccgaccccccctctccccctccccacctatcgtcatgacggcctctccggattacttggtggtgctttttgggatcactgctggggccaccggggccaagctaggctcggatgagaaggagttgatcctgctgttctggaaagtcgtggatctggccaacaagaaggtgggacagttgcacgaagtgctagttagaccggatcagttggaactgacggaggactgcaaagaagaaactaaaatagacgtcgaaagcctgtcctcggcgtcgcagctggaccaagccctccgacagtttaaccagtcagtgagcaatgaactgaatattggagtagggacttccttctgtctctgtactgatgggcagcttcatgtcaggcaaatcctgcatcctgaggcttccaagaagaatgtactattacctgaatgcttctattccttttttgatcttcgaaaagaattcaagaaatgttgccctggttcacctgatattgacaaactggacgttgccacaatgacagagtatttaaattttgagaagagtagttcagtctctcgatatggagcctctcaagttgaagatatggggaatataattttagcaatgatttcagagccttataatcacaggttttcagatccagagagagtgaattacaagtttgaaagtggaacttgcagcaagatggaacttattgatgataacaccgtagtcagggcacgaggtttaccatggcagtcttcagatcaagatattgcaagattcttcaaaggactcaatattgccaagggaggtgcagcactttgtctgaatgctcagggtcgaaggaacggagaagctctggttaggtttgtaagtgaggagcaccgagacctagcactacagaggcacaaacatcacatggggacccggtatattgaggtttacaaagcaacaggtgaagatttccttaaaattgctggtggtacttccaatgaggtagcccagtttctctccaaggaaaatcaagtcattgtccgcatgcgggggctccctttcacggccacagctgaagaagtggtggccttctttggacagcattgccctattactgggggaaaggaaggcatcctctttgtcacctacccagatggtaggccaacaggggacgcttttgtcctctttgcctgtgaggaatatgcacagaatgcgttgaggaagcataaagacttgttgggtaaaagatacattgaactcttcaggagcacagcagctgaagttcagcaggtgctgaatcgattctcctcggcccctctcattccacttccaacccctcccattattccagtactacctcagcaatttgtgccccctacaaatgttagagactgtatacgccttcgaggtcttccctatgcagccacaattgaggacatcctggatttcctgggggagttcgccacagatattcgtactcatggggttcacatggttttgaatcaccagggccgcccatcaggagatgcctttatccagatgaagtctgcggacagagcatttatggctgcacagaagtgtcataaaaaaaacatgaaggacagatatgttgaagtctttcagtgttcagctgaggagatgaactttgtgttaatggggggcactttaaatcgaaatggcttatccccaccgccatgtaagttaccatgcctgtctcctccctcctacacatttccagctcctgctgcagttattcctacagaagctgccatttaccagccctctgtgattttgaatccacgagcactgcagccctccacagcgtactacccagcaggcactcagctcttcatgaattacacagcgtactatcccagtgtttgaaagatgtatggtgatcttgaaacctccagacacaagaaaacttctagcaaattcaggggaagtttgtctacactcaggctgcagtattttcagcaaacttgattggacaaacgggcctgtgccttatcttttggtggagtgaaaaaatttgagctagtgaagccaaatcgtaacttacagcaagcagcatgcagcatacctggctctttgctgattgcaaataggcatttaaaatgtgaatttggaatcagatgtctccattacttccagttaaagtggcatcataggtgtttcctaagttttaagtcttggataaaaactccaccagtgtctaccatctccaccatgaactctgttaaggaagcttcatttttgtatattcccgctcttttctcttcatttccctgtcttctgcataatcatgccttcttgctaagtaattcaagcataagatcttggaataataaaatcacaatcttaggagaaagaataaaattgttattttcccagtctcttggccatgatgatatcttatgattaaaaacaaattaaattttaaaacacctgaagataaattagaagaaattgtgcaccctccacaaaacatacaaagtttaaaagtttggatctttttctcagcaggtatcagttgtaaataatgaattaggggccaaaatgcaaaacgaaaaatgaagcagctacatgtagttagtaatttctagtttgaactgtaattgaatattgtggcttcatatgtattattttatattgtacttttttcattattgatggtttggactttaataagagaaattccatagtttttaatatcccagaagtgagacaatttgaacagtgtattctagaaaacaatacactaactgaacagaagtgaatgcttatatatattatgatagccttaaacctttttcctctaatgccttaactgtcaaataattataaccttttaaagcataggactatagtcagcatgctagactgagaggtaaacactgatgcaattagaacaggtactgatgctgtcagtgtttaacactatgtttagctgtgtttatgctataaaagtgcaatattagacactagctagtactgctgcctcatgtaactccaaagaaaacaggatttcattaagtgcattgaatgtggatatttctctaagttactcatattgtcctttgcttgaatgcaatgccgtgcagatttatgaggctgctatttttattttctgtgcattactttaacaccttaaagggagaagcaaacatttccttcttcagctgactggcaatggccctttaactgcaataggaagaaaaaaaaaaaggtttgtgtgaaaattggtgataactggcacttaagatcgaaaagaaatttctgtatacttgatgccttaagatgcccaaagctgcccaaagctctgaaagactttaagataggcagtaatgcttactacaatactactgagtttttgtagagttaacatttgataataaaacttgcctgtttaatctcaa

SEQ ID NO: 9682 - DNA, 6951 bp, Homo sapiens
  source 1..6951: mol_type = unassigned DNA
cctttgacttccatcaaccccagacctgccgtgttgacccccacagcccctagactgcctcctggtgacttccatactggagaaggcctctgtcttgcacgctcctttgcagaggcctgacgacccctggggaagagtggggggagagcggaagaatgggttagcccccaaaatcaggcaggaccagccctggaagtaggaatccggatcctaagcgtgcgcccaggccgggagcgtgagctcttgcgtcctgggttgagttctggcggccctcccccaaggttcccggagccgccccggtcacgtggccggcggggccggcaggtaactcgcctggagagggcgtgggccggtagccgccccgccccgcggggcgccacgggcgggtcttggcagcgcccactgagccagccgggccgcaggtgccgcccccgatacacggtgtcccgcccaagctgatccgcgtctgcggtcggtcggtgcgtgcgtgcgcctcgtcggtccgcgtgtctggccgagagcccccttcctctgcggccatgactccgccgccgccgccgccccctcccccgggccctgaccccgcggccgaccccgccgcggacccctgcccctggcccggatcactggtcgtcctcttcggggctacggcgggtgcgctgggacgggacctgggctcggacgagaccgacttaatcctcctagtttggcaagtggttgagccgcggagccgccaggtggggacgctgcacaaatcgctggttcgtgccgaggcggccgcactgagtacgcagtgccgcgaggcgagcggcctgagcgccgacagcctggcgcgggcagagccgctggacaaggtgctgcagcagttctcacagctggtgaacggggatgtggctttgctgggcgggggcccctacatgctctgcactgatgggcagcagctattgcgacaggtcctgcaccccgaggcctccaggaagaacctggtgctccccgacatgttcttctccttctatgacctccgaagagaattccatatgcagcatccaagcacctgccctgccagggacctcactgtggccaccatggcacagggtttaggactggagacagatgccacagaggatgactttggggtctgggaagtcaagacaatggtagctgttatcctccatctactcaaagagcccagcagtcaattgttttcgaagcccgaggtgataaagcagaaatacgagacggggccttgcagcaaggctgatgtggtggacagtgagactgtggtacgggctcgtgggttgccgtggcagtcatcagaccaggacgtggctcgcttcttcaaagggctcaacgtggccaggggtggtgtagcactctgcctcaacgcccagggccgcagaaatggcgaggccctcatccgctttgtggacagcgagcagcgggacctagcgctgcagagacacaagcaccacatgggcgtccgctatattgaggtgtataaagcgacaggggaggagtttgtaaagattgcagggggcacatcactagaggtggctcgtttcttgtcacgggaagaccaagtgatcctgcggctgcggggactgcccttctcggctgggccaacggacgtgcttggcttcctggggccagagtgcccagtgactgggggtaccgaggggctgctctttgtgcgccatcctgatggccggccgactggtgatgccttcgccctctttgcttgtgaggagctggcacaggctgcactgcgcaggcacaagggcatgctgggtaagcgatacattgaactcttccggagcactgcagccgaagtgcagcaggtcttgaaccgctatgcatccggcccactccttcctacactgactgccccactgctgcccatccccttcccactggcacctgggactgggagggactgtgtacgcctccgaggcctgccctacacggccaccattgaagacatcctgagctttctgggggaggcagcagctgacattcggccccacggtgtacacatggtgctcaaccagcagggccggccatcgggcgatgccttcattcagatgacatcagcagagcgagccctagctgctgctcagcgttgccataagaaggtgatgaaggagcgctacgtggaggtggtcccctgttccacagaggagatgagccgagtgctgatggggggcaccttgggccgcagtggcatgtcccctccaccctgcaagctgccctgcctctcaccacctacctacaccaccttccaagccaccccaacgctcattcccacggagacggcagctctatacccctcttcagcactgctcccagctgccagggtgcctgctgcccccacccctgttgcctactatccagggccagccactcaactctacctgaactacacagcctactacccaagccccccagtctcccccaccactgtgggctacctcactacacccactgctgccctggcctctgctcccacctcagtgttgtcccagtcaggagccttggtccgcatgcagggtgtcccatacacggctggtatgaaggatctgctcagcgtcttccaggcctaccagctacccgctgatgactacaccagtctgatgcctgttggtgacccacctcgcactgtgttacaagcccccaaggaatgggtgtgtttgtaggagagaaagccaggaggtaagagccagctgatatcctcggcgaacatgtctctcctgagtccagaagaccagcaccctcaacctggtagcttctttctggcttgtcaaagctctcagaaggtacctagaggagcccaagccccagctccatcctccacttattctgcctgtttcccccaaagacaatggctggaccctgcatgcagggctgggggtggaatggggctaaccagctcctgatggcctgagccaggcatcttgactggcacctggagagcccttaagtctgtcctggctgtggcccatgccgacagatatcgtggggctgacaggtccacggcaggcttgctttcttttataaaatggaagctctggtaccttcaatgtatgactcctgggagaatcaagggtccatctgagcctctgagtaaagatcccaatgttctacctctccctgtccctcttgtaggggatagggaggcagagagagccagcccctaccctcagagtatctggacctcagagaccatgttgtgccaggggtggtcccacctaaagatgctagcccctctccaggtgggcataaggagtaacagatggcaaaaccacaaactattttgatggactgtgctgcagtatcaccagaagacattagggggcagtaggcccccacacaaaaccttcaggcttgaattttaaaggggaggactttctgccaacttttcttgtatgccttgggaaagccagttgccctgaacccagcagacaccatggaatgtcctttgcacgcattaaatggtacagaactgaagcctcggaagcaatttggaactcgatcttctcttccttaaatgaaaagttattgaccaaatggactttttaaaagacacaggacccttaactttgccccaaagtgaggggctccacaccaaccccaggcggaggaacactcagacagattaaggatactgttgacctgtcactgtttattatttcagcactaaaactgaggagcctcaactgctggctcttcttccctttgtatttgtgtaaggagcactgcactcccataaaaggttttaaaatacaaaatgtacaagaacacacaattccaagtgctgtaaacataactgagaaccagttcctttactaaacatccattttataaaacacaaggtttcaatttgagcccatctgagccttaaagatccattctgaataccaaaaacagggcttcacagccaggcccagaagaggtctggtgataatggctggccctgggtggggatagtttacacccgggcagcagcaccacacatgaacccaaagacatgttctttttaaagctgttttcagccatgtttctctgtgcatctccagtaagcagaaggctacccattccattcctcaacccaagagctagcacagttagagtaggagggggtgcgtactagcacgtgcccagttgctcagtgctgctagtagaaattgatttgcatagtccaatggatgtgtgctttaacaccactatgttgcacaaaaatttaagtctttatctacaaagccaaaaaatattgactcttaacaccaaagcttttacaaagctgatataaaactgcttacatagtatacaaagctctattttaaaatttaatgtttattttaaataggaaagcatttctagtgctacaggcatcaaggtatttagaaggcatcaaaatttggtgcatagcaactctggatcatagaggcttttaattcttgagggcacaaagggtattgcaaggggaactcttgcaataacctcatgtgaggcagctacaccaggggcaaaagggtaggggcaagtctggccatttctctggaatgtcaaccgagaggccaacttcttgcccctccaaaggaagctgtgggcgtccaaccacaggcccagaagcaaatctcactatccacattctgtgacacaactcacttttcaagaaaatttgaaaacacccagctccaagaggggccacagtgatctgctgaagaatagacctttttctctaactaactttaggggagaaatctaaaatatattttgttttttttaaagaccatacttcctcatcctgagtcaacagctcctaacctactgacaacaggtggtgggcaataggccagctccctttcccagacctgaactggccttagtagagagagtcctggcatcaagggcctgcagtctcctggaataacagcatcaggccttcaaccagcacactgtctcacatataggcactcaaaaaatctgcttcctgaatcaatggaagtatattatttcatttgaaagcatactgcaaacttcagaggctctgtaatgggcccaggaacaggtaaaaaaaatcccattagggagaggggtaagggcaggttttttttttttttaaagtacccaactcgggtacctcctttggtagacagcaggctgcagtttctgctgggccctgccttggacaccagtctcaccagcagcagcaccagggtgtctttggtgtggagggtcaggttatcacttctggatgtgctcagagccttctggggaaaaggctggtttttagatcatacagacaggacagggtaggccagaatcatttcaggctataaatagaatggcagataagccttccatgccagtgtgactcttaaaaccttcccatctggagtcctgtattttctctgcccatgctgatgtactgctcatttgtgctttagctctgcacacagcctggcctctagctagagttagaactgcaaagctgcctaaaccactgagactggcttcaaaggtcacagaacagccaaaggcagatgcttctgtttggaaaaggttctacgaccagatgacacaaacaggaagcgcactccacagcctactagtttttatgatggcaagaaatgaaagtgaccaagctagaaccccaccattcagagtcaccttaaatgtagccatcttacccagggtcctgagggaaaaagcaatttcaacatggagccagtatggagagattgcaagattacctagaaagttaccaaaaggctatgctctggaatgtctttttatattccaacacttcaatgatggaatggtctcttctcattttatctaacaacagtttagttttataaagaggtatgagctacatttggctttatttcctataaatctatgaacgtcttcaggacacatgctgactttctgaggcataggtgtgggcttgggatatttttttctttttctttttttcttttctttttttttcttttttttttttttttttttttttttgcttctagaaggtcttatcaaaagttcctattttaaaaattatcataaaaactaaagggcccttcaaatgaccataaagcagtacaaatcaccaatcctagctaagtaaccaggtcacctgcaaaagcagcacctcggaaacaagagagcctgctgcattcacactcaaagcacccatcatataaaagtatcctagttaaatataaaaagcaaagttcatttccccaaagctcaaacagcctatgctgctcctgttcttttgccaaatctacccaaggcctgaggtggaggaatgctactttccccacaaatggtgggtcccactcctggccccagacctgaaggctgcagagttggaaacccaaggtccaaggagagaaacatgctgagaagttggtggtggacacaaggctgcagtaagcactgttagagcccatcagatcttcctaaatccagggactcaggactcgggaggggagcctgcctgctcacccctgctccttgggaaacagaaatctgggacatgtctctcccaattatctcgttcactgaaaaacaagaaaagggagagtgattagtgacctctgagtgattagccatatgatgcccaacgctgagctctacctcagacatttcccttcccatggctttctgtaaagataaaggcagtgtctgaagcctgctcctgagctgagtggcattagagatggaaacatcgctccacaaactactctggacctctttttctctctcattcagttcattttgggttgggaagggggcttaccctcactctaaaggtatgtttaaataagtattcaccttactctaacttttctttaattcatatctctttgagaaagtttttattttctacaatgccacctcctatgtaaatggaatgaaaataaatgctttggtcagaataaa

SEQ ID NO: 9683 - DNA, 3114 bp, Homo sapiens
  source 1..3114: mol_type = unassigned DNA
ggaatcccatcttgagactcgctaagcgtcccagccgcatccctcccgcagcgacggcggcccgggacccgcgggctgtgaaccatgaacacccgcaatagagtggtgaactccgggctcggcgcctcccctgcctcccgcccgacccgggatccccaggacccttctgggcggcaaggggagctgagccccgtggaagaccagagagagggtttggaggcagcccctaagggcccttcgcgggagagcgtcgtgcacgcgggccagaggcgcacaagtgcatacaccttgatagcaccaaatataaaccggagaaatgagatacaaagaattgcggagcaggagctggccaacctggagaagtggaaggagcagaacagagctaaaccggttcacctggtgcccagacggctaggtggaagccagtcagaaactgaagtcagacagaaacaacaactccagctgatgcaatctaaatacaagcaaaagctaaaaagagaagaatctgtaagaatcaagaaggaagctgaagaagctgaactccaaaaaatgaaggcaattcagagagagaagagcaataaactggaggagaaaaaaagacttcaagaaaaccttagaagagaagcatttagagagcatcagcaatacaaaaccgctgagttcttgagcaaactgaacacagaatcgccagacagaagtgcctgtcaaagtgctgtttgtggcccacaatcctcaacatgggccagaagctgggcttacagagattctctaaaggcagaagaaaacagaaaattgcaaaagatgaaggatgaacaacatcaaaagagtgaattactggaactgaaacggcagcagcaagagcaagaaagagccaaaatccaccagactgaacacaggagggtaaataatgcttttctggaccgactccaaggcaaaagtcaaccaggtggcctcgagcaatctggaggctgttggaatatgaatagcggtaacagctggggtatatgagaaaatattgactcctatctggccttcatcaactgacctcgaaaagcctcatgagatgctttttcttaatgtgattttgttcagcctcactgtttttaccttaatttcaactgcccacacacttgaccgtgcagtcaggagtgactggcttctccttgtcctcatttatgcatgtttggaggagctgattcctgaactcatatttaatctctactgccagggaaatgctacattatttttctaattggaagtataattagagtgatgttggtagggtagaaaaagagggagtcacttgatgctttcaggttaatcagagctatgggtgctacaggcttgtctttctaagtgacatattcttatctaattctcagatcaggttttgaaagctttgggggtctttttagattttaatccctactttctttatggtacaaatatgtacaaaagaaaaaggtcttatattcttttacacaaatttataaataaattttgaactccttctgtataaatgggtcatttttatttttaatgaaaagttattggggttttctctcttgaagggtctcattttaattcccttttccaggccgtatagatcaaatatagtactgtcattactgttggctcttgttttggtcttgacttactaatagtgttaccctgattttcagagggggacagtttatctccagaaaggccaatgtttgtatacacatcagctagacacaaatatagacatcatatgtagtttgtacatgtttcagaaacttgttttttctttgctctgtgtaacctatttcctattgctagttcagttggctttcttattcacttctgtgaccctgaaccagttctcagaccctagagtgtaagagcattgattttctacgctgtgtaatctagctcaatccctctgtcccctccgcctcaccgtcccccagccaccacattgtatagcaaaagcattacattcaatcctagaataaaggtaaatacaacaaatcatctttgcagctggacaactaataatactttgcagcattaagagatcttctgtgttaccagtcactctgttgaaatgaactttccgaatctctttattcaggaaaacatggggttttgaaattcttgggccaagagacataactgaggggttcgcagagctaggcaagggtgcactaggaaagggccacattggtgggtggggggtaacagagaacagatggtgtcaggaagtttctctggagtaaataatgtggatattcttggtttccctctcctccgccagctgaagctgtgttagtgctgttgacactaatataaaatgtttggtccatttgaaatccttgtcattgccttatatgggggaaactcaatcccccagcctgtgttggaaatatcaccaaactgattgtaaatgtgcggctgtagcagacattttagtgtggtggtgtgcagccatttcggccctacacctgccagcctggctaccttacagttgtgttccgatttttgcgtctatgcttggtgtgcctcacttgctgcattttccagcatgcaaccaggagttgacgtaggaaaaagggatgctttcttactttggaagctctcagggaagttggtgtcaatttctcctccactgcctggcctaccctgcactcccaaagattttgtgcagatgggtagttccattttttaaaaattgtgcagatatggaaaattgtgacttacttcatgaccagaactatctagaatatgtgtgggggtataaacatcttgcttaaccaaatatctatgtaggcagaggtaaccaggagagaagcaagacttgctgcctaaaggagcccaccattttacttttcacatttaatctgccacgttgaatcaattggaataaaacctgactcgcaggtgactggacaggaaatcccaaagttccaccatttctatgcttaattttaatgtccccccgcttttttttttgtagaaaataaaaacaagaaaatcgttccaatgtaagatgtttgttatagaaactttaggcaatacaggtgtgtaataaaatgtttaataaacttctaaacacttttgtatttggattta

SEQ ID NO: 9684 - DNA, 3160 bp, Homo sapiens
  source 1..3160: mol_type = unassigned DNA
cgctaagcgtcccagccgcatccctcccgcagcgacggcggcccgggacccgcgggctgtgaaccatgaacacccgcaatagagtggtgaactccgggctcggcgcctcccctgcctcccgcccgacccgggatccccaggacccttctgggcggcaaggggagctgagccccgtggaagaccagagagagggtttggaggcagcccctaagggcccttcgcgggagagcgtcgtgcacgcgggccagaggcgcacaagtgcatacaccttgatagcaccaaatataaaccggagaaatgagatacaaagaattgcggagcaggagctggccaacctggagaagtggaaggagcagaacagagctaaaccggttcacctggtgcccagacggctaggtggaagccagtcagaaactgaagtcagacagaaacaacaactccagctgatgcaatctaaatacaagcaaaagctaaaaagagaagaatctgtaagaatcaagaaggaagctgaagaagctgaactccaaaaaatgaaggcaattcagagagagaagagcaataaactggaggagaaaaaaagacttcaagaaaaccttagaagagaagcatttagagagcatcagcaatacaaaaccgctgagttcttgagcaaactgaacacagaatcgccagacagaagtgcctgtcaaagtgctgtttgtggcccacaatcctcaacatggaaacttcctatcctgcctagggatcacagctgggccagaagctgggcttacagagattctctaaaggcagaagaaaacagaaaattgcaaaagatgaaggatgaacaacatcaaaagagtgaattactggaactgaaacggcagcagcaagagcaagaaagagccaaaatccaccagactgaacacaggagggtaaataatgcttttctggaccgactccaaggcaaaagtcaaccaggtggcctcgagcaatctggaggctgttggaatatgaatagcggtaacagctggggttctctattagttttttcgaggcacctaagggtatatgagaaaatattgactcctatctggccttcatcaactgacctcgaaaagcctcatgagatgctttttcttaatgtgattttgttcagcctcactgtttttaccttaatttcaactgcccacacacttgaccgtgcagtcaggagtgactggcttctccttgtcctcatttatgcatgtttggaggagctgattcctgaactcatatttaatctctactgccagggaaatgctacattatttttctaattggaagtataattagagtgatgttggtagggtagaaaaagagggagtcacttgatgctttcaggttaatcagagctatgggtgctacaggcttgtctttctaagtgacatattcttatctaattctcagatcaggttttgaaagctttgggggtctttttagattttaatccctactttctttatggtacaaatatgtacaaaagaaaaaggtcttatattcttttacacaaatttataaataaattttgaactccttctgtataaatgggtcatttttatttttaatgaaaagttattggggttttctctcttgaagggtctcattttaattcccttttccaggccgtatagatcaaatatagtactgtcattactgttggctcttgttttggtcttgacttactaatagtgttaccctgattttcagagggggacagtttatctccagaaaggccaatgtttgtatacacatcagctagacacaaatatagacatcatatgtagtttgtacatgtttcagaaacttgttttttctttgctctgtgtaacctatttcctattgctagttcagttggctttcttattcacttctgtgaccctgaaccagttctcagaccctagagtgtaagagcattgattttctacgctgtgtaatctagctcaatccctctgtcccctccgcctcaccgtcccccagccaccacattgtatagcaaaagcattacattcaatcctagaataaaggtaaatacaacaaatcatctttgcagctggacaactaataatactttgcagcattaagagatcttctgtgttaccagtcactctgttgaaatgaactttccgaatctctttattcaggaaaacatggggttttgaaattcttgggccaagagacataactgaggggttcgcagagctaggcaagggtgcactaggaaagggccacattggtgggtggggggtaacagagaacagatggtgtcaggaagtttctctggagtaaataatgtggatattcttggtttccctctcctccgccagctgaagctgtgttagtgctgttgacactaatataaaatgtttggtccatttgaaatccttgtcattgccttatatgggggaaactcaatcccccagcctgtgttggaaatatcaccaaactgattgtaaatgtgcggctgtagcagacattttagtgtggtggtgtgcagccatttcggccctacacctgccagcctggctaccttacagttgtgttccgatttttgcgtctatgcttggtgtgcctcacttgctgcattttccagcatgcaaccaggagttgacgtaggaaaaagggatgctttcttactttggaagctctcagggaagttggtgtcaatttctcctccactgcctggcctaccctgcactcccaaagattttgtgcagatgggtagttccattttttaaaaattgtgcagatatggaaaattgtgacttacttcatgaccagaactatctagaatatgtgtgggggtataaacatcttgcttaaccaaatatctatgtaggcagaggtaaccaggagagaagcaagacttgctgcctaaaggagcccaccattttacttttcacatttaatctgccacgttgaatcaattggaataaaacctgactcgcaggtgactggacaggaaatcccaaagttccaccatttctatgcttaattttaatgtccccccgcttttttttttgtagaaaataaaaacaagaaaatcgttccaatgtaagatgtttgttatagaaactttaggcaatacaggtgtgtaataaaatgtttaataaacttctaaacacttttgtatttggattta

SEQ ID NO: 9685 - DNA, 1660 bp, Homo sapiens
  source 1..1660: mol_type = unassigned DNA
gaaaactagccgaggagagccagggagccggagagatcgcgcgcctgccgccgccggagcctgcgagccgagaccgagccatgtggctagaaatcctcctcacttcagtgctgggctttgccatctactggttcatctcccgggacaaagaggaaactttgccacttgaagatgggtggtgggggccaggcacgaggtccgcagccagggaggacgacagcatccgccctttcaaggtggaaacgtcagatgaggagatccacgacttacaccagaggatcgataagttccgtttcaccccacctttggaggacagctgcttccactatggcttcaactccaactacctgaagaaagtcatctcctactggcggaatgaatttgactggaagaagcaggtggagattctcaacagataccctcacttcaagactaagattgaagggctggacatccacttcatccacgtgaagcccccccagctgcccgcaggccataccccgaagcccttgctgatggtgcacggctggcccggctctttctacgagttttataagatcatcccactcctgactgaccccaagaaccatggcctgagcgatgagcacgtttttgaagtcatctgcccttccatccctggctatggcttctcagaggcatcctccaagaaggggttcaactcggtggccaccgccaggatcttttacaagctgatgctgcggctgggcttccaggaattctacattcaaggaggggactgggggtccctgatctgcactaatatggcccagctggtgcccagccacgtgaaaggcctgcacttgaacatggctttggttttaagcaacttctctaccctgaccctcctcctgggacagcgtttcgggaggtttcttggcctcactgagagggatgtggagctgctgtaccccgtcaaggagaaggtattctacagcctgatgagggagagcggctacatgcacatccagtgcaccaagcctgacaccgtaggctctgctctgaatgactctcctgtgggtctggctgcctatattctagagaagttttccacctggaccaatacggaattccgatacctggaggatggaggcctggaaaggaagttctccctggacgacctgctgaccaacgtcatgctctactggacaacaggcaccatcatctcctcccagcgcttctacaaggagaacctgggacagggctggatgacccagaagcatgagcggatgaaggtctatgtgcccactggcttctctgccttcccttttgagctattgcacacgcctgaaaagtgggtgaggttcaagtacccaaagctcatctcctattcctacatggttcgtgggggccactttgcggcctttgaggagccggagctgctcgcccaggacatccgcaagttcctgtcggtgctggagcggcaatgacccacccctctccccccgcctgccacctccccccacaagtgccctccaggcttttcttggggaagataccccttttctgaggaatgagtttgcctccgtcccctgcccatgctgggagcccacgctcaccccctcacccctccaagctcactccccaacccccaactccgtgtggtaagcaacatggctttgatgataaacgactttactct

SEQ ID NO: 9686 - DNA, 1776 bp, Homo sapiens
  source 1..1776: mol_type = unassigned DNA
acaggcccttagagcatcgccaggtgcagagctccacagctctctttcccaaggagtaatcagagggtgagaacgtggagcctggtggacaggtgaaagcactgggatctttctgcccagaaaggggaaagttgcacatttatatcctagagggaagcgacagcagtgcttctccctgtgctgaggtacaggagccatgtggctagaaatcctcctcacttcagtgctgggctttgccatctactggttcatctcccgggacaaagaggaaactttgccacttgaagatgggtggtgggggccaggcacgaggtccgcagccagggaggacgacagcatccgccctttcaaggtggaaacgtcagatgaggagatccacgacttacaccagaggatcgataagttccgtttcaccccacctttggaggacagctgcttccactatggcttcaactccaactacctgaagaaagtcatctcctactggcggaatgaatttgactggaagaagcaggtggagattctcaacagataccctcacttcaagactaagattgaagggctggacatccacttcatccacgtgaagcccccccagctgcccgcaggccataccccgaagcccttgctgatggtgcacggctggcccggctctttctacgagttttataagatcatcccactcctgactgaccccaagaaccatggcctgagcgatgagcacgtttttgaagtcatctgcccttccatccctggctatggcttctcagaggcatcctccaagaaggggttcaactcggtggccaccgccaggatcttttacaagctgatgctgcggctgggcttccaggaattctacattcaaggaggggactgggggtccctgatctgcactaatatggcccagctggtgcccagccacgtgaaaggcctgcacttgaacatggctttggttttaagcaacttctctaccctgaccctcctcctgggacagcgtttcgggaggtttcttggcctcactgagagggatgtggagctgctgtaccccgtcaaggagaaggtattctacagcctgatgagggagagcggctacatgcacatccagtgcaccaagcctgacaccgtaggctctgctctgaatgactctcctgtgggtctggctgcctatattctagagaagttttccacctggaccaatacggaattccgatacctggaggatggaggcctggaaaggaagttctccctggacgacctgctgaccaacgtcatgctctactggacaacaggcaccatcatctcctcccagcgcttctacaaggagaacctgggacagggctggatgacccagaagcatgagcggatgaaggtctatgtgcccactggcttctctgccttcccttttgagctattgcacacgcctgaaaagtgggtgaggttcaagtacccaaagctcatctcctattcctacatggttcgtgggggccactttgcggcctttgaggagccggagctgctcgcccaggacatccgcaagttcctgtcggtgctggagcggcaatgacccacccctctccccccgcctgccacctccccccacaagtgccctccaggcttttcttggggaagataccccttttctgaggaatgagtttgcctccgtcccctgcccatgctgggagcccacgctcaccccctcacccctccaagctcactccccaacccccaactccgtgtggtaagcaacatggctttgatgataaacgactttactct

SEQ ID NO: 9687 - DNA, 567 bp, Homo sapiens
  source 1..567: mol_type = unassigned DNA
gctgaaaactagccgaggagagccagggagccggagagatcgcgcgcctgccgccgccggagcctgcgagccgagaccgagccatgtggctagaaatcctcctcacttcagtgctgggctttgccatctactggttcatctcccgggacaaagaggaaactttgccacttgaagatgggtggtgggggccaggcacgaggtccgcagccagggaggacgacagcatccgccctttcaaggtggaaacgtcagatgaggagatccacgacttacaccagaggatcgataagttccgtttcaccccacctttggaggacagctgcttccactatggcttcaactccaactacctgaagaaagtcatctcctactggcggaatgaatttgactggaagaagcaggtggagattctcaacagataccctcacttcaagactaagattgaagggctggacatccacttcatccacgtgaagcccccccagctgcccgcaggccataccccgaagcccttgctgatggtgcacggctggcccggctctttctacgagttttataagatcatcc

SEQ ID NO: 9688 - DNA, 895 bp, Homo sapiens
  source 1..895: mol_type = unassigned DNA
cgcgcctgccgccgccggagcctgcgagccgagaccgtaagcgcccggggccggccgggcccgcactccccggacgcagacgcggttcgggctccgcgcgggctcggccgccggggtgggcggcgggccggggcgccgaggggtcggggctgcggtcggcccgcaggggtgcagagggacttgtagttggtccgcccccagctcctgccccggccaggagactgcgcgtgccgcctactgggggaaggagcctgcaggcgaccgcggacttctcgcagggaattccgcgtcccagactgtgggcggacgccgcagggagggaggctcgcgaccccgagagcgcaccgcgtcccctggcctgggcgagctctgcttccagggccgtggctcgctcggcggtgaaatgcacttaatttgtcacccaagtcggaacactgattttcatgcgcgtccgtgtgaagagaccaccaaacaggctttgtgagccatgtggctagaaatcctcctcacttcagtgctgggctttgccatctactggttcatctcccgggacaaagaggaaactttgccacttgaagatgggtggtgggggccaggcacgaggtccgcagccagggaggacgacagcatccgccctttcaaggtggaaacgtcagatgaggagatccacgacttacaccagaggatcgataagttccgtttcaccccacctttggaggacagctgcttccactatggcttcaactccaactacctgaagaaagtcatctcctactggcggaatgaatttgactggaagaagcaggtggagattctcaacagataccctcacttcaagactaagattgaagggctggacatccacttcatccacgtgaagcccccccagctgccc

SEQ ID NO: 9689 - DNA, 2064 bp, Homo sapiens
  source 1..2064: mol_type = unassigned DNA
aggttagctgcgtgtccgggtgctaggctgcagacccgccgccatgacgctgcgcgcggccgtcttcgaccttgacggggtgctggcgctgccagcggtgttcggcgtcctcggccgcacggaggaggccctggcgctgcccagagggtgccactacccggcttatgaaaggagagatcacactttcccagtggataccactcatggaagaaaactgcaggaagtgctccgagaccgctaaagtctgcctccccaagaatttctccataaaagaaatctttgacaaggcgatttcagccagaaagatcaaccgccccatgctccaggcagctctcatgctcaggaagaaaggattcactactgccatcctcaccaacacctggctggacgaccgtgctgagagagatggcctggcccagctgatgtgtgagctgaagatgcactttgacttcctgatagagtcgtgtcaggtgggaatggtcaaacctgaacctcagatctacaagtttctgctggacaccctgaaggccagccccagtgaggtcgtttttttggatgacatcggggctaatctgaagccagcccgtgacttgggaatggtcaccatcctggtccaggacactgacacggccctgaaagaactggagaaagtgaccggaatccagcttctcaataccccggcccctctgccgacctcttgcaatccaagtgacatgagccatgggtacgtgacagtaaagcccagggtccgtctgcattttgtggagctgggctccggccctgctgtgtgcctctgccatggatttcccgagagttggtattcttggaggtaccagatccctgctctggcccaggcaggttaccgggtcctagctatggacatgaaaggctatggagagtcatctgctcctcccgaaatagaagaatattgcatggaagtgttatgtaaggagatggtaaccttcctggataaactgggcctctctcaagcagtgttcattggccatgactggggtggcatgctggtgtggtacatggctctcttctaccccgagagagtgagggcggtggccagtttgaatactcccttcataccagcaaatcccaacatgtcccctttggagagtatcaaagccaacccagtatttgattaccagctctacttccaagaaccaggagtggctgaggctgaactggaacagaacctgagtcggactttcaaaagcctcttcagagcaagcgatgagagtgttttatccatgcataaagtctgtgaagcgggaggactttttgtaaatagcccagaagagcccagcctcagcaggatggtcactgaggaggaaatccagttctatgtgcagcagttcaagaagtctggtttcagaggtcctctaaactggtaccgaaacatggaaaggaactggaagtgggcttgcaaaagcttgggacggaagatcctgattccggccctgatggtcacggcggagaaggacttcgtgctcgttcctcagatgtcccagcacatggaggactggattccccacctgaaaaggggacacattgaggactgtgggcactggacacagatggacaagccaaccgaggtgaatcagatcctcattaagtggctggattctgatgcccggaacccaccggtggtctcaaagatgtagaacgcagcgtgtgcccacgctcagcaggtgtgccatccttccacctgctggggcaccattcttagtatacagaggtggccttacacacatcttgcatggatggcagcattgttctgaaggggtttgcagaaaaaaaagattttctttacataaagtgaatcaaatttgacattattttagatcccagagaaatcaggtgtgattagttctccaggcatgaatgcatcgtccctttatctgtaagaacccttagtgtcctgtagggggacagaatggggtggccaggtggtgatttctctttgaccaatgcatagtttggcagaaaaatcagccgttcatttagaagaatcttagcagagattgggatgccttactcaataaagctaagatg

SEQ ID NO: 9690 - DNA, 2038 bp, Homo sapiens
  source 1..2038: mol_type = unassigned DNA
cttcgcgcatctcccaggttagctgcgtgtccgggtgctaggctgcagacccgccgccatgacgctgcgcgcggccgtcttcgaccttgacggggtgctggcgctgccagcggtgttcggcgtcctcggccgcacggaggaggccctggcgctgcccagtggataccactcatggaagaaaactgcaggaagtgctccgagaccgctaaagtctgcctccccaagaatttctccataaaagaaatctttgacaaggcgatttcagccagaaagatcaaccgccccatgctccaggcagctctcatgctcaggaagaaaggattcactactgccatcctcaccaacacctggctggacgaccgtgctgagagagatggcctggcccagctgatgtgtgagctgaagatgcactttgacttcctgatagagtcgtgtcaggtgggaatggtcaaacctgaacctcagatctacaagtttctgctggacaccctgaaggccagccccagtgaggtcgtttttttggatgacatcggggctaatctgaagccagcccgtgacttgggaatggtcaccatcctggtccaggacactgacacggccctgaaagaactggagaaagtgaccggaatccagcttctcaataccccggcccctctgccgacctcttgcaatccaagtgacatgagccatgggtacgtgacagtaaagcccagggtccgtctgcattttgtggagctgggctccggccctgctgtgtgcctctgccatggatttcccgagagttggtattcttggaggtaccagatccctgctctggcccaggcaggttaccgggtcctagctatggacatgaaaggctatggagagtcatctgctcctcccgaaatagaagaatattgcatggaagtgttatgtaaggagatggtaaccttcctggataaactgggcctctctcaagcagtgttcattggccatgactggggtggcatgctggtgtggtacatggctctcttctaccccgagagagtgagggcggtggccagtttgaatactcccttcataccagcaaatcccaacatgtcccctttggagagtatcaaagccaacccagtatttgattaccagctctacttccaagaaccaggagtggctgaggctgaactggaacagaacctgagtcggactttcaaaagcctcttcagagcaagcgatgagagtgttttatccatgcataaagtctgtgaagcgggaggactttttgtaaatagcccagaagagcccagcctcagcaggatggtcactgaggaggaaatccagttctatgtgcagcagttcaagaagtctggtttcagaggtcctctaaactggtaccgaaacatggaaaggaactggaagtgggcttgcaaaagcttgggacggaagatcctgattccggccctgatggtcacggcggagaaggacttcgtgctcgttcctcagatgtcccagcacatggaggactggattccccacctgaaaaggggacacattgaggactgtgggcactggacacagatggacaagccaaccgaggtgaatcagatcctcattaagtggctggattctgatgcccggaacccaccggtggtctcaaagatgtagaacgcagcgtgtgcccacgctcagcaggtgtgccatccttccacctgctggggcaccattcttagtatacagaggtggccttacacacatcttgcatggatggcagcattgttctgaaggggtttgcagaaaaaaaagattttctttacataaagtgaatcaaatttgacattattttagatcccagagaaatcaggtgtgattagttctccaggcatgaatgcatcgtccctttatctgtaagaacccttagtgtcctgtagggggacagaatggggtggccaggtggtgatttctctttgaccaatgcatagtttggcagaaaaatcagccgttcatttagaagaatcttagcagagattgggatgccttactcaataaagctaagatgactatg

SEQ ID NO: 9691 - DNA, 1930 bp, Homo sapiens
  source 1..1930: mol_type = unassigned DNA
gtgctaggctgcagacccgccgccatgacgctgcgcgcggccgtcttcgaccttgacggggtgctggcgctgccagcggtgttcggcgtcctcggccgcacggaggaggccctggcgctgcccagaggacttctgaatgatgctttccagaaagggggaccagagggtgccactacccggcttatgaaaggagagatcacactttcccagtggataccactcatggaagaaaactgcaggaagtgctccgagaccgctaaagtctgcctccccaagaatttctccataaaagaaatctttgacaaggcgatttcagccagaaagatcaaccgccccatgctccaggcagctctcatgctcaggaagaaagctttttgctcaggattcactactgccatcctcaccaacacctggctggacgaccgtgctgagagagatggcctggcccagctgatgtgtgagctgaagatgcactttgacttcctgatagagtcgtgtcaggtgggaatggtcaaacctgaacctcagatctacaagtttctgctggacaccctgaaggccagccccagtgaggtcgtttttttggatgacatcggggctaatctgaagccagcccgtgacttgggaatggtcaccatcctggtccaggacactgacacggccctgaaagaactggagaaagtgaccggaatccagcttctcaataccccggcccctctgccgacctcttgcaatccaagtgacatgagccatgggtacgtgacagtaaagcccagggtccgtctgcattttgtggagctgggctccggccctgctgtgtgcctctgccatggatttcccgagagttggtattcttggaggtaccagatccctgctctggcccaggcaggttaccgggtcctagctatggacatgaaaggctatggagagtcatctgctcctcccgaaatagaagaatattgcatggaagtgttatgtaaggagagtatcaaagccaacccagtatttgattaccagctctacttccaagaaccaggagtggctgaggctgaactggaacagaacctgagtcggactttcaaaagcctcttcagagcaagcgatgagagtgttttatccatgcataaagtctgtgaagcgggaggactttttgtaaatagcccagaagagcccagcctcagcaggatggtcactgaggaggaaatccagttctatgtgcagcagttcaagaagtctggtttcagaggtcctctaaactggtaccgaaacatggaaaggaactggaagtgggcttgcaaaagcttgggacggaagatcctgattccggccctgatggtcacggcggagaaggacttcgtgctcgttcctcagatgtcccagcacatggaggactggattccccacctgaaaaggggacacattgaggactgtgggcactggacacagatggacaagccaaccgaggtgaatcagatcctcattaagtggctggattctgatgcccggaacccaccggtggtctcaaagatgtagaacgcagcgtgtgcccacgctcagcaggtgtgccatccttccacctgctggggcaccattcttagtatacagaggtggccttacacacatcttgcatggatggcagcattgttctgaaggggtttgcagaaaaaaaagattttctttacataaagtgaatcaaatttgacattattttagatcccagagaaatcaggtgtgattagttctccaggcatgaatgcatcgtccctttatctgtaagaacccttagtgtcctgtagggggacagaatggggtggccaggtggtgatttctctttgaccaatgcatagtttggcagaaaaatcagccgttcatttagaagaatcttagcagagattgggatgccttactcaataaagctaagatgactatg

SEQ ID NO: 9692 - DNA, 3140 bp, Homo sapiens
  source 1..3140: mol_type = unassigned DNA
attccaagtccagcaagttcgcagggagctgtcagtccgtccaggaaggcccgggcctgggtttgcctcttcaagcagctactgcaggggcgtggggagggggcataagagactttggactttcctttgagacagtagaaagcgttacatccagaggcgagattctagcctggggtccccgccttcccggcctcctcttcctctccctctgactccctttcctgtgcccctccccctgcctctttcccggccagagtccagccttaacccgggcagagggcggagtcccgttaagggggtgtggggaggaggcggggccagggcaggggcggggcagagccgggccaagctgggcgggtcatgcgccctggccttcgcgcatctcccaggttagctgcgtgtccgggtgctaggctgcagacccgccgccatgacgctgcgcgcggccgtcttcgaccttgacggggtgctggcgctgccagcggtgttcggcgtcctcggccgcacggaggaggccctggcgctgcccagaggacttctgaatgatgctttccagaaagggggaccagagggtgccactacccggcttatgaaaggagagatcacactttcccagtggataccactcatggaagaaaactgcaggaagtgctccgagaccgctaaagtctgcctccccaagaatttctccataaaagaaatctttgacaaggcgatttcagccagaaagatcaaccgccccatgctccaggcagctctcatgctcaggaagaaaggattcactactgccatcctcaccaacacctggctggacgaccgtgctgagagagatggcctggcccagctgatgtgtgagctgaagatgcactttgacttcctgatagagtcgtgtcaggtgggaatggtcaaacctgaacctcagatctacaagtttctgctggacaccctgaaggccagccccagtgaggtcgtttttttggatgacatcggggctaatctgaagccagcccgtgacttgggaatggtcaccatcctggtccaggacactgacacggccctgaaagaactggagaaagtgaccggaatccagcttctcaataccccggcccctctgccgacctcttgcaatccaagtgacatgagccatgggtacgtgacagtaaagcccagggtccgtctgcattttgtggagctgggctccggccctgctgtgtgcctctgccatggatttcccgagagttggtattcttggaggtaccagatccctgctctggcccaggcaggttaccgggtcctagctatggacatgaaaggctatggagagtcatctgctcctcccgaaatagaagaatattgcatggaagtgttatgtaaggagatggtaaccttcctggataaactgggcctctctcaagcagtgttcattggccatgactggggtggcatgctggtgtggtacatggctctcttctaccccgagagagtgagggcggtggccagtttgaatactcccttcataccagcaaatcccaacatgtcccctttggagagtatcaaagccaacccagtatttgattaccagctctacttccaagaaccaggagtggctgaggctgaactggaacagaacctgagtcggactttcaaaagcctcttcagagcaagcgatgagagtgttttatccatgcataaagtctgtgaagcgggaggactttttgtaaatagcccagaagagcccagcctcagcaggatggtcactgaggaggaaatccagttctatgtgcagcagttcaagaagtctggtttcagaggtcctctaaactggtaccgaaacatggaaaggaactggaagtgggcttgcaaaagcttgggacggaagatcctgattccggccctgatggtcacggcggagaaggacttcgtgctcgttcctcagatgtcccagcacatggaggactggattccccacctgaaaaggggacacattgaggactgtgggcactggacacagatggacaagccaaccgaggtgaatcagatcctcattaagtggctggattctgatgcccggaacccaccggtggtctcaaagatgtagaacgcagcgtgtgcccacgctcagcaggtgtgccatccttccacctgctggggcaccattcttagtatacagaggtggccttacacacatcttgcatggatggcagcattgttctgaaggggtttgcagaaaaaaaagattttctttacataaagtgaatcaaatttgacattattttagatcccagagaaatcaggtgtgattagttctccaggcatgaatgcatcgtccctttatctgtaagaacccttagtgtcctgtagggggacagaatggggtggccaggtggtgatttctctttgaccaatgcatagtttggcagaaaaatcagccgttcatttagaagaatcttagcagagattgggatgccttactcaataaagctaagatgactatgctgctggctgtctttgttcttggagaggtggagtgactgttcacggagaatgcacggcatggggatgaaccctttccctctgcttttgagccctgttctgggctccaaggtgctgtatgatctaggccgtgctggccaggagacaatcctatggggatggcagtggtgtcttgtgctctgtcccctagagcagtcactggccacaggtagccacctgcctttctcccggcttccctagcagagtttgctcaggcacaaatgtgcacctggagcatttgaaatgtgctagtgaggctgaggaagagaattttaaatttcattgaattgtaatcagtttaaagttaaatagcagcagctgccatgaggctcaggcagatccagctcatcttcccctctgccccctcctccctatcttcccctctaccctctcctgcctcctgtcacatccggttaggctcccatctcactgatgtgtctcctgcagtggtctctcccctgccctgcttccagccccagagtcctggagcagcagcctcctcacgggtcttgccgcccacatggttggatcctgaaactcgcagggcctcccccaactgcccctgcccacccccagcccggccccatcaccctccaattcctaaccgc

SEQ ID NO: 9693 - DNA, 2405 bp, Homo sapiens
  source 1..2405: mol_type = unassigned DNA
gcaatttccgcttccggtccgtcgcctccttctgttgcttcccgtctcctcggcggctcccctcccccgcccggctctccgcgccccttctgggcggcggggcggcggagccgtcggcgtgcggccctccttgcgttcgtgcgtgcgcccgtggcccggcgcacgtcccgcgacaccgaggccgagcggggcagggggctgaccgccatgaccccccagagcccggcgtgagggggccgagatgcggtgacctgccagcacctgccgcagccttcgtccgggagtcgccccatctctccacgcatcggggccctgtgccccttgctgctgcagccgggcaccatgtcgacctcgtccttgaggcgccagatgaagaacatcgtccacaactactcagaggcggagatcaaggttcgagaggccacgagcaatgacccctggggcccatccagctccctcatgtcagagattgccgacctcacctacaacgttgtcgccttctcggagatcatgagcatgatctggaagcggctcaatgaccatggcaagaactggcgtcacgtttacaaggccatgacgctgatggagtacctcatcaagaccggctcggagcgcgtgtcgcagcagtgcaaggagaacatgtacgccgtgcagacgctgaaggacttccagtacgtggaccgcgacggcaaggaccagggcgtgaacgtgcgtgagaaagctaagcagctggtggccctgctgcgcgacgaggaccggctgcgggaagagcgggcgcacgcgctcaagaccaaggaaaagctggcacagaccgccacggcctcatcagcagctgtgggctcaggcccccctcccgaggcggagcaggcgtggccgcagagcagcggggaggaggagctgcagctccagctggccctggccatgagcaaggaggaggccgaccaggaggagcggatccgtcgcggggatgacctgcggctgcagatggcaatcgaggagagcaagagggagactgggggcaaggaggagtcgtccctcatggaccttgctgacgtcttcacggccccagctcctgccccgaccacagacccctgggggggcccagcacccatggctgctgccgtccccacggctgcccccacctcggacccctggggcggcccccctgtccctccagctgctgatccctggggaggtccagcccccacgccggcctctggggacccctggaggcctgctgcccctgcaggaccctcagttgacccttggggtgggaccccagcccctgcagctggggaggggcccacgcctgatccatggggaagttccgatggtggggtcccggtcagtgggccctcagcctccgatccctggacaccggccccggccttctcagatccctggggagggtcacctgccaagcccagcaccaatggcacaacagccgggggattcgacacggagcccgacgagttctctgactttgaccgactccgcacggcactgccgacctccgggagcagcgcaggagagctggagctgctggcaggagaggtgccggcccgaagccctggggcgtttgacatgagtggggtcaggggatctctggctgaggctgtgggcagccccccacctgcagccacaccaactcccacgccccccacccggaagacgccggagtcattcctggggcccaatgcagccctcgtcgacctggactcgctggtgagccggccgggccccacgccgcctggagccaaggcctccaaccccttcctgccaggcggaggcccagccactggcccttccgtcaccaaccccttccagcccgcgcctcccgcgacgctcaccctgaaccagctccgtctcagtcctgtgcctcccgtccctggagcgccacccacgtacatctctccccttggcgggggccctggcctgccccccatgatgcccccgggccccccggcccccaacactaatcccttcctcctataatccagggcggaagggggcctggctccatccggctgccccattccggctccctgggagatcagtgttgtgagtgcatgtgaaatgggggatccccacccccagtgcccttccccttcctggggcccactcacactacaccctcttcctttcccaccccacctccccggagagaaactggacatggggcctggggaggggagctggccagaggaggacccctttcccgtggcattagaagggggaggggtggctggggcccccacccattccccctccctccaaactcccaacccccagtcagtgtttgagcctcctcgttcccctcacgcacccgctcacgcaccctcggtgaatccttggtgatgattttggcaactttgggaataaatggcaattcccacgggcttggc

SEQ ID NO: 9694 - DNA, 2483 bp, Homo sapiens
  source 1..2483: mol_type = unassigned DNA
gcaatttccgcttccggtccgtcgcctccttctgttgcttcccgtctcctcggcggctcccctcccccgcccggctctccgcgccccttctgggcggcggggcggcggagccgtcggcgtgcggccctccttgcgttcgtgcgtgcgcccgtggcccggcgcacgtcccgcgacaccgaggccgagcggggcagggggctgaccgccatgaccccccagagcccggcgtgagggggccgagatgcggtgacctgccagcacctgccgcagccttcgtccgggagtcgccccatctctccacgcatcggggccctgtgccccttgctgctgcagccgggcaccatgtcgacctcgtccttgaggcgccagatgaagaacatcgtccacaactactcagaggcggagatcaaggttcgagaggccacgagcaatgacccctggggcccatccagctccctcatgtcagagattgccgacctcacctacaacgttgtcgccttctcggagatcatgagcatgatctggaagcggctcaatgaccatggcaagaactggcgtcacgtttacaaggccatgacgctgatggagtacctcatcaagaccggctcggagcgcgtgtcgcagcagtgcaaggagaacatgtacgccgtgcagacgctgaaggacttccagtacgtggaccgcgacggcaaggaccagggcgtgaacgtgcgtgagaaagctaagcagctggtggccctgctgcgcgacgaggaccggctgcgggaagagcgggcgcacgcgctcaagaccaaggaaaagctggcacagaccgccacggcctcatcagcagctgtgggctcaggcccccctcccgaggcggagcaggcgtggccgcagagcagcggggaggaggagctgcagctccagctggccctggccatgagcaaggaggaggccgaccagcccccgtcctgcggccccgaggacgacgcccagctccagctggcccttagtttgagccgagaagagcatgataaggaggagcggatccgtcgcggggatgacctgcggctgcagatggcaatcgaggagagcaagagggagactgggggcaaggaggagtcgtccctcatggaccttgctgacgtcttcacggccccagctcctgccccgaccacagacccctgggggggcccagcacccatggctgctgccgtccccacggctgcccccacctcggacccctggggcggcccccctgtccctccagctgctgatccctggggaggtccagcccccacgccggcctctggggacccctggaggcctgctgcccctgcaggaccctcagttgacccttggggtgggaccccagcccctgcagctggggaggggcccacgcctgatccatggggaagttccgatggtggggtcccggtcagtgggccctcagcctccgatccctggacaccggccccggccttctcagatccctggggagggtcacctgccaagcccagcaccaatggcacaacagcagccgggggattcgacacggagcccgacgagttctctgactttgaccgactccgcacggcactgccgacctccgggagcagcgcaggagagctggagctgctggcaggagaggtgccggcccgaagccctggggcgtttgacatgagtggggtcaggggatctctggctgaggctgtgggcagccccccacctgcagccacaccaactcccacgccccccacccggaagacgccggagtcattcctggggcccaatgcagccctcgtcgacctggactcgctggtgagccggccgggccccacgccgcctggagccaaggcctccaaccccttcctgccaggcggaggcccagccactggcccttccgtcaccaaccccttccagcccgcgcctcccgcgacgctcaccctgaaccagctccgtctcagtcctgtgcctcccgtccctggagcgccacccacgtacatctctccccttggcgggggccctggcctgccccccatgatgcccccgggccccccggcccccaacactaatcccttcctcctataatccagggcggaagggggcctggctccatccggctgccccattccggctccctgggagatcagtgttgtgagtgcatgtgaaatgggggatccccacccccagtgcccttccccttcctggggcccactcacactacaccctcttcctttcccaccccacctccccggagagaaactggacatggggcctggggaggggagctggccagaggaggacccctttcccgtggcattagaagggggaggggtggctggggcccccacccattccccctccctccaaactcccaacccccagtcagtgtttgagcctcctcgttcccctcacgcacccgctcacgcaccctcggtgaatccttggtgatgattttggcaactttgggaataaatggcaattcccacgggcttggc

SEQ ID NO: 9695 - DNA, 2946 bp, Homo sapiens
  source 1..2946: mol_type = unassigned DNA
aattctttcatttcagagttgagcaaactgtgtctcaaggaggtgtgcgctgcaggtagctgatgtggccaggatttgaacccacattttatattctttgccattagattccatttttcttatctcttatttctcagcgccaggtctctttttgtttctgggcctctttcttccttggcctcctgcctccctgtcttcccatgttcttgtatctgctgctgcctgtgtttttctcattgtgtctctgcctagctccctctgcccaggtttctatgtgtctctttctgtcagaactgtcttctatttcttctcagtccccttctctgcatttgttacatcatctcttcatcttaatgtattaggctggggctgttttgggactccagagagttactttttaactagctacatctgtcttcaggtgcctggctttctggcctgaggtggaagcagaggccagcctctctccgtcatccctatctcccctgggcttacatcatggcggggctttgaaaatctccctctgtggcttcttggagccgcatagatgggtgatcagagctggctctggaaccaggctgctccaggagtaaggagcccagtctttgcatgcagtgttgaaaaaggtaatgtccctcttgtgctgagcgagcacctggcacacagcagggacccaggcagtggggctgttaggttccttatctctcctgagccttgggcttccgctatccttgggacgtctggtcttctggcttccccggttcttcctgccgccctggatgcggtgacctgccagcacctgccgcagccttcgtccgggagtcgccccatctctccacgcatcggggccctgtgccccttgctgctgcagccgggcaccatgtcgacctcgtccttgaggcgccagatgaagaacatcgtccacaactactcagaggcggagatcaaggttcgagaggccacgagcaatgacccctggggcccatccagctccctcatgtcagagattgccgacctcacctacaacgttgtcgccttctcggagatcatgagcatgatctggaagcggctcaatgaccatggcaagaactggcgtcacgtttacaaggccatgacgctgatggagtacctcatcaagaccggctcggagcgcgtgtcgcagcagtgcaaggagaacatgtacgccgtgcagacgctgaaggacttccagtacgtggaccgcgacggcaaggaccagggcgtgaacgtgcgtgagaaagctaagcagctggtggccctgctgcgcgacgaggaccggctgcgggaagagcgggcgcacgcgctcaagaccaaggaaaagctggcacagaccgccacggcctcatcagcagctgtgggctcaggcccccctcccgaggcggagcaggcgtggccgcagagcagcggggaggaggagctgcagctccagctggccctggccatgagcaaggaggaggccgaccaggaggagcggatccgtcgcggggatgacctgcggctgcagatggcaatcgaggagagcaagagggagactgggggcaaggaggagtcgtccctcatggaccttgctgacgtcttcacggccccagctcctgccccgaccacagacccctgggggggcccagcacccatggctgctgccgtccccacggctgcccccacctcggacccctggggcggcccccctgtccctccagctgctgatccctggggaggtccagcccccacgccggcctctggggacccctggaggcctgctgcccctgcaggaccctcagttgacccttggggtgggaccccagcccctgcagctggggaggggcccacgcctgatccatggggaagttccgatggtggggtcccggtcagtgggccctcagcctccgatccctggacaccggccccggccttctcagatccctggggagggtcacctgccaagcccagcaccaatggcacaacagcagccgggggattcgacacggagcccgacgagttctctgactttgaccgactccgcacggcactgccgacctccgggagcagcgcaggagagctggagctgctggcaggagaggtgccggcccgaagccctggggcgtttgacatgagtggggtcaggggatctctggctgaggctgtgggcagccccccacctgcagccacaccaactcccacgccccccacccggaagacgccggagtcattcctggggcccaatgcagccctcgtcgacctggactcgctggtgagccggccgggccccacgccgcctggagccaaggcctccaaccccttcctgccaggcggaggcccagccactggcccttccgtcaccaaccccttccagcccgcgcctcccgcgacgctcaccctgaaccagctccgtctcagtcctgtgcctcccgtccctggagcgccacccacgtacatctctccccttggcgggggccctggcctgccccccatgatgcccccgggccccccggcccccaacactaatcccttcctcctataatccagggcggaagggggcctggctccatccggctgccccattccggctccctgggagatcagtgttgtgagtgcatgtgaaatgggggatccccacccccagtgcccttccccttcctggggcccactcacactacaccctcttcctttcccaccccacctccccggagagaaactggacatggggcctggggaggggagctggccagaggaggacccctttcccgtggcattagaagggggaggggtggctggggcccccacccattccccctccctccaaactcccaacccccagtcagtgtttgagcctcctcgttcccctcacgcacccgctcacgcaccctcggtgaatccttggtgatgattttggcaactttgggaataaatggcaattcccacgggcttggc

SEQ ID NO: 9696 - DNA, 2057 bp, Homo sapiens
  source 1..2057: mol_type = unassigned DNA
ttccggtccgtcgcctccttctgttgcttcccgtctcctcggcggctcccctcccccgcccggctctccgcgccccttctgggcggcggggcggcggagccgtcggcgtgcggccctccttgcgttcgtgcgtgcgcccgtggcccggcgcacgtcccgcgacaccgaggccgagcggggcagggggctgaccgccatgaccccccagagcccggcgtgagggggccgagatgcggtgacctgccagcacctgccgcagccttcgtccgggagtcgccccatctctccacgcatcggggccctgtgccccttgctgctgcagccgggcaccatgtcagagattgccgacctcacctacaacgttgtcgccttctcggagatcatgagcatgatctggaagcggctcaatgaccatggcaagaactggcgtcacgtttacaaggccatgacgctgatggagtacctcatcaagaccggctcggagcgcgtgtcgcagcagtgcaaggagaacatgtacgccgtgcagacgctgaaggacttccagtacgtggaccgcgacggcaaggaccagggcgtgaacgtgcgtgagaaagctaagcagctggtggccctgctgcgcgacgaggaccggctgcgggaagagcgggcgcacgcgctcaagaccaaggaaaagctggcacagaccgccacggcctcatcagcagctgtgggctcaggcccccctcccgaggcggagcaggcgtggccgcagagcagcggggaggaggagctgcagctccagctggccctggccatgagcaaggaggaggccgaccagcccccgtcctgcggccccgaggacgacgcccagctccagctggcccttagtttgagccgagaagagcatgataaggaggagcggatccgtcgcggggatgacctgcggctgcagatggcaatcgaggagagcaagagggagactgggggcaaggaggagtcgtccctcatggaccttgctgacgtcttcacggccccagctcctgccccgaccacagacccctgggggggcccagcacccatggctgctgccgtccccacggctgcccccacctcggacccctggggcggcccccctgtccctccagctgctgatccctggggaggtccagcccccacgccggcctctggggacccctggaggcctgctgcccctgcaggaccctcagttgacccttggggtgggaccccagcccctgcagctggggaggggcccacgcctgatccatggggaagttccgatggtggggtcccggtcagtgggccctcagcctccgatccctggacaccggccccggccttctcagatccctggggagggtcacctgccaagcccagcaccaatggcacaacagccgggggattcgacacggagcccgacgagttctctgactttgaccgactccgcacggcactgccgacctccgggagcagcgcaggagagctggagctgctggcaggagaggtgccggcccgaagccctggggcgtttgacatgagtggggtcaggggatctctggctgaggctgtgggcagccccccacctgcagccacaccaactcccacgccccccacccggaagacgccggagtcattcctggggcccaatgcagccctcgtcgacctggactcgctggtgagccggccgggccccacgccgcctggagccaaggcctccaaccccttcctgccaggcggaggcccagccactggcccttccgtcaccaaccccttccagcccgcgcctcccgcgacgctcaccctgaaccagctccgtctcagtcctgtgcctcccgtccctggagcgccacccacgtacatctctccccttggcgggggccctggcctgccccccatgatgcccccgggccccccggcccccaacactaatcccttcctcctataatccagggcggaagggggcctggctccatccggctgccccattccggctccctgggagatcagtgttgtgagtgcatgtgaaatgggggatccccacccccagtgcccttcccctt

SEQ ID NO: 9697 - DNA, 4816 bp, Homo sapiens
  source 1..4816: mol_type = unassigned DNA
atgttggctggtgtgtgggtgtcaaactgagccagacgcggcggtggcggcggctccgcgggctacggtcgctcccgcctctcgagcgctgccggtggccgcagcggcgcacccacgccggcccggaggagcagagtgttcatttctgtgtcgggcacagtgctaagtgctgggtgctcactggtgatgaggcagatgaaggttaccaaacttgtggacaggagcctcatatcagagacgtggacctcactgtagcctggtcatggcttccagcttttcgaatctgaggctccaaaggaggaaatgaccattcagggatcttactccagcttgattacggagactgaaccttcatagggtgcgcacttaccaaggacaggaaggtttctctgtttgaagggctttaaacttataacaaagaaaataaaaatgacgacttcgtctatcagacggcagatgaaaaacatcgtgaacaattactcagaggcagaaatcaaagtccgggaagccacctccaatgacccgtggggcccgtccagttctctgatgaccgagattgccgacctgacctacaacgtggtggccttctcggagatcatgagcatggtgtggaagcggctgaatgaccatggcaagaactggcggcatgtgtacaaggcgctgaccctgctggactacctcatcaagacaggctccgaacgtgtggcccagcagtgccgggagaacatcttcgccatccagaccctgaaggacttccagtacattgaccgagatggcaaggaccagggcatcaatgtgcgtgagaagtcaaagcaactggtggctctcctcaaggacgaggaacggttgaaggctgagagggcccaggctctcaaaaccaaagagcgcatggcccaggttgccactggcatgggcagcaaccagatcacctttgggcgaggctccagccagcccaacctctccaccagccactcggagcaggagtatggcaaggccgggggctccccggcctcctaccatggctcgcctgaggcctcgctgtgcccccagcaccgcacaggggccccgctgggtcagagtgaggagctgcagccactgagccagcgccaccccttcctgccgcacctggggctggcctcccgcccaaatggcgactggtcccagccctgcctcacttgtgaccgcgcagcccgagccacctccccgcgagtgtcctccgagctggagcaagcccggccccagactagtggagaagaggagcttcagctgcagctggcacttgccatgagcagagaagtggctgagcaggaagaacgcctcaggcggggtgatgacctcagattacagatggccctggaagaaagccgaagggacacagttaaaattccaaaaaagaaagagcatggctctctcccacagcagactacgctgttggatttaatggatgctctccccagctcgggccccgcggcccagaaagcagagccctggggcccgtcagcctccactaaccagaccaacccctggggcgggccagcggctcctgcgagtacttcagacccctggccatcgtttggtaccaagccagctgcctccattgacccatggggggtgcccactggagccaccgtacaatctgtccccaagaactcggacccctgggcagcttcacagcagcctgcctccagtgctgggaaaagagcttctgacgcgtggggcgcagtctccaccaccaagcccgtgtctgtctctgggtcctttgagctcttcagtaatctgaatggtacaattaaagatgacttttctgaatttgacaaccttcggacttcaaaaaaaacagccgaatctgtgacctctctgccatcccaaaacaatggaactaccagccctgacccctttgagtctcaacccctgactgtcgcctcaagcaagcccagcagtgcccggaaaacacctgagtccttcctgggccccaacgcggccctggtgaacctggactcactggtgaccaggcctgccccaccagcccagtccctcaaccctttcctggcaccaggtgctcccgccacctcggcccctgttaaccctttccaggtgaaccagccccagccgctgacactgaaccagcttcgggggagcccagtcctggggaccagcacatcctttgggcctggcccaggagtggagtccatggctgtggcctcgatgacctccgcggccccacagccagctctgggggccactggttcctctctgacaccactgggccctgcaatgatgaacatggtgggcagtgtgggtatacccccatcagcagcccaggccactggcacaaccaaccctttccttctctagtgcctgggcctgggacccacccagagcacctgtgctggaggatgccgagcagggactctcgtctgtgggacgggatccaagagtttggggattaggggtattagggcttttcagctccagcttcctgatgaaagggctgtctttacagccccaaccctcagaccctcgccttccaaggcaggcccctcagcctggcctgctctcaccacctcctccaaagcactgaggtcctggcagggctcctctgaggccttggacgaggacgtggagtcatcagtgttgcccttgcccctaacctcagcccgagggtctccaggatgttgcctggcccaggacttgggacagtggccttgtctttgtcctccccaccccccagccctagggacaccccaggcagtcctgggtgtggacacgatgaagcaccggctccataagacaccttttggggaagtggttgtgcatattttatttttctttgactcgtgtgagttcaaagtaaacaccaccaccgtggacaactcttgaattaaatccactagagcgagctttaaaactaatctgagcataacccccaacgtggctctatgcttgtgtacctttgcacatattttgtttagtacagtttcatatttgagtttgcagaattatctaatagtctttttttggctaatatttttataacgtggttcttatttaactgtctagttttgatagaatttaccaggtctggctgaatgaagatgttggcacgtgtcattttagtggtttaaatcctcttatttatggttttaactctaagaaaattttaaaaggaagagatgtttggatgacaaaaaaatgccttattgaaaaactaaagcaaattctttataggaagaaaatatgggaatttgattacacatagatgatgatgtttatttaaaaaaaaaacaacagcaacaaaaaatcctagcctccagttgccttttcctttctttagctcctgtttttggtgaattactaaactgattgactttcagcctttttggctagatcctgagaggctatttttcttacgaatataccaacatcctgaaagttaaagaaaaaaatctaatgtatgaatgtgactcaccaatttttatcaactaattccttttttttattaaaggcatgcagggattaacaggacttctgtttacaatggaaatctgaaatggaagaaacatctttaaccttgtgtgtctgtgatctcctctgtcttaatccacgctcaggctaaagatggggataatgtggaaatggcagttgtcccgagggcgtggggtggggggtgcttctgtgcccacgggtccctgggcaacagtccctaggctaagacaggggtggggggctaagggaccagggctggccctgatccacctacctgctaactccagatattatttttaagttggagacctaaaaataattctcttgtattttggagatgaagaaaaaagtcattcacctgggagggatttttaacaaacatgcactaatattacctccctcttccaaactcctactgtcctcacctcacccaccactgtaaaagtattacgtcgtgcattaaagaccagaaaagacttgcttttacccagggaggggacattcccccaatcctgtgtctgggcagcttgcctggtggatgtttctggccctttttccaccatgggaatttctcacctctagctctaagggcagctgaccacctgccagcccctctctggttccagaagattacccttcgcaccggcacaggagagatcttaaatggtctctgggctgctgggacatgcaggctctgagtggggactgcacccactcatgctgttcctgaggccgccctctccagtcccaggagccgtgtctagagttcctgaccagccaccttctgccagaactgcaggcctgcggctgggtcttaggctcccgctgccatttgggtaagccggtggctggtctcgtctgccgggggaagggtggggaggtgcaatgggatgggaggcaggatgcttgcccagaaaggtgctttccttcagacggtgcagggcctgggccagccttacaggtcagtagactagactcgactacttggggtcagtgattcttttgtaacgagtctttcatgatgtgactttgaggccccaacatgacagccactgggccaccgggacccaagaagacagccccctgccccatcttctggcacaggccatcccgagtgcatgtccctgttgcccactgcactgatcatgaagccaccggccactgccacgcatgttgcacctgtgccatcgtgctccctcctgatgggcaccgtggtggaggaagtcacccagctgtttctcagtcccagaggccggtggctggttttgaacttgtgttgactgttgatacttatttactgtataaatataatttatcatttgtaccatga

SEQ ID NO: 9698 - DNA, 4664 bp, Homo sapiens
  source 1..4664: mol_type = unassigned DNA
gcgccccctcccggccgccatgttggctggtgtgtgggtgtcaaactgagccagacgcggcggtggcggcggctccgcgggctacggtcgctcccgcctctcgagcgctgccggtggccgcagcggcgcacccacgccggcccggaggagcagagtgttcatttctgtgtcgggcacagtgctaagtgctgggtgctcactggtgatgaggcagatgaaggttaccaaacttgtggacaggagcctcatatcagagacgtggacctcactgtagcctggtcatggcttccagcttttcgaatctgaggctccaaaggaggaaatgaccattcagggatcttactccagcttgattacggagactgaaccttcatagggtgcgcacttaccaaggacaggaaggtttctctgtttgaagggctttaaacttataacaaagaaaataaaaatgacgacttcgtctatcagacggcagatgaaaaacatcgtgaacaattactcagaggcagaaatcaaagtccgggaagccacctccaatgacccgtggggcccgtccagttctctgatgaccgagattgccgacctgacctacaacgtggtggccttctcggagatcatgagcatggtgtggaagcggctgaatgaccatggcaagaactggcggcatgtgtacaaggcgctgaccctgctggactacctcatcaagacaggctccgaacgtgtggcccagcagtgccgggagaacatcttcgccatccagaccctgaaggacttccagtacattgaccgagatggcaaggaccagggcatcaatgtgcgtgagaagtcaaagcaactggtggctctcctcaaggacgaggaacggttgaaggctgagagggcccaggctctcaaaaccaaagagcgcatggcccaggttgccactggcatgggcagcaaccagatcacctttgggcgaggctccagccagcccaacctctccaccagccactcggagcaggagtatggcaaggccgggggctccccggcctcctaccatggctccacctccccgcgagtgtcctccgagctggagcaagcccggccccagactagtggagaagaggagcttcagctgcagctggcacttgccatgagcagagaagtggctgagcaggaagaacgcctcaggcggggtgatgacctcagattacagatggccctggaagaaagccgaagggacacagttaaaattccaaaaaagaaagagcatggctctctcccacagcagactacgctgttggatttaatggatgctctccccagctcgggccccgcggcccagaaagcagagccctggggcccgtcagcctccactaaccagaccaacccctggggcgggccagcggctcctgcgagtacttcagacccctggccatcgtttggtaccaagccagctgcctccattgacccatggggggtgcccactggagccaccgtacaatctgtccccaagaactcggacccctgggcagcttcacagcagcctgcctccagtgctgggaaaagagcttctgacgcgtggggcgcagtctccaccaccaagcccgtgtctgtctctgggtcctttgagctcttcagtaatctgaatggtacaattaaagatgacttttctgaatttgacaaccttcggacttcaaaaaaaacagccgaatctgtgacctctctgccatcccaaaacaatggaactaccagccctgacccctttgagtctcaacccctgactgtcgcctcaagcaagcccagcagtgcccggaaaacacctgagtccttcctgggccccaacgcggccctggtgaacctggactcactggtgaccaggcctgccccaccagcccagtccctcaaccctttcctggcaccaggtgctcccgccacctcggcccctgttaaccctttccaggtgaaccagccccagccgctgacactgaaccagcttcgggggagcccagtcctggggaccagcacatcctttgggcctggcccaggagtggagtccatggctgtggcctcgatgacctccgcggccccacagccagctctgggggccactggttcctctctgacaccactgggccctgcaatgatgaacatggtgggcagtgtgggtatacccccatcagcagcccaggccactggcacaaccaaccctttccttctctagtgcctgggcctgggacccacccagagcacctgtgctggaggatgccgagcagggactctcgtctgtgggacgggatccaagagtttggggattaggggtattagggcttttcagctccagcttcctgatgaaagggctgtctttacagccccaaccctcagaccctcgccttccaaggcaggcccctcagcctggcctgctctcaccacctcctccaaagcactgaggtcctggcagggctcctctgaggccttggacgaggacgtggagtcatcagtgttgcccttgcccctaacctcagcccgagggtctccaggatgttgcctggcccaggacttgggacagtggccttgtctttgtcctccccaccccccagccctagggacaccccaggcagtcctgggtgtggacacgatgaagcaccggctccataagacaccttttggggaagtggttgtgcatattttatttttctttgactcgtgtgagttcaaagtaaacaccaccaccgtggacaactcttgaattaaatccactagagcgagctttaaaactaatctgagcataacccccaacgtggctctatgcttgtgtacctttgcacatattttgtttagtacagtttcatatttgagtttgcagaattatctaatagtctttttttggctaatatttttataacgtggttcttatttaactgtctagttttgatagaatttaccaggtctggctgaatgaagatgttggcacgtgtcattttagtggtttaaatcctcttatttatggttttaactctaagaaaattttaaaaggaagagatgtttggatgacaaaaaaatgccttattgaaaaactaaagcaaattctttataggaagaaaatatgggaatttgattacacatagatgatgatgtttatttaaaaaaaaaacaacagcaacaaaaaatcctagcctccagttgccttttcctttctttagctcctgtttttggtgaattactaaactgattgactttcagcctttttggctagatcctgagaggctatttttcttacgaatataccaacatcctgaaagttaaagaaaaaaatctaatgtatgaatgtgactcaccaatttttatcaactaattccttttttttattaaaggcatgcagggattaacaggacttctgtttacaatggaaatctgaaatggaagaaacatctttaaccttgtgtgtctgtgatctcctctgtcttaatccacgctcaggctaaagatggggataatgtggaaatggcagttgtcccgagggcgtggggtggggggtgcttctgtgcccacgggtccctgggcaacagtccctaggctaagacaggggtggggggctaagggaccagggctggccctgatccacctacctgctaactccagatattatttttaagttggagacctaaaaataattctcttgtattttggagatgaagaaaaaagtcattcacctgggagggatttttaacaaacatgcactaatattacctccctcttccaaactcctactgtcctcacctcacccaccactgtaaaagtattacgtcgtgcattaaagaccagaaaagacttgcttttacccagggaggggacattcccccaatcctgtgtctgggcagcttgcctggtggatgtttctggccctttttccaccatgggaatttctcacctctagctctaagggcagctgaccacctgccagcccctctctggttccagaagattacccttcgcaccggcacaggagagatcttaaatggtctctgggctgctgggacatgcaggctctgagtggggactgcacccactcatgctgttcctgaggccgccctctccagtcccaggagccgtgtctagagttcctgaccagccaccttctgccagaactgcaggcctgcggctgggtcttaggctcccgctgccatttgggtaagccggtggctggtctcgtctgccgggggaagggtggggaggtgcaatgggatgggaggcaggatgcttgcccagaaaggtgctttccttcagacggtgcagggcctgggccagccttacaggtcagtagactagactcgactacttggggtcagtgattcttttgtaacgagtctttcatgatgtgactttgaggccccaacatgacagccactgggccaccgggacccaagaagacagccccctgccccatcttctggcacaggccatcccgagtgcatgtccctgttgcccactgcactgatcatgaagccaccggccactgccacgcatgttgcacctgtgccatcgtgctccctcctgatgggcaccgtggtggaggaagtcacccagctgtttctcagtcccagaggccggtggctggttttgaacttgtgttgactgttgatacttatttactgtataaatataatttatcatttgtaccatga

SEQ ID NO: 9699 - DNA, 2216 bp, Homo sapiens
  source 1..2216: mol_type = unassigned DNA
atgttggctggtgtgtgggtgtcaaactgagccagacgcggcggtggcggcggctccgcgggctacggtcgctcccgcctctcgagcgctgccggtggccgcagcggcgcacccacgccggcccggaggagcagagccacctccccgcgagtgtcctccgagctggagcaagcccggccccagactagtggagaagaggagcttcagctgcagctggcacttgccatgagcagagaagtggctgagcaggaagaacgcctcaggcggggtgatgacctcagattacagatggccctggaagaaagccgaagggacacagttaaaattccaaaaaagaaagagcatggctctctcccacagcagactacgctgttggatttaatggatgctctccccagctcgggccccgcggcccagaaagcagagccctggggcccgtcagcctccactaaccagaccaacccctggggcgggccagcggctcctgcgagtacttcagacccctggccatcgtttggtaccaagccagctgcctccattgacccatggggggtgcccactggagccaccgtacaatctgtccccaagaactcggacccctgggcagcttcacagcagcctgcctccagtgctgggaaaagagcttctgacgcgtggggcgcagtctccaccaccaagcccgtgtctgtctctgggtcctttgagctcttcagtaatctgaatggtacaattaaagatgacttttctgaatttgacaaccttcggacttcaaaaaaaacagccgaatctgtgacctctctgccatcccaaaacaatggaactaccagccctgacccctttgagtctcaacccctgactgtcgcctcaagcaagcccagcagtgcccggaaaacacctgagtccttcctgggccccaacgcggccctggtgaacctggactcactggtgaccaggcctgccccaccagcccagtccctcaaccctttcctggcaccaggtgctcccgccacctcggcccctgttaaccctttccaggtgaaccagccccagccgctgacactgaaccagcttcgggggagcccagtcctggggaccagcacatcctttgggcctggcccaggagtggagtccatggctgtggcctcgatgacctccgcggccccacagccagctctgggggccactggttcctctctgacaccactgggccctgcaatgatgaacatggtgggcagtgtgggtatacccccatcagcagcccaggccactggcacaaccaaccctttccttctctagtgcctgggcctgggacccacccagagcacctgtgctggaggatgccgagcagggactctcgtctgtgggacgggatccaagagtttggggattaggggtattagggcttttcagctccagcttcctgatgaaagggctgtctttacagccccaaccctcagaccctcgccttccaaggcaggcccctcagcctggcctgctctcaccacctcctccaaagcactgaggtcctggcagggctcctctgaggccttggacgaggacgtggagtcatcagtgttgcccttgcccctaacctcagcccgagggtctccaggatgttgcctggcccaggacttgggacagtggccttgtctttgtcctccccaccccccagccctagggacaccccaggcagtcctgggtgtggacacgatgaagcaccggctccataagacaccttttggggaagtggttgtgcatattttatttttctttgactcgtgtgagttcaaagtaaacaccaccaccgtggacaactcttgaattaaatccactagagcgagctttaaaactaatctgagcataacccccaacgtggctctatgcttgtgtacctttgcacatattttgtttagtacagtttcatatttgagtttgcagaattatctaatagtctttttttggctaatatttttataacgtggttcttatttaactgtctagttttgatagaatttaccaggtctggctgaatgaagatgttggcacgtgtcattttagtggtttaaatcctcttatttatggttttaactctaagaaaattttaaaaggaagagatgtttggatgacaaaaaaatgccttattgaaaaactaaagcaaattctttataggaagaaaatatgggaatttgattacacatagatgatgatgtttattt

SEQ ID NO: 9700 - DNA, 2862 bp, Homo sapiens
  source 1..2862: mol_type = unassigned DNA
atggcttccagcttttcgaatctgaggctccaaaggaggaaatgaccattcagggatcttactccagcttgattacggagactgaaccttcatagggtgcgcacttaccaaggacaggaaggtttctctgtttgaagggctttaaacttataacaaagaaaataaaaatgacgacttcgtctatcagacggcagatgaaaaacatcgtgaacaattactcagaggcagaaatcaaagtccgggaagccacctccaatgacccgtggggcccgtccagttctctgatgaccgagattgccgacctgacctacaacgtggtggccttctcggagatcatgagcatggtgtggaagcggctgaatgaccatggcaagaactggcggcatgtgtacaaggcgctgaccctgctggactacctcatcaagacaggctccgaacgtgtggcccagcagtgccgggagaacatcttcgccatccagaccctgaaggacttccagtacattgaccgagatggcaaggaccagggcatcaatgtgcgtgagaagtcaaagcaactggtggctctcctcaaggacgaggaacggttgaaggctgagagggcccaggctctcaaaaccaaagagcgcatggcccaggttgccactggcatgggcagcaaccagatcacctttgggcgaggctccagccagcccaacctctccaccagccactcggagcaggagtatggcaaggccgggggctccccggcctcctaccatggctccacctccccgcgagtgtcctccgagctggagcaagcccggccccagactagtggagaagaggagcttcagctgcagctggcacttgccatgagcagagaagtggctgagcaggaagaacgcctcaggcggggtgatgacctcagattacagatggccctggaagaaagccgaagggacacagttaaaattccaaaaaagaaagagcatggctctctcccacagcagactacgctgttggatttaatggatgctctccccagctcgggccccgcggcccagaaagcagagccctggggcccgtcagcctccactaaccagaccaacccctggggcgggccagcggctcctgcgagtacttcagacccctggccatcgtttggtaccaagccagctgcctccattgacccatggggggtgcccactggagccaccgtacaatctgtccccaagaactcggacccctgggcagcttcacagcagcctgcctccagtgctgggaaaagagcttctgacgcgtggggcgcagtctccaccaccaagcccgtgtctgtctctgggtcctttgagctcttcagtaatctgaatggtacaattaaagatgacttttctgaatttgacaaccttcggacttcaaaaaaaacagccgaatctgtgacctctctgccatcccaaaacaatggaactaccagccctgacccctttgagtctcaacccctgactgtcgcctcaagcaagcccagcagtgcccggaaaacacctgagtccttcctgggccccaacgcggccctggtgaacctggactcactggtgaccaggcctgccccaccagcccagtccctcaaccctttcctggcaccaggtgctcccgccacctcggcccctgttaaccctttccaggtgaaccagccccagccgctgacactgaaccagcttcgggggagcccagtcctggggaccagcacatcctttgggcctggcccaggagtggagtccatggctgtggcctcgatgacctccgcggccccacagccagctctgggggccactggttcctctctgacaccactgggccctgcaatgatgaacatggtgggcagtgtgggtatacccccatcagcagcccaggccactggcacaaccaaccctttccttctctagtgcctgggcctgggacccacccagagcacctgtgctggaggatgccgagcagggactctcgtctgtgggacgggatccaagagtttggggattaggggtattagggcttttcagctccagcttcctgatgaaagggctgtctttacagccccaaccctcagaccctcgccttccaaggcaggcccctcagcctggcctgctctcaccacctcctccaaagcactgaggtcctggcagggctcctctgaggccttggacgaggacgtggagtcatcagtgttgcccttgcccctaacctcagcccgagggtctccaggatgttgcctggcccaggacttgggacagtggccttgtctttgtcctccccaccccccagccctagggacaccccaggcagtcctgggtgtggacacgatgaagcaccggctccataagacaccttttggggaagtggttgtgcatattttatttttctttgactcgtgtgagttcaaagtaaacaccaccaccgtggacaactcttgaattaaatccactagagcgagctttaaaactaatctgagcataacccccaacgtggctctatgcttgtgtacctttgcacatattttgtttagtacagtttcatatttgagtttgcagaattatctaatagtctttttttggctaatatttttataacgtggttcttatttaactgtctagttttgatagaatttaccaggtctggctgaatgaagatgttggcacgtgtcattttagtggtttaaatcctcttatttatggttttaactctaagaaaattttaaaaggaagagatgtttggatgacaaaaaaatgccttattgaaaaactaaagcaaattctttataggaagaaaatatgggaatttgattacacatagatgatgatgtttatttaaaaaaaaaacaacagcaac

SEQ ID NO: 9701 - DNA, 2863 bp, Homo sapiens
  source 1..2863: mol_type = unassigned DNA
gctccaaaggaggaaatgaccattcagggatcttactccagcttgattacggagactgaaccttcatagggtgcgcacttaccaaggacaggaaggtttctctgtttgaagggctttaaacttataacaaagaaaataaaaatgacgacttcgtctatcagacggcagatgaaaaacatcgtgaacaattactcagaggcagaaatcaaagtccgggaagccacctccaatgacccgtggggcccgtccagttctctgatgaccgagattgccgacctgacctacaacgtggtggccttctcggagatcatgagcatggtgtggaagcggctgaatgaccatggcaagaactggcggcatgtgtacaaggcgctgaccctgctggactacctcatcaagacaggctccgaacgtgtggcccagcagtgccgggagaacatcttcgccatccagaccctgaaggacttccagtacattgaccgagatggcaaggaccagggcatcaatgtgcgtgagaagtcaaagcaactggtggctctcctcaaggacgaggaacggttgaaggctgagagggcccaggctctcaaaaccaaagagcgcatggcccaggttgccactggcatgggcagcaaccagatcacctttgggcgaggctccagccagcccaacctctccaccagccactcggagcaggagtatggcaaggccgggggctccccggcctcctaccatggctcgcctgaggcctcgctgtgcccccagcaccgcacaggggccccgctgggtcagagtgaggagctgcagccactgagccagcgccaccccttcctgccgcacctggggctggcctcccgcccaaatggcgactggtcccagccctgcctcacttgtgaccgcgcagcccgagccacctccccgcgagtgtcctccgagctggagcaagcccggccccagactagtggagaagaggagcttcagctgcagctggcacttgccatgagcagagaagtggctgagcaggaagaacgcctcaggcggggtgatgacctcagattacagatggccctggaagaaagccgaagggacacagttaaaattccaaaaaagaaagagcatggctctctcccacagcagactacgctgttggatttaatggatgctctccccagctcgggccccgcggcccagaaagcagagccctggggcccgtcagcctccactaaccagaccaacccctggggcgggccagcggctcctgcgagtacttcagacccctggccatcgtttggtaccaagccagctgcctccattgacccatggggggtgcccactggagccaccgtacaatctgtccccaagaactcggacccctgggcagcttcacagcagcctgcctccagtgctgggaaaagagcttctgacgcgtggggcgcagtctccaccaccaagcccgtgtctgtctctgggtcctttgagctcttcagtaatctgaatggtacaattaaagatgacttttctgaatttgacaaccttcggacttcaaaaaaaacaggcatgcagggattaacaggacttctgtttacaatggaaatctgaaatggaagaaacatctttaaccttgtgtgtctgtgatctcctctgtcttaatccacgctcaggctaaagatggggataatgtggaaatggcagttgtcccgagggcgtggggtggggggtgcttctgtgcccacgggtccctgggcaacagtccctaggctaagacaggggtggggggctaagggaccagggctggccctgatccacctacctgctaactccagatattatttttaagttggagacctaaaaataattctcttgtattttggagatgaagaaaaaagtcattcacctgggagggatttttaacaaacatgcactaatattacctccctcttccaaactcctactgtcctcacctcacccaccactgtaaaagtattacgtcgtgcattaaagaccagaaaagacttgcttttacccagggaggggacattcccccaatcctgtgtctgggcagcttgcctggtggatgtttctggccctttttccaccatgggaatttctcacctctagctctaagggcagctgaccacctgccagcccctctctggttccagaagattacccttcgcaccggcacaggagagatcttaaatggtctctgggctgctgggacatgcaggctctgagtggggactgcacccactcatgctgttcctgaggccgccctctccagtcccaggagccgtgtctagagttcctgaccagccaccttctgccagaactgcaggcctgcggctgggtcttaggctcccgctgccatttgggtaagccggtggctggtctcgtctgccgggggaagggtggggaggtgcaatgggatgggaggcaggatgcttgcccagaaaggtgctttccttcagacggtgcagggcctgggccagccttacaggtcagtagactagactcgactacttggggtcagtgattcttttgtaacgagtctttcatgatgtgactttgaggccccaacatgacagccactgggccaccgggacccaagaagacagccccctgccccatcttctggcacaggccatcccgagtgcatgtccctgttgcccactgcactgatcatgaagccaccggccactgccacgcatgttgcacctgtgccatcgtgctccctcctgatgggcaccgtggtggaggaagtcacccagctgtttctcagtcccagaggccggtggctggttttgaacttgtgttgactgttgatacttatttactgtataaatataatttatcatttgtaccatga

SEQ ID NO: 9702 - DNA, 3196 bp, Homo sapiens
  source 1..3196: mol_type = unassigned DNA
atgttggctggtgtgtgggtgtcaaactgagccagacgcggcggtggcggcggctccgcgggctacggtcgctcccgcctctcgagcgctgccggtggccgcagcggcgcacccacgccggcccggaggagcagagtgttcatttctgtgtcgggcacagtgctaagtgctgggtgctcactggtgatgaggcagatgaaggttaccaaacttgtggacaggagcctcatatcagagacgtggacctcactgtagcctggtcatggcttccagcttttcgaatctgaggctccaaaggaggaaatgaccattcagggatcttactccagcttgattacggagactgaaccttcatagggtgcgcacttaccaaggacaggaaggtttctctgtttgaagggctttaaacttataacaaagaaaataaaaatgacgacttcgtctatcagacggcagatgaaaaacatcgtgaacaattactcagaggcagaaatcaaagtccgggaagccacctccaatgacccgtggggcccgtccagttctctgatgaccgagattgccgacctgacctacaacgtggtggccttctcggagatcatgagcatggtgtggaagcggctgaatgaccatggcaagaactggcggcatgtgtacaaggcgctgaccctgctggactacctcatcaagacaggctccgaacgtgtggcccagcagtgccgggagaacatcttcgccatccagaccctgaaggacttccagtacattgaccgagatggcaaggaccagggcatcaatgtgcgtgagaagtcaaagcaactggtggctctcctcaaggacgaggaacggttgaaggctgagagggcccaggctctcaaaaccaaagagcgcatggcccaggttgccactggcatgggcagcaaccagatcacctttgggcgaggctccagccagcccaacctctccaccagccactcggagcaggagtatggcaaggccgggggctccccggcctcctaccatggctccacctccccgcgagtgtcctccgagctggagcaagcccggccccagactagtggagaagaggagcttcagctgcagctggcacttgccatgagcagagaagtggctgagcaggaagaacgcctcaggcggggtgatgacctcagattacagatggccctggaagaaagccgaagggacacagttaaaattccaaaaaagaaagagcatggctctctcccacagcagactacgctgttggatttaatggatgctctccccagctcgggccccgcggcccagaaagcagagccctggggcccgtcagcctccactaaccagaccaacccctggggcgggccagcggctcctgcgagtacttcagacccctggccatcgtttggtaccaagccagctgcctccattgacccatggggggtgcccactggagccaccgtacaatctgtccccaagaactcggacccctgggcagcttcacagcagcctgcctccagtgctgggaaaagagcttctgacgcgtggggcgcagtctccaccaccaagcccgtgtctgtctctgggtcctttgagctcttcagtaatctgaatggtacaattaaagatgacttttctgaatttgacaaccttcggacttcaaaaaaaacagccgaatctgtgacctctctgccatcccaaaacaatggaactaccagccctgacccctttgagtctcaacccctgactgtcgcctcaagcaagcccagcagtgcccggaaaacacctgagtccttcctgggccccaacgcggccctggtgaacctggactcactggtgaccaggcctgccccaccagcccagtccctcaaccctttcctggcaccaggcatgcagggattaacaggacttctgtttacaatggaaatctgaaatggaagaaacatctttaaccttgtgtgtctgtgatctcctctgtcttaatccacgctcaggctaaagatggggataatgtggaaatggcagttgtcccgagggcgtggggtggggggtgcttctgtgcccacgggtccctgggcaacagtccctaggctaagacaggggtggggggctaagggaccagggctggccctgatccacctacctgctaactccagatattatttttaagttggagacctaaaaataattctcttgtattttggagatgaagaaaaaagtcattcacctgggagggatttttaacaaacatgcactaatattacctccctcttccaaactcctactgtcctcacctcacccaccactgtaaaagtattacgtcgtgcattaaagaccagaaaagacttgcttttacccagggaggggacattcccccaatcctgtgtctgggcagcttgcctggtggatgtttctggccctttttccaccatgggaatttctcacctctagctctaagggcagctgaccacctgccagcccctctctggttccagaagattacccttcgcaccggcacaggagagatcttaaatggtctctgggctgctgggacatgcaggctctgagtggggactgcacccactcatgctgttcctgaggccgccctctccagtcccaggagccgtgtctagagttcctgaccagccaccttctgccagaactgcaggcctgcggctgggtcttaggctcccgctgccatttgggtaagccggtggctggtctcgtctgccgggggaagggtggggaggtgcaatgggatgggaggcaggatgcttgcccagaaaggtgctttccttcagacggtgcagggcctgggccagccttacaggtcagtagactagactcgactacttggggtcagtgattcttttgtaacgagtctttcatgatgtgactttgaggccccaacatgacagccactgggccaccgggacccaagaagacagccccctgccccatcttctggcacaggccatcccgagtgcatgtccctgttgcccactgcactgatcatgaagccaccggccactgccacgcatgttgcacctgtgccatcgtgctccctcctgatgggcaccgtggtggaggaagtcacccagctgtttctcagtcccagaggccggtggctggttttgaacttgtgttgactgttgatacttatttactgtataaatataatttatcatttgtaccatga

SEQ ID NO: 9703 - DNA, 4071 bp, Homo sapiens
  source 1..4071: mol_type = unassigned DNA
aaagcagaggggatcaggtcgccagcactggctccagatgtgcacttcctgggggcggccaacaggcaggccccccacctctcaatgcaccacttgcctggccagcaggaaggggttaacctgccctgcacttcctcctgtgtcctgttactgctgaggcagacctgccgggccagctgagcaactttcctcggagtgctgcctggcgctggctaggaggcaaacgcacgcgggaagagctgctacccattccagggaccctgccgctgcccctctgaggggtctgcacctcctgggagcaggtgggtctctgggacgagggtccatggtggatggctctggagacgctcccgaggctgtgccgtcccgctgctgcacaggtcggagggtcaccgcagaggctactcgggctggggctggggccgagggagcccgcactggagccccatgtggaacccaaggatgcagctgctctgctaacacggcagcccatccttcaagactgtgacctcgccacagtggccctcagccctccacctccggcgggggcgagggccacccacctccaagtctccagccatgacgacctccgcactccggcgccaggtgaagaacatcgtgcacaactactccgaggcagaaatcaaggtgcgcgaggccaccagcaatgacccctggggcccccctagttcgctcatgtccgagatcgctgacctgaccttcaacacagtggccttcaccgaagtcatgggcatgctgtggcggcggctcaatgacagcggcaagaactggcggcacgtgtacaaggctctaacattgctggactacctgctcaagacgggctccgagcgggtggcccaccagtgccgcgagaacctctacaccatccagacactcaaggacttccagtacatcgaccgcgacggcaaggaccagggcgtcaacgtgcgcgagaaggtcaagcaggtgatggccctgctcaaggatgaggagcggctgcggcaggagcgaacccacgccctcaagaccaaggagcgcatggcactggagggcatcggcattggcagtgggcagctgggcttcagccgccgctacggcgaggactacagccgctcccggggctccccgtcctcctacaactcctcctcttcgtcaccccgctatacctccgacctggagcaggcccggcctcagacgtcaggggaagaggaactgcagctgcagctggccctcgccatgagccgtgaggaggcagagaagcctgtccccccagcctcccacagggacgaggacctgcagctgcagctggctctgcgcctgagccggcaggagcacgagaaggaggtgaggtcctggcagggtgatggctcccccatggccaatggtgcaggggccgtggtccaccatcagcgggacagagagcctgagagagaagagagaaaggaggaggagaagctaaaaaccagccagtcctccatcctggacttggctgacatcttcgtacctgccctggccccgccctccacacactgctctgctgacccatgggacatcccaggttttaggccgaacacagaggccagtggatcctcctgggggccttctgcagacccctggtctccgatcccctcaggaaccgtcctgtcccgaagccagccctgggatctgactcccatgctctcctcctctgagccctggggcaggaccccagtgctgcctgctgggccccccaccacagacccctgggccctgaactctccccaccacaaactccccagcactggggctgacccttggggagcctccctggagacctccgacacacctggtggtgcctcgacctttgacccatttgccaaacctccagaatccacagagaccaaggaggggctggagcaggccctgccctctgggaagcccagcagccctgtggagctggacctgtttggagaccccagccccagttccaagcaaaatggcacgaaggagccagatgccctggacctgggcatactaggggaagcactaacccagccaagcaaagaggcccgagcttgccggactcccgagtccttcctgggtccctcagcttcctccttggtcaaccttgactcgttggtcaaggcaccccaggttgcaaagacccggaaccccttcctgacaggtctcagcgctccgtcccccaccaacccgttcggcgcgggcgagccgggcaggccgacgctaaaccagatgcgcaccggctcgccggcgctgggcctggcaggcgggcctgtgggggcgcccctgggctccatgacctacagcgcctctctgcccctcccgctcagcagcgtgccagctggcttgaccctccccgcctcggttagcgtcttcccgcaggccggagccttcgcaccgcagccgctgctgcccacgccgagctcagccgggccgcggcccccgcccccgcagaccggcaccaaccccttcctctgagccccgccccgtcccataccggcctgcgcctgcgccggacgctccgcggccccgcctccggacccggggctgggcggggcgccggtgctagtggaacgccgagccagtggcggctggtatcccgcggcggctctggaagctggacgcggaccacggcccgggagctagaaactgaacgcccgcataataaagactggaaccctcgttctcagctctcaccaagtggactttttgcggggtgtggcggccgggtctcgaccacagcgtggatcaccggctgtttaggaaactgcagctgcacaacgtggggtgcaaaactgccccgcttcctttacagctcttctcaaccctcacctccatcccccgtcacccaggcaccttcgcttccagatgctgccaggctgtcactcaattcggtcatttcattcatttatcacacatgggcactggggttgggctaacagcaagagacaataggcctttgttcctatttattgggtactgcttacgtgctaagcagatcagtttatttaatgcttgcaacgactctctgaggtagaaaatattgttaattccgttcaggatcccggctacataatctgtggggctcaatacaaaataaaaatgtaggggctccttgttcaaaatcgtatgaagaatttcaaaacagggacaacagagcatgaaaccaagcgcaaagcccactgcagtgcgattgcacaggtatctcaccttgcagccggcactactcccatttttcaggcaaggaaaccgtggctcagagaggttgaatggcatgctcaaagtcacaaagctggcatggggcggggctggaactcaagagtcagacagtctggctccaaggcctggagatcccaggctgggccccagatttaattcagcaaatattgactgactgctgtggacaaagtgctgggctcaccttggagggatccaacctccaggagctcgagcgcagcagggtagacaagccaggggcacgtgatgcggctgtggcagaagccaagtgcaggagctcccaggctcctttgttttactgagtcaccttaaatgtaactctgccctctcccttgcttcgccaaggctagcgagaaactcagtcttagccacacaggaggaatcggaccccttctgggggtttatgtggagtctgggaaaccaagggtggggtgaggcctggtactcaatccaggaggggcccctatgaccaccctcgcctgtttttcttctcaatgctccctgatcactggaccactggacactgatgtgtcctcagtgcttggggtctggctctgcaggcagcctgcagccagcctccatccccctttcagggacaaatggccttccaccagagtcggtgagtggagaggcacaatgccactccccttcctgaggtgggggtaggggaagggagtcccacaatgcagttacaaacaggatggacaagaacacctgctcaggagtcagacttacagggttcaaagttctgctccaaggtttgaccctaacaagaatcacttagtaataagtggttatgctctgtgaccttgagtaaattacttaccctctcca

SEQ ID NO: 9704 - DNA, 2223 bp, Homo sapiens
  source 1..2223: mol_type = unassigned DNA
gtggaacccaaggatgcagctgctctgctaacacggcagcccatccttcaagactgtgacctcgccacagtggccctcagccctccacctccggcgggggcgagggccacccacctccaagtctccagccatgacgacctccgcactccggcgccaggtgaagaacatcgtgcacaactactccgaggcagaaatcaaggtgcgcgaggccaccagcaatgacccctggggcccccctagttcgctcatgtccgagatcgctgacctgaccttcaacacagtggccttcaccgaagtcatgggcatgctgtggcggcggctcaatgacagcggcaagaactggcggcacgtgtacaaggctctaacattgctggactacctgctcaagacgggctccgagcgggtggcccaccagtgccgcgagaacctctacaccatccagacactcaaggacttccagtacatcgaccgcgacggcaaggaccagggcgtcaacgtgcgcgagaaggtcaagcaggtgatggccctgctcaaggatgaggagcggctgcggcaggagcgaacccacgccctcaagaccaaggagcgcatggcactggagggcatcggcattggcagtgggcagctgggcttcagccgccgctacggcgaggactacagccgctcccggggctccccgtcctcctacaactcctcctcttcgtcaccccgctatacctccgacctggagcaggcccggcctcagacgtcaggggaagaggaactgcagctgcagctggccctcgccatgagccgtgaggaggcagagaagcctgtccccccagcctcccacagggacgaggacctgcagctgcagctggctctgcgcctgagccggcaggagcacgagaaggaggtgaggtcctggcagggtgatggctcccccatggccaatggtgcaggggccgtggtccaccatcagcgggacagagagcctgagagagaagagagaaaggaggaggagaagctaaaaaccagccaggccccgcccacttctgagccgcggctgcctctcccctccacagtcctccatcctggacttggctgacatcttcgtacctgccctggccccgccctccacacactgctctgctgacccatgggacatcccaggttttaggccgaacacagaggccagtggatcctcctgggggccttctgcagacccctggtctccgatcccctcaggaaccgtcctgtcccgaagccagccctgggatctgactcccatgctctcctcctctgagccctggggcaggaccccagtgctgcctgctgggccccccaccacagacccctgggccctgaactctccccaccacaaactccccagcactggggctgacccttggggagcctccctggagacctccgacacacctggtggtgcctcgacctttgacccatttgccaaacctccagaatccacagagaccaaggaggggctggagcaggccctgccctctgggaagcccagcagccctgtggagctggacctgtttggagaccccagccccagttccaagcaaaatggcacgaaggagccagatgccctggacctgggcatactaggggaagcactaacccagccaagcaaagaggcccgagcttgccggactcccgagtccttcctgggtccctcagcttcctccttggtcaaccttgactcgttggtcaaggcaccccaggttgcaaagacccggaaccccttcctgacaggtctcagcgctccgtcccccaccaacccgttcggcgcgggcgagccgggcaggccgacgctaaaccagatgcgcaccggctcgccggcgctgggcctggcaggcgggcctgtgggggcgcccctgggctccatgacctacagcgcctctctgcccctcccgctcagcagcgtgccagctggcttgaccctccccgcctcggttagcgtcttcccgcaggccggagccttcgcaccgcagccgctgctgcccacgccgagctcagccgggacgcggaccacggcccgggagctagaaactgaacgcccgcataataaagactggaaccctcgttctcagctctcaccaagtggactttttgcggggtgtggcggccgggtctcgaccacagcgtggatcaccggctgtttaggaaactgcagctgcacaacgtggggtgcaaaactgccccgcttcctttacagct

SEQ ID NO: 9705 - DNA, 1862 bp, Homo sapiens
  source 1..1862: mol_type = unassigned DNA
gtgctgcctggcgctggctaggaggcaaacgcacgcgggaagagctgctacccattccagggaccctgccgctgcccctctgaggggtctgcacctcctgggagcaggtgggtctctgggacgagggtccatggtggatggctctggagacgctcccgaggctgtgccgtcccgctgctgcacaggtcggagggtcaccgcagaggctactcgggctggggctggggccgagggagcccgcactggagccccatgtggaacccaaggatgcagctgctctgctaacacggcagcccatccttcaagactgtgacctcgccacagtggccctcagccctccacctccggcgggggcgagggccacccacctccaagtctccagccatgacgacctccgcactccggcgccaggtgaagaacatcgtgcacaactactccgaggcagaaatcaagtggccttcaccgaagtcatgggcatgctgtggcggcggctcaatgacagcggcaagaactggcggcacgtgtacaaggctctaacattgctggactacctgctcaagacgggctccgagcgggtggcccaccagtgccgcgagaacctctacaccatccagacactcaaggacttccagtacatcgaccgcgacggcaaggaccagggcgtcaacgtgcgcgagaaggtcaagcaggtgatggccctgctcaaggatgaggagcggctgcggcaggagcgaacccacgccctcaagaccaaggagcgcatggcactggagggcatcggcattggcagtgggcagctgggcttcagccgccgctacggcgaggactacagccgctcccggggctccccgtcctcctacaactcctcctcttcgtcaccccgctatacctccgacctggagcaggcccggcctcagacgtcaggggaagaggaactgcagctgcagctggccctcgccatgagccgtgaggaggcagagaaggaggtgaggtcctggcagggtgatggctcccccatggccaatggtgcaggggccgtggtccaccatcagcgggacagagagcctgagagagaagagagaaaggaggaggagaagctaaaaaccagccagtcctccatcctggacttggctgacatcttcgtacctgccctggccccgccctccacacactgctctgctgacccatgggacatcccaggttttaggccgaacacagaggccagtggatcctcctgggggccttctgcagacccctggtctccgatcccctcaggaaccgtcctgtcccgaagccagccctgggatctgactcccatgctctcctcctctgagccctggggcaggaccccagtgctgcctgctgggccccccaccacagacccctgggccctgaactctccccaccacaaactccccagcactggggctgacccttggggagcctccctggagacctccgacacacctggtggtgcctcgacctttgacccatttgccaaacctccagaatccacagagaccaaggaggggctggagcaggccctgccctctgggaagcccagcagccctgtggagctggacctgtttggagaccccagccccagttccaagcaaaatggcacgaaggagccagatgccctggacctgggcatactaggggaagcactaacccagccaagcaaagaggcccgagcttgccggactcccgagtccttcctgggtccctcagcttcctccttggtcaaccttgactcgttggtcaaggcaccccaggttgcaaagacccggaaccccttcctgacaggtctcagcgctccgccccgcctccggacccggggctgggcggggcgccggtgctag

SEQ ID NO: 9706 - DNA, 804 bp, Homo sapiens
  source 1..804: mol_type = unassigned DNA
gtgtcctgttactgctgaggcagacctgccgggccagctgagcaactttcctcggagtgctgcctggcgctggctaggaggcaaacgcacgcgggaagagctgctacccattccagggaccctgccgctgcccctctgaggggtctgcacctcctgggagcagccccatgtggaacccaaggatgcagctgctctgctaacacggcagcccatccttcaagactgtgacctcgccacagtggccctcagccctccacctccggcgggggcgagggccacccacctccaagtctccagccatgacgacctccgcactccggcgccaggtgaagaacatcgtgcacaactactccgaggcagaaatcaaggtgcgcgaggccaccagcaatgacccctggggcccccctagttcgctcatgtccgagatcgctgacctgaccttcaacacagtggccttcaccgaagtcatgggcatgctgtggcggcggctcaatgacagcggcaagaactggcggcacgtgtacaaggctctaacattgctggactacctgctcaagacgggctccgagcgggtggcccaccagtgccgcgagaacctctacaccatccagacactcaaggacttccagtacatcgaccgcgacggcaaggaccagggcgtcaacgtgcgcgagaaggtcaagcaggtgatggccctgctcaaggatgaggagcggctgcggcaggagcgaacccacgccctcaagaccaaggagcgcatggcactggagggcatcggcattggcagtgggcagctgggcttca

SEQ ID NO: 9707 - DNA, 603 bp, Homo sapiens
  source 1..603: mol_type = unassigned DNA
aactttcctcggagtgctgcctggcgctggctaggaggcaaacgcacgcgggaagagctgctacccattccagggaccctgccgctgcccctctgaggggtctgcacctcctgggagcaggtgggtctctgggacgagggtccatggtggatggctctggagacgctcccgaggctgtgccgtcccgctgctgcacaggtcggagggtcaccgcagaggctactcgggctggggctggggccgagggagcccgcactggagggtctcgctctgttgcccagtggcctgaccatggctcactgcagcctccaactactggcctcaagtgatcctcttgccttggcctcctgaagtcctggaattacaggcgtgagccactgcaccgggcccatttaatactctgagccccacctttcccatctgtggatggagccccatgtggaacccaaggatgcagctgctctgctaacacggcagcccatccttcaagactgtgacctcgccacagtggccctcagccctccacctccggcgggggcgagggccacccacctccaagtctccagccatgacgacctccgcactccggcgccaggtgaagaa

SEQ ID NO: 9708 - DNA, 810 bp, Homo sapiens
  source 1..810: mol_type = unassigned DNA
agcaagggggagggcaggagttaaacaagttgtggccgtggcattcccacagaaggcccacgacccgctggaaggaaagagatagcagacaaaagggtctcgctctgttgcccagtggcctgaccatggctcactgcagcctccaactactggcctcaagtgatcctcttgccttggcctcctgaagtcctggaattacaggcgtgagccactgcaccgggcccatttaatactctgagccccacctttcccatctgtggatggagccccatgtggaacccaaggatgcagctgctctgctaacacggcagcccatccttcaagactgtgacctcgccacagtggccctcagccctccacctccggcgggggcgagggccacccacctccaagtctccagccatgacgacctccgcactccggcgccaggtgaagaacatcgtgcacaactactccgaggcagaaatcaaggtgcgcgaggccaccagcaatgacccctggggcccccctagttcgctcatgtccgagatcgctgacctgaccttcaacacagtggccttcaccgaagtcatgggcatgctgtggcggcggctcaatgacagcggcaagaactggcggcacgtgtacaaggctctaacattgctggactacctgctcaagacgggctccgagcgggtggcccaccagtgccgcgagaacctctacaccatccagacactcaaggacttccagtacatcgaccgcgacggcaaggaccagggcgtcaacgtgcgcgagaaggtcaagcaggtgatggccctgctcaaggat

SEQ ID NO: 9709 - DNA, 580 bp, Homo sapiens
  source 1..580: mol_type = unassigned DNA
aactttcctcggagtgctgcctggcgctggctaggaggcaaacgcacgcgggaagagctgctacccattccagggaccctgccgctgcccctctgaggggtctgcacctcctgggagcagggtctcgctctgttgcccagtggcctgaccatggctcactgcagcctccaactactggcctcaagtgatcctcttgccttggcctcctgaagtcctggaattacaggcgtgagccactgcaccgggcccatttaatactctgagccccacctttcccatctgtggatggagccccatgtggaacccaaggatgcagctgctctgctaacacggcagcccatccttcaagactgtgacctcgccacagtggccctcagccctccacctccggcgggggcgagggccacccacctccaagtctccagccatgacgacctccgcactccggcgccaggtgaagaacatcgtgcacaactactccgaggcagaaatcaaggtgcgcgaggccaccagcaatgacccctggggcccccctagttcgctcatgtccgagatcgctgacctgaccttcaacacagtg

SEQ ID NO: 9710 - DNA, 560 bp, Homo sapiens
  source 1..560: mol_type = unassigned DNA
actagcaagggggagggcaggagttaaacaagttgtggccgtggcattcccacagaaggcccacgacccgctggaaggaaagagatagcagacaaaagccccatgtggaacccaaggatgcagctgctctgctaacacggcagcccatccttcaagactgtgacctcgccacagtggccctcagccctccacctccggcgggggcgagggccacccacctccaagtctccagccatgacgacctccgcactccggcgccaggtgaagaacatcgtgcacaactactccgaggcagaaatcaaggtgcgcgaggccaccagcaatgacccctggggcccccctagttcgctcatgtccgagatcgctgacctgaccttcaacacagtggccttcaccgaagtcatgggcatgctgtggcggcggctcaatgacagcggcaagaactggcggcacgtgtacaaggctctaacattgctggactacctgctcaagacgggctccgagcgggtggcccaccagtgccgcgagaacctctacaccatccagacactcaaggactt

SEQ ID NO: 9711 - DNA, 2449 bp, Homo sapiens
  source 1..2449: mol_type = unassigned DNA
gtgctgcctggcgctggctaggaggcaaacgcacgcgggaagagctgctacccattccagggaccctgccgctgcccctctgaggggtctgcacctcctgggagcaggtgggtctctgggacgagggtccatggtggatggctctggagacgctcccgaggctgtgccgtcccgctgctgcacaggtcggagggtcaccgcagaggctactcgggctggggctggggccgagggagcccgcactggagccccatgtggaacccaaggatgcagctgctctgctaacacggcagcccatccttcaagactgtgacctcgccacagtggccctcagccctccacctccggcgggggcgagggccacccacctccaagtctccagccatgacgacctccgcactccggcgccaggtgaagaacatcgtgcacaactactccgaggcagaaatcaagtggccttcaccgaagtcatgggcatgctgtggcggcggctcaatgacagcggcaagaactggcggcacgtgtacaaggctctaacattgctggactacctgctcaagacgggctccgagcgggtggcccaccagtgccgcgagaacctctacaccatccagacactcaaggacttccagtacatcgaccgcgacggcaaggaccagggcgtcaacgtgcgcgagaaggtcaagcaggtgatggccctgctcaaggatgaggagcggctgcggcaggagcgaacccacgccctcaagaccaaggagcgcatggcactggagggcatcggcattggcagtgggcagctgggcttcagccgccgctacggcgaggactacagccgctcccggggctccccgtcctcctacaactcctcctcttcgtcaccccgctatacctccgacctggagcaggcccggcctcagacgtcaggggaagaggaactgcagctgcagctggccctcgccatgagccgtgaggaggcagagaaggaggtgaggtcctggcagggtgatggctcccccatggccaatggtgcaggggccgtggtccaccatcagcgggacagagagcctgagagagaagagagaaaggaggaggagaagctaaaaaccagccagtcctccatcctggacttggctgacatcttcgtacctgccctggccccgccctccacacactgctctgctgacccatgggacatcccaggttttaggccgaacacagaggccagtggatcctcctgggggccttctgcagacccctggtctccgatcccctcaggaaccgtcctgtcccgaagccagccctgggatctgactcccatgctctcctcctctgagccctggggcaggaccccagtgctgcctgctgggccccccaccacagacccctgggccctgaactctccccaccacaaactccccagcactggggctgacccttggggagcctccctggagacctccgacacacctggtggtgcctcgacctttgacccatttgccaaacctccagaatccacagagaccaaggaggggctggagcaggccctgccctctgggaagcccagcagccctgtggagctggacctgtttggagaccccagccccagttccaagcaaaatggcacgaaggagccagatgccctggacctgggcatactaggggaagcactaacccagccaagcaaagaggcccgagcttgccggactcccgagtccttcctgggtccctcagcttcctccttggtcaaccttgactcgttggtcaaggcaccccaggttgcaaagacccggaaccccttcctgacaggtctcagcgctccgtcccccaccaacccgttcggcgcgggcgagccgggcaggccgacgctaaaccagatgcgcaccggctcgccggcgctgggcctggcaggcgggcctgtgggggcgcccctgggctccatgacctacagcgcctctctgcccctcccgctcagcagcgtgccagctggcttgaccctccccgcctcggttagcgtcttcccgcaggccggagccttcgcaccgcagccgctgctgcccacgccgagctcagccgggccgcggcccccgcccccgcagaccggcaccaaccccttcctctgagccccgccccgtcccataccggcctgcgcctgcgccggacgctccgcggccccgcctccggacccggggctgggcggggcgccggtgctagtggaacgccgagccagtggcggctggtatcccgcggcggctctggaagctggacgcggaccacggcccgggagctagaaactgaacgcccgcataataaagactggaaccctcgttctcagctctcaccaagtggactttttgcggggtgtggcggccgggtctcgaccacagcgtggatcaccggctgtttaggaaactgcagctgcacaacgtggggtgcaaaactgccccgcttc

SEQ ID NO: 9712 - DNA, 1675 bp, Homo sapiens
  source 1..1675: mol_type = unassigned DNA
gtgctgcctggcgctggctaggaggcaaacgcacgcgggaagagctgctacccattccagggaccctgccgctgcccctctgaggggtctgcacctcctgggagcagccccatgtggaacccaaggatgcagctgctctgctaacacggcagcccatccttcaagactgtgacctcgccacagtggccctcagccctccacctccggcgggggcgagggccacccacctccaagtctccagccatgacgacctccgcactccggcgccaggtgaagaacatcgtgcacaactactccgaggcagaaatcaagtggccttcaccgaagtcatgggcatgctgtggcggcggctcaatgacagcggcaagaactggcggcacgtgtacaaggctctaacattgctggactacctgctcaagacgggctccgagcgggtggcccaccagtgccgcgagaacctctacaccatccagacactcaaggacttccagtacatcgaccgcgacggcaaggaccagggcgtcaacgtgcgcgagaaggtcaagcaggtgatggccctgctcaaggatgaggagcggctgcggcaggagcgaacccacgccctcaagaccaaggagcgcatggcactggagggcatcggcattggcagtgggcagctgggcttcagccgccgctacggcgaggactacagccgctcccggggctccccgtcctcctacaactcctcctcttcgtcaccccgctatacctccgacctggagcaggcccggcctcagacgtcaggggaagaggaactgcagctgcagctggccctcgccatgagccgtgaggaggcagagaaggaggtgaggtcctggcagggtgatggctcccccatggccaatggtgcaggggccgtggtccaccatcagcgggacagagagcctgagagagaagagagaaaggaggaggagaagctaaaaaccagccaggttttaggccgaacacagaggccagtggatcctcctgggggccttctgcagacccctggtctccgatcccctcaggaaccgtcctgtcccgaagccagccctgggatctgactcccatgctctcctcctctgagccctggggcaggaccccagtgctgcctgctgggccccccaccacagacccctgggccctgaactctccccaccacaaactccccagcactggggctgacccttggggagcctccctggagacctccgacacacctggtggtgcctcgacctttgacccatttgccaaacctccagaatccacagagaccaaggaggggctggagcaggccctgccctctgggaagcccagcagccctgtggagctggacctgtttggagaccccagccccagttccaagcaaaatggcacgaaggagccagatgccctggacctgggcatactaggggaagcactaacccagccaagcaaagaggcccgagcttgccggactcccgagtccttcctgggtccctcagcttcctccttggtcaaccttgactcgttggtcaaggcaccccaggttgcaaagacccggaaccccttcctgacaggtctcagcgctccgtcccccaccaacccgttcggcgcgggcgagccgggcaggccgacgctaaaccagatgcgcaccggctcgccggcgctgggcctg

SEQ ID NO: 9713 - DNA, 1128 bp, Homo sapiens
  source 1..1128: mol_type = unassigned DNA
ccgcagccatgaccccgcagcttctcctggcccttgtcctctgggccagctgcccgccctgcagtggaaggaaagggcccccagcagctctgacactgccccgggtgcaatgccgagcctctcggtacccgatcgccgtggattgctcctggaccctgccgcctgctccaaactccaccagccccgtgtccttcattgccacgtacaggctcggcatggctgcccggggccacagctggccctgcctgcagcagacgccaacgtccaccagctgcaccatcacggatgtccagctgttctccatggctccctacgtgctcaatgtcaccgccgtccacccctggggctccagcagcagcttcgtgcctttcataacagagcacatcatcaagcccgaccctccagaaggcgtgcgcctaagccccctcgctgagcgccagctacaggtgcagtgggagcctcccgggtcctggcccttcccagagatcttctcactgaagtactggatccgttacaagcgtcagggagctgcgcgcttccaccgggtggggcccattgaagccacgtccttcatcctcagggctgtgcggccccgagccaggtactacgtccaagtggcggctcaggacctcacagactacggggaactgagtgactggagtctccccgccactgccacaatgagcctgggcaagtagcaagggcttcccgctgcctccagacagcacctgggtcctcgccaccctaagccccgggacacctgttggagggcggatgggatctgcctagcctgggctggagtccttgctttgctgctgctgagctgccgggcaacctcagatgaccgacttttccctttgagcctcagtttctctagctgagaaatggagatgtactactctctcctttacctttacctttaccacagtgcagggctgactgaactgtcactgtgagatattttttattgtttaattagaaaagaattgttgttgggctgggcgcagtggatcgcacctgtaatcccagtcactgggaagccgacgtgggagggtagcttgaggccaggagctcgaaaccagtccgggccacacagcaagaccccatctctaaaaaattaatataaat

SEQ ID NO: 9714 - DNA, 962 bp, Homo sapiens
  source 1..962: mol_type = unassigned DNA
gttggcggcggttggctcggcgcgggagtcggctgcacgtgcgggcgggggcgatgcgtcactgatcggtgaggcgcggccgaggggtcggctttcctcgcgagcctgcggctgggcttcttctcagaggaacgagaatgaatatgactcaagcccgggttctggtggctgcagtggtggggttggtggctgtcctgctctacgcctccatccacaagattgaggagggccatctggctgtgtactacaggggaggagctttactaactagccccagtggaccaggctatcatatcatgttgcctttcattactacgttcagatctgtgcagacaacactacaaactgatgaagttaaaaatgtgccttgtggaacaagtggtggggtcatgatctatattgaccgaatagaagtggttaatatgttggctccttatgcagtgtttgatatcgtgaggaactatactgcagattatgacaagaccttaatcttcaataaaatccaccatgagctgaaccagttctgcagtgcccacacacttcaggaagtttacattgaattgtttgatcaaatagatgaaaacctgaagcaagctctgcagaaagacttaaacctcatggccccaggtctcactatacaggctgtgcgtgttacaaaacccaaaatcccagaagccataagaagaaattttgagttaatggaggctgagaagacaaaactccttatagctgcacagaaacaaaaggttgtggaaaaagaagctgagacagagaggaaaaaggcagttatagaagcagagaagattgcacaagtggcaaaaattcggtttcagcagaaagtgatggaaaaagaaactgaaaagcgcatttctgaaatcgaagatgctgcattcctggcccgagagaaagcgaaagcagatgctgaatattatgctgcacacaaatatgccacctcaaacaag

SEQ ID NO: 9715 - DNA, 1045 bp, Homo sapiens
  source 1..1045: mol_type = unassigned DNA
gttggcggcggttggctcggcgcgggagtcggctgcacgtgcgggcgggggcgatgcgtcactgatcggaggaacgagaatgaatatgactcaagcccgggttctggtggctgcagtggtggggttggtggctgtcctgctctacgcctccatccacaagattgaggagggccatctggctgtgtactacagacaacactacaaactgatgaagttaaaaatgtgccttgtggaacaagtggtggggtcatgatctatattgaccgaatagaagtggttaatatgttggctccttatgcagtgtttgatatcgtgaggaactatactgcagattatgacaagaccttaatcttcaataaaatccaccatgagctgaaccagttctgcagtgcccacacacttcaggaagtttacattgaattgtttgatcaaatagatgaaaacctgaagcaagctctgcagaaagacttaaacctcatggccccaggtctcactatacaggctgtgcgtgttacaaaacccaaaatcccagaagccataagaagaaattttgagttaatggaggctgagaagacaaaactccttatagctgcacagaaacaaaaggttgtggaaaaagaagctgagacagagaggaaaaaggcagttatagaagcagagaagattgcacaagtggcaaaaattcggtttcagcagaaagtgatggaaaaagaaactgaaaagcgcatttctgaaatcgaagatgctgcattcctggcccgagagaaagcgaaagcagatgctgaatattatgctgcacacaaatatgccacctcaaacaagcacaagttgaccccggaatatctggagctcaaaaagtaccaggccattgcttctaacagtaagatctattttggcagcaacatccctaacatgttctccatatcaagatgtggcccaaggggttaagtgggaacaatcattatacggactcttcagatttacagagaacttacacttcatctgttccacctctcctgcgatagtcctgggtgctccactgatt

SEQ ID NO: 9716 - DNA, 1453 bp, Homo sapiens
  source 1..1453: mol_type = unassigned DNA
ggctgttggcggcggttggctcggcgcgggagtcggctgcacgtgcgggcgggggcgatgcgtcactgatcggaggaacgagaatgaatatgactcaagcccgggttctggtggctgcagtggtggggttggtggctgtcctgctctacgcctccatccacaagattgaggagggccatctggctgtgtactacaggggaggagctttactaactagccccagtggaccaggctatcatatcatgttgcctttcattactacgttcagatctgtgcagacaacactacaaactgatgaagttaaaaatgtgccttgtggaacaagtggtggggtcatgatctatattgaccgaatagaagtggttaatatgttggctccttatgcagtgtttgatatcgtgaggaactatactgcagattatgacaagaccttaatcttcaataaaatccaccatgagctgaaccagttctgcagtgcccacacacttcaggaagtttacattgaattgtttgatcaaatagatgaaaacctgaagcaagctctgcagaaagacttaaacctcatggccccaggtctcactatacaggctgtgcgtgttacaaaacccaaaatcccagaagccataagaagaaattttgagttaatggaggctgagaagacaaaactccttatagctgcacagaaacaaaaggttgtggaaaaagaagctgagacagagaggaaaaaggcagttatagaagcagagaagattgcacaagtggcaaaaattcggtttcagcagaaagtgatggaaaaagaaactgaaaagcgcatttctgaaatcgaagatgctgcattcctggcccgagagaaagcgaaagcagatgctgaatattatgctgcacacaaatatgccacctcaaacaagcacaagttgaccccggaatatctggagctcaaaaagtaccaggccattgcttctaacagtaagatctattttggcagcaacatccctaacatgttcgtggactcctcatgtgctttgaaatattcagatattaggactggaagagaaagctcactcccctctaaggaggctcttgaaccctctggagagaacgtcatccaaaacaaagagagcacaggttgatgcaagaggtggaaatgttctccatatcaagatgtggcccaaggggttaagtgggaacaatcattatacggactcttcagatttacagagaacttacacttcatctgttccacctctcctgcgatagtcctgggtgctccactgattggaggatagagccagctgtctgacacacaaatggtcttttcagccacagtcttatcaagtatcctatatgtattcctttctaaactgctactcatgaatgaggaaagtctgatgctaagatactgcctgcactggaatgttaaacactaaatatataacaagctgtgttttcctaa

SEQ ID NO: 9717 - DNA, 5792 bp, Homo sapiens
  source 1..5792: mol_type = unassigned DNA
attataataaaacagttgaatatggcttaggaaaatatgaaggttccatgaagtggaattaagagcatagaataactgtactttccttaggaataataggacttatggtaaaggtagtattgggcaacttctttaagagtgttttcctctgagatgtcctatcaccactatctacatctaaaaaacatgctcgattcttgccctataaactgatgtcacagccccaccatccccatttttgctagtggtatcattttcctagtcaaccaaattttttagtcatcacatatcactgttcgtcatctattataataggcagtctctctcttgtttccctggttttagaagattttagtaataaacatttattgggtacctgttacttggagggtattaagctagatggcaagatctgaaacaacataggcagtatagtaaaagtgcttatctgggagtctgaacattacaagccatccaagcattgcaattattgttaaggattattttcaatggtcatgcattttctaatattttaataattggttaaagatttgttatagcgtgggggccgctgctggtgtgtggctggggttatgtcagggcagcctgatctatataatttgggcagatggtgtgagtcagaacagactattatagtgggatccccaaacttgcttttgatgcatgagttggaccactattttttggtgggtaacaacttttcagaggggaatggcagttgtgaattgtatacatttcattctttaagcaatattatgaaaaacttcagagaatgtctacagaaaacagggtatggagcaagttattttccattctttttgctttttggaagttaaaatagctaagctctgcaaatatcatttatttggaacagataaggtcccagacattcctagataataaaaatcaaatgaatgatacaggtaagtgtatttattgaagggtgtgggtagagtggtctgggaagtcttgctttaatgaagacggattgattctatttacctcttcttacttccactactaagtaaccctgggcctgcagtttcctaaccacttgacttccttgccaacagtctgtctccactttcagccgttttatagattcattggccctaaagcactgctttcccatacttccctacccaagagggcaggggtccccaagccctgggccgcggaccggaaccagacagtggcctgttaggaaccaagccggatagcaggaggtgagcggcgggcgagtgagcattatcgccttgagctctgcctgctgtcagattagcgagtggcatcagattctcataggcacgcgaaccctattgtgaactgcacatgtgaggtttgccggctccctgtgagaatctaatgcctgatgatctgaagtggaacagtttcatccccaacccacacacacccccaccccgtccgctgggttagaggactttacaaccctagtccaccttgtccagttatagttccacctctagcctttcaaggcttaaaccattaatgtccttaatttctcttgtattcatctatctcccaactatacctttttccttcccttttttatttttggcaatatgtgcccatggttttttaatttaaaacgaacagaatatgtagtgacgcctaccatagcactccttcccatcacacaagccttcaaggaaactgaagtacttactttggtctccctggaggattccctccgcctcccgccccatgtgcttagcaattctgttcctgtagtctggatggccttcataaagccctcactggaccagcattctggcacataataggaacacttaaaaaacgagagaatgatgccgttatatctaatatcttcctcttctgaactttcacagcactttatttgcaacaagtttagttgctcctgaagggcaggatctctgccggaagcaagtgcgtgccacacagtggggctccgcatacactgcaaaaggacaaataaaccgaacagctaccgtttgagagtgagcgagtgggttctctgcacaagaacaaaccaaccagtcccttgtccgaaagggcgtctccttttctctgcttcgctgctcactccagactgcgggctgtcctcttccgaagcagttaaccagcagtgtacagaaagcgacttgcctccaaaggagcctgcgcggcccgcggctaggagaattttgtcccatgcgctccccgtctcactagccgcgggccggggctacgccgtgtgcgtccccgcgcagccgcagtgctgggcgagtgggcggggccggctgttggcggcggttggctcggcgcgggagtcggctgcacgtgcgggcgggggcgatgcgtcactgatcggtgaggcgcggccgaggggtcggctttcctcgcgagcctgcggctgggcttcttctcagttagtgccttccacccgggagcgacccttgggagagggagtttcaggaagctcaccgagcaggggcggcccactggcctccgggggcggaggagttggcaaggggtcagcgggctcagccagaagggaagaatgaggggacaggggtactggactccccggctcagcctgcgagagagcgccaagtttccggagggagagggtagaaactggagggggtggacctgtcactcacgggactgagggtccttttctcccgctcccaggaggaacgagaatgaatatgactcaagcccgggttctggtggctgcagtggtggggttggtggctgtcctgctctacgcctccatccacaagattgaggagggccatctggctgtgtactacaggggaggagctttactaactagccccagtggaccaggctatcatatcatgttgcctttcattactacgttcagatctgtgcagacaacactacaaactgatgaagttaaaaatgtgccttgtggaacaagtggtggggtcatgatctatattgaccgaatagaagtggttaatatgttggctccttatgcagtgtttgatatcgtgaggaactatactgcagattatgacaagaccttaatcttcaataaaatccaccatgagctgaaccagttctgcagtgcccacacacttcaggaagtttacattgaattgtttgatcaaatagatgaaaacctgaagcaagctctgcagaaagacttaaacctcatggccccaggtctcactatacaggctgtgcgtgttacaaaacccaaaatcccagaagccataagaagaaattttgagttaatggaggctgagaagacaaaactccttatagctgcacagaaacaaaaggttgtggaaaaagaagctgagacagagaggaaaaaggcagttatagaagcagagaagattgcacaagtggcaaaaattcggtttcagcagaaagtgatggaaaaagaaactgaaaagcgcatttctgaaatcgaagatgctgcattcctggcccgagagaaagcgaaagcagatgctgaatattatgctgcacacaaatatgccacctcaaacaagcacaagttgaccccggaatatctggagctcaaaaagtaccaggccattgcttctaacagtaagatctattttggcagcaacatccctaacatgttcgtggactcctcatgtgctttgaaatattcagatattaggactggaagagaaagctcactcccctctaaggaggctcttgaaccctctggagagaacgtcatccaaaacaaagagagcacaggttgatgcaagaggtggaaatgttctccatatcaagatgtggcccaaggggttaagtgggaacaatcattatacggactcttcagatttacagagaacttacacttcatctgttccacctctcctgcgatagtcctgggtgctccactgattggaggatagagccagctgtctgacacacaaatggtcttttcagccacagtcttatcaagtatcctatatgtattcctttctaaactgctactcatgaatgaggaaagtctgatgctaagatactgcctgcactggaatgttaaacactaaatatataacaagctgtgttttcctaagctgagatctgttgaataatgtttacattcgtcccccggggaaatgtatgctcagccaccattcaagagatgactgagaaggagatggtaagttcaagaagactgattgcacctgggacccaggccctttctttgggatccagtcccagccttcatccatgtgattaagatccaggccgctgaagttccccaggaaatgatcttccacttgagcaaccttttacttgatacgatttgcacctttctgttttcctgcagtcagggtggtggcctgcagggacctgagctttgctacccaaccagattcctcatagagattcctaatcactagtttcttgtattcataaactcagagatacagagggcttggtttgaagttggggtgagatgaaacctttgctctgagccaaagctctggggccttgcattccctgcattgggttgatgactgtcagcatcactgccgcaggccatgcttgactaaggtacctggttttagccacagccacctccttgtatgttacctttcagctctggccaagagtgggacagggttttaaccacaaataggagcagcatgcaattcctagtgacttgctgcacagtattgtatcataattacaggaagtttttatttttaaaactggatctggggtatattcatttgccccatcacctctgtctaaaggcccaagtcctagggctgccatggtcacaagcacactgatgctccttaagattgtttatctggagcccacatagtgtggaacaaaaagtcacctagaaagcatccttggtcatcattgtctccttcccacctggcccagagatgcttaaatccaagttgtttctccagctgtcacctcccccaggagatcaggattccactgacgtcctgggcagccagtgaatttaattttccatgagaaacaacagagttaacctgtggcattaggagacctacttcatgtggaccctttttttccttcagtttaacttttctggagcagtgtgctgcgtagttcggcctgagtttgtgcagcttgttaagacaactcttgtgtacgctatgttgaagctcaacaaaaaagtcatgggaccacttctagaaatctttcagctgtcaggcctgtcagtctcatgacagtttgttggttgtgccaaacactttatttgggaaaggaaagcccagatttgaatgggtctttcccctgggccttatcctatagaggcatttgtaatatggagaaaataatttttcatttttgctcatttaattctataaattctctttataaatgaattttgtgttctttagttctccttaaaagaacttttgaattataaaaataaaatctttacctgtcgaattgttgctgcagatgattgttgtggaaaatctggatcattgacctctgtgctttcattcctagagatgttttatagttacatgagcaaaagctgttgccccaaagtgatggccctggaggcggggctgaggaacagggaaatgccgctgtgaagtcttaaagcacttctgcttaaactcccatgtgtgaggagtgtgcctccctgtgccctctcagctctgaggctggccgtctttcggggtgttccttttggcaaatatacactgtaatcttgagtctaaatttatatgttgaaatgctaccttttttaaaataagaaactaaataaaattattttactatca

SEQ ID NO: 9718 - DNA, 6073 bp, Homo sapiens
  source 1..6073: mol_type = unassigned DNA
ttttcttgctcgtgggctcggacgagtacggagcgcctgcagggacagcctggataaaggctcactgatggctcagttgggagcagttgtggctgtggcttccagtttcttttgtgcatctctcttctcagctgtgcacaagatagaagagggacatattggggtatattacagaggcggtgccctgctgacttcgaccagcggccctggtttccatctcatgctccctttcatcacatcatataagtctgtgcagaccacactccagacagatgaggtgaagaatgtaccttgtgggactagtggtggtgtgatgatctactttgacagaattgaagtggtgaacttcctggtcccgaacgcagtgtatgatatagtgaagaactatactgctgactatgacaaggccctcatcttcaacaagatccaccacgaactgaaccagttctgcagtgtgcacacgcttcaagaggtctacattgagctgtttgatcagattgatgaaaatctcaaactggctttgcaacaggacctgacctccatggcccctgggctggtcattcaagctgtgcgggtaacaaagcccaacataccagaggcaatccgcagaaactacgagttgatggaaagtgagaagacaaagcttctcattgccgcccagaaacagaaggtggtggaaaaggaagcagagacagagcggaagaaggcgctcattgaggcagaaaaagtggcccaggtggctgagatcacctacgggcagaaggtgatggagaaggagactgagaagaagatttcagaaattgaagatgctgcatttctggcccgggagaaggcaaaggcagatgctgagtgctacactgctatgaaaatagccgaagccaataagctgaagctaacccctgaatatctgcagctgatgaagtacaaggccattgcttccaacagcaagatttactttggcaaagacattcctaacatgttcatggactctgcgggcagtgtgagcaagcagtttgaggggctagctgacaagctaagctttggcttagaagatgaacccttggagacggccactaaggagaattgaaaaaaacttgatatgactgcaaatgatacttaagcagatctttattttttaagatgaatcagaatgttcctccctccccgactaccttctctgactgtcttccagttactgtggtgaaaaagaagaaatgaacttaaatccactccctttctagggaaaggagggtggggactgatgatggggggttttatttcaggtaagcagtttatatgacttccaataagatttgtaaatcatgggcttgacctttgacctctagacactaattttatcctttgaggctggcttaattagggatgctgtcattaaggagagggagaaatgtagagtgttacctccaactcatttgatttcccttacttgggaaaatgcagtccagtgttctcacctctgcctccaaggtaggagatgtctgtgggtgaggctcagcaactgagcaaatatgtgcctgtgagtttgccagtagagctgtgaagaaacagctgcagagaacatttgaccttcctggcattcttgtctgcatgtgtgtgagttattttagaggtgtgctttcttgagccctcataaggaagtactggtgctaggttttgcaagattttgtatacactttgctccttgccctagggctcagagtggtggtttctgactacatttctagagtcagagcttgatcaccacaactcaattatttcggcatcttttcacctatgctgtgatttgttttttttttttcttctcaaaaattctgttcattggttccactcagcatcaagaagacagggacaaacaactcaagtgtcttaacagctgctggagtgggatccttgttatctcttagccactgcaggacctgcctgacaggttatgtgtgcacctcgagatgaagtgtctttctattattgtagagattctgtagtgaagaggtctgacaccatgtgtggaggaggaggaacgatcagtcaagagatgtcctggtcttaatgcctgtggcttgtgctgggagtgggtctgacttagtgataaaaggactctattcactaagtagcctgtgtttttaaatccagggctgcaggcagcaacgcaagtcaggctgaacattcagtctccagagacagctgtgtggagcaaatcagagttcatgcccaagtccccaggttggaatggctgtgccaaaatccattcaaagggttttctttttcattactaggtcagaacattttgagtcaccttgggagattcaggatggggagagcaaatttgaacaaaaggtttttcttatatcctgagattgaggggtagggggtgtccaacctgtatagcccatgggttgtgtctagaattaagtggagggcagctatctggagttaacttgcaagcatattggtgccctccatgaccacctctggcttaggacttggccctgttatgagctgacccccaccccccaccccccaccccccccccccgccaactcctatacccatcttccctaggtgaatctgtgaatggtcctttctggcagcaatccctgccttctttttgggcccatgcccagacttctggtttaaggaatggtcccagagcttgggccagcttgctcagaagttttgggagcattgagcctgcctagaaagatacagtgttagctccccttacttcaaagttgcccttctctgttctgactcctgggacttctggtcctgggcacactttttgcaggcaacaaaatgtgcctgggagtgatggattttaatgtgctccagagtcctttcagaaggtggtcatttcccttggccgggcgcggtggctcacacctgtaatcccagcactttgggaggccaaggcaggcggatcacctgaggttaggagttcgagaccaccctggccaacatgcgaaaccccatctctacgaaaaatagaaatattagccgggcatggtgtcaggcacctgtaatcccagctacttgggaggctgaggcaggagaattgcttgaactcgggaggcagaggttgcagtgagccaagatcatgccatcccactctagcttgggcaatagagcaaggctccgtctcaagaaaagaaggtcatttcccaagactagcatagggagtatccatttaaaatacattcatcttcctcccatttccgtgctattaatcacttgttagagcaacatgacatgcccagcatcccacttcccgaaaatgtctactccttctactctgagctcttgttgcctagacctcagaaaacaccaattcaccacagtagaaccgggagcagggatagctcagcttctctgaatagcacactttgctcaggtcttaacttgagggcctctccggtactaacatcctgcgatagcttgtcccatgagcacagaagagcctcagtagagtcaagtcctgctgcagctgccccaccccaagtttctatcatttcctctttaaacaaaaaatatgttatcctacacattagtgtcaatccaatggttgtctcttatctgtctaaatagcaaaatcatgaaaatcagctgttttatttgcataggacaactaacctgtctgtgtaactttgtttttattttaactcttactagaaaatctaatcttaaaacatttgaattctaaacatgtaaaatgtgacagcctgcaattttgtagacagtgaagtaatggctgctatttataaatggaacatctatcaaaataagtaactgtttataaaattcagtttttgtagggttttccaaggaaaaatcaccttggttgaatgtttctcactcattaaactttgcagaagtgattcatattcagtactgtttttaatcactttttaaaatataaggaccgaatgcaaggaaaccaaagtttattaataatttttatataactaaaataaaatagatgtggagggatctgtgatcatataaaaagggagggttactgaaagaattttagcaatatattgattcaggaaaaggagctgttttataaatgatcattcactgttcctatggttctatgtatctttcaaaccgatacctttactatttaaagagcgtaaatagtgaaagtaagatggtcatacttactgactttatctatttaagtttgatggagataaactatatcttggctagtggctactgtgtctgtgaatgtaaccagtacttctttaagctctattcagtagggttccagccactgcttttttgttgtttctagccactgttttttttttcttgtttccttataaaacaggtaataaccaatcattttgtgtttgtatttccattcctttttatttctgcctttgtgtagactgatgattaagtaggcaaactacttctactttcaaagagccccaagggcttaatgaccccatttgtaactgagaaatgattcttgttttagtaatcattctataaatgatactgctggattgattgccgtgggttgatagctggaggaattgttttggacaatactaacatgtgaatttatgtcttagttttatttgcagtcttgctaagtaaaatgagtctttgtatctacttttttattaaagtgaaatttagcaatagttaatattaggtgacataaataaaacatcccagactagtgagttaagtacaagatctctctaaaaataaacagatgaaaatctatccccattatcgatacagaatttgtgaacgtggcataattcttggtaggtgctatagagatttatcattttaaacagttcacacaccactgcaattctgctccaaaggacaaagatattttcaagtgaaccaaaattcattttgatatcagttcagtggacgaactcccagtctttactctggaaagctgcccagcttagggttgccagataaaacataagatacctagttaaatatgaatttcaacaatgtacaatttttagtctaagtactatgtgtcctaaacactgcatgagacatactcataccaaagtatttgttgcttatgtgtaattcatatttaactgggtatcctgtatttttacttgttaagtccggcaaccctagcccaggctttctcaggttttttttaacagggatcccaagctttttctattggtttgagagcctgctacacaaataatatgatcttaacaattgaatagttatgttaagagtgtagttactgcagttagactgccaaagttcaaatcactgctctactacttcttaggtgtgtggtcttgaataagttttttgacctctctaagcctcagtttcttcattaataaaatgagttgcatggcttatatgaaataatgcatacgaagggctttcacactgtaccttgcatgtatgtattcaaaaacttcaatctggagaaacgggctaaaaaacatacagctattaaatgggagccactaagtagaaagccaaacacgtgaaaaaaaatggaataagattacaaatgggatagcacatagaagaagggaatgacattgcaatgcagcaaacacagtattgaggatacatacctctacaaaaatgttgtgtagaaaataacctggtttaaagaaagaaaagaaaagaaaagaagccaggcacggtggttcacacctgtaatcctagcactttgggaggctgaggtgggtggatcacctgaggtcgggagttcaagaccagcctgaccaacatagagaaaccccatctcgactaaaaatagaaaattaaccgggcatggtggtgcatgcctgaaatcccagctacttgggaggctaaggcaggagaatcacttgaacctgggaggtagaggatgcagtgagccaaaatcacgccactgcactccagcctgggcaacaagagcaaaactctatctccaaaaaaaagaaaagaatctgatttggccctgttgagaggaactgtccagttctggtctccaattttaaaaatgaaaaaaatttgaagaagctagaaagaaaatgttaaaaccaaaaag

SEQ ID NO: 9719 - DNA, 1473 bp, Homo sapiens
  source 1..1473: mol_type = unassigned DNA
ggaagtcgcgtgctgaggggtgtgacggttttcttgctcgtgggctcggacgagtacggagcgcctgcagggacagcctggataaaggctcactgatggctcagttgggagcagttgtggctgtggcttccagtttcttttgtgcatctctcttctcagctgtgcacaagatagaagagggacatattggggtatattacagaggcggtgccctgctgacttcgaccagcggccctggtttccatctcatgctccctttcatcacatcatataagtctgtgcagaccacactccagacagatgaggtgaagaatgtaccttgtgggactagtggtggtgtgatgatctactttgacagaattgaagtggtgaacttcctggtcccgaacgcagtgtatgatatagtgaagaactatactgctgactatgacaaggccctcatcttcaacaagatccaccacgaactgaaccagttctgcagtgtgcacacgcttcaagaggtctacattgagctgtttggactggaaaatgatttttcccaggaatcttcataaaagggaccctgagcaagaacatttttcatagcagacaggaggactcatccacatcgccagcaatcataattaagcaaaccgccttttgcaccatttaagatttaggaaatcatccaaattacttttaatgtttctgcagtagaaaatgaatctaaattcattttatagggtttgtagtcttttatctgttttggattcactgtgcttttaagaaaaagttggtaaatttgccgttgatttttctttttaacctcaaactaatagaattttataaaatattaattttctctagccattgtcttaggacttgtgacattacatgaacatttcaaagcactgaaaaaagacaaaggatccctaatgtccctgaagaggaaattaaaatacaaagttgtttttcattagcaaacttcttactttcttacagctaaacttggtagcttagtgaagtacagctgcttgtatggaggagctggggaaatatatttgctttgaaacttttttatttttacatctcagtcttgctagcaagcactacttggcttagaatctgtcatatccataaaggaggagctcatgtctctagtcctggcccttcaactcagaaggttcttctatactttccttctctcaggactcttatagcccagactttaaacatgaagctgcataattttcatcacttcttactctgccgcatcctctttgcccatgttattaaagtattatctaatactttgaagtttacctgaagaacctctttgtgtgtacttagtaatacaactttttttcctgtcccaacaccttttaatacagttgaatggataaaaacatggatacaaacacatggatatagttatcactgaagcagtgtgacataaaataatacctatgtatacaacactcctctgtaaatagc

SEQ ID NO: 9720 - DNA, 1718 bp, Homo sapiens
  source 1..1718: mol_type = unassigned DNA
tactggtaggaaaggttcagtgacagcacattcgtgttcacaggaagacaaggctgtgttctgaaccctacccagctggcacgggttctcccttgagcaacggctgtatccggagccagtgcttcctcagtgcggtgggggctctaattttacagttaaagaaaggggaacgttgactgagaacgaggaggaagcgagttgtagatctagccttgtgttcacacgacaccaggctggatatgagtcactcgcagggagctcagcttggtgaggtcctctcgctgttgtggccttttctcctgcacgttggaccacacacattttcccgtgtcttttccctaggataaaggctcactgatggctcagttgggagcagttgtggctgtggcttccagtttcttttgtgcatctctcttctcagctgtgcacaagatagaagagggacatattggggtatattacagaggcggtgccctgctgacttcgaccagcggccctggtttccatctcatgctccctttcatcacatcatataagtctgtgcagaccacactccagacagatgaggtgaagaatgtaccttgtgggactagtggtggtgtgatgatctactttgacagaattgaagtggtgaacttcctggtcccgaacgcagtgtatgatatagtgaagaactatactgctgactatgacaaggccctcatcttcaacaagatccaccacgaactgaaccagttctgcagtgtgcacacgcttcaagaggtctacattgagctgtttgatcagattgatgaaaatctcaaactggctttgcaacaggacctgacctccatggcccctgggctggtcattcaagctgtgcgggtaacaaagcccaacataccagaggcaatccgcagaaactacgagttgatggaaagtgagaagacaaagcttctcattgccgcccagaaacagaaggtggtggaaaaggaagcagagacagagcggaagaaggcgctcattgaggcagaaaaagtggcccaggtggctgagatcacctacgggcagaaggtgatggagaaggagactgagaagaagatttcagaaattgaagatgctgcatttctggcccgggagaaggcaaaggcagatgctgagtgctacactgctatgaaaatagccgaagccaataagctgaagctaacccctgaatatctgcagctgatgaagtacaaggccattgcttccaacagcaagatttactttggcaaagacattcctaacatgttcatggactctgcgggcagtgtgagcaagcagtttgaggggctagctgacaagctaagctttggcttagaagatgaacccttggagacggccactaaggagaattgaaaaaaacttgatatgactgcaaatgatacttaagcagatctttattttttaagatgaatcagaatgttcctccctccccgactaccttctctgactgtcttccagttactgtggtgaaaaagaagaaatgaacttaaatccactccctttctagggaaaggagggtggggactgatgatggggggttttatttcaggtaagcagtttatatgacttccaataagatttgtaaatcatgggcttgacctttgacctctagacactaattttatcctttgaggctggcttaattagggatgctgtcattaaggagagggagaaatgtagagtgttacctccaa

SEQ ID NO: 9721 - DNA, 2347 bp, Homo sapiens
  source 1..2347: mol_type = unassigned DNA
ggttttcttgctcgtgggctcggacgagtacggagcgcctgcagggacagcctggataaaggctcactgatggctcagttgggagcagttgtggctgtggcttccagtttcttttgtgcatctctcttctcagctgtgcacaagatagaagagggacatattggggtatattacagaggcggtgccctgctgacttcgaccagcggccctggtttccatctcatgctccctttcatcacatcatataagtctgtgcagaccacactccagacagatgaggtgaagaatgtaccttgtgggactagtggtggtgtgatgatctactttgacagaattgaagtggtgaacttcctggtcccgaacgcagtgtatgatatagtgaagaactatactgctgactatgacaaggccctcatcttcaacaagatccaccacgaactgaaccagttctgcagtgtgcacacgcttcaagaggtctacattgagctgtttggtaagaaagtctctcctgagcatgccgtgcttaagcagggttcctggaaccccgcgtctctccactgcctaaagcctggctgcctgcagggtgtgatggtcacttatggacaggaaatgttaaagaatcttgtgctcaggagctggtcacaaaggagttcatggagaatgctgatagctatgcaacaagatccttagagggctggagctttgggcacagggaccatagtggagtagagtattcacttctggcctcaatcagaggctggagtggaaatgtgttcccactgttcctaaactatcattctataatgaagacaaggtccattctagaagaaccttagagattgtccagaccagcatcctcattttaagctgagggtactgtgacccaaagcaagaaagtcacagagccagatgccaattagtagtggggctgaaacaggagccttcctctcctggctcttcagcattcttctcaccatgcaacactgaatggagggcccccaggaatgggtgatgaaaaagacatgattcatagttaattctagaagtgagatgagaaccatagctccttccagttctcagaacctttgtgattattatttttttactctgtacctgtagcaacgaatagaaaaacactttaaacaaaaagattccacgtgcctaagtagatatgttttgtcctttttacctttttcaaagtaaaggcaacctgacttagcagcaaaggaaggacacagttgggtaactgttataacttgtttgcagtcaagtattctgtttaaactcactgccagaaattctctaatagccaatgccaaaagtaaatgaatttttaaccaatagtataactgttcttgacactaggactggaaaatgatttttcccaggaatcttcataaaagggaccctgagcaagaacatttttcatagcagacaggaggactcatccacatcgccagcaatcataattaagcaaaccgccttttgcaccatttaagatttaggaaatcatccaaattacttttaatgtttctgcagtagaaaatgaatctaaattcattttatagggtttgtagtcttttatctgttttggattcactgtgcttttaagaaaaagttggtaaatttgccgttgatttttctttttaacctcaaactaatagaattttataaaatattaattttctctagccattgtcttaggacttgtgacattacatgaacatttcaaagcactgaaaaaagacaaaggatccctaatgtccctgaagaggaaattaaaatacaaagttgtttttcattagcaaacttcttactttcttacagctaaacttggtagcttagtgaagtacagctgcttgtatggaggagctggggaaatatatttgctttgaaacttttttatttttacatctcagtcttgctagcaagcactacttggcttagaatctgtcatatccataaaggaggagctcatgtctctagtcctggcccttcaactcagaaggttcttctatactttccttctctcaggactcttatagcccagactttaaacatgaagctgcataattttcatcacttcttactctgccgcatcctctttgcccatgttattaaagtattatctaatactttgaagtttacctgaagaacctctttgtgtgtacttagtaatacaactttttttcctgtcccaacaccttttaatacagttgaatggataaaaacatggatacaaacacatggatatagttatcactgaagcagtgtgacataaaataatacctatgtatacaacactcctctgtaaatagcaaatgtaaagtaaaagatacacaacaga

SEQ ID NO: 9722 - DNA, 1742 bp, Homo sapiens
  source 1..1742: mol_type = unassigned DNA
ggcccccgccccttcgtgcgcgcgctgggcctagctgccgctcagggtcggggctgacccgtcactttcgggaacctcagtcccagcagcttctctccctcagccggcccgctcctggagagagacagaaacccttttctgtcgcgtcctctccttgcgagccgcagggggaccgagcggaggctattggagccgcagccccagaccagggcgcttgaccctctctcggaacggggcggggaaggggcgcgagtgacctcggggagggaagggcactggcaggaaaggacgcaactgcagatcggtagccggaggccgccacggataaaggctcactgatggctcagttgggagcagttgtggctgtggcttccagtttcttttgtgcatctctcttctcagctgtgcacaagatagaagagggacatattggggtatattacagaggcggtgccctgctgacttcgaccagcggccctggtttccatctcatgctccctttcatcacatcatataagtctgtgcagaccacactccagacagatgaggtgaagaatgtaccttgtgggactagtggtggtgtgatgatctactttgacagaattgaagtggtgaacttcctggtcccgaacgcagtgtatgatatagtgaagaactatactgctgactatgacaaggccctcatcttcaacaagatccaccacgaactgaaccagttctgcagtgtgcacacgcttcaagaggtctacattgagctgtttggactggaaaatgatttttcccaggaatcttcataaaagggaccctgagcaagaacatttttcatagcagacaggaggactcatccacatcgccagcaatcataattaagcaaaccgccttttgcaccatttaagatttaggaaatcatccaaattacttttaatgtttctgcagtagaaaatgaatctaaattcattttatagggtttgtagtcttttatctgttttggattcactgtgcttttaagaaaaagttggtaaatttgccgttgatttttctttttaacctcaaactaatagaattttataaaatattaattttctctagccattgtcttaggacttgtgacattacatgaacatttcaaagcactgaaaaaagacaaaggatccctaatgtccctgaagaggaaattaaaatacaaagttgtttttcattagcaaacttcttactttcttacagctaaacttggtagcttagtgaagtacagctgcttgtatggaggagctggggaaatatatttgctttgaaacttttttatttttacatctcagtcttgctagcaagcactacttggcttagaatctgtcatatccataaaggaggagctcatgtctctagtcctggcccttcaactcagaaggttcttctatactttccttctctcaggactcttatagcccagactttaaacatgaagctgcataattttcatcacttcttactctgccgcatcctctttgcccatgttattaaagtattatctaatactttgaagtttacctgaagaacctctttgtgtgtacttagtaatacaactttttttcctgtcccaacaccttttaatacagttgaatggataaaaacatggatacaaacacatggatatagttatcactgaagcagtgtgacataaaataatacctatgtatacaacactcctctgtaaatagcaaatgtaaagtaaaagatacacaaca

SEQ ID NO: 9723 - DNA, 8647 bp, Homo sapiens
  source 1..8647: mol_type = unassigned DNA
ggacggagctggatcctgcttctcgccaaggcaggaagtgagtttcgcactgcaattccgggcggtgtcacgagtgaaaagttttgtttttttttttttcggcggagatcctcgttggggctgggaaactcctgcaaaactcgagaccaggaagccagcccgcaccccaacccccaccaaagccacctactcttcttctgtgggaggccagtccacatccgctctcacccgagagagatattcagctggatccaaagtgactgatgaagggaaggaaatcatgtcaagcgaagccttgaaaaagctgccctgagacggtgtcccgccgaaagaatgttggctcaattaagaaacatcagggagataaattcaacccagtgtgtctaaaaatgactacaaaacgaagtttgtttgtgcggttggtaccatgtcgctgtctacgaggggaagaggagactgtcactactcttgattattctcattgcagcttagaacaagttccgaaagagatttttacttttgaaaaaaccttggaggaactctatttagatgctaatcagattgaagagcttccaaagcaactttttaactgtcagtctttacacaaactgagtttgccagacaatgatttaacaacgttaccagcatccattgcaaaccttattaatctcagggaactggatgtcagcaagaatggaatacaggagtttccagaaaatataaaaaattgtaaagttttgacaattgtggaggccagtgtaaaccctatttccaagctccctgatggattttctcagctgttaaacctaacccagttgtatctgaatgatgcttttcttgagttcttgccagcaaattttggcagattaactaaactccaaatattagagcttagagaaaaccagttaaaaatgttgcctaaaactatgaatagactgacccagctggaaagactggatttgggaagtaacgaattcacggaagtgcctgaagtacttgagcaactaagtggattgaaagagttttggatggatgctaatagactgacttttattccagggtttattggtagtttgaaacagctcacatatttggatgtttctaaaaataatattgaaatggttgaagaaggaatttcaacatgtgaaaaccttcaagacctcctattatcaagcaattcacttcagcagcttcctgagactattggttcgttgaagaatataacaacgcttaaaatagatgaaaaccagttaatgtatctgccagactctataggagggttaatatcagtagaagaactggattgtagtttcaatgaagttgaagctttgccttcatctattgggcagcttactaacttaagaacttttgctgctgatcataattacttacagcagttgcccccagagattggaagctggaaaaatataactgtgctgtttctccattccaataaacttgagacacttccagaggaaatgggtgatatgcaaaaattaaaagtcattaatttaagtgataatagattaaagaatttaccctttagctttacaaagctacagcaattgacagctatgtggctctcagataatcagtccaaacccctgatacctcttcaaaaagaaactgattcagagacccagaaaatggtgcttaccaactacatgttccctcaacagccaaggactgaggatgttatgtttatatcagataatgaaagttttaacccttcattgtgggaggaacagaggaaacagcgggctcaagttgcatttgaatgtgatgaagacaaagatgaaagggaggcacctcccagggagggaaatttaaaaagatatccaacaccatacccagatgagcttaagaatatggtcaaaactgttcaaaccattgtacatagattaaaagatgaagagaccaatgaagactcaggaagagatttgaaaccacatgaagatcaacaagatataaataaagatgtgggtgtgaagacctcagaaagtactactacagtaaaaagcaaagttgatgaaagagaaaaatatatgataggaaactctgtacagaagatcagtgaacctgaagctgagattagtcctgggagtttaccagtgactgcaaatatgaaagcctctgagaacttgaagcatattgttaaccatgatgatgtttttgaggaatctgaagaactttcttctgatgaagagatgaaaatggcggagatgcgaccaccattaattgaaacctctattaaccagccaaaagtcgtagcacttagtaataacaaaaaagatgatacaaaggaaacagattctttatcagatgaagttacacacaatagcaatcagaataacagcaattgttcttctccatctcggatgtctgattcagtttctcttaatactgatagtagtcaagacacctcactctgctctccagtgaaacaaactcatattgatattaattccaaaatcaggcaagaagatgaaaattttaacagccttttacaaaatggagatattttaaacagttcaacagaggaaaagttcaaagctcatgataaaaaagattttaacttacctgaatatgatttgaatgttgaagagcgattagttctaattgagaaaagtgttgactcaacagccacagctgatgacactcacaaattagatcatatcaatatgaatcttaataaacttataactaatgatacatttcaaccagagatcatggaaagatcaaaaacacaggatattgtgcttggaacaagctttttaagcattaattctaaagaggaaactgagcacttggaaaatggaaacaagtatcctaatttggaatccgtaaataaggtaaatggacattctgaggaaacttcccagtctcctaataggactgaaccacatgacagtgattgttctgttgacttaggtatttccaaaagcactgaagatctctcccctcagaaaagtggtccagttggatctgttgtgaaatctcatagcataactaatatggagattggagggctaaaaatctatgatattcttagtgataatggacctcagcagccaagtacaaccgttaaaatcacatctgctgttgatggaaaaaatatagtcaggagcaagtctgccacactgttgtatgatcaaccattgcaggtatttactggttcttcctcatcttctgatttaatatcaggaacaaaggcaattttcaagtttgattcaaatcataatcccgaagagccaaatataataagaggccccacaagtggcccacaatctgcacctcaaatatatggtcctccacagtataatatccaatacagtagcagtgctgcagtcaaagacactttgtggcactccaaacaaaatccccaaatagaccatgccagttttcctcctcagctccttcctagatcagagagcacagaaaatcaaagttatgctaaacattctgccaatatgaatttctctaatcataacaatgttcgagctaatactgcataccatttacatcagagacttggcccagcaagacatggggaaatgtgggccatctcaccaaacgaccgacttattcctgcagtaactcgaagtacaatccagcgacaaagtagtgtgtcctccacagcctctgtaaatcttggtgatccaggctctacaaggcgggctcagattcctgaaggagattatttatcatacagagagttccactcagcgggaagaactcctccaatgatgccaggatcacagagacccctttctgcacgaacatacagcatagatggtccaaatgcatcaagacctcagagtgctcgaccctctattaatgaaataccagagagaactatgtcagttagtgatttcaattattcacggactagtccttcaaaaagaccaaatgcaagggttggttctgagcattctttattagatcctccaggaaaaagtaaagttcctcgtgactggagagaacaagtacttcgacatattgaagccaaaaagttagaaaagaagcatccccagacatccagttcaggagatccttgtcaagatggtatattcatttcaggacagcagaactactcatcagccacacttagtcacaaagatgttcctccagacagcttgatgaaaatgcctttgagtaatggacagatgggccagcctctcaggcctcaggcaaattatagtcaaatacatcacccccctcaggcatctgtggcaaggcatccctctagagaacaactaattgattacttgatgctgaaagtggcccaccagcctccatatacacagccccattgttctcctagacaaggccatgaactggcaaaacaagagattcgagtgagggttgaaaaggatccagaacttggatttagcatatcaggtggtgtcgggggtagaggaaacccattcagacctgatgatgatggtatatttgtaacaagggtacaacctgaaggaccagcatcaaaattactgcagccaggtgataaaattattcaggctaatggctacagttttataaatattgaacatggacaagcagtgtccttgctaaaaactttccagaatacagttgaactcatcattgtacgagaagtttcctcataagcactgtggacaaaaaaagcggggaagacagcaagatttattggaagatacttacaggggaaattaatattttgactatttttatatataaagaagaactcaaaaaattatgttcaaatttgtacattaatgaaataatggaacttgtggttagagggaaagaaccactgtacagaatataaaggagactgttgaattcataccatataaaacttgttaggtttttaaacatagcaatcaaggctacaaaaacaaacctgtgttgtttttgtatagattgtaggtttatttttggatttcatatacatgactgaactgtgtgcaaggcaatagttagccttgattttagcccagagacagatggcagagctatctctctcatagcttttatgcccttatttttattcaactggtattaatgtttttctcctgaaactactttttttgatgtgggcaagagatttgaagtgttggcttttgctatgtgcatattgaattgaagagtgagtaggtgaaggtggtgctggtgggttcactttccaaggccagactaaaacagttattttctataaaaatctggaagcaaagaatggggatggggagagctacgtggtagtatgtttttattaggagaataatgcaataaaatatgtaatgtcttttttataaagcaaaaaagacaataattgcatttatgagctcggcaggatctgttcttgtcatagccattgactatacatttgctactggtgattcagtttttaattttttagtcacaggaaatttttaactctactgtagatgcatgtccatgcattttctgtgttatggaaatccactgatttttttttttttttcaaatggtggtacttgcaatctgttttataattagtgctccatttaaatctaatttataatttttattttaagcagcaaatgaaacaaaaatggccagttttaagattgtgttgcctgtaacacaaaatgttacgaaggtttaggaaagcctctttgatttttgtttggccttgcattgccttggtaaagtaaaaggaaacagtacacttggagctaggaaaccaaagcaagctttgtgaaactggcacagtgatagagaattgctgtggagagttatagagcaaagggatgggtccttgaggcctgccagtgtgtaaaggtgttcaaataaagggctgtttctacaggtaacattaaatgtgaactcaacacttccagagtctttaaagggtttctatgtgtatcagtgtaatagtgttttaccaccaactgcctttctttgttcctagttactgtaacaaatatttgatgatagaggtttattaattttgtttatccagaccattaattttatttgtttttgttctatgtaatcaaataaaatttgagtaacatgtaatggtaaggattaatgcatggttatttggaccagaaaaaagtgccatagaagaccaataactgtttagttgaggctagtctggaacctttcattagagcaatatttggttattgcacttcatttttatttactaagaaatgcaatttgggaatttttaatctgttatgctttgtttatcaaccttgattttaattaagacttttataagactagcttaaaacaccaaccaacattatttttgcaaaagtgagttggactcactttccattcttgctagtcagagtaagtaggcagcacttttaaaaatatgtgaactcaaatattgcacttctttcaagatgttatcaattggttattgtactgtatagttttaataattttgattgaaaccctttaacaactctttgtaaattttaactcattttagttgattttcagtactatttacataggaattgatttttatggatatagtagaagaaatgtgctgtattttgataaaattcacttattgtatgtgtgttgtaatctaaaaaaaaaaagaatgacaaacagcttctttaagacaagtctcggtgttccctttattcttagtttgtttttaaatattaattttggcattctaaaatagctaacatttcttttattgatttcagattttcacaggcacattctacttttaatcagaaatatatttaataagtataattgtgaagttttcaactactttaccttgaaccacatataccaattataattttggaaaaggaattaagcctcacggaacaatggatcttcagcaaaccttaacttcattgtctgcacattacattgaagtattataaatgcaacagatgttatatgcactggcattttatcctactctagttagttaaaattttatagtattcttgcaacacataaagttgcgtaagaaactttaccaagaggagtattatagccaagttttctttgaaagtattggaaaactaaaattaaatgacaaggactttgaattagaattttgctgtaataaagtttcaaaatttgaataaaataattaaattttttgaggaagtggagaagacatttttagtttatatattgttgagtaaattgtagttaaggcctatacccataactaactttagtaagtattatatagcaattcatcaaaaccacaactgtcttttagtgattttgtctttaagagtaatttcttactctaaccagtaaaaaaataatactgatcagagtaatttatacggcatacaatagttgatacaatctaaagatttatgctaattaaggaattatcacttcatctgaatcaatgaaattctaaaattccctacatatttattttgtaaatattcttctgacctctttggactggatatgaagatatatatatatacacttaattcttttaaacacaaaacttgccataagcagaaccaaacttttaagtattaatttgctgcacttaaaaaatcccattagcagctatgtaatatttttatcaaccaacatttattcattccaaatttttgtatatatctagatgaagtaacacatagaggatagataacaaactaatgatgtttaaactggtttatttacaaaattcggggttagagaaattctcatgaaaaatatacaatttttttttagcattaaaaccctgtatatctaggtgtggaagaagtgtagtttatctcaaattattattatttacttctaaagggaggcattaagatgggaaatgtttctctgatggagattgacgtgtgaaatctatttggaagggtatttttttcactcagtctgttgcattcttacagccttctgttttaatgttcagtgaataggtttcttatgaaatggacattgaaataaaaattatgattcaagagcattaattgatgaacaagtgaacaagatgcctctttaaaaaaaaaaaagaaaaagtaatctagacaggcagccaactcagacctttgggtattcctttgtttctaaataaggaccttcagaaaaagttgaccatattctacctaaagctgctaattctttacagaattcataagcccaggggatagtaagtagtcatttagttttggaaagttcttaagagaatgctatcttctacagtctcatgaagcagtttttcaagattagaatctgtggtcagctataacgtacagtcctaatatccaaccacctgagaagctcatcctaagctgagaaagcctaaaatgttagagaatgtttagagaaaacacctgaaattttttttaagagaacaacctaggttttattgtagagaacaatcaaaatactcctgaacctttctatagaatctttaggagagaggctgacaaaaagaatccttctgttacaactttcttttctaatgtaacaaccagggacaatggtgatctgtcacgcatctgcccatctagcttctcaatcggcccacggttttatttcaggataaaatttgagaaactagtatcactggggaaggaagaaacctaagctgtaaaattatgcttttcccctcaagggattcaataaagcttatttttcatgaaaacaa

SEQ ID NO: 9724 - DNA, 6691 bp, Homo sapiens
  source 1..6691: mol_type = unassigned DNA
cggcggagatcctcgttggggctgggaaactcctgcaaaactcgagaccaggaagccagcccgcaccccaacccccaccaaagccacctactcttcttctgtgggaggccagtccacatccgctctcacccgagagagatattcagctggatccaaagtgactgatgaagggaaggaaatcatgtcaagcgaagccttgaaaaagctgccctgagacggtgtcccgccgaaagaatgttggctcaattaagaaacatcagggagataaattcaacccagtgtgtctaaaaatgactacaaaacgaagtttgtttgtgcggttggtaccatgtcgctgtctacgaggggaagaggagactgtcactactcttgattattctcattgcagcttagaacaagttccgaaagagatttttacttttgaaaaaaccttggaggaactctatttagatgctaatcagattgaagagcttccaaagcaactttttaactgtcagtctttacacaaactgagtttgccagacaatgatttaacaacgttaccagcatccattgcaaaccttattaatctcagggaactggatgtcagcaagaatggaatacaggagtttccagaaaatataaaaaattgtaaagttttgacaattgtggaggccagtgtaaaccctatttccaagctccctgatggattttctcagctgttaaacctaacccagttgtatctgaatgatgcttttcttgagttcttgccagcaaattttggcagattaactaaactccaaatattagagcttagagaaaaccagttaaaaatgttgcctaaaactatgaatagactgacccagctggaaagactggatttgggaagtaacgaattcacggaagtgcctgaagtacttgagcaactaagtggattgaaagagttttggatggatgctaatagactgacttttattccagggtttattggtagtttgaaacagctcacatatttggatgtttctaaaaataatattgaaatggttgaagaaggaatttcaacatgtgaaaaccttcaagacctcctattatcaagcaattcacttcagcagcttcctgagactattggttcgttgaagaatataacaacgcttaaaatagatgaaaaccagttaatgtatctgccagactctataggagggttaatatcagtagaagaactggattgtagtttcaatgaagttgaagctttgccttcatctattgggcagcttactaacttaagaacttttgctgctgatcataattacttacagcagttgcccccagagattggaagctggaaaaatataactgtgctgtttctccattccaataaacttgagacacttccagaggaaatgggtgatatgcaaaaattaaaagtcattaatttaagtgataatagattaaagaatttaccctttagctttacaaagctacagcaattgacagctatgtggctctcagataatcagtccaaacccctgatacctcttcaaaaagaaactgattcagagacccagaaaatggtgcttaccaactacatgttccctcaacagccaaggactgaggatgttatgtttatatcagataatgaaagttttaacccttcattgtgggaggaacagaggaaacagcgggctcaagttgcatttgaatgtgatgaagacaaagatgaaagggaggcacctcccagggagggaaatttaaaaagatatccaacaccatacccagatgagcttaagaatatggtcaaaactgttcaaaccattgtacatagattaaaagatgaagagaccaatgaagactcaggaagagatttgaaaccacatgaagatcaacaagatataaataaagatgtgggtgtgaagacctcagaaagtactactacagtaaaaagcaaagttgatgaaagagaaaaatatatgataggaaactctgtacagaagatcagtgaacctgaagctgagattagtcctgggagtttaccagtgactgcaaatatgaaagcctctgagaacttgaagcatattgttaaccatgatgatgtttttgaggaatctgaagaactttcttctgatgaagagatgaaaatggcggagatgcgaccaccattaattgaaacctctattaaccagccaaaagtcgtagcacttagtaataacaaaaaagatgatacaaaggaaacagattctttatcagatgaagttacacacaatagcaatcagaataacagcaattgttcttctccatctcggatgtctgattcagtttctcttaatactgatagtagtcaagacacctcactctgctctccagtgaaacaaactcatattgatattaattccaaaatcaggcaagaagatgaaaattttaacagccttttacaaaatggagatattttaaacagttcaacagaggaaaagttcaaagctcatgataaaaaagattttaacttacctgaatatgatttgaatgttgaagagcgattagttctaattgagaaaagtgttgactcaacagccacagctgatgacactcacaaattagatcatatcaatatgaatcttaataaacttataactaatgatacatttcaaccagagatcatggaaagatcaaaaacacaggatattgtgcttggaacaagctttttaagcattaattctaaagaggaaactgagcacttggaaaatggaaacaagtatcctaatttggaatccgtaaataaggtaaatggacattctgaggaaacttcccagtctcctaataggactgaaccacatgacagtgattgttctgttgacttaggtatttccaaaagcactgaagatctctcccctcagaaaagtggtccagttggatctgttgtgaaatctcatagcataactaatatggagattggagggctaaaaatctatgatattcttagtgataatggacctcagcagccaagtacaaccgttaaaatcacatctgctgttgatggaaaaaatatagtcaggagcaagtctgccacactgttgtatgatcaaccattgcaggtatttactggttcttcctcatcttctgatttaatatcaggaacaaaggcaattttcaagtttgattcaaatcataatcccgaagagccaaatataataagaggccccacaagtggcccacaatctgcacctcaaatatatggtcctccacagtataatatccaatacagtagcagtgctgcagtcaaagacactttgtggcactccaaacaaaatccccaaatagaccatgccagttttcctcctcagctccttcctagatcagagagcacagaaaatcaaagttatgctaaacattctgccaatatgaatttctctaatcataacaatgttcgagctaatactgcataccatttacatcagagacttggcccagcaagacatggggaaatgtgggccatctcaccaaacgaccgacttattcctgcagtaactcgaagtacaatccagcgacaaagtagtgtgtcctccacagcctctgtaaatcttggtgatccaggctctacaaggcgggctcagattcctgaaggagattatttatcatacagagagttccactcagcgggaagaactcctccaatgatgccaggatcacagagacccctttctgcacgaacatacagcatagatggtccaaatgcatcaagacctcagagtgctcgaccctctattaatgaaataccagagagaactatgtcagttagtgatttcaattattcacggactagtccttcaaaaagaccaaatgcaagggttggttctgagcattctttattagatcctccaggaaaaagtaaagttcctcgtgactggagagaacaagtacttcgacatattgaagccaaaaagttagaaaagattcgagtgagggttgaaaaggatccagaacttggatttagcatatcaggtggtgtcgggggtagaggaaacccattcagacctgatgatgatggtatatttgtaacaagggtacaacctgaaggaccagcatcaaaattactgcagccaggtgataaaattattcaggctaatggctacagttttataaatattgaacatggacaagcagtgtccttgctaaaaactttccagaatacagttgaactcatcattgtacgagaagtttcctcataagcactgtggacaaaaaaagcggggaagacagcaagatttattggaagatacttacaggggaaattaatattttgactatttttatatataaagaagaactcaaaaaattatgttcaaatttgtacattaatgaaataatggaacttgtggttagagggaaagaaccactgtacagaatataaaggagactgttgaattcataccatataaaacttgttaggtttttaaacatagcaatcaaggctacaaaaacaaacctgtgttgtttttgtatagattgtaggtttatttttggatttcatatacatgactgaactgtgtgcaaggcaatagttagccttgattttagcccagagacagatggcagagctatctctctcatagcttttatgcccttatttttattcaactggtattaatgtttttctcctgaaactactttttttgatgtgggcaagagatttgaagtgttggcttttgctatgtgcatattgaattgaagagtgagtaggtgaaggtggtgctggtgggttcactttccaaggccagactaaaacagttattttctataaaaatctggaagcaaagaatggggatggggagagctacgtggtagtatgtttttattaggagaataatgcaataaaatatgtaatgtcttttttataaagcaaaaaagacaataattgcatttatgagctcggcaggatctgttcttgtcatagccattgactatacatttgctactggtgattcagtttttaattttttagtcacaggaaatttttaactctactgtagatgcatgtccatgcattttctgtgttatggaaatccactgatttttttttttttttcaaatggtggtacttgcaatctgttttataattagtgctccatttaaatctaatttataatttttattttaagcagcaaatgaaacaaaaatggccagttttaagattgtgttgcctgtaacacaaaatgttacgaaggtttaggaaagcctctttgatttttgtttggccttgcattgccttggtaaagtaaaaggaaacagtacacttggagctaggaaaccaaagcaagctttgtgaaactggcacagtgatagagaattgctgtggagagttatagagcaaagggatgggtccttgaggcctgccagtgtgtaaaggtgttcaaataaagggctgtttctacaggtaacattaaatgtgaactcaacacttccagagtctttaaagggtttctatgtgtatcagtgtaatagtgttttaccaccaactgcctttctttgttcctagttactgtaacaaatatttgatgatagaggtttattaattttgtttatccagaccattaattttatttgtttttgttctatgtaatcaaataaaatttgagtaacatgtaatggtaaggattaatgcatggttatttggaccagaaaaaagtgccatagaagaccaataactgtttagttgaggctagtctggaacctttcattagagcaatatttggttattgcacttcatttttatttactaagaaatgcaatttgggaatttttaatctgttatgctttgtttatcaaccttgattttaattaagacttttataagactagcttaaaacaccaaccaacattatttttgcaaaagtgagttggactcactttccattcttgctagtcagagtaagtaggcagcacttttaaaaatatgtgaactcaaatattgcacttctttcaagatgttatcaattggttattgtactgtatagttttaataattttgattgaaaccctttaacaactctttgtaaattttaactcattttagttgattttcagtactatttacataggaattgatttttatggatatagtagaagaaatgtgctgtattttgataaaattcacttattgtatgtgtgttgtaatctaaaaaaaaaaagaatgacaaacagcttctttaagacaagtctcggtgttccctttattcttagtttgtttttaaatattaattttggcattctaaaatagctaacatttcttttattgatttcagattttcacaggcacattctacttttaatcagaaatatatttaataagtataattgtgaagttttcaactactttaccttgaaccacatataccaattataattttggaaaaggaattaagcctcacggaacaatggatcttcagcaaaccttaacttcattgtctgcacattacattgaagtattataaatgcaacagatgttatatgcactggcattttatcctactctagttagttaaaattttatagtattcttgcaacacataaagttgcgtaagaaactttaccaagaggagtattatagccaagttttctttgaaagtattggaaaactaaaattaaatgacaaggactttgaattagaattttgctgtaataaagtttcaaaatttgaataaaataattaaattttttgagg

SEQ ID NO: 9725 - DNA, 6805 bp, Homo sapiens
  source 1..6805: mol_type = unassigned DNA
cggcggagatcctcgttggggctgggaaactcctgcaaaactcgagaccaggaagccagcccgcaccccaacccccaccaaagccacctactcttcttctgtgggaggccagtccacatccgctctcacccgagagagatattcagctggatccaaagtgactgatgaagggaaggaaatcatgtcaagcgaagccttgaaaaagctgccctgagacggtgtcccgccgaaagaatgttggctcaattaagaaacatcagggagataaattcaacccagtgtgtctaaaaatgactacaaaacgaagtttgtttgtgcggttggtaccatgtcgctgtctacgaggggaagaggagactgtcactactcttgattattctcattgcagcttagaacaagttccgaaagagatttttacttttgaaaaaaccttggaggaactctatttagatgctaatcagattgaagagcttccaaagcaactttttaactgtcagtctttacacaaactgagtttgccagacaatgatttaacaacgttaccagcatccattgcaaaccttattaatctcagggaactggatgtcagcaagaatggaatacaggagtttccagaaaatataaaaaattgtaaagttttgacaattgtggaggccagtgtaaaccctatttccaagctccctgatggattttctcagctgttaaacctaacccagttgtatctgaatgatgcttttcttgagttcttgccagcaaattttggcagattaactaaactccaaatattagagcttagagaaaaccagttaaaaatgttgcctaaaactatgaatagactgacccagctggaaagactggatttgggaagtaacgaattcacggaagtgcctgaagtacttgagcaactaagtggattgaaagagttttggatggatgctaatagactgacttttattccagggtttattggtagtttgaaacagctcacatatttggatgtttctaaaaataatattgaaatggttgaagaaggaatttcaacatgtgaaaaccttcaagacctcctattatcaagcaattcacttcagcagcttcctgagactattggttcgttgaagaatataacaacgcttaaaatagatgaaaaccagttaatgtatctgccagactctataggagggttaatatcagtagaagaactggattgtagtttcaatgaagttgaagctttgccttcatctattgggcagcttactaacttaagaacttttgctgctgatcataattacttacagcagttgcccccagagattggaagctggaaaaatataactgtgctgtttctccattccaataaacttgagacacttccagaggaaatgggtgatatgcaaaaattaaaagtcattaatttaagtgataatagattaaagaatttaccctttagctttacaaagctacagcaattgacagctatgtggctctcagataatcagtccaaacccctgatacctcttcaaaaagaaactgattcagagacccagaaaatggtgcttaccaactacatgttccctcaacagccaaggactgaggatgttatgtttatatcagataatgaaagttttaacccttcattgtgggaggaacagaggaaacagcgggctcaagttgcatttgaatgtgatgaagacaaagatgaaagggaggcacctcccagggagggaaatttaaaaagatatccaacaccatacccagatgagcttaagaatatggtcaaaactgttcaaaccattgtacatagattaaaagatgaagagaccaatgaagactcaggaagagatttgaaaccacatgaagatcaacaagatataaataaagatgtgggtgtgaagacctcagaaagtactactacagtaaaaagcaaagttgatgaaagagaaaaatatatgataggaaactctgtacagaagatcagtgaacctgaagctgagattagtcctgggagtttaccagtgactgcaaatatgaaagcctctgagaacttgaagcatattgttaaccatgatgatgtttttgaggaatctgaagaactttcttctgatgaagagatgaaaatggcggagatgcgaccaccattaattgaaacctctattaaccagccaaaagtcgtagcacttagtaataacaaaaaagatgatacaaaggaaacagattctttatcagatgaagttacacacaatagcaatcagaataacagcaattgttcttctccatctcggatgtctgattcagtttctcttaatactgatagtagtcaagacacctcactctgctctccagtgaaacaaactcatattgatattaattccaaaatcaggcaagaagatgaaaattttaacagccttttacaaaatggagatattttaaacagttcaacagaggaaaagttcaaagctcatgataaaaaagattttaacttacctgaatatgatttgaatgttgaagagcgattagttctaattgagaaaagtgttgactcaacagccacagctgatgacactcacaaattagatcatatcaatatgaatcttaataaacttataactaatgatacatttcaaccagagatcatggaaagatcaaaaacacaggatattgtgcttggaacaagctttttaagcattaattctaaagaggaaactgagcacttggaaaatggaaacaagtatcctaatttggaatccgtaaataaggtaaatggacattctgaggaaacttcccagtctcctaataggactgaaccacatgacagtgattgttctgttgacttaggtatttccaaaagcactgaagatctctcccctcagaaaagtggtccagttggatctgttgtgaaatctcatagcataactaatatggagattggagggctaaaaatctatgatattcttagtgataatggacctcagcagccaagtacaaccgttaaaatcacatctgctgttgatggaaaaaatatagtcaggagcaagtctgccacactgttgtatgatcaaccattgcaggtatttactggttcttcctcatcttctgatttaatatcaggaacaaaggcaattttcaagtttgattcaaatcataatcccgaagagccaaatataataagaggccccacaagtggcccacaatctgcacctcaaatatatggtcctccacagtataatatccaatacagtagcagtgctgcagtcaaagacactttgtggcactccaaacaaaatccccaaatagaccatgccagttttcctcctcagctccttcctagatcagagagcacagaaaatcaaagttatgctaaacattctgccaatatgaatttctctaatcataacaatgttcgagctaatactgcataccatttacatcagagacttggcccagcaagacatggggaaatgtgggccatctcaccaaacgaccgacttattcctgcagtaactcgaagtacaatccagcgacaaagtagtgtgtcctccacagcctctgtaaatcttggtgatccaggctctacaaggcgggctcagattcctgaaggagattatttatcatacagagagttccactcagcgggaagaactcctccaatgatgccaggatcacagagacccctttctgcacgaacatacagcatagatggtccaaatgcatcaagacctcagagtgctcgaccctctattaatgaaataccagagagaactatgtcagttagtgatttcaattattcacggactagtccttcaaaaagaccaaatgcaagggttggttctgagcattctttattagatcctccaggaaaaagtaaagttcctcgtgactggagagaacaagtacttcgacatattgaagccaaaaagttagaaaagatgcctttgagtaatggacagatgggccagcctctcaggcctcaggcaaattatagtcaaatacatcacccccctcaggcatctgtggcaaggcatccctctagagaacaactaattgattacttgatgctgaaagtggcccaccagcctccatatacacagccccattgttctcctagacaaggccatgaactggcaaaacaagagggtatatttgtaacaagggtacaacctgaaggaccagcatcaaaattactgcagccaggtgataaaattattcaggctaatggctacagttttataaatattgaacatggacaagcagtgtccttgctaaaaactttccagaatacagttgaactcatcattgtacgagaagtttcctcataagcactgtggacaaaaaaagcggggaagacagcaagatttattggaagatacttacaggggaaattaatattttgactatttttatatataaagaagaactcaaaaaattatgttcaaatttgtacattaatgaaataatggaacttgtggttagagggaaagaaccactgtacagaatataaaggagactgttgaattcataccatataaaacttgttaggtttttaaacatagcaatcaaggctacaaaaacaaacctgtgttgtttttgtatagattgtaggtttatttttggatttcatatacatgactgaactgtgtgcaaggcaatagttagccttgattttagcccagagacagatggcagagctatctctctcatagcttttatgcccttatttttattcaactggtattaatgtttttctcctgaaactactttttttgatgtgggcaagagatttgaagtgttggcttttgctatgtgcatattgaattgaagagtgagtaggtgaaggtggtgctggtgggttcactttccaaggccagactaaaacagttattttctataaaaatctggaagcaaagaatggggatggggagagctacgtggtagtatgtttttattaggagaataatgcaataaaatatgtaatgtcttttttataaagcaaaaaagacaataattgcatttatgagctcggcaggatctgttcttgtcatagccattgactatacatttgctactggtgattcagtttttaattttttagtcacaggaaatttttaactctactgtagatgcatgtccatgcattttctgtgttatggaaatccactgatttttttttttttttcaaatggtggtacttgcaatctgttttataattagtgctccatttaaatctaatttataatttttattttaagcagcaaatgaaacaaaaatggccagttttaagattgtgttgcctgtaacacaaaatgttacgaaggtttaggaaagcctctttgatttttgtttggccttgcattgccttggtaaagtaaaaggaaacagtacacttggagctaggaaaccaaagcaagctttgtgaaactggcacagtgatagagaattgctgtggagagttatagagcaaagggatgggtccttgaggcctgccagtgtgtaaaggtgttcaaataaagggctgtttctacaggtaacattaaatgtgaactcaacacttccagagtctttaaagggtttctatgtgtatcagtgtaatagtgttttaccaccaactgcctttctttgttcctagttactgtaacaaatatttgatgatagaggtttattaattttgtttatccagaccattaattttatttgtttttgttctatgtaatcaaataaaatttgagtaacatgtaatggtaaggattaatgcatggttatttggaccagaaaaaagtgccatagaagaccaataactgtttagttgaggctagtctggaacctttcattagagcaatatttggttattgcacttcatttttatttactaagaaatgcaatttgggaatttttaatctgttatgctttgtttatcaaccttgattttaattaagacttttataagactagcttaaaacaccaaccaacattatttttgcaaaagtgagttggactcactttccattcttgctagtcagagtaagtaggcagcacttttaaaaatatgtgaactcaaatattgcacttctttcaagatgttatcaattggttattgtactgtatagttttaataattttgattgaaaccctttaacaactctttgtaaattttaactcattttagttgattttcagtactatttacataggaattgatttttatggatatagtagaagaaatgtgctgtattttgataaaattcacttattgtatgtgtgttgtaatctaaaaaaaaaaagaatgacaaacagcttctttaagacaagtctcggtgttccctttattcttagtttgtttttaaatattaattttggcattctaaaatagctaacatttcttttattgatttcagattttcacaggcacattctacttttaatcagaaatatatttaataagtataattgtgaagttttcaactactttaccttgaaccacatataccaattataattttggaaaaggaattaagcctcacggaacaatggatcttcagcaaaccttaacttcattgtctgcacattacattgaagtattataaatgcaacagatgttatatgcactggcattttatcctactctagttagttaaaattttatagtattcttgcaacacataaagttgcgtaagaaactttaccaagaggagtattatagccaagttttctttgaaagtattggaaaactaaaattaaatgacaaggactttgaattagaattttgctgtaataaagtttcaaaatttgaataaaataattaaattttttgagg

SEQ ID NO: 9726 - DNA, 4701 bp, Homo sapiens
  source 1..4701: mol_type = unassigned DNA
aaaactcgagaccaggaagccagcccgcaccccaacccccaccaaagccacctactcttcttctgtgggaggccagtccacatccgctctcacccgagagagatattcagctggatccaaagtgactgatgaagggaaggaaatcatgtcaagcgaagccttgaaaaagctgccctgagacggtgtcccgccgaaagaatgttggctcaattaagaaacatcagggagataaattcaacccagtgtgtctaaaaatgactacaaaacgaagtttgtttgtgcggttggtaccatgtcgctgtctacgaggggaagaggagactgtcactactcttgattattctcattgcagcttagaacaagttccgaaagagatttttacttttgaaaaaaccttggaggaactctatttagatgctaatcagattgaagagcttccaaagcaactttttaactgtcagtctttacacaaactgagtttgccagacaatgatttaacaacgttaccagcatccattgcaaaccttattaatctcagggaactggatgtcagcaagaatggaatacaggagtttccagaaaatataaaaaattgtaaagttttgacaattgtggaggccagtgtaaaccctatttccaagctccctgatggattttctcagctgttaaacctaacccagttgtatctgaatgatgcttttcttgagttcttgccagcaaattttggcagattaactaaactccaaatattagagcttagagaaaaccagttaaaaatgttgcctaaaactatgaatagactgacccagctggaaagactggatttgggaagtaacgaattcacggaagtgcctgaagtacttgagcaactaagtggattgaaagagttttggatggatgctaatagactgacttttattccagggtttattggtagtttgaaacagctcacatatttggatgtttctaaaaataatattgaaatggttgaagaaggaatttcaacatgtgaaaaccttcaagacctcctattatcaagcaattcacttcagcagcttcctgagactattggttcgttgaagaatataacaacgcttaaaatagatgaaaaccagttaatgtatctgccagactctataggagggttaatatcagtagaagaactggattgtagtttcaatgaagttgaagctttgccttcatctattgggcagcttactaacttaagaacttttgctgctgatcataattacttacagcagttgcccccagagattggaagctggaaaaatataactgtgctgtttctccattccaataaacttgagacacttccagaggaaatgggtgatatgcaaaaattaaaagtcattaatttaagtgataatagattaaagaatttaccctttagctttacaaagctacagcaattgacagctatgtggctctcagataatcagtccaaacccctgatacctcttcaaaaagaaactgattcagagacccagaaaatggtgcttaccaactacatgttccctcaacagccaaggactgaggatgttatgtttatatcagataatgaaagttttaacccttcattgtgggaggaacagaggaaacagcgggctcaagttgcatttgaatgtgatgaagacaaagatgaaagggaggcacctcccagggagggaaatttaaaaagatatccaacaccatacccagatgagcttaagaatatggtcaaaactgttcaaaccattgtacatagattaaaagatgaagagaccaatgaagactcaggaagagatttgaaaccacatgaagatcaacaagatataaataaagatgtgggtgtgaagacctcagaaagtactactacagtaaaaagcaaagttgatgaaagagaaaaatatatgataggaaactctgtacagaagatcagtgaacctgaagctgagattagtcctgggagtttaccagtgactgcaaatatgaaagcctctgagaacttgaagcatattgttaaccatgatgatgtttttgaggaatctgaagaactttcttctgatgaagagatgaaaatggcggagatgcgaccaccattaattgaaacctctattaaccagccaaaagtcgtagcacttagtaataacaaaaaagatgatacaaaggaaacagattctttatcagatgaagttacacacaatagcaatcagaataacagcaattgttcttctccatctcggatgtctgattcagtttctcttaatactgatagtagtcaagacacctcactctgctctccagtgaaacaaactcatattgatattaattccaaaatcaggcaagaagatgaaaattttaacagccttttacaaaatggagatattttaaacagttcaacagaggaaaagttcaaagctcatgataaaaaagattttaacttacctgaatatgatttgaatgttgaagagcgattagttctaattgagaaaagtgttgactcaacagccacagctgatgacactcacaaattagatcatatcaatatgaatcttaataaacttataactaatgatacatttcaaccagagatcatggaaagatcaaaaacacaggatattgtgcttggaacaagctttttaagcattaattctaaagaggaaactgagcacttggaaaatggaaacaagtatcctaatttggaatccgtaaataaggtaaatggacattctgaggaaacttcccagtctcctaataggactgaaccacatgacagtgattgttctgttgacttaggtatttccaaaagcactgaagatctctcccctcagaaaagtggtccagttggatctgttgtgaaatctcatagcataactaatatggagattggagggctaaaaatctatgatattcttagtgataatggacctcagcagccaagtacaaccgttaaaatcacatctgctgttgatggaaaaaatatagtcaggagcaagtctgccacactgttgtatgatcaaccattgcaggtatttactggttcttcctcatcttctgatttaatatcaggaacaaaggcaattttcaagtttgattcaaatcataatcccgaagagccaaatataataagaggccccacaagtggcccacaatctgcacctcaaatatatggtcctccacagtataatatccaatacagtagcagtgctgcagtcaaagacactttgtggcactccaaacaaaatccccaaatagaccatgccagttttcctcctcagctccttcctagatcagagagcacagaaaatcaaagttatgctaaacattctgccaatatgaatttctctaatcataacaatgttcgagctaatactgcataccatttacatcagagacttggcccagcaagacatggggaaatgtgggccatctcaccaaacgaccgacttattcctgcagtaactcgaagtacaatccagcgacaaagtagtgtgtcctccacagcctctgtaaatcttggtgatccaggctctacaaggcgggctcagattcctgaaggagattatttatcatacagagagttccactcagcgggaagaactcctccaatgatgccaggatcacagagacccctttctgcacgaacatacagcatagatggtccaaatgcatcaagacctcagagtgctcgaccctctattaatgaaataccagagagaactatgtcagttagtgatttcaattattcacggactagtccttcaaaaagaccaaatgcaagggttggttctgagcattctttattagatcctccaggaaaaagtaaagttcctcgtgactggagagaacaagtacttcgacatattgaagccaaaaagttagaaaagatgcctttgagtaatggacagatgggccagcctctcaggcctcaggcaaattatagtcaaatacatcacccccctcaggcatctgtggcaaggcatccctctagagaacaactaattgattacttgatgctgaaagtggcccaccagcctccatatacacagccccattgttctcctagacaaggccatgaactggcaaaacaagagattcgagtgagggttgaaaaggatccagaacttggatttagcatatcaggtggtgtcgggggtagaggaaacccattcagacctgatgatgatgctaatggctacagttttataaatattgaacatggacaagcagtgtccttgctaaaaactttccagaatacagttgaactcatcattgtacgagaagtttcctcataagcactgtggacaaaaaaagcggggaagacagcaagatttattggaagatacttacaggggaaattaatattttgactatttttatatataaagaagaactcaaaaaattatgttcaaatttgtacattaatgaaataatggaacttgtggttagagggaaagaaccactgtacagaatataaaggagactgttgaattcataccatataaaacttgttaggtttttaaacatagcaatcaaggctacaaaaacaaacctgtgttgtttttgtatagattgtaggtttatttttggatttcatatacatgactgaactgtgtgcaaggcaatagttagccttgattttagcccagagacagatggcagagctatctctctcatagcttttatgcccttatttttatt

SEQ ID NO: 9727 - DNA, 6865 bp, Homo sapiens
  source 1..6865: mol_type = unassigned DNA
cggcggagatcctcgttggggctgggaaactcctgcaaaactcgagaccaggaagccagcccgcaccccaacccccaccaaagccacctactcttcttctgtgggaggccagtccacatccgctctcacccgagagagatattcagctggatccaaagtgactgatgaagggaaggaaatcatgtcaagcgaagccttgaaaaagctgccctgagacggtgtcccgccgaaagaatgttggctcaattaagaaacatcagggagataaattcaacccagtgtgtctaaaaatgactacaaaacgaagtttgtttgtgcggttggtaccatgtcgctgtctacgaggggaagaggagactgtcactactcttgattattctcattgcagcttagaacaagttccgaaagagatttttacttttgaaaaaaccttggaggaactctatttagatgctaatcagattgaagagcttccaaagcaactttttaactgtcagtctttacacaaactgagtttgccagacaatgatttaacaacgttaccagcatccattgcaaaccttattaatctcagggaactggatgtcagcaagaatggaatacaggagtttccagaaaatataaaaaattgtaaagttttgacaattgtggaggccagtgtaaaccctatttccaagctccctgatggattttctcagctgttaaacctaacccagttgtatctgaatgatgcttttcttgagttcttgccagcaaattttggcagattaactaaactccaaatattagagcttagagaaaaccagttaaaaatgttgcctaaaactatgaatagactgacccagctggaaagactggatttgggaagtaacgaattcacggaagtgcctgaagtacttgagcaactaagtggattgaaagagttttggatggatgctaatagactgacttttattccagggtttattggtagtttgaaacagctcacatatttggatgtttctaaaaataatattgaaatggttgaagaaggaatttcaacatgtgaaaaccttcaagacctcctattatcaagcaattcacttcagcagcttcctgagactattggttcgttgaagaatataacaacgcttaaaatagatgaaaaccagttaatgtatctgccagactctataggagggttaatatcagtagaagaactggattgtagtttcaatgaagttgaagctttgccttcatctattgggcagcttactaacttaagaacttttgctgctgatcataattacttacagcagttgcccccagagattggaagctggaaaaatataactgtgctgtttctccattccaataaacttgagacacttccagaggaaatgggtgatatgcaaaaattaaaagtcattaatttaagtgataatagattaaagaatttaccctttagctttacaaagctacagcaattgacagctatgtggctctcagataatcagtccaaacccctgatacctcttcaaaaagaaactgattcagagacccagaaaatggtgcttaccaactacatgttccctcaacagccaaggactgaggatgttatgtttatatcagataatgaaagttttaacccttcattgtgggaggaacagaggaaacagcgggctcaagttgcatttgaatgtgatgaagacaaagatgaaagggaggcacctcccagggagggaaatttaaaaagatatccaacaccatacccagatgagcttaagaatatggtcaaaactgttcaaaccattgtacatagattaaaagatgaagagaccaatgaagactcaggaagagatttgaaaccacatgaagatcaacaagatataaataaagatgtgggtgtgaagacctcagaaagtactactacagtaaaaagcaaagttgatgaaagagaaaaatatatgataggaaactctgtacagaagatcagtgaacctgaagctgagattagtcctgggagtttaccagtgactgcaaatatgaaagcctctgagaacttgaagcatattgttaaccatgatgatgtttttgaggaatctgaagaactttcttctgatgaagagatgaaaatggcggagatgcgaccaccattaattgaaacctctattaaccagccaaaagtcgtagcacttagtaataacaaaaaagatgatacaaaggaaacagattctttatcagatgaagttacacacaatagcaatcagaataacagcaattgttcttctccatctcggatgtctgattcagtttctcttaatactgatagtagtcaagacacctcactctgctctccagtgaaacaaactcatattgatattaattccaaaatcaggcaagaagatgaaaattttaacagccttttacaaaatggagatattttaaacagttcaacagaggaaaagttcaaagctcatgataaaaaagattttaacttacctgaatatgatttgaatgttgaagagcgattagttctaattgagaaaagtgttgactcaacagccacagctgatgacactcacaaattagatcatatcaatatgaatcttaataaacttataactaatgatacatttcaaccagagatcatggaaagatcaaaaacacaggatattgtgcttggaacaagctttttaagcattaattctaaagaggaaactgagcacttggaaaatggaaacaagtatcctaatttggaatccgtaaataaggtaaatggacattctgaggaaacttcccagtctcctaataggactgaaccacatgacagtgattgttctgttgacttaggtatttccaaaagcactgaagatctctcccctcagaaaagtggtccagttggatctgttgtgaaatctcatagcataactaatatggagattggagggctaaaaatctatgatattcttagtgataatggacctcagcagccaagtacaaccgttaaaatcacatctgctgttgatggaaaaaatatagtcaggagcaagtctgccacactgttgtatgatcaaccattgcaggtatttactggttcttcctcatcttctgatttaatatcaggaacaaaggcaattttcaagtttgattcaaatcataatcccgaagagccaaatataataagaggccccacaagtggcccacaatctgcacctcaaatatatggtcctccacagtataatatccaatacagtagcagtgctgcagtcaaagacactttgtggcactccaaacaaaatccccaaatagaccatgccagttttcctcctcagctccttcctagatcagagagcacagaaaatcaaagttatgctaaacattctgccaatatgaatttctctaatcataacaatgttcgagctaatactgcataccatttacatcagagacttggcccagcaagacatggggaaatgtgggccatctcaccaaacgaccgacttattcctgcagtaactcgaagtacaatccagcgacaaagtagtgtgtcctccacagcctctgtaaatcttggtgatccaggctctacaaggcgggctcagattcctgaaggagattatttatcatacagagagttccactcagcgggaagaactcctccaatgatgccaggatcacagagacccctttctgcacgaacatacagcatagatggtccaaatgcatcaagacctcagagtgctcgaccctctattaatgaaataccagagagaactatgtcagttagtgatttcaattattcacggactagtccttcaaaaagaccaaatgcaagggttggttctgagcattctttattagatcctccaggaaaaagtaaagttcctcgtgactggagagaacaagtacttcgacatattgaagccaaaaagttagaaaagatgcctttgagtaatggacagatgggccagcctctcaggcctcaggcatctgtggcaaggcatccctctagagaacaactaattgattacttgatgctgaaagtggcccaccagcctccatatacacagccccattgttctcctagacaaggccatgaactggcaaaacaagagattcgagtgagggttgaaaaggatccagaacttggatttagcatatcaggtggtgtcgggggtagaggaaacccattcagacctgatgatgatggtatatttgtaacaagggtacaacctgaaggaccagcatcaaaattactgcagccaggtgataaaattattcaggctaatggctacagttttataaatattgaacatggacaagcagtgtccttgctaaaaactttccagaatacagttgaactcatcattgtacgagaagtttcctcataagcactgtggacaaaaaaagcggggaagacagcaagatttattggaagatacttacaggggaaattaatattttgactatttttatatataaagaagaactcaaaaaattatgttcaaatttgtacattaatgaaataatggaacttgtggttagagggaaagaaccactgtacagaatataaaggagactgttgaattcataccatataaaacttgttaggtttttaaacatagcaatcaaggctacaaaaacaaacctgtgttgtttttgtatagattgtaggtttatttttggatttcatatacatgactgaactgtgtgcaaggcaatagttagccttgattttagcccagagacagatggcagagctatctctctcatagcttttatgcccttatttttattcaactggtattaatgtttttctcctgaaactactttttttgatgtgggcaagagatttgaagtgttggcttttgctatgtgcatattgaattgaagagtgagtaggtgaaggtggtgctggtgggttcactttccaaggccagactaaaacagttattttctataaaaatctggaagcaaagaatggggatggggagagctacgtggtagtatgtttttattaggagaataatgcaataaaatatgtaatgtcttttttataaagcaaaaaagacaataattgcatttatgagctcggcaggatctgttcttgtcatagccattgactatacatttgctactggtgattcagtttttaattttttagtcacaggaaatttttaactctactgtagatgcatgtccatgcattttctgtgttatggaaatccactgatttttttttttttttcaaatggtggtacttgcaatctgttttataattagtgctccatttaaatctaatttataatttttattttaagcagcaaatgaaacaaaaatggccagttttaagattgtgttgcctgtaacacaaaatgttacgaaggtttaggaaagcctctttgatttttgtttggccttgcattgccttggtaaagtaaaaggaaacagtacacttggagctaggaaaccaaagcaagctttgtgaaactggcacagtgatagagaattgctgtggagagttatagagcaaagggatgggtccttgaggcctgccagtgtgtaaaggtgttcaaataaagggctgtttctacaggtaacattaaatgtgaactcaacacttccagagtctttaaagggtttctatgtgtatcagtgtaatagtgttttaccaccaactgcctttctttgttcctagttactgtaacaaatatttgatgatagaggtttattaattttgtttatccagaccattaattttatttgtttttgttctatgtaatcaaataaaatttgagtaacatgtaatggtaaggattaatgcatggttatttggaccagaaaaaagtgccatagaagaccaataactgtttagttgaggctagtctggaacctttcattagagcaatatttggttattgcacttcatttttatttactaagaaatgcaatttgggaatttttaatctgttatgctttgtttatcaaccttgattttaattaagacttttataagactagcttaaaacaccaaccaacattatttttgcaaaagtgagttggactcactttccattcttgctagtcagagtaagtaggcagcacttttaaaaatatgtgaactcaaatattgcacttctttcaagatgttatcaattggttattgtactgtatagttttaataattttgattgaaaccctttaacaactctttgtaaattttaactcattttagttgattttcagtactatttacataggaattgatttttatggatatagtagaagaaatgtgctgtattttgataaaattcacttattgtatgtgtgttgtaatctaaaaaaaaaaagaatgacaaacagcttctttaagacaagtctcggtgttccctttattcttagtttgtttttaaatattaattttggcattctaaaatagctaacatttcttttattgatttcagattttcacaggcacattctacttttaatcagaaatatatttaataagtataattgtgaagttttcaactactttaccttgaaccacatataccaattataattttggaaaaggaattaagcctcacggaacaatggatcttcagcaaaccttaacttcattgtctgcacattacattgaagtattataaatgcaacagatgttatatgcactggcattttatcctactctagttagttaaaattttatagtattcttgcaacacataaagttgcgtaagaaactttaccaagaggagtattatagccaagttttctttgaaagtattggaaaactaaaattaaatgacaaggactttgaattagaattttgctgtaataaagtttcaaaatttgaataaaataattaaattttttgagg

SEQ ID NO: 9728 - DNA, 6410 bp, Homo sapiens
  source 1..6410: mol_type = unassigned DNA
ttttgtttttttttttttcggcggagatcctcgttggggctgggaaactcctgcaaaactcgagaccaggaagccagcccgcaccccaacccccaccaaagccacctactcttcttctgtgggaggccagtccacatccgctctcacccgagagagatattcagctggatccaaagtgactgatgaagggaaggaaatcatgtcaagcgaagccttgaaaaagctgccctgagacggtgtcccgccgaaagaatgttggctcaattaagaaacatcagggagataaattcaacccagtgtgtctaaaaatgactacaaaacgaagtttgtttgtgcggttggtaccatgtcgctgtctacgaggggaagaggagactgtcactactcttgattattctcattgcagcttagaacaagttccgaaagagatttttacttttgaaaaaaccttggaggaactctatttagatgctaatcagattgaagagcttccaaagcaactttttaactgtcagtctttacacaaactgagtttgccagacaatgatttaacaacgttaccagcatccattgcaaaccttattaatctcagggaactggatgtcagcaagaatggaatacaggagtttccagaaaatataaaaaattgtaaagttttgacaattgtggaggccagtgtaaaccctatttccaagctccctgatggattttctcagctgttaaacctaacccagttgtatctgaatgatgcttttcttgagttcttgccagcaaattttggcagattaactaaactccaaatattagagcttagagaaaaccagttaaaaatgttgcctaaaactatgaatagactgacccagctggaaagactggatttgggaagtaacgaattcacggaagtgcctgaagtacttgagcaactaagtggattgaaagagttttggatggatgctaatagactgacttttattccagggtttattggtagtttgaaacagctcacatatttggatgtttctaaaaataatattgaaatggttgaagaaggaatttcaacatgtgaaaaccttcaagacctcctattatcaagcaattcacttcagcagcttcctgagactattggttcgttgaagaatataacaacgcttaaaatagatgaaaaccagttaatgtatctgccagactctataggagggttaatatcagtagaagaactggattgtagtttcaatgaagttgaagctttgccttcatctattgggcagcttactaacttaagaacttttgctgctgatcataattacttacagcagttgcccccagagattggaagctggaaaaatataactgtgctgtttctccattccaataaacttgagacacttccagaggaaatgggtgatatgcaaaaattaaaagtcattaatttaagtgataatagattaaagaatttaccctttagctttacaaagctacagcaattgacagctatgtggctctcagataatcagtccaaacccctgatacctcttcaaaaagaaactgattcagagacccagaaaatggtgcttaccaactacatgttccctcaacagccaaggactgaggatgttatgtttatatcagataatgaaagttttaacccttcattgtgggaggaacagaggaaacagcgggctcaagttgcatttgaatgtgatgaagacaaagatgaaagggaggcacctcccagggagggaaatttaaaaagatatccaacaccatacccagatgagcttaagaatatggtcaaaactgttcaaaccattgtacatagattaaaagatgaagagaccaatgaagactcaggaagagatttgaaaccacatgaagatcaacaagatataaataaagatgtgggtgtgaagacctcagaaagtactactacagtaaaaagcaaagttgatgaaagagaaaaatatatgataggaaactctgtacagaagatcagtgaacctgaagctgagattagtcctgggagtttaccagtgactgcaaatatgaaagcctctgagaacttgaagcatattgttaaccatgatgatgtttttgaggaatctgaagaactttcttctgatgaagagatgaaaatggcggagatgcgaccaccattaattgaaacctctattaaccagccaaaagtcgtagcacttagtaataacaaaaaagatgatacaaaggaaacagattctttatcagatgaagttacacacaatagcaatcagaataacagcaattgttcttctccatctcggatgtctgattcagtttctcttaatactgatagtagtcaagacacctcactctgctctccagtgaaacaaactcatattgatattaattccaaaatcaggcaagaagatgaaaattttaacagccttttacaaaatggagatattttaaacagttcaacagaggaaaagttcaaagctcatgataaaaaagattttaacttacctgaatatgatttgaatgttgaagagcgattagttctaattgagaaaagtgttgactcaacagccacagctgatgacactcacaaattagatcatatcaatatgaatcttaataaacttataactaatgatacatttcaaccagagatcatggaaagatcaaaaacacaggatattgtgcttggaacaagctttttaagcattaattctaaagaggaaactgagcacttggaaaatggaaacaagtatcctaatttggaatccgtaaataaggtaaatggacattctgaggaaacttcccagtctcctaataggactgaaccacatgacagtgattgttctgttgacttaggtatttccaaaagcactgaagatctctcccctcagaaaagtggtccagttggatctgttgtgaaatctcatagcataactaatatggagattggagggctaaaaatctatgatattcttagtgataatggacctcagcagccaagtacaaccgttaaaatcacatctgctgttgatggaaaaaatatagtcaggagcaagtctgccacactgttgtatgatcaaccattgcaggtatttactggttcttcctcatcttctgatttaatatcaggaacaaaggcaattttcaagtttgattcaaatcataatcccgaagagccaaatataataagaggccccacaagtggcccacaatctgcacctcaaatatatggtcctccacagtataatatccaatacagtagcagtgctgcagtcaaagacactttgtggcactccaaacaaaatccccaaatagaccatgccagttttcctcctcagctccttcctagatcagagagcacagaaaatcaaagttatgctaaacattctgccaatatgaatttctctaatcataacaatgttcgagctaatactgcataccatttacatcagagacttggcccagcaagacatggggaaatgtgggccatctcaccaaacgaccgacttattcctgcagtaactcgaagtacaatccagcgacaaagtagtgtgtcctccacagcctctgtaaatcttggtgatccaggctctacaaggcgggctcagattcctgaaggagattatttatcatacagagagttccactcagcgggaagaactcctccaatgatgccaggatcacagagacccctttctgcacgaacatacagcatagatggtccaaatgcatcaagacctcagagtgctcgaccctctattaatgaaataccagagagaactatgtcagttagtgatttcaattattcacggactagtccttcaaaaagaccaaatgcaagggttggttctgagcattctttattagatcctccaggaaaaagtaaagttcctcgtgactggagagaacaagtacttcgacatattgaagccaaaaagttagaaaagatgcctttgagtaatggacagatgggccagcctctcaggcctcaggcaaattatagtcaaatacatcacccccctcaggcatctgtggcaaggcatccctctagagaacaactaattgattacttgatgctgaaagtggcccaccagcctccatatacacagccccattgttctcctagacaaggccatgaactggcaaaacaagagattcgagtgagggttgaaaaggatccagaacttggatttagcatatcaggtggtgtcgggggtagaggaaacccattcagacctgatgatgatggtatatttgtaacaagggtacaacctgaaggaccagcatcaaaattactgcagccaggtgataaaattattcaggctaatggctacagttttataaatattgaacatggacaagcagtgtccttgctaaaaactttccagaatacagttgaactcatcattgtacgagaagtttcctcataagcactgtggacaaaaaaagcggggaagacagcaagatttattggaagatacttacaggggaaattaatattttgactatttttatatataaagaagaactcaaaaaattatgttcaaatttgtacattaatgaaataatggaacttgtggttagagggaaagaaccactgtacagaatataaaggagactgttgaattcataccatataaaacttgttaggtttttaaacatagcaatcaaggctacaaaaacaaacctgtgttgtttttgtatagattgtaggtttatttttggatttcatatacatgactgaactgtgtgcaaggcaatagttagccttgattttagcccagagacagatggcagagctatctctctcatagcttttatgcccttatttttattcaactggtattaatgtttttctcctgaaactactttttttgatgtgggcaagagatttgaagtgttggcttttgctatgtgcatattgaattgaagagtgagtaggtgaaggtggtgctggtgggttcactttccaaggccagactaaaacagttattttctataaaaatctggaagcaaagaatggggatggggagagctacgtggtagtatgtttttattaggagaataatgcaataaaatatgtaatgtcttttttataaagcaaaaaagacaataattgcatttatgagctcggcaggatctgttcttgtcatagccattgactatacatttgctactggtgattcagtttttaattttttagtcacaggaaatttttaactctactgtagatgcatgtccatgcattttctgtgttatggaaatccactgatttttttttttttttcaaatggtggtacttgcaatctgttttataattagtgctccatttaaatctaatttataatttttattttaagcagcaaatgaaacaaaaatggccagttttaagattgtgttgcctgtaacacaaaatgttacgaaggtttaggaaagcctctttgatttttgtttggccttgcattgccttggtaaagtaaaaggaaacagtacacttggagctaggaaaccaaagcaagctttgtgaaactggcacagtgatagagaattgctgtggagagttatagagcaaagggatgggtccttgaggcctgccagtgtgtaaaggtgttcaaataaagggctgtttctacaggtaacattaaatgtgaactcaacacttccagagtctttaaagggtttctatgtgtatcagtgtaatagtgttttaccaccaactgcctttctttgttcctagttactgtaacaaatatttgatgatagaggtttattaattttgtttatccagaccattaattttatttgtttttgttctatgtaatcaaataaaatttgagtaacatgtaatggtaaggattaatgcatggttatttggaccagaaaaaagtgccatagaagaccaataactgtttagttgaggctagtctggaacctttcattagagcaatatttggttattgcacttcatttttatttactaagaaatgcaatttgggaatttttaatctgttatgctttgtttatcaaccttgattttaattaagacttttataagactagcttaaaacaccaaccaacattatttttgcaaaagtgagttggactcactttccattcttgctagtcagagtaagtaggcagcacttttaaaaatatgtgaactcaaatattgcacttctttcaagatgttatcaattggttattgtactgtatagttttaataattttgattgaaaccctttaacaactctttgtaaattttaactcattttagttgattttcagtactatttacataggaattgatttttatggatatagtagaagaaatgtgctgtattttgataaaattcacttattgtatgtgtgttgtaatctaaaaaaaaaaagaatgacaaacagcttctttaagacaa

SEQ ID NO: 9729 - DNA, 4374 bp, Homo sapiens
  source 1..4374: mol_type = unassigned DNA
agaatgttggctcaattaagaaacatcagggagataaattcaacccagtgtgtctaaaaatgactacaaaacgaagtttgtttgtgcggttggtaccatgtcgctgtctacgaggggaagaggagactgtcactactcttgattattctcattgcagcttagaacaagttccgaaagagatttttacttttgaaaaaaccttggaggaactctatttagatgctaatcagattgaagagcttccaaagcaactttttaactgtcagtctttacacaaactgagtttgccagacaatgatttaacaacgttaccagcatccattgcaaaccttattaatctcagggaactggatgtcagcaagaatggaatacaggagtttccagaaaatataaaaaattgtaaagttttgacaattgtggaggccagtgtaaaccctatttccaagctccctgatggattttctcagctgttaaacctaacccagttgtatctgaatgatgcttttcttgagttcttgccagcaaattttggcagattaactaaactccaaatattagagcttagagaaaaccagttaaaaatgttgcctaaaactatgaatagactgacccagctggaaagactggatttgggaagtaacgaattcacggaagtgcctgaagtacttgagcaactaagtggattgaaagagttttggatggatgctaatagactgacttttattccagggtttattggtagtttgaaacagctcacatatttggatgtttctaaaaataatattgaaatggttgaagaaggaatttcaacatgtgaaaaccttcaagacctcctattatcaagcaattcacttcagcagcttcctgagactattggttcgttgaagaatataacaacgcttaaaatagatgaaaaccagttaatgtatctgccagactctataggagggttaatatcagtagaagaactggattgtagtttcaatgaagttgaagctttgccttcatctattgggcagcttactaacttaagaacttttgctgctgatcataattacttacagcagttgcccccagagattggaagctggaaaaatataactgtgctgtttctccattccaataaacttgagacacttccagaggaaatgggtgatatgcaaaaattaaaagtcattaatttaagtgataatagattaaagaatttaccctttagctttacaaagctacagcaattgacagctatgtggctctcagataatcagtccaaacccctgatacctcttcaaaaagaaactgattcagagacccagaaaatggtgcttaccaactacatgttccctcaacagccaaggactgaggatgttatgtttatatcagataatgaaagttttaacccttcattgtgggaggaacagaggaaacagcgggctcaagttgcatttgaatgtgatgaagacaaagatgaaagggaggcacctcccagggagggaaatttaaaaagatatccaacaccatacccagatgagcttaagaatatggtcaaaactgttcaaaccattgtacatagattaaaagatgaagagaccaatgaagactcaggaagagatttgaaaccacatgaagatcaacaagatataaataaagatgtgggtgtgaagacctcagaaagtactactacagtaaaaagcaaagttgatgaaagagaaaaatatatgataggaaactctgtacagaagatcagtgaacctgaagctgagattagtcctgggagtttaccagtgactgcaaatatgaaagcctctgagaacttgaagcatattgttaaccatgatgatgtttttgaggaatctgaagaactttcttctgatgaagagatgaaaatggcggagatgcgaccaccattaattgaaacctctattaaccagccaaaagtcgtagcacttagtaataacaaaaaagatgatacaaaggaaacagattctttatcagatgaagttacacacaatagcaatcagaataacagcaattgttcttctccatctcggatgtctgattcagtttctcttaatactgatagtagtcaagacacctcactctgctctccagtgaaacaaactcatattgatattaattccaaaatcaggcaagaagatgaaaattttaacagccttttacaaaatggagatattttaaacagttcaacagaggaaaagttcaaagctcatgataaaaaagattttaacttacctgaatatgatttgaatgttgaagagcgattagttctaattgagaaaagtgttgactcaacagccacagctgatgacactcacaaattagatcatatcaatatgaatcttaataaacttataactaatgatacatttcaaccagagatcatggaaagatcaaaaacacaggatattgtgcttggaacaagctttttaagcattaattctaaagaggaaactgagcacttggaaaatggaaacaagtatcctaatttggaatccgtaaataaggtaaatggacattctgaggaaacttcccagtctcctaataggactgaaccacatgacagtgattgttctgttgacttaggtatttccaaaagcactgaagatctctcccctcagaaaagtggtccagttggatctgttgtgaaatctcatagcataactaatatggagattggagggctaaaaatctatgatattcttagtgataatggacctcagcagccaagtacaaccgttaaaatcacatctgctgttgatggaaaaaatatagtcaggagcaagtctgccacactgttgtatgatcaaccattgcaggtatttactggttcttcctcatcttctgatttaatatcaggaacaaaggcaattttcaagtttgattcaaatcataatcccgaagagccaaatataataagaggccccacaagtggcccacaatctgcacctcaaatatatggtcctccacagtataatatccaatacagtagcagtgctgcagtcaaagacactttgtggcactccaaacaaaatccccaaatagaccatgccagttttcctcctcagctccttcctagatcagagagcacagaaaatcaaagttatgctaaacattctgccaatatgaatttctctaatcataacaatgttcgagctaatactgcataccatttacatcagagacttggcccagcaagacatggggaaatgtgggccatctcaccaaacgaccgacttattcctgcagtaactcgaagtacaatccagcgacaaagtagtgtgtcctccacagcctctgtaaatcttggtgatccaggctctacaaggcgggctcagattcctgaaggagattatttatcatacagagagttccactcagcgggaagaactcctccaatgatgccaggatcacagagacccctttctgcacgaacatacagcatagatggtccaaatgcatcaagacctcagagtgctcgaccctctattaatgaaataccagagagaactatgtcagttagtgatttcaattattcacggactagtccttcaaaaagaccaaatgcaagggttggttctgagcattctttattagatcctccaggaaaaagtaaagttcctcgtgactggagagaacaagtacttcgacatattgaagccaaaaagttagaaaagattcgagtgagggttgaaaaggatccagaacttggatttagcatatcaggtggtgtcgggggtagaggaaacccattcagacctgatgatgatggtatatttgtaacaagggtacaacctgaaggaccagcatcaaaattactgcagccaggtgataaaattattcaggctaatggctacagttttataaatattgaacatggacaagcagtgtccttgctaaaaactttccagaatacagttgaactcatcattgtacgagaagtttcctcataagcactgtggacaaaaaaagcggggaagacagcaagatttattggaagatacttacaggggaaattaatattttgactatttttatatataaagaagaactcaaaaaattatgttcaaatttgtacattaatgaaataatggaacttgtggttagagggaaagaaccactgtacagaatataaaggagactgttgaattcataccatataaaacttgttaggtttttaaacatagcaatcaaggctacaaaaacaaacctgtgttgtttttgtatagattgtaggtttatttttggatttcatatacatgactgaactgtgtgcaaggcaatagttagccttgattttagcccagagacagatggcagagctatctctctcatagcttttatgcccttatttttatt

SEQ ID NO: 9730 - DNA, 4386 bp, Homo sapiens
  source 1..4386: mol_type = unassigned DNA
aaaaagctgccctgagacggtgtcccgccgaaagaatgttggctcaattaagaaacatcagggagataaattcaacccagtgtgtctaaaaatgactacaaaacgaagtttgtttgtgcggttggtaccatgtcgctgtctacgaggggaagaggagactgtcactactcttgattattctcattgcagcttagaacaagttccgaaagagatttttacttttgaaaaaaccttggaggaactctatttagatgctaatcagattgaagagcttccaaagcaactttttaactgtcagtctttacacaaactgagtttgccagacaatgatttaacaacgttaccagcatccattgcaaaccttattaatctcagggaactggatgtcagcaagaatggaatacaggagtttccagaaaatataaaaaattgtaaagttttgacaattgtggaggccagtgtaaaccctatttccaagctccctgatggattttctcagctgttaaacctaacccagttgtatctgaatgatgcttttcttgagttcttgccagcaaattttggcagattaactaaactccaaatattagagcttagagaaaaccagttaaaaatgttgcctaaaactatgaatagactgacccagctggaaagactggatttgggaagtaacgaattcacggaagtgcctgaagtacttgagcaactaagtggattgaaagagttttggatggatgctaatagactgacttttattccagggtttattggtagtttgaaacagctcacatatttggatgtttctaaaaataatattgaaatggttgaagaaggaatttcaacatgtgaaaaccttcaagacctcctattatcaagcaattcacttcagcagcttcctgagactattggttcgttgaagaatataacaacgcttaaaatagatgaaaaccagttaatgtatctgccagactctataggagggttaatatcagtagaagaactggattgtagtttcaatgaagttgaagctttgccttcatctattgggcagcttactaacttaagaacttttgctgctgatcataattacttacagcagttgcccccagagattggaagctggaaaaatataactgtgctgtttctccattccaataaacttgagacacttccagaggaaatgggtgatatgcaaaaattaaaagtcattaatttaagtgataatagattaaagaatttaccctttagctttacaaagctacagcaattgacagctatgtggctctcagataatcagtccaaacccctgatacctcttcaaaaagaaactgattcagagacccagaaaatggtgcttaccaactacatgttccctcaacagccaaggactgaggatgttatgtttatatcagataatgaaagttttaacccttcattgtgggaggaacagaggaaacagcgggctcaagttgcatttgaatgtgatgaagacaaagatgaaagggaggcacctcccagggagggaaatttaaaaagatatccaacaccatacccagatgagcttaagaatatggtcaaaactgttcaaaccattgtacatagattaaaagatgaagagaccaatgaagactcaggaagagatttgaaaccacatgaagatcaacaagatataaataaagatgtgggtgtgaagacctcagaaagtactactacagtaaaaagcaaagttgatgaaagagaaaaatatatgataggaaactctgtacagaagatcagtgaacctgaagctgagattagtcctgggagtttaccagtgactgcaaatatgaaagcctctgagaacttgaagcatattgttaaccatgatgatgtttttgaggaatctgaagaactttcttctgatgaagagatgaaaatggcggagatgcgaccaccattaattgaaacctctattaaccagccaaaagtcgtagcacttagtaataacaaaaaagatgatacaaaggaaacagattctttatcagatgaagttacacacaatagcaatcagaataacagcaattgttcttctccatctcggatgtctgattcagtttctcttaatactgatagtagtcaagacacctcactctgctctccagtgaaacaaactcatattgatattaattccaaaatcaggcaagaagatgaaaattttaacagccttttacaaaatggagatattttaaacagttcaacagaggaaaagttcaaagctcatgataaaaaagattttaacttacctgaatatgatttgaatgttgaagagcgattagttctaattgagaaaagtgttgactcaacagccacagctgatgacactcacaaattagatcatatcaatatgaatcttaataaacttataactaatgatacatttcaaccagagatcatggaaagatcaaaaacacaggatattgtgcttggaacaagctttttaagcattaattctaaagaggaaactgagcacttggaaaatggaaacaagtatcctaatttggaatccgtaaataaggtaaatggacattctgaggaaacttcccagtctcctaataggactgaaccacatgacagtgattgttctgttgacttaggtatttccaaaagcactgaagatctctcccctcagaaaagtggtccagttggatctgttgtgaaatctcatagcataactaatatggagattggagggctaaaaatctatgatattcttagtgataatggacctcagcagccaagtacaaccgttaaaatcacatctgctgttgatggaaaaaatatagtcaggagcaagtctgccacactgttgtatgatcaaccattgcaggtatttactggttcttcctcatcttctgatttaatatcaggaacaaaggcaattttcaagtttgattcaaatcataatcccgaagagccaaatataataagaggccccacaagtggcccacaatctgcacctcaaatatatggtcctccacagtataatatccaatacagtagcagtgctgcagtcaaagacactttgtggcactccaaacaaaatccccaaatagaccatgccagttttcctcctcagctccttcctagatcagagagcacagaaaatcaaagttatgctaaacattctgccaatatgaatttctctaatcataacaatgttcgagctaatactgcataccatttacatcagagacttggcccagcaagacatggggaaatgtgggccatctcaccaaacgaccgacttattcctgcagtaactcgaagtacaatccagcgacaaagtagtgtgtcctccacagcctctgtaaatcttggtgatccaggctctacaaggcgggctcagattcctgaaggagattatttatcatacagagagttccactcagcgggaagaactcctccaatgatgccaggatcacagagacccctttctgcacgaacatacagcatagatggtccaaatgcatcaagacctcagagtgctcgaccctctattaatgaaataccagagagaactatgtcagttagtgatttcaattattcacggactagtccttcaaaaagaccaaatgcaagggttggttctgagcattctttattagatcctccaggaaaaagtaaagttcctcgtgactggagagaacaagtacttcgacatattgaagccaaaaagttagaaaagagcatgctgtcaaggtcctttaattccaattttactactgtaagcagttttcactgtggcagctctagggatctgcatggcagccagggcagtcttgccttgagtgttgcagacagaagaggttctggtgggcacatttttcgaatgcctttgagtaatggacagatgggccagcctctcaggcctcaggcaaattatagtcaaatacatcacccccctcaggcatctgtggcaaggcatccctctagagaacaactaattgattacttgatgctgaaagtggcccaccagcctccatatacacagccccattgttctcctagacaaggccatgaactggcaaaacaagagattcgagtgagggttgaaaaggatccagaacttggatttagcatatcaggtggtgtcgggggtagaggaaacccattcagacctgatgatgatggtatatttgtaacaagggtacaacctgaaggaccagcatcaaaattactgcagccaggtgataaaattattcaggctaatggctacagttttataaatattgaacatggacaagcagtgtccttgctaaaaactttccagaatacagttgaactcatcattgtacgagaagtttcctcataagcactgtggacaaaaaaagcggggaagacagcaag

SEQ ID NO: 9731 - DNA, 1281 bp, Homo sapiens
  source 1..1281: mol_type = unassigned DNA
atgaaggaagaggaaggttttcctgaagatgaggcgactgaatcggaaactttaagtttggtaaaagagttggatgcctttccgaaggttcctgagagctatgtagagacttcagccagtggaggtacagtttctctaatagcatttacaactatggctttattaaccataatggaattctcagtatatcaagatacatggatgaagtatgaatacgaagtagacaaggatttttctagcaaattaagaattaatatagatattactgttgccatgaagtgtcaatatgttggagcggatgtattggatttagcagaaacaatggttgcatctgcagatggtttagtttatgaaccaacagtatttgatctttcaccacagcagaaagagtggcagaggatgctgcagctgattcagagtaggctacaagaagagcattcacttcaagatgtgatatttaaaagtgcttttaaaagtacatcaacagctcttccaccaagagaagatgattcatcacagtctccaaatgcatgcagaattcatggccatctatatgtcaataaagtagcagggaattttcacataacagtgggcaaggcaattccacatcctcgtggtcatgcacatttggcagcacttgtcaaccatgaatcttacaatttttctcatagaatagatcatttgtcttttggagagcttgttccagcaattattaatcctttagatggaactgaaaaaattgctatagatcacaaccagatgttccaatattttattacagttgtgccaacaaaactacatacatataaaatatcagcagacacccatcagttttctgtgacagaaagggaacgtatcattaaccatgctgcaggcagccatggagtctctgggatatttatgaaatatgatctcagttctcttatggtgacagttactgaggagcacatgccattctggcagttttttgtaagactctgtggtattgttggaggaatcttttcaacaacaggcatgttacatggaattggaaaatttatagttgaaataatttgctgtcgtttcagacttggatcctataaacctgtcaattctgttccttttgaggatggccacacagacaaccacttacctcttttagaaaataatacacattaacacctcccgattgaaggagaaaaactttttgcctgagacataaaacctttttttaataataaaatattgtgcaatatattcaaagaaaagaaaacacaaataagcagaaaacatacttatttt

SEQ ID NO: 9732 - DNA, 5014 bp, Homo sapiens
  source 1..5014: mol_type = unassigned DNA
tctgtgaaacatggcggtaggctgggaccataacacaagcatgactatatgaaggaagaggaaggttttcctgaagatgaggcgactgaatcggaaaaaaactttaagtttggtaaaagagttggatgcctttccgaaggttcctgagagctatgtagagacttcagccagtggaggtacagtttctctaatagcatttacaactatggctttattaaccataatggaattctcagtatatcaagatacatggatgaagtatgaatacgaagtagacaaggatttttctagcaaattaagaattaatatagatattactgttgccatgaagtgtcaatatgttggagcggatgtattggatttagcagaaacaatggttgcatctgcagatggtttagtttatgaaccaacagtatttgatctttcaccacagcagaaagagtggcagaggatgctgcagctgattcagagtaggctacaagaagagcattcacttcaagatgtgatatttaaaagtgcttttaaaagtacatcaacagctcttccaccaagagaagatgattcatcacagtctccaaatgcatgcagaattcatggccatctatatgtcaataaagtagcagggaattttcacataacagtgggcaaggcaattccacatcctcgtggtcatgcacatttggcagcacttgtcaaccatgaatcttacaatttttctcatagaatagatcatttgtcttttggagagcttgttccagcaattattaatcctttagatggaactgaaaaaattgctatagatcacaaccagatgttccaatattttattacagttgtgccaacaaaactacatacatataaaatatcagcagacacccatcagttttctgtgacagaaagggaacgtatcattaaccatgctgcaggcagccatggagtctctgggatatttatgaaatatgatctcagttctcttatggtgacagttactgaggagcacatgccattctggcagttttttgtaagactctgtggtattgttggaggaatcttttcaacaacaggcatgttacatggaattggaaaatttatagttgaaataatttgctgtcgtttcagacttggatcctataaacctgtcaattctgttccttttgaggatggccacacagacaaccacttacctcttttagaaaataatacacattaacacctcccgattgaaggagaaaaactttttgcctgagacataaaacctttttttaataataaaatattgtgcaatatattcaaagaaaagaaaacacaaataagcagaaaacatacttattttaaaaaagaaaaaaaaggataaaaaaacccaaactgaaattctatatacgttgtgtctgttacaaatgtcgtagaagaaatcatgcagctaaacgatgaagaagcccaactggagtgttgctttgaagatgacgccttcttatattttcatagcaaatgggtggtatcaaaatcagacattgcttcttgctgataaaaagcctgaaggaaataagtgaaactacatctatgggaaaaaaaaaaacattgagaagtgcaaatgttcgcatccttttgtttttaaaagatatgatgtcagaataaaatgtggaaaacatacggaaaactagtctagactttaaagaattgtgatcaggtcacattgttaataaaaaaaaaaaacgggctagtccctatgttatagccatattaatgttaagccatattgacaagaccagttatccaataatttggtcttaaaaagtaactacttttctttgaactctggttattgacttatctaactgttgaagatagagtcttagaagactaaggtaaattctcacaggggcagatatgtaggtgttatgtaactagggtgtcattcacaaatggtatagtagaatcttatacacggaaaagaaagcacatttttttaaaaaagatgccaagttttttaatctaatcattatattattggtgtattttgggcaacatagggtgagttataaaaagatccgctactgatagtgaaaattaccggtttgtaaaacattaagagaaaaaataggatattttatacatgtggtgagtggagaacagggtaactttaaatgaaagtgtaaggcaaattgtaagcaccacaagatatatcagatttgagaggtgccatgttaaacattgtccattaaactataaaactgtattatgaagtatttgcattcagggtgtcctgaatatgattgattctgtattagattgtgttctaactttcttactatttaaggattggttctaaatcttcacattataaaagattaaaaacagtgagagggagctatcacacaggtactattaaaagctgtatttggaatatgtgtaccaatatcagttttccttttgtagtactgaatggcagtagaagaatcagcagccaatcctcaaagtttaaatcatttaaggaaatggggaaacaaaattccaggtaaataacaagactgaaaaactagatttaaaatagtggttttagaaaacaggatatcacaagtaacagtttttcaaatggatttttttaaagataaatttatgaaaacaggataaacaatataatggagagaaggagaaatagtgatgggtctgttttgcagtaaagtttatgcagaatgacgttttgcagaaaataacagaagcatcactttaaaaaatatatcattaagagccatgacgttaactgatgaaaataagtgatataacatactttgaaagatttttaaacagaaaattctgaatcgtgaatgagccttctctaggttttaattttttttcttcaaattatttccaacaaagtttggctataaactaacaccatctatccacaggaattttaataggaaaggattagaattgtagactgattgttggtcctttaagtatgcttggaagaaaattcaatcgagtttcaaggctttttctaaatgggagggagaacaatattgatttaggattattttctttcatttaggattagaacagttaagtgcctttaaaaaggactttaaaaattattttgatacttatatatgatttttaattgttttcgtattttccaaataccatattaaaattttaatgaaatttatctcctatgaaaggaatttctttaaagcaaaattctgctttgcctttgatttccattttaaaagttaaaggcttccatctgaaactcctcaaatagagtcagatttttggcaatggaagtattaaaattccgatcagccctttggacgatgaagtttacctgcatattaggatttgttaggagtttttggcctcaccaagtgattcttttctattgcagagagcactttactcacctacctgttatgcaactttccctatgcctggaggtgcctccagccaggataccctactttgttacccaattctcctttttgttttacaagagtattcataatatctatatgtttatattccagactacatatttaaaaatgagatctcaaattatatgaaatggatttttaaatactgtgtttgcatacattgacctataaagaagattaaatatttaggtgaataattccctgctgcagtatttgtacacttcagactacctcttaggaaaagcttaacttagtattgcaaaattccctttctctttttttttttaagagatggggtctcgcactgttgcccaggctgaagtgcagtggcatgattgtaactcactgcatcctcgaactcctgggttcaagcaatcctcctgcttccatctgctgagtaggtaggactacagccatgcaccaacaaacctggctaattctttttcatttatatagttagtatcttgctgtgttgttcaagctggactccaactcccggactcaagtaatcctcccaccttagtctcctgcattgctggaattataggcacgagccactgcacctggcacccaaattacttctagttctcaagttagatgattaatatcacacttttctcatgtatgttttatgatagcattgaatttttataattaaaaatttactaatgcaaacaagatttacagtctttaatacaatcttaattttggaattcatgaaggaatgactaagttctaatttttttttttttttttttgaaactgagtctcgctctgtcgcctaggctggagtgcagtggtgcaatctcagctcactgcaacctccgtctcccgggttcaagtgattctcctgcctcagcctgttgagtagctgggactacaggtgcgtaccaccaagcccagctaatttttttatatttttagtagagacggggtttcactgtgttagccaggatggtctcaatctcctgacctcatgatccgcccaccttggcctcccaaagtgttgggattacaggcatgagccactgcccctggacagatctaattttttaatagtgtaagagagatacactgtgcattccatctatgtcctgagttagtaattcaagtaccaaaaagtaatttaatatgaaactccttgaaaattcagagcttacacttgaattcaaaatgcctatttttgattgtttaaaagttacttaaacctgagctttaggacctttaaaatctcagcatgccttttaagctagtacttttcctgttttgagctctagcaaaccttcagcaagccaaggtggtagccctttttcaacacaatcaaaatagagaggtcaccagttgtttactaccttatggtaaaatgcccggatcaagatccatgtatcccccccatattgtgatgatgcaatcaaagcatagtttttttctactttctgaaatattactgatgaaatcactttacatttaagaggagaaaacagactgccttggattttttttttgtcttgagagaaaaaacaaaatatttagtattgcaagcataaacatttggactcaataaatgacaaattatgaaa

SEQ ID NO: 9733 - DNA, 1274 bp, Homo sapiens
  source 1..1274: mol_type = unassigned DNA
gtgaaacatggcggtaggctgggaccataacacaaggtaaaatactgaaacaccgctgggtgctgttccctcggttgttccagggctgtttagggcgtaaatgcaattgagggaactgggagcctgtcatgggcttggcttcctgtcttcattgatctctagagagccggtcggacggagaagccgctccacctcccacgggggcgttactggcaggaccctaggcaacgatgctactgggagcttccctttgccaggtccgggtgcttgtgtgctatcctgcaactcgaaggagttcaggtgcttcctcgatcgcacctgattctgaccctttgcttgtcacagtgcccggttcccaggtggtttctccagtccgcaggcgagtaggatcccaatcggtcgagtcccagtcctcccggatgtcagactccctacccccattcagacaaatgccacattcgtggcagcacgttgccctctgtctctttaagagtcttggccttgcccggaaggagtttcgcacagtgcttcggaaaatgagaagggggcgggggagggcgagatgctgagagacagcatgactatatgaaggaagaggaaggttttcctgaagatgaggcgactgaatcggaaaaaaactttaagtttggtaaaagagttggatgcctttccgaaggttcctgagagctatgtagagacttcagccagtggaggtacagtttctctaatagcatttacaactatggctttattaaccataatggaattctcagtatatcaagatacatggatgaagtatgaatacgaagtagacaaggatttttctagcaaattaagaattaatatagatattactgttgccatgaagtgtcaatatgttggagcggatgtattggatttagcagaaacaatggttgcatctgcagatggtttagtttatgaaccaacagtatttgatctttcaccacagcagaaagagtggcagaggatgctgcagctgattcagagtaggctacaagaagagcattcacttcaagatgtgatatttaaaagtgcttttaaaagtacatcaacagctcttccaccaagagaagatgattcatcacagtctccaaatgcatgcagaattcatggccatctatatgtcaataaagtagcagggaattttcacataacagtgggcaaggcaattccacatcctcgtggtcatgcacatttggcagcacttgtcaaccatgaatcttacaatttttctcatagaatagatcatttgt

SEQ ID NO: 9734 - DNA, 432 bp, Homo sapiens
  source 1..432: mol_type = unassigned DNA
gtacgcgggagccccggcgacccgggcttctgtgaaacatggcggtaggctgggaccataacacaagagtttcaggccaggtgtggtggttcacatctataatcccagcactttttttgagaggccgaggtgggtggaaggcttcagcccaggagtttgagacccagcctgggcaacaagcatgactatatgaaggaagaggaaggttttcctgaagatgaggcgactgaatcggaaaaaaactttaagtttggtaaaagagttggatgcctttccgaaggttcctgagagctatgtagagacttcagccagtggaggtacagtttctctaatagcatttacaactatggctttattaaccataatggaattctcagtatatcaagatacatggatgaagtatgaatacgaagtagacaaggatttttctag

SEQ ID NO: 9735 - DNA, 695 bp, Homo sapiens
  source 1..695: mol_type = unassigned DNA
atttccgggtacgcgggagccccggcgacccgggcttctgtgaaacatggcggtaggctgggaccataacacaaggttattgtcataggataaattcctcaatgggcatttacttagaagaggagtggtgtgcatgactatatgaaggaagaggaaggttttcctgaagatgaggcgactgaatcggaaaaaaactttaagtttggtaaaagagttggatgcctttccgaaggttcctgagagctatgtagagacttcagccagtggaggtacagtttctctaatagcatttacaactatggctttattaaccataatggaattctcagtatatcaagatacatggatgaagtatgaatacgaagtagacaaggatttttctagcaaattaagaattaatatagatattactgttgccatgaagtgtcaatatgttggagcggatgtattggatttagcagaaacaatggttgcatctgcagatggtttagtttatgaaccaacagtatttgatctttcaccacagcagaaagagtggcagaggatgctgcagctgattcagagtaggctacaagaagagcattcacttcaagatgtgatatttaaaagtgcttttaaaagtacatcaacagctcttccaccaagagaagatgattcatcacagtctccaaatgcatgcagaattcatggccatc

SEQ ID NO: 9736 - DNA, 3949 bp, Homo sapiens
  source 1..3949: mol_type = unassigned DNA
ggagggacctcactgccttgatctgttatttatcaagagtcaaactggaaaaggctgtcagggaaacctccaggctgcatcttgggcaaagattggcttgaaacaggcatttcccaagcctggccttggacaccaactgtaaaaaaaaggccattactggtgtttccttggttagttctgggtataagttctggatcctcactcatctcatctgcactgacatcctcactcacggcatttagagacttaacacgccagcctctgtgtgagcatttacctctttcaaccctcaccataatcccacaaggaggcacagttcttttacccattttgaagatgaagaaacacagtctcagagaagttcggtcacagtatcacaaggaggtaagtagcagagctgggattggagccccggcctttgtgatcccagagcaccagcaataccgtctcggcctcggctcctgggttataccctctgtcacgccaagcccatcagcccgcttgtgctgtctccctctgtctgtcctagttcggatggagatggcgagttctgctggctcctggctctctggctgcctcatccctctcgtcttcctccggctgtctgtgcatgtgtcaggtaggagtttctgatcctctttccctgcctggtacatgtgatattggcgtccccagaataaggaagcttggctggaaacattatgtcttttggggttctgttcccccggccctggcaatcctttccagagtccttcctgggctctgtccgtccccgggatatcctcttcctcatcccttcccaagctttctcctgccgtccctcccagttggccttgtctctttttttgtccaggccacgcaggggatgccggcaagttccacgtggccctactagggggcacagccgagctgctctgccctctctccctctggcccgggacggtacccaaggaggtgaggtggctgcggtccccattcccgcagcgctcccaggctgttcacatattccgggatgggaaggaccaggatgaagatctgatgccggaatataaggggaggacggtgctagtgagagatgcccaagagggaagtgtcactctgcagatccttgacgtgcgccttgaggaccaagggtcttaccgatgtctgatccaagttggaaatctgagtaaagaggacaccgtgatcctgcaggttgcagccccatctgtggggagtctctccccctcagcagtggctctggctgtgatcctgcctgtcctggtacttctcatcatggtgtgcctttgccttatctggaagcaaagaagagcaaaagaaaagcttctctatgaacatgtgacggaggtggacaatcttctttcagaccatgctaaagaaaaaggaaaactccataaagctgtcaagaaactccggagtgaactgaagttgaaaagagctgcagcaaactcaggctggagaagagcccggttgcattttgtggcagtgaccctggacccagacacagcacatcccaaactcatcctttctgaggaccaaagatgtgtaaggcttggagacagacggcagcctgtacctgacaacccccagagatttgatttcgttgtcagcatcctaggctctgagtacttcacgactggctgccactactgggaggtgtatgtgggagacaagaccaaatggattcttggagtatgtagtgagtcagtgagcaggaaggggaaggttactgcctcacctgccaatggacactggcttctgcgacagagtcgtgggaatgagtatgaagctctcacatccccgcagacctccttccgccttaaagagcctccacggtgtgtggggattttcctggactatgaagcaggagtcatctctttctacaatgtgaccaacaagtcccacatctttactttcacccacaatttctctggcccccttcgccctttctttgaaccttgccttcatgatggaggaaaaaacacagcacctctagtcatttgttcagaactacacaaatcagaggaatcaattgtccccaggccagaagggaaaggccatgctaatggagatgtgtccctcaaggtgaactcttctttactacccccgaaggccccagagctgaaggatataatcctgtccttgccccctgaccttggcccagcccttcaggagctcaaggctccttctttttagggatatgccacattacctgctcccatcaccatccagcccagcaccctggacttcagtcgcctggcccaaccccatgattatggaacgtctcttcaccttaacccaaatccagacccttttgtggtttctatttgtaccacttttctcccaggcctcagttctgaagcttacctttcttctaaggaattgaagctcccagtgacctggagggaggattcctggaaaccaaacaatcagtttaggtgcaggtggagatgttgaatatgtgttaccaagatacagcacaggttcagggaaaagagttcgctactccaggggttatttagaagacactttctctgcctcatcctgccctcaagctttagtcaagaagttatggcccccagtccctgacttcttacttatcccattgaggactgcctttctctctctcagttctggcctctgccccccaaagtcagctctctaaaagcaagcatgttttagaccactcactctttccctctttcttcaggaatgaattgggaaaggctgatgagtaaaacataccatccttttctattttcttgatgctgtttacaacatagtttggtgatatccagagctaatgtacatgctttcaaaagctaatctgcctgttgatggtaactaggtacagcgactttaaatacagttgctataatcctgaaaagccccaggagcacatcagggagctgggaaacacagttgcagagaactcagctgtatgttgccctctgaccttggcccagaccttcagaggctcagtctgttgagtctgttgtgactgtcttatgaatcaatctgttgtgccaaccctttctgagattcagagaggtccagctagaaaaagtggcagttttaaccaccaacgtagaagcttttttttccccacaagaccattgtactgcaatacttgagtatttgtgtagcaaacagcctcttaggttggagagtattgatttcaaataggaagttggtagactaggtgtgaggatgaaataatgaccttgatttttgggtgtgtattgcagaagcctcgtcgctttcaagtcacatcatatatgcgatctggcctaaccatggagatattggttatcagtttgcagatgaatacacagttctatccaacagaaactgtatctttctgtttgtcagaagttctccgttagttcctgtattagtcaaggttttccagagaaacagaatcaatatatattggggcaggggggcggtggttattataaggaattggctcacgtgattatggaggcggttaaatcccaagatctgcaggataagtcagcaagatggagtcccatgagagctgatggtttagttccagtctgatggcagcaggcttgacgccaaggaagagatgatgtttaattcaagtccgaaggcaaggaaaaagctgatggtcctgtccaaaggctattaggcaggaagaattctcttagggcagagttagctcttttgttctattcaggccttcaactgattcagcaaggcccgcccacatttgggaggacagtctgcattactcagtctactgatttgaatgttaatgtcattgagaaacaccctcacaggaacactcagaataatgtttgaccaaatagctgggcatcttgtgacccagttaagtggatacataagattaactatcacagtgactcagtggaattttttgtttgcttttgtacagttttaaaataaaagtttggtatttgtg

SEQ ID NO: 9737 - DNA, 3369 bp, Homo sapiens
  source 1..3369: mol_type = unassigned DNA
cagagagagccctggcctctcatatttcataaaatatgaacttttcccggcccacatccctaggccttcctgatgcgcttgcctgctccctggtctctctgcatggggaaggagtgttcccagcttgcaaactccagctttgcctgtgagaggaacaagcgtccctgatccagaaggtgttcggatggagatggcgagttctgctggctcctggctctctggctgcctcatccctctcgtcttcctccggctgtctgtgcatgtgtcaggccacgcaggggatgccggcaagttccacgtggccctactagggggcacagccgagctgctctgccctctctccctctggcccgggacggtacccaaggaggtgaggtggctgcggtccccattcccgcagcgctcccaggctgttcacatattccgggatgggaaggaccaggatgaagatctgatgccggaatataaggggaggacggtgctagtgagagatgcccaagagggaagtgtcactctgcagatccttgacgtgcgccttgaggaccaagggtcttaccgatgtctgatccaagttggaaatctgagtaaagaggacaccgtgatcctgcaggttgcagccccatctgtggggagtctctccccctcagcagtggctctggctgtgatcctgcctgtcctggtacttctcatcatggtgtgcctttgccttatctggaagcaaagaagagcaaaagaaaagcttctctatgaacatgtgacggaggtggacaatcttctttcagaccatgctaaagaaaaaggaaaactccataaagctgtcaagaaactccggagtgaactgaagttgaaaagagctgcagcaaactcaggctggagaagagcccggttgcattttgtggcagtgaccctggacccagacacagcacatcccaaactcatcctttctgaggaccaaagatgtgtaaggcttggagacagacggcagcctgtacctgacaacccccagagatttgatttcgttgtcagcatcctaggctctgagtacttcacgactggctgccactactgggaggtgtatgtgggagacaagaccaaatggattcttggagtatgtagtgagtcagtgagcaggaaggggaaggttactgcctcacctgccaatggacactggcttctgcgacagagtcgtgggaatgagtatgaagctctcacatccccgcagacctccttccgccttaaagagcctccacggtgtgtggggattttcctggactatgaagcaggagtcatctctttctacaatgtgaccaacaagtcccacatctttactttcacccacaatttctctggcccccttcgccctttctttgaaccttgccttcatgatggaggaaaaaacacagcacctctagtcatttgttcagaactacacaaatcagaggaatcaattgtccccaggccagaagggaaaggccatgctaatggagatgtgtccctcaaggtgaactcttctttactacccccgaaggccccagagctgaaggatataatcctgtccttgccccctgaccttggcccagcccttcaggagctcaaggctccttctttttagggatatgccacattacctgctcccatcaccatccagcccagcaccctggacttcagtcgcctggcccaaccccatgattatggaacgtctcttcaccttaacccaaatccagacccttttgtggtttctatttgtaccacttttctcccaggcctcagttctgaagcttacctttcttctaaggaattgaagctcccagtgacctggagggaggattcctggaaaccaaacaatcagtttaggtgcaggtggagatgttgaatatgtgttaccaagatacagcacaggttcagggaaaagagttcgctactccaggggttatttagaagacactttctctgcctcatcctgccctcaagctttagtcaagaagttatggcccccagtccctgacttcttacttatcccattgaggactgcctttctctctctcagttctggcctctgccccccaaagtcagctctctaaaagcaagcatgttttagaccactcactctttccctctttcttcaggaatgaattgggaaaggctgatgagtaaaacataccatccttttctattttcttgatgctgtttacaacatagtttggtgatatccagagctaatgtacatgctttcaaaagctaatctgcctgttgatggtaactaggtacagcgactttaaatacagttgctataatcctgaaaagccccaggagcacatcagggagctgggaaacacagttgcagagaactcagctgtatgttgccctctgaccttggcccagaccttcagaggctcagtctgttgagtctgttgtgactgtcttatgaatcaatctgttgtgccaaccctttctgagattcagagaggtccagctagaaaaagtggcagttttaaccaccaacgtagaagcttttttttccccacaagaccattgtactgcaatacttgagtatttgtgtagcaaacagcctcttaggttggagagtattgatttcaaataggaagttggtagactaggtgtgaggatgaaataatgaccttgatttttgggtgtgtattgcagaagcctcgtcgctttcaagtcacatcatatatgcgatctggcctaaccatggagatattggttatcagtttgcagatgaatacacagttctatccaacagaaactgtatctttctgtttgtcagaagttctccgttagttcctgtattagtcaaggttttccagagaaacagaatcaatatatattggggcaggggggcggtggttattataaggaattggctcacgtgattatggaggcggttaaatcccaagatctgcaggataagtcagcaagatggagtcccatgagagctgatggtttagttccagtctgatggcagcaggcttgacgccaaggaagagatgatgtttaattcaagtccgaaggcaaggaaaaagctgatggtcctgtccaaaggctattaggcaggaagaattctcttagggcagagttagctcttttgttctattcaggccttcaactgattcagcaaggcccgcccacatttgggaggacagtctgcattactcagtctactgatttgaatgttaatgtcattgagaaacaccctcacaggaacactcagaataatgtttgaccaaatagctgggcatcttgtgacccagttaagtggatacataagattaactatcacagtgactcagtggaattttttgtttgcttttgtacagttttaaaataaaagtttggtatttgtgtttt

SEQ ID NO: 9738 - DNA, 3423 bp, Homo sapiens
  source 1..3423: mol_type = unassigned DNA
ctcctggaggaaaatggcggtcgctggagccgccgaccaagaggcttgggagtctgtacctttcccgaccgggccactggaagttggagcctccgccgagtcgcagacaacgcctccgggagggccttcctgatgcgcttgcctgctccctggtctctctgcatggggaaggagtgttcccagcttgcaaactccagctttgcctgtgagaggaacaagcgtccctgatccagaaggtgttcggatggagatggcgagttctgctggctcctggctctctggctgcctcatccctctcgtcttcctccggctgtctgtgcatgtgtcaggccacgcaggggatgccggcaagttccacgtggccctactagggggcacagccgagctgctctgccctctctccctctggcccgggacggtacccaaggaggtgaggtggctgcggtccccattcccgcagcgctcccaggctgttcacatattccgggatgggaaggaccaggatgaagatctgatgccggaatataaggggaggacggtgctagtgagagatgcccaagagggaagtgtcactctgcagatccttgacgtgcgccttgaggaccaagggtcttaccgatgtctgatccaagttggaaatctgagtaaagaggacaccgtgatcctgcaggttgcagccccatctgtggggagtctctccccctcagcagtggctctggctgtgatcctgcctgtcctggtacttctcatcatggtgtgcctttgccttatctggaagcaaagaagagcaaaagaaaagcttctctatgaacatgtgacggaggtggacaatcttctttcagaccatgctaaagaaaaaggaaaactccataaagctgtcaagaaactccggagtgaactgaagttgaaaagagctgcagcaaactcaggctggagaagagcccggttgcattttgtggcagtgaccctggacccagacacagcacatcccaaactcatcctttctgaggaccaaagatgtgtaaggcttggagacagacggcagcctgtacctgacaacccccagagatttgatttcgttgtcagcatcctaggctctgagtacttcacgactggctgccactactgggaggtgtatgtgggagacaagaccaaatggattcttggagtatgtagtgagtcagtgagcaggaaggggaaggttactgcctcacctgccaatggacactggcttctgcgacagagtcgtgggaatgagtatgaagctctcacatccccgcagacctccttccgccttaaagagcctccacggtgtgtggggattttcctggactatgaagcaggagtcatctctttctacaatgtgaccaacaagtcccacatctttactttcacccacaatttctctggcccccttcgccctttctttgaaccttgccttcatgatggaggaaaaaacacagcacctctagtcatttgttcagaactacacaaatcagaggaatcaattgtccccaggccagaagggaaaggccatgctaatggagatgtgtccctcaaggtgaactcttctttactacccccgaaggccccagagctgaaggatataatcctgtccttgccccctgaccttggcccagcccttcaggagctcaaggctccttctttttagggatatgccacattacctgctcccatcaccatccagcccagcaccctggacttcagtcgcctggcccaaccccatgattatggaacgtctcttcaccttaacccaaatccagacccttttgtggtttctatttgtaccacttttctcccaggcctcagttctgaagcttacctttcttctaaggaattgaagctcccagtgacctggagggaggattcctggaaaccaaacaatcagtttaggtgcaggtggagatgttgaatatgtgttaccaagatacagcacaggttcagggaaaagagttcgctactccaggggttatttagaagacactttctctgcctcatcctgccctcaagctttagtcaagaagttatggcccccagtccctgacttcttacttatcccattgaggactgcctttctctctctcagttctggcctctgccccccaaagtcagctctctaaaagcaagcatgttttagaccactcactctttccctctttcttcaggaatgaattgggaaaggctgatgagtaaaacataccatccttttctattttcttgatgctgtttacaacatagtttggtgatatccagagctaatgtacatgctttcaaaagctaatctgcctgttgatggtaactaggtacagcgactttaaatacagttgctataatcctgaaaagccccaggagcacatcagggagctgggaaacacagttgcagagaactcagctgtatgttgccctctgaccttggcccagaccttcagaggctcagtctgttgagtctgttgtgactgtcttatgaatcaatctgttgtgccaaccctttctgagattcagagaggtccagctagaaaaagtggcagttttaaccaccaacgtagaagcttttttttccccacaagaccattgtactgcaatacttgagtatttgtgtagcaaacagcctcttaggttggagagtattgatttcaaataggaagttggtagactaggtgtgaggatgaaataatgaccttgatttttgggtgtgtattgcagaagcctcgtcgctttcaagtcacatcatatatgcgatctggcctaaccatggagatattggttatcagtttgcagatgaatacacagttctatccaacagaaactgtatctttctgtttgtcagaagttctccgttagttcctgtattagtcaaggttttccagagaaacagaatcaatatatattggggcaggggggcggtggttattataaggaattggctcacgtgattatggaggcggttaaatcccaagatctgcaggataagtcagcaagatggagtcccatgagagctgatggtttagttccagtctgatggcagcaggcttgacgccaaggaagagatgatgtttaattcaagtccgaaggcaaggaaaaagctgatggtcctgtccaaaggctattaggcaggaagaattctcttagggcagagttagctcttttgttctattcaggccttcaactgattcagcaaggcccgcccacatttgggaggacagtctgcattactcagtctactgatttgaatgttaatgtcattgagaaacaccctcacaggaacactcagaataatgtttgaccaaatagctgggcatcttgtgacccagttaagtggatacataagattaactatcacagtgactcagtggaattttttgtttgcttttgtacagttttaaaataaaagtttggtatttg

SEQ ID NO: 9739 - DNA, 5930 bp, Homo sapiens
  source 1..5930: mol_type = unassigned DNA
agttgccctgtcagtgcaggtggaggccccggcggggcaaagtggcaggaacctcttaaagggcgagagcggcgcggagccagaacgcggtcggcccggtccccgccgcacccagcccagcaacatcatgacaacagagaagagtttagtgactgaggccgaaaattcacagcaccaacagaaggaagagggtgaggaagccataaactcaggccaacaagaacctcagcaggaggaatcttgtcaaacagcagctgaaggagataattggtgtgaacagaagctgaaagcttctaatggagacactcctacacatgaagacttgaccaagaacaaggagcggacatcagaaagcagaggactttcacgactattctcctcgtttctcaaaaggcccaaatctcaggtgtccgaggaagaaggcaaagaagtagagtcagataaagaaaaaggtgaaggaggtcagaaagagatagaatttggaaccagtcttgatgaagagatcattttaaaggccccaattgcagctcctgaaccggaactcaaaacagacccatctttggatcttcattcattaagcagtgcagaaacacagcctgctcaggaagaactcagagaagatccagattttgaaattaaggaaggagaaggacttgaagagtgctccaaaatagaagtaaaagaagaaagccctcaatcaaaagcagaaacagaattaaaagcttcccaaaaaccaatcagaaaacacaggaacatgcactgcaaggtttctttgttggatgacacagtttatgaatgtgttgtggagaaacatgctaagggacaagatttgcttaaacgagtatgtgagcatctcaatcttttggaagaagactattttggtctagccatttgggataacgcaacctctaagacatggctggattccgccaaagaaataaaaaagcaggttcgtggtgtcccttggaattttacatttaatgtaaagttttatccacctgacccagcacagttaacagaagacataacaagatattatttatgtcttcagcttcggcaggacatagttgcaggacgtctgccctgttcctttgcaaccttagcattattaggttcttacaccatccagtctgaactgggagactacgacccagaactccatggcgtggattatgttagtgattttaaactggccccgaatcagaccaaggaacttgaagagaaggtcatggaactgcataagtcatacaggtccatgactccagctcaggctgacttggagtttcttgagaatgccaaaaagttgtctatgtatggagttgatcttcataaagcaaaggacttggaaggagtagatatcatcctaggtgtctgctctagtggccttctggtttacaaagataagctgagaattaaccgcttcccttggcccaaagtgctgaagatttcttataaacgtagtagctttttcatcaagattcggcctggagagcaagagcagtatgaaagtaccatcggattcaaacttcccagttaccgagcagctaagaaattatggaaagtctgtgtagaacatcacacgtttttcagattgacatctacagacaccattcccaaaagcaaatttcttgcgctaggatccaaatttcgatacagtggccggactcaagctcagaccaggcaagctagtgctctaattgacaggcctgccccacacttcgagcgtacagcaagtaaacgggcgtcccggagcctcgatggagcagcagctgtcgattcggcagaccgaagtcctcggcccacttctgcacctgccattactcagggtcaggttgcagaaggtggcgtcctagatgcctctgctaaaaaaacagtggtccctaaagcacagaaggaaacagtgaaggctgaagtgaaaaaggaagacgagccacctgagcaagctgagccagagcccacagaagcatggaaggtggaaaaaacccacatcgaggtgacagtacccacctcaaatggtgaccaaacacagaagcttgcagaaaaaactgaagatctgataagaatgaggaagaaaaagagagaaagactagatggtgaaaacatttatatcagacatagcaatttaatgttggaggatttagacaagagtcaagaggagatcaaaaaacatcatgccagcatcagtgagctgaaaaagaacttcatggagtctgtaccagaaccacggcctagtgaatgggataaacgcttatccactcactcacccttccgaactcttaacatcaatgggcaaatccccacaggagaaggacctcccctggtgaagacacaaactgtcaccatctcagataatgccaatgctgtgaaaagtgaaatcccaaccaaagacgtccctattgtccacactgagaccaagaccatcacttatgaggctgcccagactgacgacaacagtggagacttggacccaggagtcttgctgacagctcaaactatcacatctgagaccccaagcagcaccaccacaactcaaattaccaagactgtaaaaggtgggatttcagagacacgtattgaaaagagaattgtgatcacaggagatgctgatattgaccatgatcaggtccttgtacaagccatcaaggaggcaaaggagcagcacccagacatgtcagtgaccaaggtggtcgtccaccaggagaccgagattgctgatgagtgagctcaggaactaacctaccccaactctgcccttctcccatccaagagaaaccagcaaaatgataaagaagctaacctgccatagtcagacttcagactttcaagattattctaaatcaccagaaaattaatttcagtttctattgggagtttataccaagagattcttctagatctcattgatccttttgaagagctttttctatattaggatatcagaattgttcaacttttcactctatagactgttttaagagttttggggtttttttaattgggtggtttgtaaccccttcagcctagcctctctgcccatttatttccaaccccaacagacactgacagggtccatggaattcttcgggaaatcctccaaggactcttgtcagctgtgttggaagccaaagccagcttagtgggacttccgcgtctctccctagtcttatcccctttggatgatggcagaaacttcatgaaccagccctttctcagagccagtgatgtgagtgtatcagaatgccagggagggcaccagccctgatccacagacctcggaaagatgcccctgttcctttgttgcgggtggttttggtaaggcagagccctctgctgagaatgtagtattgtttttcccctctccctcctgctttctttttggagcttctttgggtcaaagacatggaagttgcttcagatatctgatactgtgaatgtttgaacatatccgtggccttcacctctccagctacccttttacctcatcagaagcagtggctcagctaagtgctccccctagctcccatctcaggagaccaaatctcacagaaaaataggcactttgggccaaaagctctaatggaacatttttagtggtgatttggggaaggaaagttaatgaggtttttaaaataaggttttctagttttgagagtgtgcacttcacacaggggaatggggttacttctgtctgatcctgggcctttctttcatcccaaatgacaaggaatgtggctcagagaagggtttttcttttttgacctttcttctctcaacaggaacctgcctgaggacacccttctagagcaaggaattgacttttaggagccgttctccccacaagacaccacatgacaaggggtataagccccagccctgctcattcccactcaccagctgaggtctgtcaggttttgaaggcttgattttgtggtgggtttggggcttagttttcctttttttcattttgatttttgaaagtgaagatgatgccctaattcctggtaaggatttggggcatagttttttgtttttttgagacggagtttcgctcttgttgcccaagctggagtgcagtggcgcgatctcggctcactgcaacctccgcctcctgggttcaagcagttctcttgcctcagcctcccaagtagctgggatgacaggcgcacaccaccacgcccagcaaattttttgtatttttagtagaaacgggatttcaccttgttaggctggtctcgaactcctgacctcaggtgatccacccaccttggcctcccaaagtgctgggattacaggtgtgagccaccacgcccggccgatttggggcatttttatttaacagaacttctctaaccttccaactgcttcccacaaacacattggcctcaaggctccttagaatcccagttccagcttcctaaaatagacagtgggtatcgggcagcagtcactggggctcaagggcagtgagcaagagaaatgtctaaagctgcttctcccaacaccgtccaaagtctccactgcctgagttttgtttcggctggtttgaactcatttcgggtgtgtgcatttttcttttggtacccatgtgagacatgaacaacaggagggagggaaagagcccaggtgggacgtgggacaggcttaggggaaagagcttgtcctatctcaggaacaaaattataggctgtgggcagagggtctgaaaggtgggctttggggtagtgcccaagcctggtcgtgttgccaggagtggtgacaagaaatgcagcttacatcaaacgaacatgtagtgcatgcccactgcctgatggccagatggcctgtaggaagagctaccagggcttccagacctgtggaacgaagaggatggggaaaaggcagagggcactgagtgtccctttaaaaactaacccactgaatattccgtgtgatctagaacagtgtggcagctttcacagcacaggaccgttcatcgggggcctaaacgtttccctcagctctgtcaccaactcacttctctcggcttcgttgtctgtaaattggatgaaaagagctctaatgcctttcaggctcttagaagccatagatttggacaagcccagcaagatgggtgtccttccaggcctcttcccctttcctccatctctggcaacagttcttggggtttggcaattgtttggattttttttctttctgcagttgtgtgtatgtgtgtttgtgtgaagaaaaacagactctgtccaggtagaaatggtgaggagggggaagagaattacatttccagggtcagaaacttggcaacagttttcctagagtgactcagacacaccacagtaacaactctcgctgcaattttattttaatttgagaaataaagatttcctccaagccacatgaggactctggcacccacccacaaagcaagacctgtatttataagccgagggctcagggagcctaactgcgggacccgtcagggccccgtgacccatccccgtccccacccccccctccaccgctgggcccatcagtgtgtgttggggggatgcttggcagctgggggtgaggagacaacaaacctcgggaactggagccagagctgcggcctgactgacgccttttgatgctcacgggaaatttctgcccaggatctcagccccaggctggttgtttctacaaatctctctcaaatgtattattttggtgacaaaaatgaaggagctttgtaaattttttttaaaattatgaatcatatcaagtagttgtttacatttcttgaaaaaataggaactcgggcagcagaatcagattggcagaatctttagactacacaggcaataatcaagtctgctgttttggcctttcgtagtagaagtggttgtagtgtttagatatctgtttggtcttgcttcttgtattgcatttttttc

SEQ ID NO: 9740 - DNA, 2676 bp, Homo sapiens
  source 1..2676: mol_type = unassigned DNA
agaacgcggtcggcccggtccccgccgcacccagcccagcaacatcatgacaacagagaagagtttagtgactgaggccgaaaattcacagcaccaacagaaggaagagggtgaggaagccataaactcaggccaacaagaacctcagcaggaggaatcttgtcaaacagcagctgaaggagataattggtgtgaacagaagctgaaagcttctaatggagacactcctacacatgaagacttgaccaagaacaaggagcggacatcagaaagcagaggactttcacgactattctcctcgtttctcaaaaggcccaaatctcaggtgtccgaggaagaaggcaaagaagtagagtcagataaagaaaaaggtgaaggaggtcagaaagagatagaatttggaaccagtcttgatgaagagatcattttaaaggccccaattgcagctcctgaaccggaactcaaaacagacccatctttggatcttcattcattaagcagtgcagaaacacagcctgctcaggaagaactcagagaagatccagattttgaaattaaggaaggagaaggacttgaagagtgctccaaaatagaagtaaaagaagaaagccctcaatcaaaagcagaaacagaattaaaagcttcccaaaaaccaatcagaaaacacaggaacatgcactgcaaggtttctttgttggatgacacagtttatgaatgtgttgtggagacatggctggattccgccaaagaaataaaaaagcaggttcgtggtgtcccttggaattttacatttaatgtaaagttttatccacctgacccagcacagttaacagaagacataacaagatattatttatgtcttcagcttcggcaggacatagttgcaggacgtctgccctgttcctttgcaaccttagcattattaggttcttacaccatccagtctgaactgggagactacgacccagaactccatggcgtggattatgttagtgattttaaactggccccgaatcagaccaaggaacttgaagagaaggtcatggaactgcataagtcatacaggtccatgactccagctcaggctgacttggagtttcttgagaatgccaaaaagttgtctatgtatggagttgatcttcataaagcaaaggacttggaaggagtagatatcatcctaggtgtctgctctagtggccttctggtttacaaagataagctgagaattaaccgcttcccttggcccaaagtgctgaagatttcttataaacgtagtagctttttcatcaagattcggcctggagagcaagagcagtatgaaagtaccatcggattcaaacttcccagttaccgagcagctaagaaattatggaaagtctgtgtagaacatcacacgtttttcagattgacatctacagacaccattcccaaaagcaaatttcttgcgctaggatccaaatttcgatacagtggccggactcaagctcagaccaggcaagctagtgctctaattgacaggcctgccccacacttcgagcgtacagcaagtaaacgggcgtcccggagcctcgatggagcagcagctgtcgattcggcagaccgaagtcctcggcccacttctgcacctgccattactcagggtcaggttgcagaaggtggcgtcctagatgcctctgctaaaaaaacagtggtccctaaagcacagaaggaaacagtgaaggctgaagtgaaaaaggaagacgagccacctgagcaagctgagccagagcccacagaagcatggaaggatttagacaagagtcaagaggagatcaaaaaacatcatgccagcatcagtgagctgaaaaagaacttcatggagtctgtaccagaaccacggcctagtgaatgggataaacgcttatccactcactcacccttccgaactcttaacatcaatgggcaaatccccacaggagaaggacctcccctggtgaagacacaaactgtcaccatctcagataatgccaatgctgtgaaaagtgaaatcccaaccaaagacgtccctattgtccacactgagaccaagaccatcacttatgaggctgcccagactgacgacaacagtggagacttggacccaggagtcttgctgacagctcaaactatcacatctgagaccccaagcagcaccaccacaactcaaattaccaagactgtaaaaggtgggatttcagagacacgtattgaaaagagaattgtgatcacaggagatgctgatattgaccatgatcaggtccttgtacaagccatcaaggaggcaaaggagcagcacccagacatgtcagtgaccaaggtggtcgtccaccaggagaccgagattgctgatgagtgagctcaggaactaacctaccccaactctgcccttctcccatccaagagaaaccagcaaaatgataaagaagctaacctgccatagtcagacttcagactttcaagattattctaaatcaccagaaaattaatttcagtttctattgggagtttataccaagagattcttctagatctcattgatccttttgaagagctttttctatattaggatatcagaattgttcaacttttcactctatagactgttttaagagttttggggtttttttaattgggtggtttgtaaccccttcagcctag

SEQ ID NO: 9741 - DNA, 3029 bp, Homo sapiens
  source 1..3029: mol_type = unassigned DNA
ggggcaaagtggcaggaacctcttaaagggcgagagcggcgcggagccagaacgcggtcggcccggtccccgccgcacccagcccagcaacatcatgacaacagagaagagtttagtgactgaggccgaaaattcacagcaccaacagaaggaagagggtgaggaagccataaactcaggccaacaagaacctcagcaggaggaatcttgtcaaacagcagctgaaggagataattggtgtgaacagaagctgaaagcttctaatggagacactcctacacatgaagacttgaccaagaacaaggagcggacatcagaaagcagaggactttcacgactattctcctcgtttctcaaaaggcccaaatctcaggtgtccgaggaagaaggcaaagaagtagagtcagataaagaaaaaggtgaaggaggtcagaaagagatagaatttggaaccagtcttgatgaagagatcattttaaaggccccaattgcagctcctgaaccggaactcaaaacagacccatctttggatcttcattcattaagcagtgcagaaacacagcctcaccattacaattaagaattattttcagagtcttcttatttctgaagcatgtgaatattatctgcatcgttaaaagtcctgctcaggaagaactcagagaagatccagattttgaaattaaggaaggagaaggacttgaagagtgctccaaaatagaagtaaaagaagaaagccctcaatcaaaagcagaaacagaattaaaagcttcccaaaaaccaatcagaaaacacaggaacatgcactgcaaggtttctttgttggatgacacagtttatgaatgtgttgtggagaaacatgctaagggacaagatttgcttaaacgagtatgtgagcatctcaatcttttggaagaagactattttggtctagccatttgggataacgcaacctctaagacatggctggattccgccaaagaaataaaaaagcaggttcgtggtgtcccttggaattttacatttaatgtaaagttttatccacctgacccagcacagttaacagaagacataacaagatattatttatgtcttcagcttcggcaggacatagttgcaggacgtctgccctgttcctttgcaaccttagcattattaggttcttacaccatccagtctgaactgggagactacgacccagaactccatggcgtggattatgttagtgattttaaactggccccgaatcagaccaaggaacttgaagagaaggtcatggaactgcataagtcatacaggtccatgactccagctcaggctgacttggagtttcttgagaatgccaaaaagttgtctatgtatggagttgatcttcataaagcaaaggacttggaaggagtagatatcatcctaggtgtctgctctagtggccttctggtttacaaagataagctgagaattaaccgcttcccttggcccaaagtgctgaagatttcttataaacgtagtagctttttcatcaagattcggcctggagagcaagagcagtatgaaagtaccatcggattcaaacttcccagttaccgagcagctaagaaattatggaaagtctgtgtagaacatcacacgtttttcagattgacatctacagacaccattcccaaaagcaaatttcttgcgctaggatccaaatttcgatacagtggccggactcaagctcagaccaggcaagctagtgctctaattgacaggcctgccccacacttcgagcgtacagcaagtaaacgggcgtcccggagcctcgatggagcagcagctgtcgattcggcagaccgaagtcctcggcccacttctgcacctgccattactcagggtcaggttgcagaaggtggcgtcctagatgcctctgctaaaaaaacagtggtccctaaagcacagaaggaaacagtgaaggctgaagtgaaaaaggaagacgagccacctgagcaagctgagccagagcccacagaagcatggaaggtggaaaaaacccacatcgaggtgacagtacccacctcaaatggtgaccaaacacagaaaaagagagaaagactagatggtgaaaacatttatatcagacatagcaatttaatgttggaggatttagacaagagtcaagaggagatcaaaaaacatcatgccagcatcagtgagctgaaaaagaacttcatggagtctgtaccagaaccacggcctagtgaatgggataaacgcttatccactcactcacccttccgaactcttaacatcaatgggcaaatccccacaggagaaggacctcccctggtgaagacacaaactgtcaccatctcagataatgccaatgctgtgaaaagtgaaatcccaaccaaagacgtccctattgtccacactgagaccaagaccatcacttatgaggctgcccagactgacgacaacagtggagacttggacccaggagtcttgctgacagctcaaactatcacatctgagaccccaagcagcaccaccacaactcaaattaccaagactgtaaaaggtgggatttcagagacacgtattgaaaagagaattgtgatcacaggagatgctgatattgaccatgatcaggtccttgtacaagccatcaaggaggcaaaggagcagcacccagacatgtcagtgaccaaggtggtcgtccaccaggagaccgagattgctgatgagtgagctcaggaactaacctaccccaactctgcccttctcccatccaagagaaaccagcaaaatgataaagaagctaacctgccatagtcagacttcagactttcaagattattctaaatcaccagaaaattaatttcagtttctattgggagtttataccaagagattcttctagatctcattgatccttttgaagagctttttctatattaggatatcagaattgttcaacttttcactctatagactgttttaagagttttggggtttttttaattgggtggtttgtaaccccttcagcctag

SEQ ID NO: 9742 - DNA, 5831 bp, Homo sapiens
  source 1..5831: mol_type = unassigned DNA
agttgccctgtcagtgcaggtggaggccccggcggggcaaagtggcaggaacctcttaaagggcgagagcggcgcggagccagaacgcggtcggcccggtccccgccgcacccagcccagcaacatcatgacaacagagaagagtttagtgactgaggccgaaaattcacagcaccaacagaaggaagagggtgaggaagccataaactcaggccaacaagaacctcagcaggaggaatcttgtcaaacagcagctgaaggagataattggtgtgaacagaagctgaaagcttctaatggagacactcctacacatgaagacttgaccaagaacaaggagcggacatcagaaagcagaggactttcacgactattctcctcgtttctcaaaaggcccaaatctcaggtgtccgaggaagaaggcaaagaagtagagtcagataaagaaaaaggtgaaggaggtcagaaagagatagaatttggaaccagtcttgatgaagagatcattttaaaggccccaattgcagctcctgaaccggaactcaaaacagacccatctttggatcttcattcattaagcagtgcagaaacacagcctgctcaggaagaactcagagaagatccagattttgaaattaaggaaggagaaggacttgaagagtgctccaaaatagaagtaaaagaagaaagccctcaatcaaaagcagaaacagaattaaaagcttcccaaaaaccaatcagaaaacacaggaacatgcactgcaaggtttctttgttggatgacacagtttatgaatgtgttgtggagaaacatgctaagggacaagatttgcttaaacgagtatgtgagcatctcaatcttttggaagaagactattttggtctagccatttgggataacgcaacctctaagacatggctggattccgccaaagaaataaaaaagcaggttcgtggtgtcccttggaattttacatttaatgtaaagttttatccacctgacccagcacagttaacagaagacataacaagatattatttatgtcttcagcttcggcaggacatagttgcaggacgtctgccctgttcctttgcaaccttagcattattaggttcttacaccatccagtctgaactgggagactacgacccagaactccatggcgtggattatgttagtgattttaaactggccccgaatcagaccaaggaacttgaagagaaggtcatggaactgcataagtcatacaggtccatgactccagctcaggctgacttggagtttcttgagaatgccaaaaagttgtctatgtatggagttgatcttcataaagcaaaggacttggaaggagtagatatcatcctaggtgtctgctctagtggccttctggtttacaaagataagctgagaattaaccgcttcccttggcccaaagtgctgaagatttcttataaacgtagtagctttttcatcaagattcggcctggagagcaagagcagtatgaaagtaccatcggattcaaacttcccagttaccgagcagctaagaaattatggaaagtctgtgtagaacatcacacgtttttcagattgacatctacagacaccattcccaaaagcaaatttcttgcgctaggatccaaatttcgatacagtggccggactcaagctcagaccaggcaagctagtgctctaattgacaggcctgccccacacttcgagcgtacagcaagtaaacgggcgtcccggagcctcgatggagcagcagctgtcgattcggcagaccgaagtcctcggcccacttctgcacctgccattactcagggtcaggttgcagaaggtggcgtcctagatgcctctgctaaaaaaacagtggtccctaaagcacagaaggaaacagtgaaggctgaagtgaaaaaggaagacgagccacctgagcaagctgagccagagcccacagaagcatggaagaaaaagagagaaagactagatggtgaaaacatttatatcagacatagcaatttaatgttggaggatttagacaagagtcaagaggagatcaaaaaacatcatgccagcatcagtgagctgaaaaagaacttcatggagtctgtaccagaaccacggcctagtgaatgggataaacgcttatccactcactcacccttccgaactcttaacatcaatgggcaaatccccacaggagaaggacctcccctggtgaagacacaaactgtcaccatctcagataatgccaatgctgtgaaaagtgaaatcccaaccaaagacgtccctattgtccacactgagaccaagaccatcacttatgaggctgcccagactgacgacaacagtggagacttggacccaggagtcttgctgacagctcaaactatcacatctgagaccccaagcagcaccaccacaactcaaattaccaagactgtaaaaggtgggatttcagagacacgtattgaaaagagaattgtgatcacaggagatgctgatattgaccatgatcaggtccttgtacaagccatcaaggaggcaaaggagcagcacccagacatgtcagtgaccaaggtggtcgtccaccaggagaccgagattgctgatgagtgagctcaggaactaacctaccccaactctgcccttctcccatccaagagaaaccagcaaaatgataaagaagctaacctgccatagtcagacttcagactttcaagattattctaaatcaccagaaaattaatttcagtttctattgggagtttataccaagagattcttctagatctcattgatccttttgaagagctttttctatattaggatatcagaattgttcaacttttcactctatagactgttttaagagttttggggtttttttaattgggtggtttgtaaccccttcagcctagcctctctgcccatttatttccaaccccaacagacactgacagggtccatggaattcttcgggaaatcctccaaggactcttgtcagctgtgttggaagccaaagccagcttagtgggacttccgcgtctctccctagtcttatcccctttggatgatggcagaaacttcatgaaccagccctttctcagagccagtgatgtgagtgtatcagaatgccagggagggcaccagccctgatccacagacctcggaaagatgcccctgttcctttgttgcgggtggttttggtaaggcagagccctctgctgagaatgtagtattgtttttcccctctccctcctgctttctttttggagcttctttgggtcaaagacatggaagttgcttcagatatctgatactgtgaatgtttgaacatatccgtggccttcacctctccagctacccttttacctcatcagaagcagtggctcagctaagtgctccccctagctcccatctcaggagaccaaatctcacagaaaaataggcactttgggccaaaagctctaatggaacatttttagtggtgatttggggaaggaaagttaatgaggtttttaaaataaggttttctagttttgagagtgtgcacttcacacaggggaatggggttacttctgtctgatcctgggcctttctttcatcccaaatgacaaggaatgtggctcagagaagggtttttcttttttgacctttcttctctcaacaggaacctgcctgaggacacccttctagagcaaggaattgacttttaggagccgttctccccacaagacaccacatgacaaggggtataagccccagccctgctcattcccactcaccagctgaggtctgtcaggttttgaaggcttgattttgtggtgggtttggggcttagttttcctttttttcattttgatttttgaaagtgaagatgatgccctaattcctggtaaggatttggggcatagttttttgtttttttgagacggagtttcgctcttgttgcccaagctggagtgcagtggcgcgatctcggctcactgcaacctccgcctcctgggttcaagcagttctcttgcctcagcctcccaagtagctgggatgacaggcgcacaccaccacgcccagcaaattttttgtatttttagtagaaacgggatttcaccttgttaggctggtctcgaactcctgacctcaggtgatccacccaccttggcctcccaaagtgctgggattacaggtgtgagccaccacgcccggccgatttggggcatttttatttaacagaacttctctaaccttccaactgcttcccacaaacacattggcctcaaggctccttagaatcccagttccagcttcctaaaatagacagtgggtatcgggcagcagtcactggggctcaagggcagtgagcaagagaaatgtctaaagctgcttctcccaacaccgtccaaagtctccactgcctgagttttgtttcggctggtttgaactcatttcgggtgtgtgcatttttcttttggtacccatgtgagacatgaacaacaggagggagggaaagagcccaggtgggacgtgggacaggcttaggggaaagagcttgtcctatctcaggaacaaaattataggctgtgggcagagggtctgaaaggtgggctttggggtagtgcccaagcctggtcgtgttgccaggagtggtgacaagaaatgcagcttacatcaaacgaacatgtagtgcatgcccactgcctgatggccagatggcctgtaggaagagctaccagggcttccagacctgtggaacgaagaggatggggaaaaggcagagggcactgagtgtccctttaaaaactaacccactgaatattccgtgtgatctagaacagtgtggcagctttcacagcacaggaccgttcatcgggggcctaaacgtttccctcagctctgtcaccaactcacttctctcggcttcgttgtctgtaaattggatgaaaagagctctaatgcctttcaggctcttagaagccatagatttggacaagcccagcaagatgggtgtccttccaggcctcttcccctttcctccatctctggcaacagttcttggggtttggcaattgtttggattttttttctttctgcagttgtgtgtatgtgtgtttgtgtgaagaaaaacagactctgtccaggtagaaatggtgaggagggggaagagaattacatttccagggtcagaaacttggcaacagttttcctagagtgactcagacacaccacagtaacaactctcgctgcaattttattttaatttgagaaataaagatttcctccaagccacatgaggactctggcacccacccacaaagcaagacctgtatttataagccgagggctcagggagcctaactgcgggacccgtcagggccccgtgacccatccccgtccccacccccccctccaccgctgggcccatcagtgtgtgttggggggatgcttggcagctgggggtgaggagacaacaaacctcgggaactggagccagagctgcggcctgactgacgccttttgatgctcacgggaaatttctgcccaggatctcagccccaggctggttgtttctacaaatctctctcaaatgtattattttggtgacaaaaatgaaggagctttgtaaattttttttaaaattatgaatcatatcaagtagttgtttacatttcttgaaaaaataggaactcgggcagcagaatcagattggcagaatctttagactacacaggcaataatcaagtctgctgttttggcctttcgtagtagaagtggttgtagtgtttagatatctgtttggtcttgcttcttgtattgcatttttttc

SEQ ID NO: 9743 - DNA, 5751 bp, Homo sapiens
  source 1..5751: mol_type = unassigned DNA
agttgccctgtcagtgcaggtggaggccccggcggggcaaagtggcaggaacctcttaaagggcgagagcggcgcggagccagaacgcggtcggcccggtccccgccgcacccagcccagagaagagtttagtgactgaggccgaaaattcacagcaccaacagaaggaagagggtgaggaagccataaactcaggccaacaagaacctcagcaggaggaatcttgtcaaacagcagctgaaggagataattggtgtgaacagaagctgaaagcttctaatggagacactcctacacatgaagacttgaccaagaacaaggagcggacatcagaaagcagaggactttcacgactattctcctcgtttctcaaaaggcccaaatctcaggtgtccgaggaagaaggcaaagaagtagagtcagataaagaaaaaggtgaaggaggtcagaaagagatagaatttggaaccagtcttgatgaagagatcattttaaaggccccaattgcagctcctgaaccggaactcaaaacagacccatctttggatcttcattcattaagcagtgcagaaacacagcctgctcaggaagaactcagagaagatccagattttgaaattaaggaaggagaaggacttgaagagtgctccaaaatagaagtaaaagaagaaagccctcaatcaaaagcagaaacagaattaaaagcttcccaaaaaccaatcagaaaacacaggaacatgcactgcaaggtttctttgttggatgacacagtttatgaatgtgttgtggagaaacatgctaagggacaagatttgcttaaacgagtatgtgagcatctcaatcttttggaagaagactattttggtctagccatttgggataacgcaacctctaagacatggctggattccgccaaagaaataaaaaagcaggttcgtggtgtcccttggaattttacatttaatgtaaagttttatccacctgacccagcacagttaacagaagacataacaagatattatttatgtcttcagcttcggcaggacatagttgcaggacgtctgccctgttcctttgcaaccttagcattattaggttcttacaccatccagtctgaactgggagactacgacccagaactccatggcgtggattatgttagtgattttaaactggccccgaatcagaccaaggaacttgaagagaaggtcatggaactgcataagtcatacaggtccatgactccagctcaggctgacttggagtttcttgagaatgccaaaaagttgtctatgtatggagttgatcttcataaagcaaaggacttggaaggagtagatatcatcctaggtgtctgctctagtggccttctggtttacaaagataagctgagaattaaccgcttcccttggcccaaagtgctgaagatttcttataaacgtagtagctttttcatcaagattcggcctggagagcaagagcagtatgaaagtaccatcggattcaaacttcccagttaccgagcagctaagaaattatggaaagtctgtgtagaacatcacacgtttttcagattgacatctacagacaccattcccaaaagcaaatttcttgcgctaggatccaaatttcgatacagtggccggactcaagctcagaccaggcaagctagtgctctaattgacaggcctgccccacacttcgagcgtacagcaagtaaacgggcgtcccggagcctcgatggagcagcagctgtcgattcggcagaccgaagtcctcggcccacttctgcacctgccattactcagggtcaggttgcagaaggtggcgtcctagatgcctctgctaaaaaaacagtggtccctaaagcacagaaggaaacagtgaaggctgaagtgaaaaaggaagacgagccacctgagcaagctgagccagagcccacagaagcatggaaggatttagacaagagtcaagaggagatcaaaaaacatcatgccagcatcagtgagctgaaaaagaacttcatggagtctgtaccagaaccacggcctagtgaatgggataaacgcttatccactcactcacccttccgaactcttaacatcaatgggcaaatccccacaggagaaggacctcccctggtgaagacacaaactgtcaccatctcagataatgccaatgctgtgaaaagtgaaatcccaaccaaagacgtccctattgtccacactgagaccaagaccatcacttatgaggctgcccagactgacgacaacagtggagacttggacccaggagtcttgctgacagctcaaactatcacatctgagaccccaagcagcaccaccacaactcaaattaccaagactgtaaaaggtgggatttcagagacacgtattgaaaagagaattgtgatcacaggagatgctgatattgaccatgatcaggtccttgtacaagccatcaaggaggcaaaggagcagcacccagacatgtcagtgaccaaggtggtcgtccaccaggagaccgagattgctgatgagtgagctcaggaactaacctaccccaactctgcccttctcccatccaagagaaaccagcaaaatgataaagaagctaacctgccatagtcagacttcagactttcaagattattctaaatcaccagaaaattaatttcagtttctattgggagtttataccaagagattcttctagatctcattgatccttttgaagagctttttctatattaggatatcagaattgttcaacttttcactctatagactgttttaagagttttggggtttttttaattgggtggtttgtaaccccttcagcctagcctctctgcccatttatttccaaccccaacagacactgacagggtccatggaattcttcgggaaatcctccaaggactcttgtcagctgtgttggaagccaaagccagcttagtgggacttccgcgtctctccctagtcttatcccctttggatgatggcagaaacttcatgaaccagccctttctcagagccagtgatgtgagtgtatcagaatgccagggagggcaccagccctgatccacagacctcggaaagatgcccctgttcctttgttgcgggtggttttggtaaggcagagccctctgctgagaatgtagtattgtttttcccctctccctcctgctttctttttggagcttctttgggtcaaagacatggaagttgcttcagatatctgatactgtgaatgtttgaacatatccgtggccttcacctctccagctacccttttacctcatcagaagcagtggctcagctaagtgctccccctagctcccatctcaggagaccaaatctcacagaaaaataggcactttgggccaaaagctctaatggaacatttttagtggtgatttggggaaggaaagttaatgaggtttttaaaataaggttttctagttttgagagtgtgcacttcacacaggggaatggggttacttctgtctgatcctgggcctttctttcatcccaaatgacaaggaatgtggctcagagaagggtttttcttttttgacctttcttctctcaacaggaacctgcctgaggacacccttctagagcaaggaattgacttttaggagccgttctccccacaagacaccacatgacaaggggtataagccccagccctgctcattcccactcaccagctgaggtctgtcaggttttgaaggcttgattttgtggtgggtttggggcttagttttcctttttttcattttgatttttgaaagtgaagatgatgccctaattcctggtaaggatttggggcatagttttttgtttttttgagacggagtttcgctcttgttgcccaagctggagtgcagtggcgcgatctcggctcactgcaacctccgcctcctgggttcaagcagttctcttgcctcagcctcccaagtagctgggatgacaggcgcacaccaccacgcccagcaaattttttgtatttttagtagaaacgggatttcaccttgttaggctggtctcgaactcctgacctcaggtgatccacccaccttggcctcccaaagtgctgggattacaggtgtgagccaccacgcccggccgatttggggcatttttatttaacagaacttctctaaccttccaactgcttcccacaaacacattggcctcaaggctccttagaatcccagttccagcttcctaaaatagacagtgggtatcgggcagcagtcactggggctcaagggcagtgagcaagagaaatgtctaaagctgcttctcccaacaccgtccaaagtctccactgcctgagttttgtttcggctggtttgaactcatttcgggtgtgtgcatttttcttttggtacccatgtgagacatgaacaacaggagggagggaaagagcccaggtgggacgtgggacaggcttaggggaaagagcttgtcctatctcaggaacaaaattataggctgtgggcagagggtctgaaaggtgggctttggggtagtgcccaagcctggtcgtgttgccaggagtggtgacaagaaatgcagcttacatcaaacgaacatgtagtgcatgcccactgcctgatggccagatggcctgtaggaagagctaccagggcttccagacctgtggaacgaagaggatggggaaaaggcagagggcactgagtgtccctttaaaaactaacccactgaatattccgtgtgatctagaacagtgtggcagctttcacagcacaggaccgttcatcgggggcctaaacgtttccctcagctctgtcaccaactcacttctctcggcttcgttgtctgtaaattggatgaaaagagctctaatgcctttcaggctcttagaagccatagatttggacaagcccagcaagatgggtgtccttccaggcctcttcccctttcctccatctctggcaacagttcttggggtttggcaattgtttggattttttttctttctgcagttgtgtgtatgtgtgtttgtgtgaagaaaaacagactctgtccaggtagaaatggtgaggagggggaagagaattacatttccagggtcagaaacttggcaacagttttcctagagtgactcagacacaccacagtaacaactctcgctgcaattttattttaatttgagaaataaagatttcctccaagccacatgaggactctggcacccacccacaaagcaagacctgtatttataagccgagggctcagggagcctaactgcgggacccgtcagggccccgtgacccatccccgtccccacccccccctccaccgctgggcccatcagtgtgtgttggggggatgcttggcagctgggggtgaggagacaacaaacctcgggaactggagccagagctgcggcctgactgacgccttttgatgctcacgggaaatttctgcccaggatctcagccccaggctggttgtttctacaaatctctctcaaatgtattattttggtgacaaaaatgaaggagctttgtaaattttttttaaaattatgaatcatatcaagtagttgtttacatttcttgaaaaaataggaactcgggcagcagaatcagattggcagaatctttagactacacaggcaataatcaagtctgctgttttggcctttcgtagtagaagtggttgtagtgtttagatatctgtttggtcttgcttcttgtattgcatttttttc

SEQ ID NO: 9744 - DNA, 2402 bp, Homo sapiens
  source 1..2402: mol_type = unassigned DNA
cgggagggcgcgcgccagggtcgctcgctcgctccctccctccgctggtgcgtttagtcagtcagccagcagcagccggcgggcccgcgagccgcagagggcccgagcctcggacgccggcgcctcctcctgccattgttcgtcgggctgcagcagtggcgggcgcaggagcccggccccggagccaccgcaacatcatgacaacagagaagagtttagtgactgaggccgaaaattcacagcaccaacagaaggaagagggtgaggaagccataaactcaggccaacaagaacctcagcaggaggaatcttgtcaaacagcagctgaaggagataattggtgtgaacagaagctgaaagcttctaatggagacactcctacacatgaagacttgaccaagaacaaggagcggacatcagaaagcagaggactttcacgactattctcctcgtttctcaaaaggcccaaatctcaggtgtccgaggaagaaggcaaagaagtagagtcagataaagaaaaaggtgaaggaggtcagaaagagatagaatttggaaccagtcttgatgaagagatcattttaaaggccccaattgcagctcctgaaccggaactcaaaacagacccatctttggatcttcattcattaagcagtgcagaaacacagcctgctcaggaagaactcagagaagatccagattttgaaattaaggaaggagaaggacttgaagagtgctccaaaatagaagtaaaagaagaaagccctcaatcaaaagcagaaacagaattaaaagcttcccaaaaaccaatcagaaaacacaggaacatgcactgcaaggtttctttgttggatgacacagtttatgaatgtgttgtggagaaacatgctaagggacaagatttgcttaaacgagtatgtgagcatctcaatcttttggaagaagactattttggtctagccatttgggataacgcaacctctaagacatggctggattccgccaaagaaataaaaaagcaggttcgtggtgtcccttggaattttacatttaatgtaaagttttatccacctgacccagcacagttaacagaagacataacaagatattatttatgtcttcagcttcggcaggacatagttgcaggacgtctgccctgttcctttgcaaccttagcattattaggttcttacaccatccagtctgaactgggagactacgacccagaactccatggcgtggattatgttagtgattttaaactggccccgaatcagaccaaggaacttgaagagaaggtcatggaactgcataagtcatacaggtccatgactccagctcaggctgacttggagtttcttgagaatgccaaaaagttgtctatgtatggagttgatcttcataaagcaaaggacttggaaggagtagatatcatcctaggtgtctgctctagtggccttctggtttacaaagataagctgagaattaaccgcttcccttggcccaaagtgctgaagatttcttataaacgtagtagctttttcatcaagattcggcctggagagcaagagcagtatgaaagtaccatcggattcaaacttcccagttaccgagcagctaagaaattatggaaagtctgtgtagaacatcacacgtttttcagattgacatctacagacaccattcccaaaagcaaatttcttgcgctaggatccaaatttcgatacagtggccggactcaagctcagaccaggcaagctagtgctctaattgacaggcctgccccacacttcgagcgtacagcaagtaaacgggcgtcccggagcctcgatggagcagcagctgtcgattcggcagaccgaagtcctcggcccacttctgcacctgccattactcagggtcaggttgcagaaggtggcgtcctagatgcctctgctaaaaaaacagtggtccctaaagcacagaaggaaacagtgaaggctgaagtgaaaaaggaagacgagccacctgagcaagctgagccagagcccacagaagcatggaaggtggaaaaaacccacatcgaggtgacagtacccacctcaaatggtgaccaaacacagaaaaagagagaaagactagatggtgaaaacatttatatcagacatagcaatttaatgttggaggatttagacaagagtcaagaggagatcaaaaaacatcatgccagcatcagtgagctgaaaaagaacttcatggagtctgtaccagaaccacggcctagtgaatgggataaacgcttatccactcactcacccttccgaactcttaacatcaatgggcaaatccccacaggagaaggagtgagtactttgtccacatgaccaattgtgaaaatggagggaataaatgtttttatgtattaa

SEQ ID NO: 9745 - DNA, 5928 bp, Homo sapiens
  source 1..5928: mol_type = unassigned DNA
tgtgtctcactgctgtcatttgcttccatgtgccactgcggtgatggctccatggcctctcctggactggctgcgtgaccccgacggctgcttctggcaacatcatgacaacagagaagagtttagtgactgaggccgaaaattcacagcaccaacagaaggaagagggtgaggaagccataaactcaggccaacaagaacctcagcaggaggaatcttgtcaaacagcagctgaaggagataattggtgtgaacagaagctgaaagcttctaatggagacactcctacacatgaagacttgaccaagaacaaggagcggacatcagaaagcagaggactttcacgactattctcctcgtttctcaaaaggcccaaatctcaggtgtccgaggaagaaggcaaagaagtagagtcagataaagaaaaaggtgaaggaggtcagaaagagatagaatttggaaccagtcttgatgaagagatcattttaaaggccccaattgcagctcctgaaccggaactcaaaacagacccatctttggatcttcattcattaagcagtgcagaaacacagcctgctcaggaagaactcagagaagatccagattttgaaattaaggaaggagaaggacttgaagagtgctccaaaatagaagtaaaagaagaaagccctcaatcaaaagcagaaacagaattaaaagcttcccaaaaaccaatcagaaaacacaggaacatgcactgcaaggtttctttgttggatgacacagtttatgaatgtgttgtggagaaacatgctaagggacaagatttgcttaaacgagtatgtgagcatctcaatcttttggaagaagactattttggtctagccatttgggataacgcaacctctaagacatggctggattccgccaaagaaataaaaaagcaggttcgtggtgtcccttggaattttacatttaatgtaaagttttatccacctgacccagcacagttaacagaagacataacaagatattatttatgtcttcagcttcggcaggacatagttgcaggacgtctgccctgttcctttgcaaccttagcattattaggttcttacaccatccagtctgaactgggagactacgacccagaactccatggcgtggattatgttagtgattttaaactggccccgaatcagaccaaggaacttgaagagaaggtcatggaactgcataagtcatacaggtccatgactccagctcaggctgacttggagtttcttgagaatgccaaaaagttgtctatgtatggagttgatcttcataaagcaaaggacttggaaggagtagatatcatcctaggtgtctgctctagtggccttctggtttacaaagataagctgagaattaaccgcttcccttggcccaaagtgctgaagatttcttataaacgtagtagctttttcatcaagattcggcctggagagcaagagcagtatgaaagtaccatcggattcaaacttcccagttaccgagcagctaagaaattatggaaagtctgtgtagaacatcacacgtttttcagattgacatctacagacaccattcccaaaagcaaatttcttgcgctaggatccaaatttcgatacagtggccggactcaagctcagaccaggcaagctagtgctctaattgacaggcctgccccacacttcgagcgtacagcaagtaaacgggcgtcccggagcctcgatggagcagcagctgtcgattcggcagaccgaagtcctcggcccacttctgcacctgccattactcagggtcaggttgcagaaggtggcgtcctagatgcctctgctaaaaaaacagtggtccctaaagcacagaaggaaacagtgaaggctgaagtgaaaaaggaagacgagccacctgagcaagctgagccagagcccacagaagcatggaaggtggaaaaaacccacatcgaggtgacagtacccacctcaaatggtgaccaaacacagaagcttgcagaaaaaactgaagatctgataagaatgaggaagaaaaagagagaaagactagatggtgaaaacatttatatcagacatagcaatttaatgttggaggatttagacaagagtcaagaggagatcaaaaaacatcatgccagcatcagtgagctgaaaaagaacttcatggagtctgtaccagaaccacggcctagtgaatgggataaacgcttatccactcactcacccttccgaactcttaacatcaatgggcaaatccccacaggagaaggacctcccctggtgaagacacaaactgtcaccatctcagataatgccaatgctgtgaaaagtgaaatcccaaccaaagacgtccctattgtccacactgagaccaagaccatcacttatgaggctgcccagactgacgacaacagtggagacttggacccaggagtcttgctgacagctcaaactatcacatctgagaccccaagcagcaccaccacaactcaaattaccaagactgtaaaaggtgggatttcagagacacgtattgaaaagagaattgtgatcacaggagatgctgatattgaccatgatcaggtccttgtacaagccatcaaggaggcaaaggagcagcacccagacatgtcagtgaccaaggtggtcgtccaccaggagaccgagattgctgatgagtgagctcaggaactaacctaccccaactctgcccttctcccatccaagagaaaccagcaaaatgataaagaagctaacctgccatagtcagacttcagactttcaagattattctaaatcaccagaaaattaatttcagtttctattgggagtttataccaagagattcttctagatctcattgatccttttgaagagctttttctatattaggatatcagaattgttcaacttttcactctatagactgttttaagagttttggggtttttttaattgggtggtttgtaaccccttcagcctagcctctctgcccatttatttccaaccccaacagacactgacagggtccatggaattcttcgggaaatcctccaaggactcttgtcagctgtgttggaagccaaagccagcttagtgggacttccgcgtctctccctagtcttatcccctttggatgatggcagaaacttcatgaaccagccctttctcagagccagtgatgtgagtgtatcagaatgccagggagggcaccagccctgatccacagacctcggaaagatgcccctgttcctttgttgcgggtggttttggtaaggcagagccctctgctgagaatgtagtattgtttttcccctctccctcctgctttctttttggagcttctttgggtcaaagacatggaagttgcttcagatatctgatactgtgaatgtttgaacatatccgtggccttcacctctccagctacccttttacctcatcagaagcagtggctcagctaagtgctccccctagctcccatctcaggagaccaaatctcacagaaaaataggcactttgggccaaaagctctaatggaacatttttagtggtgatttggggaaggaaagttaatgaggtttttaaaataaggttttctagttttgagagtgtgcacttcacacaggggaatggggttacttctgtctgatcctgggcctttctttcatcccaaatgacaaggaatgtggctcagagaagggtttttcttttttgacctttcttctctcaacaggaacctgcctgaggacacccttctagagcaaggaattgacttttaggagccgttctccccacaagacaccacatgacaaggggtataagccccagccctgctcattcccactcaccagctgaggtctgtcaggttttgaaggcttgattttgtggtgggtttggggcttagttttcctttttttcattttgatttttgaaagtgaagatgatgccctaattcctggtaaggatttggggcatagttttttgtttttttgagacggagtttcgctcttgttgcccaagctggagtgcagtggcgcgatctcggctcactgcaacctccgcctcctgggttcaagcagttctcttgcctcagcctcccaagtagctgggatgacaggcgcacaccaccacgcccagcaaattttttgtatttttagtagaaacgggatttcaccttgttaggctggtctcgaactcctgacctcaggtgatccacccaccttggcctcccaaagtgctgggattacaggtgtgagccaccacgcccggccgatttggggcatttttatttaacagaacttctctaaccttccaactgcttcccacaaacacattggcctcaaggctccttagaatcccagttccagcttcctaaaatagacagtgggtatcgggcagcagtcactggggctcaagggcagtgagcaagagaaatgtctaaagctgcttctcccaacaccgtccaaagtctccactgcctgagttttgtttcggctggtttgaactcatttcgggtgtgtgcatttttcttttggtacccatgtgagacatgaacaacaggagggagggaaagagcccaggtgggacgtgggacaggcttaggggaaagagcttgtcctatctcaggaacaaaattataggctgtgggcagagggtctgaaaggtgggctttggggtagtgcccaagcctggtcgtgttgccaggagtggtgacaagaaatgcagcttacatcaaacgaacatgtagtgcatgcccactgcctgatggccagatggcctgtaggaagagctaccagggcttccagacctgtggaacgaagaggatggggaaaaggcagagggcactgagtgtccctttaaaaactaacccactgaatattccgtgtgatctagaacagtgtggcagctttcacagcacaggaccgttcatcgggggcctaaacgtttccctcagctctgtcaccaactcacttctctcggcttcgttgtctgtaaattggatgaaaagagctctaatgcctttcaggctcttagaagccatagatttggacaagcccagcaagatgggtgtccttccaggcctcttcccctttcctccatctctggcaacagttcttggggtttggcaattgtttggattttttttctttctgcagttgtgtgtatgtgtgtttgtgtgaagaaaaacagactctgtccaggtagaaatggtgaggagggggaagagaattacatttccagggtcagaaacttggcaacagttttcctagagtgactcagacacaccacagtaacaactctcgctgcaattttattttaatttgagaaataaagatttcctccaagccacatgaggactctggcacccacccacaaagcaagacctgtatttataagccgagggctcagggagcctaactgcgggacccgtcagggccccgtgacccatccccgtccccacccccccctccaccgctgggcccatcagtgtgtgttggggggatgcttggcagctgggggtgaggagacaacaaacctcgggaactggagccagagctgcggcctgactgacgccttttgatgctcacgggaaatttctgcccaggatctcagccccaggctggttgtttctacaaatctctctcaaatgtattattttggtgacaaaaatgaaggagctttgtaaattttttttaaaattatgaatcatatcaagtagttgtttacatttcttgaaaaaataggaactcgggcagcagaatcagattggcagaatctttagactacacaggcaataatcaagtctgctgttttggcctttcgtagtagaagtggttgtagtgtttagatatctgtttggtcttgcttcttgtattgcatttttttcaataaacaacaacaaaaagaa

SEQ ID NO: 9746 - DNA, 2853 bp, Homo sapiens
  source 1..2853: mol_type = unassigned DNA
ggggcaaagtggcaggaacctcttaaagggcgagagcggcgcggagccagaacgcggtcggcccggtccccgccgcacccagcccagagaagagtttagtgactgaggccgaaaattcacagcaccaacagaaggaagagggtgaggaagccataaactcaggccaacaagaacctcagcaggaggaatcttgtcaaacagcagctgaaggagataattggtgtgaacagaagctgaaagcttctaatggagacactcctacacatgaagacttgaccaagaacaaggagcggacatcagaaagcagaggactttcacgactattctcctcgtttctcaaaaggcccaaatctcaggtgtccgaggaagaaggcaaagaagtagagtcagataaagaaaaaggtgaaggaggtcagaaagagatagaatttggaaccagtcttgatgaagagatcattttaaaggccccaattgcagctcctgaaccggaactcaaaacagacccatctttggatcttcattcattaagcagtgcagaaacacagcctcaccattacaattaagaattattttcagagtcttcttatttctgaagcatgtgaatattatctgcatcgttaaaagtcctgctcaggaagaactcagagaagatccagattttgaaattaaggaaggagaaggacttgaagagtgctccaaaatagaagtaaaagaagaaagccctcaatcaaaagcagaaacagaattaaaagcttcccaaaaaccaatcagaaaacacaggaacatgcactgcaaggtttctttgttggatgacacagtttatgaatgtgttgtggagaaacatgctaagggacaagatttgcttaaacgagtatgtgagcatctcaatcttttggaagaagactattttggtctagccatttgggataacgcaacctctaagacatggctggattccgccaaagaaataaaaaagcaggttcgtggtgtcccttggaattttacatttaatgtaaagttttatccacctgacccagcacagttaacagaagacataacaagatattatttatgtcttcagcttcggcaggacatagttgcaggacgtctgccctgttcctttgcaaccttagcattattaggttcttacaccatccagtctgaactgggagactacgacccagaactccatggcgtggattatgttagtgattttaaactggccccgaatcagaccaaggaacttgaagagaaggtcatggaactgcataagtcatacaggtccatgactccagctcaggctgacttggagtttcttgagaatgccaaaaagttgtctatgtatggagttgatcttcataaagcaaaggacttggaaggagtagatatcatcctaggtgtctgctctagtggccttctggtttacaaagataagctgagaattaaccgcttcccttggcccaaagtgctgaagatttcttataaacgtagtagctttttcatcaagattcggcctggagagcaagagcagtatgaaagtaccatcggattcaaacttcccagttaccgagcagctaagaaattatggaaagtctgtgtagaacatcacacgtttttcagattgacatctacagacaccattcccaaaagcaaatttcttgcgctaggatccaaatttcgatacagtggccggactcaagctcagaccaggcaagctagtgctctaattgacaggcctgccccacacttcgagcgtacagcaagtaaacgggcgtcccggagcctcgatggagcagcagctgtcgattcggcagaccgaagtcctcggcccacttctgcacctgccattactcagggtcaggttgcagaaggtggcgtcctagatgcctctgctaaaaaaacagtggtccctaaagcacagaaggaaacagtgaaggctgaagtgaaaaaggaagacgagccacctgagcaagctgagccagagcccacagaagcatggaagaaaaagagagaaagactagatggtgaaaacatttatatcagacatagcaatttaatgttggaggatttagacaagagtcaagaggagatcaaaaaacatcatgccagcatcagtgagctgaaaaagaacttcatggagtctgtaccagaaccacggcctagtgaatgggataaacgcttatccactcactcacccttccgaactcttaacatcaatgggcaaatccccacaggagaaggacctcccctggtgaagacacaaactgtcaccatctcagataatgccaatgctgtgaaaagtgaaatcccaaccaaagacgtccctattgtccacactgagaccaagaccatcacttatgaggctgcccagactgtaaaaggtgggatttcagagacacgtattgaaaagagaattgtgatcacaggagatgctgatattgaccatgatcaggtccttgtacaagccatcaaggaggcaaaggagcagcacccagacatgtcagtgaccaaggtggtcgtccaccaggagaccgagattgctgatgagtgagctcaggaactaacctaccccaactctgcccttctcccatccaagagaaaccagcaaaatgataaagaagctaacctgccatagtcagacttcagactttcaagattattctaaatcaccagaaaattaatttcagtttctattgggagtttataccaagagattcttctagatctcattgatccttttgaagagctttttctatattaggatatcagaattgttcaacttttcactctatagactgttttaagagttttggggtttttttaattgggtggtttgtaaccccttcagcctag

SEQ ID NO: 9747 - DNA, 5450 bp, Homo sapiens
  source 1..5450: mol_type = unassigned DNA
agttgccctgtcagtgcaggtggaggccccggcggggcaaagtggcaggaacctcttaaagggcgagagcggcgcggagccagaacgcggtcggcccggtccccgccgcacccagcccagcaacatcatgacaacagagaagagtttagtgactgaggccgaaaattcacagcaccaacagaaggaagagggtgaggaagccataaactcaggccaacaagaacctcagcaggaggaatcttgtcaaacagcagctgaaggagataattggtgtgaacagaagctgaaagcttctaatggagacactcctacacatgaagacttgaccaagaacaaggagcggacatcagaaagcagaggactttcacgactattctcctcgtttctcaaaaggcccaaatctcaggtgtccgaggaagaaggcaaagaagtagagtcagataaagaaaaaggtgaaggaggtcagaaagagatagaatttggaaccagtcttgatgaagagatcattttaaaggccccaattgcagctcctgaaccggaactcaaaacagacccatctttggatcttcattcattaagcagtgcagaaacacagacatggctggattccgccaaagaaataaaaaagcaggttcgtggtgtcccttggaattttacatttaatgtaaagttttatccacctgacccagcacagttaacagaagacataacaagatattatttatgtcttcagcttcggcaggacatagttgcaggacgtctgccctgttcctttgcaaccttagcattattaggttcttacaccatccagtctgaactgggagactacgacccagaactccatggcgtggattatgttagtgattttaaactggccccgaatcagaccaaggaacttgaagagaaggtcatggaactgcataagtcatacaggtccatgactccagctcaggctgacttggagtttcttgagaatgccaaaaagttgtctatgtatggagttgatcttcataaagcaaaggacttggaaggagtagatatcatcctaggtgtctgctctagtggccttctggtttacaaagataagctgagaattaaccgcttcccttggcccaaagtgctgaagatttcttataaacgtagtagctttttcatcaagattcggcctggagagcaagagcagtatgaaagtaccatcggattcaaacttcccagttaccgagcagctaagaaattatggaaagtctgtgtagaacatcacacgtttttcagattgacatctacagacaccattcccaaaagcaaatttcttgcgctaggatccaaatttcgatacagtggccggactcaagctcagaccaggcaagctagtgctctaattgacaggcctgccccacacttcgagcgtacagcaagtaaacgggcgtcccggagcctcgatggagcagcagctgtcgattcggcagaccgaagtcctcggcccacttctgcacctgccattactcagggtcaggttgcagaaggtggcgtcctagatgcctctgctaaaaaaacagtggtccctaaagcacagaaggaaacagtgaaggctgaagtgaaaaaggaagacgagccacctgagcaagctgagccagagcccacagaagcatggaaggatttagacaagagtcaagaggagatcaaaaaacatcatgccagcatcagtgagctgaaaaagaacttcatggagtctgtaccagaaccacggcctagtgaatgggataaacgcttatccactcactcacccttccgaactcttaacatcaatgggcaaatccccacaggagaaggacctcccctggtgaagacacaaactgtcaccatctcagataatgccaatgctgtgaaaagtgaaatcccaaccaaagacgtccctattgtccacactgagaccaagaccatcacttatgaggctgcccagactgacgacaacagtggagacttggacccaggagtcttgctgacagctcaaactatcacatctgagaccccaagcagcaccaccacaactcaaattaccaagactgtaaaaggtgggatttcagagacacgtattgaaaagagaattgtgatcacaggagatgctgatattgaccatgatcaggtccttgtacaagccatcaaggaggcaaaggagcagcacccagacatgtcagtgaccaaggtggtcgtccaccaggagaccgagattgctgatgagtgagctcaggaactaacctaccccaactctgcccttctcccatccaagagaaaccagcaaaatgataaagaagctaacctgccatagtcagacttcagactttcaagattattctaaatcaccagaaaattaatttcagtttctattgggagtttataccaagagattcttctagatctcattgatccttttgaagagctttttctatattaggatatcagaattgttcaacttttcactctatagactgttttaagagttttggggtttttttaattgggtggtttgtaaccccttcagcctagcctctctgcccatttatttccaaccccaacagacactgacagggtccatggaattcttcgggaaatcctccaaggactcttgtcagctgtgttggaagccaaagccagcttagtgggacttccgcgtctctccctagtcttatcccctttggatgatggcagaaacttcatgaaccagccctttctcagagccagtgatgtgagtgtatcagaatgccagggagggcaccagccctgatccacagacctcggaaagatgcccctgttcctttgttgcgggtggttttggtaaggcagagccctctgctgagaatgtagtattgtttttcccctctccctcctgctttctttttggagcttctttgggtcaaagacatggaagttgcttcagatatctgatactgtgaatgtttgaacatatccgtggccttcacctctccagctacccttttacctcatcagaagcagtggctcagctaagtgctccccctagctcccatctcaggagaccaaatctcacagaaaaataggcactttgggccaaaagctctaatggaacatttttagtggtgatttggggaaggaaagttaatgaggtttttaaaataaggttttctagttttgagagtgtgcacttcacacaggggaatggggttacttctgtctgatcctgggcctttctttcatcccaaatgacaaggaatgtggctcagagaagggtttttcttttttgacctttcttctctcaacaggaacctgcctgaggacacccttctagagcaaggaattgacttttaggagccgttctccccacaagacaccacatgacaaggggtataagccccagccctgctcattcccactcaccagctgaggtctgtcaggttttgaaggcttgattttgtggtgggtttggggcttagttttcctttttttcattttgatttttgaaagtgaagatgatgccctaattcctggtaaggatttggggcatagttttttgtttttttgagacggagtttcgctcttgttgcccaagctggagtgcagtggcgcgatctcggctcactgcaacctccgcctcctgggttcaagcagttctcttgcctcagcctcccaagtagctgggatgacaggcgcacaccaccacgcccagcaaattttttgtatttttagtagaaacgggatttcaccttgttaggctggtctcgaactcctgacctcaggtgatccacccaccttggcctcccaaagtgctgggattacaggtgtgagccaccacgcccggccgatttggggcatttttatttaacagaacttctctaaccttccaactgcttcccacaaacacattggcctcaaggctccttagaatcccagttccagcttcctaaaatagacagtgggtatcgggcagcagtcactggggctcaagggcagtgagcaagagaaatgtctaaagctgcttctcccaacaccgtccaaagtctccactgcctgagttttgtttcggctggtttgaactcatttcgggtgtgtgcatttttcttttggtacccatgtgagacatgaacaacaggagggagggaaagagcccaggtgggacgtgggacaggcttaggggaaagagcttgtcctatctcaggaacaaaattataggctgtgggcagagggtctgaaaggtgggctttggggtagtgcccaagcctggtcgtgttgccaggagtggtgacaagaaatgcagcttacatcaaacgaacatgtagtgcatgcccactgcctgatggccagatggcctgtaggaagagctaccagggcttccagacctgtggaacgaagaggatggggaaaaggcagagggcactgagtgtccctttaaaaactaacccactgaatattccgtgtgatctagaacagtgtggcagctttcacagcacaggaccgttcatcgggggcctaaacgtttccctcagctctgtcaccaactcacttctctcggcttcgttgtctgtaaattggatgaaaagagctctaatgcctttcaggctcttagaagccatagatttggacaagcccagcaagatgggtgtccttccaggcctcttcccctttcctccatctctggcaacagttcttggggtttggcaattgtttggattttttttctttctgcagttgtgtgtatgtgtgtttgtgtgaagaaaaacagactctgtccaggtagaaatggtgaggagggggaagagaattacatttccagggtcagaaacttggcaacagttttcctagagtgactcagacacaccacagtaacaactctcgctgcaattttattttaatttgagaaataaagatttcctccaagccacatgaggactctggcacccacccacaaagcaagacctgtatttataagccgagggctcagggagcctaactgcgggacccgtcagggccccgtgacccatccccgtccccacccccccctccaccgctgggcccatcagtgtgtgttggggggatgcttggcagctgggggtgaggagacaacaaacctcgggaactggagccagagctgcggcctgactgacgccttttgatgctcacgggaaatttctgcccaggatctcagccccaggctggttgtttctacaaatctctctcaaatgtattattttggtgacaaaaatgaaggagctttgtaaattttttttaaaattatgaatcatatcaagtagttgtttacatttcttgaaaaaataggaactcgggcagcagaatcagattggcagaatctttagactacacaggcaataatcaagtctgctgttttggcctttcgtagtagaagtggttgtagtgtttagatatctgtttggtcttgcttcttgtattgcatttttttc

SEQ ID NO: 9748 - DNA, 5639 bp, Homo sapiens
  source 1..5639: mol_type = unassigned DNA
agttgccctgtcagtgcaggtggaggccccggcggggcaaagtggcaggaacctcttaaagggcgagagcggcgcggagccagaacgcggtcggcccggtccccgccgcacccagcccagcaacatcatgacaacagagaagagtttagtgactgaggccgaaaattcacagcaccaacagaaggaagagggtgaggaagccataaactcaggccaacaagaacctcagcaggaggaatcttgtcaaacagcagctgaaggagataattggtgtgaacagaagctgaaagcttctaatggagacactcctacacatgaagacttgaccaagaacaaggagcggacatcagaaagcagaggactttcacgactattctcctcgtttctcaaaaggcccaaatctcaggtgtccgaggaagaaggcaaagaagtagagtcagataaagaaaaaggtgaaggaggtcagaaagagatagaatttggaaccagtcttgatgaagagatcattttaaaggccccaattgcagctcctgaaccggaactcaaaacagacccatctttggatcttcattcattaagcagtgcagaaacacagcctgctcaggaagaactcagagaagatccagattttgaaattaaggaaggagaaggacttgaagagtgctccaaaatagaagtaaaagaagaaagccctcaatcaaaagcagaaacagaattaaaagcttcccaaaaaccaatcagaaaacacaggaacatgcactgcaaggtttctttgttggatgacacagtttatgaatgtgttgtggagaaacatgctaagggacaagatttgcttaaacgagtatgtgagcatctcaatcttttggaagaagactattttggtctagccatttgggataacgcaacctctaagacatggctggattccgccaaagaaataaaaaagcaggttcgtggtgtcccttggaattttacatttaatgtaaagttttatccacctgacccagcacagttaacagaagacataacaagatattatttatgtcttcagcttcggcaggacatagttgcaggacgtctgccctgttcctttgcaaccttagcattattaggttcttacaccatccagtctgaactgggagactacgacccagaactccatggcgtggattatgttagtgattttaaactggccccgaatcagaccaaggaacttgaagagaaggtcatggaactgcataagtcatacaggtccatgactccagctcaggctgacttggagtttcttgagaatgccaaaaagttgtctatgtatggagttgatcttcataaagcaaaggacttggaaggagtagatatcatcctaggtgtctgctctagtggccttctggtttacaaagataagctgagaattaaccgcttcccttggcccaaagtgctgaagatttcttataaacgtagtagctttttcatcaagattcggcctggagagcaagagcagtatgaaagtaccatcggattcaaacttcccagttaccgagcagctaagaaattatggaaagtctgtgtagaacatcacacgtttttcagattgacatctacagacaccattcccaaaagcaaatttcttgcgctaggatccaaatttcgatacagtggccggactcaagctcagaccaggcaagctagtgctctaattgacaggcctgccccacacttcgagcgtacagcaagtaaacgggcgtcccggagcctcgatggagcagcagctgtcgattcggcagaccgaagtcctcggcccacttctgcacctgccattactcagggtcaggttgcagaaggtggcgtcctagatgcctctgctaaaaaaacagtggtccctaaagcacagaaggaaacagtgaaggctgaagtgaaaaaggaagacgagccacctgagcaagctgagccagagcccacagaagcatggaaggatttagacaagagtcaagaggagatcaaaaaacatcatgccagcatcagtgagctgaaaaagaacttcatggagtctgtaccagaaccacggcctagtgaatgggataaacgcttatccactcactcacccttccgaactcttaacatcaatgggcaaatccccacaggagaaggaactgacgacaacagtggagacttggacccaggagtcttgctgacagctcaaactatcacatctgagaccccaagcagcaccaccacaactcaaattaccaagactgtaaaaggtgggatttcagagacacgtattgaaaagagaattgtgatcacaggagatgctgatattgaccatgatcaggtccttgtacaagccatcaaggaggcaaaggagcagcacccagacatgtcagtgaccaaggtggtcgtccaccaggagaccgagattgctgatgagtgagctcaggaactaacctaccccaactctgcccttctcccatccaagagaaaccagcaaaatgataaagaagctaacctgccatagtcagacttcagactttcaagattattctaaatcaccagaaaattaatttcagtttctattgggagtttataccaagagattcttctagatctcattgatccttttgaagagctttttctatattaggatatcagaattgttcaacttttcactctatagactgttttaagagttttggggtttttttaattgggtggtttgtaaccccttcagcctagcctctctgcccatttatttccaaccccaacagacactgacagggtccatggaattcttcgggaaatcctccaaggactcttgtcagctgtgttggaagccaaagccagcttagtgggacttccgcgtctctccctagtcttatcccctttggatgatggcagaaacttcatgaaccagccctttctcagagccagtgatgtgagtgtatcagaatgccagggagggcaccagccctgatccacagacctcggaaagatgcccctgttcctttgttgcgggtggttttggtaaggcagagccctctgctgagaatgtagtattgtttttcccctctccctcctgctttctttttggagcttctttgggtcaaagacatggaagttgcttcagatatctgatactgtgaatgtttgaacatatccgtggccttcacctctccagctacccttttacctcatcagaagcagtggctcagctaagtgctccccctagctcccatctcaggagaccaaatctcacagaaaaataggcactttgggccaaaagctctaatggaacatttttagtggtgatttggggaaggaaagttaatgaggtttttaaaataaggttttctagttttgagagtgtgcacttcacacaggggaatggggttacttctgtctgatcctgggcctttctttcatcccaaatgacaaggaatgtggctcagagaagggtttttcttttttgacctttcttctctcaacaggaacctgcctgaggacacccttctagagcaaggaattgacttttaggagccgttctccccacaagacaccacatgacaaggggtataagccccagccctgctcattcccactcaccagctgaggtctgtcaggttttgaaggcttgattttgtggtgggtttggggcttagttttcctttttttcattttgatttttgaaagtgaagatgatgccctaattcctggtaaggatttggggcatagttttttgtttttttgagacggagtttcgctcttgttgcccaagctggagtgcagtggcgcgatctcggctcactgcaacctccgcctcctgggttcaagcagttctcttgcctcagcctcccaagtagctgggatgacaggcgcacaccaccacgcccagcaaattttttgtatttttagtagaaacgggatttcaccttgttaggctggtctcgaactcctgacctcaggtgatccacccaccttggcctcccaaagtgctgggattacaggtgtgagccaccacgcccggccgatttggggcatttttatttaacagaacttctctaaccttccaactgcttcccacaaacacattggcctcaaggctccttagaatcccagttccagcttcctaaaatagacagtgggtatcgggcagcagtcactggggctcaagggcagtgagcaagagaaatgtctaaagctgcttctcccaacaccgtccaaagtctccactgcctgagttttgtttcggctggtttgaactcatttcgggtgtgtgcatttttcttttggtacccatgtgagacatgaacaacaggagggagggaaagagcccaggtgggacgtgggacaggcttaggggaaagagcttgtcctatctcaggaacaaaattataggctgtgggcagagggtctgaaaggtgggctttggggtagtgcccaagcctggtcgtgttgccaggagtggtgacaagaaatgcagcttacatcaaacgaacatgtagtgcatgcccactgcctgatggccagatggcctgtaggaagagctaccagggcttccagacctgtggaacgaagaggatggggaaaaggcagagggcactgagtgtccctttaaaaactaacccactgaatattccgtgtgatctagaacagtgtggcagctttcacagcacaggaccgttcatcgggggcctaaacgtttccctcagctctgtcaccaactcacttctctcggcttcgttgtctgtaaattggatgaaaagagctctaatgcctttcaggctcttagaagccatagatttggacaagcccagcaagatgggtgtccttccaggcctcttcccctttcctccatctctggcaacagttcttggggtttggcaattgtttggattttttttctttctgcagttgtgtgtatgtgtgtttgtgtgaagaaaaacagactctgtccaggtagaaatggtgaggagggggaagagaattacatttccagggtcagaaacttggcaacagttttcctagagtgactcagacacaccacagtaacaactctcgctgcaattttattttaatttgagaaataaagatttcctccaagccacatgaggactctggcacccacccacaaagcaagacctgtatttataagccgagggctcagggagcctaactgcgggacccgtcagggccccgtgacccatccccgtccccacccccccctccaccgctgggcccatcagtgtgtgttggggggatgcttggcagctgggggtgaggagacaacaaacctcgggaactggagccagagctgcggcctgactgacgccttttgatgctcacgggaaatttctgcccaggatctcagccccaggctggttgtttctacaaatctctctcaaatgtattattttggtgacaaaaatgaaggagctttgtaaattttttttaaaattatgaatcatatcaagtagttgtttacatttcttgaaaaaataggaactcgggcagcagaatcagattggcagaatctttagactacacaggcaataatcaagtctgctgttttggcctttcgtagtagaagtggttgtagtgtttagatatctgtttggtcttgcttcttgtattgcatttttttc

SEQ ID NO: 9749 - DNA, 5888 bp, Homo sapiens
  source 1..5888: mol_type = unassigned DNA
agttgccctgtcagtgcaggtggaggccccggcggggcaaagtggcaggaacctcttaaagggcgagagcggcgcggagccagaacgcggtcggcccggtccccgccgcacccagcccagcaacatcatgacaacagagaagagtttagtgactgaggccgaaaattcacagcaccaacagaaggaagagggtgaggaagccataaactcaggccaacaagaacctcagcaggaggaatcttgtcaaacagcagctgaaggagataattggtgtgaacagaagctgaaagcttctaatggagacactcctacacatgaagacttgaccaagaacaaggagcggacatcagaaagcagaggactttcacgactattctcctcgtttctcaaaaggcccaaatctcaggtgtccgaggaagaaggcaaagaagtagagtcagataaagaaaaaggtgaaggaggtcagaaagagatagaatttggaaccagtcttgatgaagagatcattttaaaggccccaattgcagctcctgaaccggaactcaaaacagacccatctttggatcttcattcattaagcagtgcagaaacacagcctgctcaggaagaactcagagaagatccagattttgaaattaaggaaggagaaggacttgaagagtgctccaaaatagaagtaaaagaagaaagccctcaatcaaaagcagaaacagaattaaaagcttcccaaaaaccaatcagaaaacacaggaacatgcactgcaaggtttctttgttggatgacacagtttatgaatgtgttgtggagaaacatgctaagggacaagatttgcttaaacgagtatgtgagcatctcaatcttttggaagaagactattttggtctagccatttgggataacgcaacctctaagacatggctggattccgccaaagaaataaaaaagcaggttcgtggtgtcccttggaattttacatttaatgtaaagttttatccacctgacccagcacagttaacagaagacataacaagatattatttatgtcttcagcttcggcaggacatagttgcaggacgtctgccctgttcctttgcaaccttagcattattaggttcttacaccatccagtctgaactgggagactacgacccagaactccatggcgtggattatgttagtgattttaaactggccccgaatcagaccaaggaacttgaagagaaggtcatggaactgcataagtcatacaggtccatgactccagctcaggctgacttggagtttcttgagaatgccaaaaagttgtctatgtatggagttgatcttcataaagcaaaggacttggaaggagtagatatcatcctaggtgtctgctctagtggccttctggtttacaaagataagctgagaattaaccgcttcccttggcccaaagtgctgaagatttcttataaacgtagtagctttttcatcaagattcggcctggagagcaagagcagtatgaaagtaccatcggattcaaacttcccagttaccgagcagctaagaaattatggaaagtctgtgtagaacatcacacgtttttcagattgacatctacagacaccattcccaaaagcaaatttcttgcgctaggatccaaatttcgatacagtggccggactcaagctcagaccaggcaagctagtgctctaattgacaggcctgccccacacttcgagcgtacagcaagtaaacgggcgtcccggagcctcgatggagcagcagctgtcgattcggcagaccgaagtcctcggcccacttctgcacctgccattactcagggtcaggttgcagaaggtggcgtcctagatgcctctgctaaaaaaacagtggtccctaaagcacagaaggaaacagtgaaggctgaagtgaaaaaggaagacgagccacctgagcaagctgagccagagcccacagaagcatggaaggtggaaaaaacccacatcgaggtgacagtacccacctcaaatggtgaccaaacacagaaaaagagagaaagactagatggtgaaaacatttatatcagacatagcaatttaatgttggaggatttagacaagagtcaagaggagatcaaaaaacatcatgccagcatcagtgagctgaaaaagaacttcatggagtctgtaccagaaccacggcctagtgaatgggataaacgcttatccactcactcacccttccgaactcttaacatcaatgggcaaatccccacaggagaaggacctcccctggtgaagacacaaactgtcaccatctcagataatgccaatgctgtgaaaagtgaaatcccaaccaaagacgtccctattgtccacactgagaccaagaccatcacttatgaggctgcccagactgacgacaacagtggagacttggacccaggagtcttgctgacagctcaaactatcacatctgagaccccaagcagcaccaccacaactcaaattaccaagactgtaaaaggtgggatttcagagacacgtattgaaaagagaattgtgatcacaggagatgctgatattgaccatgatcaggtccttgtacaagccatcaaggaggcaaaggagcagcacccagacatgtcagtgaccaaggtggtcgtccaccaggagaccgagattgctgatgagtgagctcaggaactaacctaccccaactctgcccttctcccatccaagagaaaccagcaaaatgataaagaagctaacctgccatagtcagacttcagactttcaagattattctaaatcaccagaaaattaatttcagtttctattgggagtttataccaagagattcttctagatctcattgatccttttgaagagctttttctatattaggatatcagaattgttcaacttttcactctatagactgttttaagagttttggggtttttttaattgggtggtttgtaaccccttcagcctagcctctctgcccatttatttccaaccccaacagacactgacagggtccatggaattcttcgggaaatcctccaaggactcttgtcagctgtgttggaagccaaagccagcttagtgggacttccgcgtctctccctagtcttatcccctttggatgatggcagaaacttcatgaaccagccctttctcagagccagtgatgtgagtgtatcagaatgccagggagggcaccagccctgatccacagacctcggaaagatgcccctgttcctttgttgcgggtggttttggtaaggcagagccctctgctgagaatgtagtattgtttttcccctctccctcctgctttctttttggagcttctttgggtcaaagacatggaagttgcttcagatatctgatactgtgaatgtttgaacatatccgtggccttcacctctccagctacccttttacctcatcagaagcagtggctcagctaagtgctccccctagctcccatctcaggagaccaaatctcacagaaaaataggcactttgggccaaaagctctaatggaacatttttagtggtgatttggggaaggaaagttaatgaggtttttaaaataaggttttctagttttgagagtgtgcacttcacacaggggaatggggttacttctgtctgatcctgggcctttctttcatcccaaatgacaaggaatgtggctcagagaagggtttttcttttttgacctttcttctctcaacaggaacctgcctgaggacacccttctagagcaaggaattgacttttaggagccgttctccccacaagacaccacatgacaaggggtataagccccagccctgctcattcccactcaccagctgaggtctgtcaggttttgaaggcttgattttgtggtgggtttggggcttagttttcctttttttcattttgatttttgaaagtgaagatgatgccctaattcctggtaaggatttggggcatagttttttgtttttttgagacggagtttcgctcttgttgcccaagctggagtgcagtggcgcgatctcggctcactgcaacctccgcctcctgggttcaagcagttctcttgcctcagcctcccaagtagctgggatgacaggcgcacaccaccacgcccagcaaattttttgtatttttagtagaaacgggatttcaccttgttaggctggtctcgaactcctgacctcaggtgatccacccaccttggcctcccaaagtgctgggattacaggtgtgagccaccacgcccggccgatttggggcatttttatttaacagaacttctctaaccttccaactgcttcccacaaacacattggcctcaaggctccttagaatcccagttccagcttcctaaaatagacagtgggtatcgggcagcagtcactggggctcaagggcagtgagcaagagaaatgtctaaagctgcttctcccaacaccgtccaaagtctccactgcctgagttttgtttcggctggtttgaactcatttcgggtgtgtgcatttttcttttggtacccatgtgagacatgaacaacaggagggagggaaagagcccaggtgggacgtgggacaggcttaggggaaagagcttgtcctatctcaggaacaaaattataggctgtgggcagagggtctgaaaggtgggctttggggtagtgcccaagcctggtcgtgttgccaggagtggtgacaagaaatgcagcttacatcaaacgaacatgtagtgcatgcccactgcctgatggccagatggcctgtaggaagagctaccagggcttccagacctgtggaacgaagaggatggggaaaaggcagagggcactgagtgtccctttaaaaactaacccactgaatattccgtgtgatctagaacagtgtggcagctttcacagcacaggaccgttcatcgggggcctaaacgtttccctcagctctgtcaccaactcacttctctcggcttcgttgtctgtaaattggatgaaaagagctctaatgcctttcaggctcttagaagccatagatttggacaagcccagcaagatgggtgtccttccaggcctcttcccctttcctccatctctggcaacagttcttggggtttggcaattgtttggattttttttctttctgcagttgtgtgtatgtgtgtttgtgtgaagaaaaacagactctgtccaggtagaaatggtgaggagggggaagagaattacatttccagggtcagaaacttggcaacagttttcctagagtgactcagacacaccacagtaacaactctcgctgcaattttattttaatttgagaaataaagatttcctccaagccacatgaggactctggcacccacccacaaagcaagacctgtatttataagccgagggctcagggagcctaactgcgggacccgtcagggccccgtgacccatccccgtccccacccccccctccaccgctgggcccatcagtgtgtgttggggggatgcttggcagctgggggtgaggagacaacaaacctcgggaactggagccagagctgcggcctgactgacgccttttgatgctcacgggaaatttctgcccaggatctcagccccaggctggttgtttctacaaatctctctcaaatgtattattttggtgacaaaaatgaaggagctttgtaaattttttttaaaattatgaatcatatcaagtagttgtttacatttcttgaaaaaataggaactcgggcagcagaatcagattggcagaatctttagactacacaggcaataatcaagtctgctgttttggcctttcgtagtagaagtggttgtagtgtttagatatctgtttggtcttgcttcttgtattgcatttttttc

SEQ ID NO: 9750 - DNA, 4707 bp, Homo sapiens
  source 1..4707: mol_type = unassigned DNA
cgcaggatgcgcggggacgcgccaccgccctccgcgcccagttccgccggcgcttccccggcggctcccgggcgctgactctcccgggcttttccgcctttctcgctcccgccccgccgggcggttcggcggccggtccccggaccccgccgggagctgctcgtctcaccctcgccacggcgcggacaataaattaatgcatcgcgcttgagtggagggggcggctgggcgcctcggtggtagctttctctcctggctggagacgaccacaaccgacatgggctgtttctgcgctgttccggaagaattttactgcgaagttttgctcctggatgaatccaagttaacccttaccacccagcagcagggcatcaagaagtcaacgaaaggttccgttgtccttgaccacgtattccatcacgtaaaccttgtggagatagattattttgggctacgttactgtgacagaagccatcagacgtattggctggatcctgcaaaaacccttgctgaacacaaagaactgatcaacactggacctccatatactttgtattttggtattaaattctatgctgaagatccatgtaaacttaaagaagaaataaccagatatcagtttttcttgcaggtgaagcaagatgtccttcagggccgtctgccctgtcccgtcaacactgctgctcagctgggagcgtatgccatccagtcggagcttggagattatgacccatataaacatactgcaggatatgtatctgagtaccggtttgttcctgatcagaaggaagaacttgaagaagccatagaaaggattcataaaactctaatgggtcagattccttctgaggctgagctgaattacttgaggactgccaaatccctggagatgtatggcgttgacctccatcccgtctatggagaaaacaagtctgagtatttcttaggattaactccggttggtgttgttgtgtacaagaataaaaagcaagtggggaagtatttctggcctcggattacaaaggttcacttcaaggagactcaatttgaactcagagtactgggaaaagattgtaacgaaacctcattcttttttgaagctcggagtaaaactgcttgcaagcacctctggaagtgcagtgtggaacatcatacattttttagaatgccagaaaatgaatccaattcactgtcaagaaaactcagcaagtttggatccatacgttataagcaccgctacagtggcaggacagctttgcaaatgagccgagatctttctattcagcttccccggcctgatcagaatgtgacaagaagtcgaagcaagacttaccctaagcgaatagcacaaacacagccagctgaatcaaacagcatcagtaggataactgcaaacatggaaaatggagaaaatgaaggaacaattaaaattattgcaccttcaccagtaaaaagctttaagaaagcaaagaatgaaaatagccctgatacccaaagaagcaaatctcatgcaccgtgggaagaaaatggcccccagagtggactctacaattctcccagtgatcgcactaagtcgccaaagttcccttacacgcgtcgccgaaacccctcctgtggaagtgacaatgattctgtacagcctgtgaggaggaggaaagcccataacagtggtgaagattcagatcttaagcaaaggaggaggtcacgttcacgctgtaacaccagcagtggtagtgaatcagaaaattctaatagagaataccggaaaaagagaaacagaatacggcaggagaatgatatggttgattcagcgcctcagtgggaagctgtattaaggagacaaaaggaaaaaaaccaagccgaccccaacaacaggcgatccagacacagatctcgttcgagaagccccgatatccaagcaaaagaagagttatggaagcacattcaaaaagaacttgtggatccatccggattgtccgaagaacaattaaaagagattccatacactaaaatagagacacaaggtgacccaatccgcatcaggcattctcattcgccacgaagttaccgccagtatcgcaggtcccagtgttcagatggggagcgatcagttctctcggaagtgaattcaaaaacagatcttgtaccaccacttccggtgacccgttcttcggatgctcagggttctggggatgctacagttcatcagagaagaaatgggtctaaagatagcctgatggaagaaaaacctcagacatctacaaacaacctggctggaaaacacacagcaaaaacaataaaaactatacaagcttcccgcctcaagacagagacttgatcctgatgaagggtcaagggtaggggtgggaaggttgtgtgcgccactggtacttttgaaactgtgaaataggtatcttaattcaaatctcagacctgcaagtatttcttcagcatgagaaaatacattatcttttgcttctttttttttttttttttgagatgttatcactctgtcgcccaggctggagtgcagcggcaccgtgtcagctcaccgcagcctccacttactgggttaagcgattctcctgtctcaggctcccgagcagctgggattacaggcgtgcaccacaacacccggctaattctttttgtatttttagtagagacagggctttgccatgttggaggctggtctcgaactcctgacctcaagtgatccgcctgcctcagcctcccaaagtgctgggattataggccatggtttaactacagcacagttgtgctgaaggacctttttgttttaactggaagaataagtattttgtaaaaattcacttgataccacattttcatttctggaacaggatagcaatcattcatttctatcttgtgtctgtgtccaccacaaccaagaccagatgcatctgatgaacattctggaattctgaactgcagctagcctgctgtgcaatagtacaagtgggaggacgtcttcccagggctgggctggttctcaactagtgcccagatgcaaaaggactgaggcatcactttcagactgcatatatttttattcatataaagttctttataatactttattttgtggtgttaagttccaccagttatttacaaatgatgtaaaaagctttaagtgttgttaatttctaaagtgttcttgcgttttcagaagtgtaagtggatctcagttgatctgtcaccccaaacctcaaatgatccatccaccctgcttggccatctaattcacctgctctccccagtgactattttgtacctttcctctccatagatgactttgcaatctacagggaaaatacttatgcaggacatcttatatctcccccttaccacgtacagttctctccacagctgccagcagccctaacctttttgtctctccacctgtgctttggatgctcttctcccagccttttcaggatctttgtctgtcctcctatattaatgtattcaattattctctcagctagatccttgctacttggttttaaatttaagactaagattaaacaaaactatctttcacaaccacaaaccccctcccgccaagcaactaagattttcctctcattctcagccagttttcttgcaagcagtatctttagtcattgccctcaattcatctaatccctatcttaagctatctctaacatggatctttccctctactccactaatatcaatcactgtgttacttaatcccagggagaatttttaggacattcttttgcttctttaatataatcctattttgctcctaccactgaccatcctttctggcttatcatgctttaccttgccattaattagtggagtttctcaaacttcagaccctaggccctcttcctctaccaccagcagatctcatttatacccatggccttaaggtttatttctgtagtttagactactgagtaatgtgctactgcaaaaagaccatttgggtttctcaaaggtaatttaaaaattcagctgtttaaatgctgctccccagctgaatctagggtcattatgctcatcagtgtgcaagctggacacctagcagttatggacacctccactattaccacgtctagttggctctgtcatccaactataaacgatcttatttcactaattttactagtccaagctggtctcttgtctagacaacaataagcaacctagttcaactaccttttcttgcaaatctgattttccaccatggatttatcttgctttaataaagccagagggagcctgaagtggtctggcttctttacctacctcttcagcctcattttgtaacactctcacctcccataatagccatcttacaagcctcagtaaggactcagttctaaaacagggcactgaagagggaaagcagccaaaactgtctcaaaagtaagtggactaacggtatcttttttctagcccaagcctctgtatatgtcattcccccagttttgccttgtgaaaaatatgacacatacctttagtctcaactctttctcaggtttccctaagaaaatcctatcacggaactcatctcatagtgaagttttacatttgtgatgacattccctccacttatctatgtttccaaagggaagaactgtgttgtgctcatcatcgtgttctcagctcctagtacagtgctttcaataaattttttgaatacctcta

SEQ ID NO: 9751 - DNA, 5576 bp, Homo sapiens
  source 1..5576: mol_type = unassigned DNA
caggccgccggcccgggagagcgcgcggcggcggcggcggcgggacggccccgagcgcgccctcccgcctgcggccactcgcagccggcgctggccgggccggcgcgccccgcaggcggctagagcgcggcctcggcctcggcgcgggcttgccccgggccgtagcccgcgagaggcggcgcgggcggccgagggcactgacggcgtcgcgggacgctcccgggcggcggcgcagcggcagcggcagcggcagcggcagcgcagggggcggaggcagggggcgcccccagccaggatgctgcggttcctgcgccggacctttggccgccgctccatgcagcgctacgcgcggggcgcggcggggcgcggggccgccgggctgggggacgagcgcgatggggggccacgggggggcccggccgccgccgcctcctcctcggcgctgcccgccgcgcccgggggcagcgtgttcccggcgggcggcgggcccctgctcaccggcggcgcggccgtgcacatctccgccgccggcgccgccaaggccaccctctactgccgcgtcttcctgctcgacgggaccgaagtgagcgtggacctgccgaaacatgccaaaggccaggatttgtttgatcagattgtgtaccacttggaccttgtggaaacagattactttggcctccagttcctcgactctgcccaggttgcgcactggctggatcatgccaaacccataaaaaagcagatgaaaattggacctgcttatgctttacactttcgagttaaatactattcttcagaaccaaacaaccttcgtgaggagtttacaaggtacctgtttgttttacaactcaggcatgacattctttctggaaaattgaaatgcccttatgaaacagctgtggaattagctgctctctgtctacaagcggagcttggggagtgcgagcttccagaacacacaccagagcttgtgtctgagtttcggttcattccaaatcagacagaagcaatggaatttgatatcttccagagatggaaagagtgcaggggaaagagccctgcccaggcggaactctcctatctgaataaagcgaagtggctggaaatgtatggggtagacatgcacgttgtcaggggaagagatggctgtgaatattctcttggactgaccccgacaggcatattaatctttgaaggagctaacaaaataggcttattcttttggcctaaaattaccaaaatggattttaaaaagagcaaattgacactcgtggtggtcgaggatgatgatcagggacgtgagcaagagcacacgtttgtgttccggttagacagtgccaggacctgcaaacacctttggaagtgtgcagttgagcaccacgcattcttccgactgcggacgccaggaaacagcaaatccaatagatccgactttatcaggctgggctctcgcttcagattcagtgggcggacagaatatcaagctacacatggctccaggttacgaagaaccagcacctttgagaggaagcctagtaaacgttatccatcccggagacattcaacgttcaaagcaagcaacccagtgatagcagcccagctctgctctaaaacaaatccagaagtccataattaccagcctcaatatcatcctaatatccatcccagccagccccggtggcatcctcactctccaaatgtcagctacccgctcccttccccagtgcttagcagctcggaccggttgccttttggcattgaggagaatgggggcacaccgttcctcaccgcagcttcaggaaggcatcaccaccagcaccagcatcagcatcagcaccagcaccactcaaactacagcctctcactgaccctggagaacaaagaggggcctctgaggtccccaaactccagcagcaagtcccttacaaaactgagtccaggaacacctgccttgttcagtgaagccgctgcccatctaaagaagctggaactggaaactgtgaaggctgctggaccctggcctcctctgcacatcaacataaacaaggctgaagaaaagaaagtctcggagaaaactcttcagactccacttttgccttcccctgttgcggatcatgtgaagtgtaacattctgaaagcccagttggaaaatgcttcccgagtgaacatccagggtggaaaggaggaatcaccgtttgtaaatatcaataagaaatccagtcttcaggacgctagtgtaagaagtcctattcctattcgtgtggaaactgcccagccagctgtggaaaagccggaaatcaagcctccccgagtgaggaagttaacaagacagtatagttttgatgaagacgacctccctccagacctggccgaggcagtgggagtgaccacatctacaaccacaaacaccacaacggccgccacacaagtctccgtgccgctgccgtcccccaaggtccagaatgtcagctcgcctcacaagtcagaaggcaaaggcctgctgtcccctggggccaagagcccctctgaccgaggaggtgcctttaccctggagccgggtgatcttctgatggatttcacagaagccactcctctggcagagcccgccagcaacccccactgtgcccactctcgctgttctcctccactctctctccccatgaaggaagagaccactggagtttgcatgtaccctccaatcaaaacgaggctgataaaaacattcccggttgatacaatgaacccgtttcctgatactttcaccacagggccacagtttactgcagacttcagagacagtaaattacagtgctgtcctggcccgacttccccgctgatcccagcagcgaccctgaggcctttgacagagaccgtccacagtgcagaccatttacaccacccggaaacctgtttctctggcagccagtgcagagacactccggcaggaactggagagagagaagatgatgaaaagactgttgatgaccgaactgtgaaattctccccttgtcacctggaagatggcatggtgccttctgtccgtcttctttcttcgggctttgtgtgctcactctagcacagcatacaagtgtgtgctctgttcgcccaggtctccatggttagttgaagccaatttctggcttgacttttatgggaaaagttattttatgtctcctaagcattagagtttttctattactctatgtagttgagacaggatttgataagtctaggaaaagaaagatgggaaaacgggattccttttcagaagtacctgtgtgtatctgttaataaccacaggggttaatatgatgtaggatcttttactatcaatttcaaccatttgattttgtatgattgaaacttgcaccgagctttgactgtttgttaaagagtcatttttaatgaaagaataattctttattgctggtttttcatttacactgataaatacacagatcttataaagtctttaacattcatttgtattcagatgtgagtagaagaactaaaaaaagaaagttacatatcactatgactgaaggtacttcagcttaatctgaaatataatttaacttgtgaactccttggatatgatattatttggaataaacagaatttatcattgaacccaaagtaggaaatgatagcttacattgtctaaaaatccttacaaggttaagatgattcaatatcaagaagattcagaaaattatttctaaagttgatcgattcatgtcgtattgatagaatcttgaccagaagaaattttgctctttttatatagtttcaagaaatgtgtttttaaatttttattaatgcacttgaacaactttgcaggaataaagcaaccccctaaccacaaaatatccctctaaattagttccctagctttctcaatgaatacacacatatttttacatagctatgatcgttgtgtacattctcctttgttttacttctcggcctaacacttgtctcctcttgtcaacacagattctactctcaccaatttaaatgtctttatatccatgtaacatgggtaacctcacttcaccccattattagatatttgagttatatctaatttttcactcttataaatagtgctgctatgaatgtctgtaaaaaaaaaaaactgctccttcttttggattattcccttaggaatatctccaaagagggattacaaggtcaaagagcatgaagtattttatagctcttgttttatattgccagattgctttctagaaagatccaatctttgggttggaaggaccttaaaggtcatctagtttagcctccccaccccctctgaatgcttgaatcccctcgacaatttatgatgccaccagcaatgtataagcatttctgtttaccaatagctctgccagtattgggttttgccatttttatttatttttgctagtttaataggtatgtatagttgttcttgaagagttgttttatttcattaattgctagcaaggctgagcacttttccatgtgatgatttactagttgtatttccttgtgtgtaaaatgttcattcatttcttatgaccacttgttaagaggaactgatctcatatatttgtatcagaactgtatttttatgttatattgtatagtttgctctcctgcccctctccttaaaactgaatggtgccaataatttgatactaatgactacaaaaaaaggtaatgcctcatttactagtattgttgtaaaatgaggaatgtatgtgaatattcagataaccgaggattaaccctttaagtgctgaatctttaaaattttaatatatttttttttgagggaaatctttctaaaatgtattacgcacttccctgccttagtaaacagagtatactggagagtatttaaccttttcttgatgagtcatggtcatgattataaacatcagccccttttataccttggtacggtgcagtgatatcattaagagctatcaatatgtgtagggcttggcttggccttttataggatattatgctgttctcactgatggttttttactgctctctgctctgtcagtggagctatccggggcaattgtagcgtttgggtccttttacccctatgtcccccggctatacttttaaaacagctttagctgttctttatcttgtgcacatgatacaaaatatgttcccgtacaatatggggctgtcacttcttgccaacccagcaccctcttcctcttctaacctgctttctgaggcttctgctcttcacctcctgctcgctgatggaaacctccagggcaaagctgaaggtttcttggggaagccaggaaagccagtatttcctatgtgtcagatctgcttggcttccaagaagggatgcatgggctttttggccagtgtttccaggaggctctgggcttcctgcttcttccccgcttcccccagagttcacagatgttgaagtttctgaaggttgacgtcactggaagtctgaccacaaacaagttggctgttactgtatttgaaacccagtacctttggcagctcacctctaaccagtaaaataagaggattccatggtttca

SEQ ID NO: 9752 - DNA, 2962 bp, Homo sapiens
  source 1..2962: mol_type = unassigned DNA
tgggatatgggatattgtaatgggagagcaggaaatttaaggtcggaggtatttgtttaggatacctcagtattctagagctatgggatttattttgctttgaagtccagaggtatttagctttattctaaaagcgatgaagttcctcttaattaaagacgctcctggaaaaaaaaaaaggaaaaatttaatgctgtcttttaaaaggaaacatgccaaaggccaggatttgtttgatcagattgtgtaccacttggaccttgtggaaacagattactttggcctccagttcctcgactctgcccaggttgcgcactggctggatcatgccaaacccataaaaaagcagatgaaaattggacctgcttatgctttacactttcgagttaaatactattcttcagaaccaaacaaccttcgtgaggagtttacaaggtacctgtttgttttacaactcaggcatgacattctttctggaaaattgaaatgcccttatgaaacagctgtggaattagctgctctctgtctacaagcggagcttggggagtgcgagcttccagaacacacaccagagcttgtgtctgagtttcggttcattccaaatcagacagaagcaatggaatttgatatcttccagagatggaaagagtgcaggggaaagagccctgcccaggcggaactctcctatctgaataaagcgaagtggctggaaatgtatggggtagacatgcacgttgtcaggggaagagatggctgtgaatattctcttggactgaccccgacaggcatattaatctttgaaggagctaacaaaataggcttattcttttggcctaaaattaccaaaatggattttaaaaagagcaaattgacactcgtggtggtcgaggatgatgatcagggacgtgagcaagagcacacgtttgtgttccggttagacagtgccaggacctgcaaacacctttggaagtgtgcagttgagcaccacgcattcttccgactgcggacgccaggaaacagcaaatccaatagatccgactttatcaggctgggctctcgcttcagattcagtgggcggacagaatatcaagctacacatggctccaggttacgaagaaccagcacctttgagaggaagcctagtaaacgttatccatcccggagacattcaacgttcaaagcaagcaacccagtgatagcagcccagctctgctctaaaacaaatccagaagtccataattaccagcctcaatatcatcctaatatccatcccagccagccccggtggcatcctcactctccaaatgtcaggccatcctttcaggatgacaggtcgcattggaaagcatcggccagtggagatgacagccattttgattatgtccacgaccagaaccagaagaacttaggagggatgcaaagtatgatgtatcgagataaactcatgactgcactttgagagactgaagcatctctcttccattcaccttcatagtttcattgcattccatgaaaagtgtcttggcctcagatggatggatgtgtttggacgagtgtctttaaggagtagtcctgaaaggtgtttttggtgtccatgtaaatatttgaagataaaaccactatagcttgtcataatttactgttgactgcattctcattaaaatgaaggtaaaggctcaggaatcatattgatgttctgattttaaaattggagtcaaagtctatgtttatcattttactatgttcctgatgttctttgttatttaattaatgggagcaaataaaaccagaagagcttgggaagattgctcagcatatattcctgtcgtagaagttgagattgctagggtccagtttccctagtgtggcctggacgagtcatttccccttcattgacctcattttccccatctgaaaagagagggttggactaagtgatctccaaggtcctttccaactctaaaattctgcaatttgttaacatttcattttgtttaggttgaggacatacattcaaactaattttatcacaaggaaaactgcaatacccacttccttgacagagttactcctttcagaagctaaataaagtatataacttattagatgttatatagatacagggggactttgaatttcacatcttaaagcagttgagctactttgaatttaagcagtcgtactaatcttaaattgcatagcatttgttttgatcgaatttgctgctcaagtatgggaataatttttaatgtcttaatgattggtgctgctaacttgcgtgatttcagaagacataattgtgaatacacactgtcagaattgggggattggtttttaccctagacttcactcttaaaaagcaacgtgcaatcaagatcatttatggctcaaatgaaagcatataaggttttcttgaagttgtgccaaagcattctgtagagtaggatgagatggttgttgccctagtctgttggtagaaccagaaatcaatatgttgtcttttaggttaaagcttgtaccaaaatatttatttcccccatttcaagccctgagtcaaacatttttttctcttaataatagacctgaaatgttttattagtatttctgtgaaatcagttgattcttgtgccatttttgtatatgtaattgtaattttgcccatgttaggccctctaaaaaatgtttgacatcctttgagatattttattactaaaatctgatcttttttggctactgcaaaaatctattcagcaagaaggtatcagctgcataccttgcacagtggagctgactacctataaactctccctaaggcatttgtttacaggtgtattccattttagcagacgttctgatgctcagtgtatgtgctgcatacaaataaatgtgttctgaatcttttcatcttattgatagcatttttacaaatgtgtttccaaggaataaagattattcttgcttt

SEQ ID NO: 9753 - DNA, 3843 bp, Homo sapiens
  source 1..3843: mol_type = unassigned DNA
ggaaaaggcgccttgggagcgggcgctcggcggggcctcctcgggccccgggcgcggcgcggcgagtgggagcgagcgcgccaggaccacgcaggcgccctgctccggctggccctcggccggcgcgcggcgcgggagcagcccgcagcccgcctcccgcgcccccggcagccccctggcagcccgcagccgcccgtccggagcagcccctcggcagcccgcgcaggccgccggcccgggagagcgcgcggcggcggcggcggcgggacggccccgagcgcgccctcccgcctgcggccactcgcagccggcgctggccgggccggcgcgccccgcaggcggctagagcgcggcctcggcctcggcgcgggcttgccccgggccgtagcccgcgagaggcggcgcgggcggccgagggcactgacggcgtcgcgggacgctcccgggcggcggcgcagcggcagcggcagcggcagcggcagcgcagggggcggaggcagggggcgcccccagccaggatgctgcggttcctgcgccggacctttggccgccgctccatgcagcgctacgcgcggggcgcggcggggcgcggggccgccgggctgggggacgagcgcgatggggggccacgggggggcccggccgccgccgcctcctcctcggcgctgcccgccgcgcccgggggcagcgtgttcccggcgggcggcgggcccctgctcaccggcggcgcggccgtgcacatctccgccgccggcgccgccaaggccaccctctactgccgcgtcttcctgctcgacgggaccgaagtgagcgtggacctgccgaaacatgccaaaggccaggatttgtttgatcagattgtgtaccacttggaccttgtggaaacagattactttggcctccagttcctcgactctgcccaggttgcgcactggctggatcatgccaaacccataaaaaagcagatgaaaattggacctgcttatgctttacactttcgagttaaatactattcttcagaaccaaacaaccttcgtgaggagtttacaaggtacctgtttgttttacaactcaggcatgacattctttctggaaaattgaaatgcccttatgaaacagctgtggaattagctgctctctgtctacaagcggagcttggggagtgcgagcttccagaacacacaccagagcttgtgtctgagtttcggttcattccaaatcagacagaagcaatggaatttgatatcttccagagatggaaagagtgcaggggaaagagccctgcccaggcggaactctcctatctgaataaagcgaagtggctggaaatgtatggggtagacatgcacgttgtcaggggaagagatggctgtgaatattctcttggactgaccccgacaggcatattaatctttgaaggagctaacaaaataggcttattcttttggcctaaaattaccaaaatggattttaaaaagagcaaattgacactcgtggtggtcgaggatgatgatcagggacgtgagcaagagcacacgtttgtgttccggttagacagtgccaggacctgcaaacacctttggaagtgtgcagttgagcaccacgcattcttccgactgcggacgccaggaaacagcaaatccaatagatccgactttatcaggctgggctctcgcttcagattcagtgggcggacagaatatcaagctacacatggctccaggttacgaagaaccagcacctttgagaggaagcctagtaaacgttatccatcccggagacattcaacgttcaaagcaagcaacccagtgatagcagcccagctctgctctaaaacaaatccagaagtccataattaccagcctcaatatcatcctaatatccatcccagccagccccggtggcatcctcactctccaaatgtcaggccatcctttcaggatgacaggtcgcattggaaagcatcggccagtggagatgacagccattttgattatgtccacgaccagaaccagaagaacttaggagggatgcaaagtatgatgtatcgagataaactcatgactgcactttgagagactgaagcatctctcttccattcaccttcatagtttcattgcattccatgaaaagtgtcttggcctcagatggatggatgtgtttggacgagtgtctttaaggagtagtcctgaaaggtgtttttggtgtccatgtaaatatttgaagataaaaccactatagcttgtcataatttactgttgactgcattctcattaaaatgaaggtaaaggctcaggaatcatattgatgttctgattttaaaattggagtcaaagtctatgtttatcattttactatgttcctgatgttctttgttatttaattaatgggagcaaataaaaccagaagagcttgggaagattgctcagcatatattcctgtcgtagaagttgagattgctagggtccagtttccctagtgtggcctggacgagtcatttccccttcattgacctcattttccccatctgaaaagagagggttggactaagtgatctccaaggtcctttccaactctaaaattctgcaatttgttaacatttcattttgtttaggttgaggacatacattcaaactaattttatcacaaggaaaactgcaatacccacttccttgacagagttactcctttcagaagctaaataaagtatataacttattagatgttatatagatacagggggactttgaatttcacatcttaaagcagttgagctactttgaatttaagcagtcgtactaatcttaaattgcatagcatttgttttgatcgaatttgctgctcaagtatgggaataatttttaatgtcttaatgattggtgctgctaacttgcgtgatttcagaagacataattgtgaatacacactgtcagaattgggggattggtttttaccctagacttcactcttaaaaagcaacgtgcaatcaagatcatttatggctcaaatgaaagcatataaggttttcttgaagttgtgccaaagcattctgtagagtaggatgagatggttgttgccctagtctgttggtagaaccagaaatcaatatgttgtcttttaggttaaagcttgtaccaaaatatttatttcccccatttcaagccctgagtcaaacatttttttctcttaataatagacctgaaatgttttattagtatttctgtgaaatcagttgattcttgtgccatttttgtatatgtaattgtaattttgcccatgttaggccctctaaaaaatgtttgacatcctttgagatattttattactaaaatctgatcttttttggctactgcaaaaatctattcagcaagaaggtatcagctgcataccttgcacagtggagctgactacctataaactctccctaaggcatttgtttacaggtgtattccattttagcagacgttctgatgctcagtgtatgtgctgcatacaaataaatgtgttctgaatcttttcatcttattgatagcatttttacaaatgtgtttccaaggaataaagattattcttgctttttttttgactccatcttcattttttttaaattgattcttgttgctatgcagaagtctcatttgtgaatgaccttggtaacagaacagttggcttttggaagtctgaaggtgagcattcagttaggtgggtggagcaagatcatcctagaatgaggctgctcttggcaagagtggatcttataggcacagcagctgatgcctttcttcatctggggcaactctggtgaaggttgtcctgcctgtcacaggtgctgagtagagagaa

SEQ ID NO: 9754 - DNA, 5800 bp, Homo sapiens
  source 1..5800: mol_type = unassigned DNA
ggaaaaggcgccttgggagcgggcgctcggcggggcctcctcgggccccgggcgcggcgcggcgagtgggagcgagcgcgccaggaccacgcaggcgccctgctccggctggccctcggccggcgcgcggcgcgggagcagcccgcagcccgcctcccgcgcccccggcagccccctggcagcccgcagccgcccgtccggagcagcccctcggcagcccgcgcaggccgccggcccgggagagcgcgcggcggcggcggcggcgggacggccccgagcgcgccctcccgcctgcggccactcgcagccggcgctggccgggccggcgcgccccgcaggcggctagagcgcggcctcggcctcggcgcgggcttgccccgggccgtagcccgcgagaggcggcgcgggcggccgagggcactgacggcgtcgcgggacgctcccgggcggcggcgcagcggcagcggcagcggcagcggcagcgcagggggcggaggcagggggcgcccccagccaggatgctgcggttcctgcgccggacctttggccgccgctccatgcagcgctacgcgcggggcgcggcggggcgcggggccgccgggctgggggacgagcgcgatggggggccacgggggggcccggccgccgccgcctcctcctcggcgctgcccgccgcgcccgggggcagcgtgttcccggcgggcggcgggcccctgctcaccggcggcgcggccgtgcacatctccgccgccggcgccgccaaggccaccctctactgccgcgtcttcctgctcgacgggaccgaagtgagcgtggacctgccgaaacatgccaaaggccaggatttgtttgatcagattgtgtaccacttggaccttgtggaaacagattactttggcctccagttcctcgactctgcccaggttgcgcactggctggatcatgccaaacccataaaaaagcagatgaaaattggacctgcttatgctttacactttcgagttaaatactattcttcagaaccaaacaaccttcgtgaggagtttacaaggtacctgtttgttttacaactcaggcatgacattctttctggaaaattgaaatgcccttatgaaacagctgtggaattagctgctctctgtctacaagcggagcttggggagtgcgagcttccagaacacacaccagagcttgtgtctgagtttcggttcattccaaatcagacagaagcaatggaatttgatatcttccagagatggaaagagtgcaggggaaagagccctgcccaggcggaactctcctatctgaataaagcgaagtggctggaaatgtatggggtagacatgcacgttgtcaggggaagagatggctgtgaatattctcttggactgaccccgacaggcatattaatctttgaaggagctaacaaaataggcttattcttttggcctaaaattaccaaaatggattttaaaaagagcaaattgacactcgtggtggtcgaggatgatgatcagggacgtgagcaagagcacacgtttgtgttccggttagacagtgccaggacctgcaaacacctttggaagtgtgcagttgagcaccacgcattcttccgactgcggacgccaggaaacagcaaatccaatagatccgactttatcaggctgggctctcgcttcagattcagtgggcggacagaatatcaagctacacatggctccaggttacgaagaaccagcacctttgagaggaagcctagtaaacgttatccatcccggagacattcaacgttcaaagcaagcaacccagtgatagcagcccagctctgctctaaaacaaatccagaagtccataattaccagcctcaatatcatcctaatatccatcccagccagccccggtggcatcctcactctccaaatgtcagctacccgctcccttccccagtgcttagcagctcggaccggttgccttttggcattgaggagaatgggggcacaccgttcctcaccgcagcttcaggaaggcatcaccaccagcaccagcatcagcatcagcaccagcaccactcaaactacagcctctcactgaccctggagaacaaagaggggcctctgaggtccccaaactccagcagcaagtcccttacaaaactgagtccaggaacacctgccttgttcagtgaagccgctgcccatctaaagaagctggaactggaaactgtgaaggctgctggaccctggcctcctctgcacatcaacataaacaaggctgaagaaaagaaagtctcggagaaaactcttcagactccacttttgccttcccctgttgcggatcatgtgaagtgtaacattctgaaagcccagttggaaaatgcttcccgagtgaacatccagggtggaaaggaggaatcaccgtttgtaaatatcaataagaaatccagtcttcaggacgctagtgtaagaagtcctattcctattcgtgtggaaactgcccagccagctgtggaaaagccggaaatcaagcctccccgagtgaggaagttaacaagacagtatagttttgatgaagacgacctccctccagacctggccgaggcagtgggagtgaccacatctacaaccacaaacaccacaacggccgccacacaagtctccgtgccgctgccgtcccccaaggtccagaatgtcagctcgcctcacaagtcagaaggcaaaggcctgctgtcccctggggccaagagcccctctgaccgaggaggtgcctttaccctggagccgggtgatcttctgatggatttcacagaagccactcctctggcagagcccgccagcaacccccactgtgcccactctcgctgttctcctccactctctctccccatgaaggaagagaccactggagtttgcatgtaccctccaatcaaaacgaggctgataaaaacattcccggttgatacaatgaacccgtttcctgatactttcaccacagggccacagtttactgcagacttcagagacagtaaattacagtgctgtcctggcccgacttccccgctgatcccagcagcgaccctgaggcctttgacagagaccgtctccacagtgcagaccatttacaccacccggaaacctgtttctctggcagccagtgcagagacactccggcaggaactggagagagagaagatgatgaaaagactgttgatgaccgaactgtgaaattctccccttgtcacctggaagatggcatggtgccttctgtccgtcttctttcttcgggctttgtgtgctcactctagcacagcatacaagtgtgtgctctgttcgcccaggtctccatggttagttgaagccaatttctggcttgacttttatgggaaaagttattttatgtctcctaagcattagagtttttctattactctatgtagttgagacaggatttgataagtctaggaaaagaaagatgggaaaacgggattccttttcagaagtacctgtgtgtatctgttaataaccacaggggttaatatgatgtaggatcttttactatcaatttcaaccatttgattttgtatgattgaaacttgcaccgagctttgactgtttgttaaagagtcatttttaatgaaagaataattctttattgctggtttttcatttacactgataaatacacagatcttataaagtctttaacattcatttgtattcagatgtgagtagaagaactaaaaaaagaaagttacatatcactatgactgaaggtacttcagcttaatctgaaatataatttaacttgtgaactccttggatatgatattatttggaataaacagaatttatcattgaacccaaagtaggaaatgatagcttacattgtctaaaaatccttacaaggttaagatgattcaatatcaagaagattcagaaaattatttctaaagttgatcgattcatgtcgtattgatagaatcttgaccagaagaaattttgctctttttatatagtttcaagaaatgtgtttttaaatttttattaatgcacttgaacaactttgcaggaataaagcaaccccctaaccacaaaatatccctctaaattagttccctagctttctcaatgaatacacacatatttttacatagctatgatcgttgtgtacattctcctttgttttacttctcggcctaacacttgtctcctcttgtcaacacagattctactctcaccaatttaaatgtctttatatccatgtaacatgggtaacctcacttcaccccattattagatatttgagttatatctaatttttcactcttataaatagtgctgctatgaatgtctgtaaaaaaaaaaaactgctccttcttttggattattcccttaggaatatctccaaagagggattacaaggtcaaagagcatgaagtattttatagctcttgttttatattgccagattgctttctagaaagatccaatctttgggttggaaggaccttaaaggtcatctagtttagcctccccaccccctctgaatgcttgaatcccctcgacaatttatgatgccaccagcaatgtataagcatttctgtttaccaatagctctgccagtattgggttttgccatttttatttatttttgctagtttaataggtatgtatagttgttcttgaagagttgttttatttcattaattgctagcaaggctgagcacttttccatgtgatgatttactagttgtatttccttgtgtgtaaaatgttcattcatttcttatgaccacttgttaagaggaactgatctcatatatttgtatcagaactgtatttttatgttatattgtatagtttgctctcctgcccctctccttaaaactgaatggtgccaataatttgatactaatgactacaaaaaaaggtaatgcctcatttactagtattgttgtaaaatgaggaatgtatgtgaatattcagataaccgaggattaaccctttaagtgctgaatctttaaaattttaatatatttttttttgagggaaatctttctaaaatgtattacgcacttccctgccttagtaaacagagtatactggagagtatttaaccttttcttgatgagtcatggtcatgattataaacatcagccccttttataccttggtacggtgcagtgatatcattaagagctatcaatatgtgtagggcttggcttggccttttataggatattatgctgttctcactgatggttttttactgctctctgctctgtcagtggagctatccggggcaattgtagcgtttgggtccttttacccctatgtcccccggctatacttttaaaacagctttagctgttctttatcttgtgcacatgatacaaaatatgttcccgtacaatatggggctgtcacttcttgccaacccagcaccctcttcctcttctaacctgctttctgaggcttctgctcttcacctcctgctcgctgatggaaacctccagggcaaagctgaaggtttcttggggaagccaggaaagccagtatttcctatgtgtcagatctgcttggcttccaagaagggatgcatgggctttttggccagtgtttccaggaggctctgggcttcctgcttcttccccgcttcccccagagttcacagatgttgaagtttctgaaggttgacgtcactggaagtctgaccacaaacaagttggctgttactgtatttgaaacccagtacctttggcagctcacctctaaccagtaaaataagaggattccatggtttc

SEQ ID NO: 9755 - DNA, 6628 bp, Homo sapiens
  source 1..6628: mol_type = unassigned DNA
aagagcggagcgctccgccctgggggcggagctgggagggagctttaaggggtggacgggcgggaggtcggggtcctccggggattagagccggtgggctcgttgtgggcgccatttctcggcgtctaccgaggagccgcccctttctcagccttgctcggctcttccccgctctggtcgccggggctgcgccgtccccagctcagtgacaaaaatgctgagtttcttccgtagaacactagggcgtcggtctatgcgtaaacatgcagagaaggaacgactccgagaagcacaacgcgccgccacacatattcctgcagctggagattctaagtccatcatcacgtgtcgggtgtcccttctggatggtactgatgttagtgtggacttgccaaaaaaagccaaaggacaagagttgtttgatcagattatgtaccacctggacctgattgaaagcgactattttggtctgagatttatggattcagcacaagtagcacattggttggatggtacaaaaagcatcaaaaagcaagtaaaaattggttcaccctattgtctgcatcttcgagttaagttttattcctcagaaccaaataaccttcgtgaggagctaacccggtatttatttgttcttcagttaaaacaagatattctcagtggaaaattagactgtccctttgatacagcagtgcaattggcagcttataatctgcaagctgaacttggtgactatgatcttgctgagcatagtcctgaacttgtctcagagttcagattcgtgcctattcagactgaagagatggaactggctatttttgagaaatggaaggaatacagaggtcaaacaccagcacaggctgaaaccaattatctgaataaagccaaatggctagaaatgtatggggttgatatgcatgtggtcaaggctagagatgggaatgactatagtttgggactaacaccaacaggagtccttgtttttgaaggagataccaaaattggcttatttttttggccgaagataaccagattggattttaagaagaataaattaaccttggtggttgtagaagatgatgatcagggcaaagaacaggaacatacatttgtctttagactggatcatccaaaagcatgcaaacatttatggaaatgtgctgtggagcatcatgctttcttccgccttcgaggccccgtccaaaagagttctcatcgatcaggatttattcgactaggatcacgatttagatatagtgggaaaacagagtatcagaccacaaaaaccaataaagcaagaagatcaacatcctttgaaagaaggcccagcaaacgatattctagacgaactctacaaatgaaagcatgtgctacaaaacctgaagaacttagtgttcacaataatgtttcgacccaaagtaatggctcccaacaggcttgggggatgagatctgctctgcctgtgagtccttccatttcctctgctcctgtgccagtggagatagagaatcttccacagagtcctggaacagaccagcatgacaggaaatgcattcctctgaatattgatttgctgaatagcccagacttattggaagcaacgattggtgatgtaattggggcatctgacactatggaaacatcccaagcactgaatgacgttaatgtagccaccaggcttccgggattaggggaacctgaagttgaatatgagacattaaaagacacctcagagaagctcaaacagcttgagatggagaacagtcctttgctgtcccctcgatccaacatcgatgttaacataaacagccaggaggaagtggtgaagttgactgagaaatgccttaataatgtcattgagagcccaggattgaatgtcatgagagttcctcctgacttcaagagtaacattttgaaggctcaagtagaagcagtgcataaggttacaaaagaagatagcttattaagtcataaaaatgccaatgttcaggatgctgccacaaacagtgctgtgttaaatgagaataatgtgcccctccccaaagagtctcttgagactctgatgcttatcacacctgccgacagtggttctgttctaaaggaagctacagatgaattggatgccttgcttgcatctctaactgagaatctaattgatcacacagttgcacctcaggtgtcttccacatccatgatcacaccccggtggattgttccgcagagtggtgccatgtctaatggacttgcgggatgtgaaatgcttttgacagggaaggagggacatggtaataaagatggaatctcactgatctctcccccagcgccattcttggtagatgctgtgaccagctctggtcccattttggcagaagaagctgtcctgaagcagaagtgtttactgaccactgagctctgagggcctgtagctggaatacgcatctctccagcattccgtcctgggatccgtttcagctagaatatgttggattcaggagcttgtccattatttgtaggtaaaaaaagctgcacgtagatttgacttcaactccgtaaaaaagacagctgtattttccgtccaactggaattgttgaatcacactgcatagctgcccaaaagagagtgtttggtcttgaactttctatacttttataaatgttacaaattcccgaaagaagggaatttctttttctggggtttccttcaaactcttggctccacctagcggttctatttgttcataacaacttcataacaagcctgcctctggtagtcaacagccttttgaaagctatttccatctagtatcagggtgagagcatccttgatctggctgcctgttagagaaattgcacttttcctgacttacctagaaatcaagaatttaggaaattaatgtggacactataaaggcagacttagggccaacttttttttttttttacaattattacaacactaaagagaagtttagaatatagagagtttttaaatgtctcccattcttttgatttcttactgtactggctatcttaatatttcaagtttacatcaagataaaccctgagaagaactacggagaaatcaaataaaatcctgtcatatttttttcaccctgcctttccacaggaagcactcacaggcaccacacacgtatcatgtaacttatcagtggggtgggttactgttgaagagaccctggggcatttacctcaggcatctgcactcctccgagcccggtggagaatgcaggctgctgtagtctcaggtaatgaaggcacagcacagcagtactccacattgtttcctatttggacatagacttcatttcctttcagtataagctgaataaatttagagctttcaaactggaaaaaaaaatgaaacaaaacaaatacaccaagaccaaaataggcaataggaacaggggtgaagggatgttgtttcttaaatacctaccatgtatgaagctatacacagcatataccgaaagaacctgcattgcactaggaattctgtgttagtttaaaagagatctctaaaacttccccatccctttgggcctgtacaaagaaattctggatgttaaaataatatatactcatcacagaaaaataaagtatagcaatgtccatctgtaattctaatacccagaaataacgctatttagctttataattttcgaatgaacaaggtaaacctcggttgccatggggaagaaggatgatgtggaaaccatattggtaaagttgttaatccctcgttatggagaactgatcttaagctatacctcctggaatttgctttctagttttctgtcctgcaatatgtatataattaagcactaatttgtactgcttagcataaaagaacatccagtcttagatccttaaaacttcatggattggactttcctgggctccttataacataatcgtgtgtccaggcaaacgcacactagtgtctgactggaaagctcaggaattttaatcttgcactgtttcccagggagctgtagtgattggaacccacgtttgcacaaaacatttttgcagaaggaaagtcaacacttcttgctggctgcctccccttagccattatgctaaaaacagcttctgagtttcactggtggggctcttgccagttcttaattataggacatattttctcaaagctgaaggtgacacctagaaccaggggcttgacccaggacatgatggaatgagcatcaaattttcagtgtcttggcaaccgtagatgtcctacagggttaccgttgtgctgctcaccacagagcagctgaggcattatgccttggaagacctaaatctcccatccagttcaggaggtgacaacatccttattttaaacttcctaaaattaggaattaggtagttggacatagtctgtgacctttatgtcgttggatacctgtattcttgacagttagaatattggtagggactttgttaaaattcacttgaatttcaagctcagaggaaactttgtctcatgccctgacatgaagtggcaaacacggaagttcatacttgaatgctgaattggccccgacagattaaatgcgtgttggggattggtttcctgtcatagctgctgctgctgccatgcgcagagctgctgtaacagctcttcctgttctgctcccctgagaacagtgtggtggggagaggcagggctgaggtggtctacgaatgtggcaggtagggaaggggagatgtctgtctcttgagaagagagaggcatgtgtgccggcatccttgatgggttcaaagagaaaggttggagatgatagtgggtgagaagcaggctggtgagactgggctgaggttggagaaggggcagccgggggcactgctgagggtttgccgtgcacgcctcggacggagcacggtggggtggcggggagcagatagtgctgcctccctgcgggcagacaggagaggaacctcaactcagtccatttcatagccctgataggggaagtgggagttgacaggatggtttaaaataagacgtgaaggtttcagttacctgctctagactttgcctgagaacttgtaaattaatcagtgagacctaatttgtgacatgtcagtagcatcatcttttgacacacaggaggtcatggtcatttcattcctactcttcaggagacactgctgaacagaggaatgattctgttccttgtgtgcttacttccttaacatttatacattgttttaagaaaaaacttttaaaaatatttcttatagtctcctaacatttgtctctagcctttgcctttgtacaatcacagatatcctatggagatttaaggatgaaagccctgagttgttcttgggttcttggatctggactacttgttatcttatgcttctcacttctggctaaaacttgcacctcttcttctcttagctaagccccaaaatgaagatttccttcagaagtcttgttagcagaattatttatcagtcacagagagaaaaatctgctatttttctaagtaagagtctcgagaagcagagtttttgtcttgtcattgagaggagtcagcagtcttgttctgtaaaggaccagagatggtaaatactgtcccactcagctctgctggcgcagtacagcagcagcagccccagcacagctgtgttcctgcggagtcccctttacaaagccgctgacccctgatgtgaaactttgtagagcagcagagtggctgcgtgaaacgggaggctggcaggtcctcagataggttctgcagtgttacctgtcacttggaggcagccaacacttctggacattgcatccttattcacacatgtggcagctgaacgaggtgctgttgtgggtgtctcagctctgagggtctttgtgagctcccactgttgtgggtgtctcagctctgagggtctttgtgagctcccactgttgtgggtgtctcagctctgagggtctttgtgagttcccaccaacttttaattattcatgcccttgaccatgtggttgcttggagacctggggtcttctgcagactgaagaagacacatttctagattatttgtcctttttatcctctcaaaaatttaaacactgtacctcttcagtggtcagaagaaagttggaaacttttcctacatattaggcgttagtatgaggacatttgtttgaattatagaaatttgccctgagctgaactgggttgtgttaacacattggtagagctatgattccttcccagttctaagagatacgatctgtaagtccctatgtcaccacattgcttgagatgatcattcagttacttgtcaggatttctcctcttcagagagatttttttttatagcacagattcctttgccccttttatctccttatctggatatgataagtggttatgagggtctcactaactattttgtgtttaccttttatatgtgtaaaactttgcagtagcatttaaagtgtaatttatttttctatcaagtgcactattcatttagtgtgttccagttttatatgacttgtattagaaacactgcactgagttgtttgtacactgaaatgagaactctagatgtaactctattcaaataaaccttcgtgagacattca

SEQ ID NO: 9756 - DNA, 1777 bp, Homo sapiens
  source 1..1777: mol_type = unassigned DNA
tttctcggcgtctaccgaggagccgcccctttctcagccttgctcggctcttccccgctctggtcgccggggctgcgccgtccccagctcagtgacaaaaatgctgagtttcttccgtagaacactagggcgtcggtctatgcgtaaacatgcagagaaggaacgactccgagaagcacaacgcgccgccacacatattcctgcagctggagattctaagtccatcatcacgtgtcgggtgtcccttctggatggtactgatgttagtgtggacttgccaaaaaaagccaaaggacaagagttgtttgatcagattatgtaccacctggacctgattgaaagcgactattttggtctgagatttatggattcagcacaagtagcacattggttggatggtacaaaaagcatcaaaaagcaagtaaaaattggttcaccctattgtctgcatcttcgagttaagttttattcctcagaaccaaataaccttcgtgaggagctaacccggtatttatttgttcttcagttaaaacaagatattctcagtggaaaattagactgtccctttgatacagcagtgcaattggcagcttataatctgcaagctgaacttggtgactatgatcttgctgagcatagtcctgaacttgtctcagagttcagattcgtgcctattcagactgaagagatggaactggctatttttgagaaatggaaggaatacagaggtcaaacaccagcacaggctgaaaccaattatctgaataaagccaaatggctagaaatgtatggggttgatatgcatgtggtcaaggctagagatgggaatgactatagtttgggactaacaccaacaggagtccttgtttttgaaggagataccaaaattggcttatttttttggccgaagataaccagattggattttaagaagaataaattaaccttggtggttgtagaagatgatgatcagggcaaagaacaggaacatacatttgtctttagactggatcatccaaaagcatgcaaacatttatggaaatgtgctgtggagcatcatgctttcttccgccttcgaggccccgtccaaaagagttctcatcgatcaggatttattcgactaggatcacgatttagatatagtgggaaaacagagtatcagaccacaaaaaccaataaagcaagaagatcaacatcctttgaaagaaggcccagcaaacgatattctagacgaactctacaaatgaaagcatgtgctacaaaacctgaagaacttagtgttcacaataatgtttcgacccaaagtaatggctcccaacaggcttgggggatgagatctgctctgcctgtgagtccttccatttcctctgctcctgtgccagtggagatagagaatcttccacagagtcctggaacagaccagcatgacaggaaatggctctctgctgccagcgactgctgtcaacgtggtggaaaccagtggaacacaagggccttgcccccaccccagaccgcacatagaaactacactgactttgttcatgagcacaatgtgaagaatgcaggaatccgtcatgatgttcattttcctggccatacagccatgactgagatatgagtgttgagcctcttaggctttgggactctttgtcatgcaagttgatggtatacattatctggtgtttataaaggattaatcacattaggagtatttgggagaatttacagtgagtcactagttgttcagtgctgtttgtaattgaattcttccatgaaa

SEQ ID NO: 9757 - DNA, 2872 bp, Homo sapiens
  source 1..2872: mol_type = unassigned DNA
gtaagcgcgaggcccggcggcggcgccgcagtacagtccgctgcgctcctagccgagtggacccttcctcgcccgcgcctgcggtagcggccttgtccccggggaggcgggcgggggccgcacccagaccctagggcggccggcccctctctcgtcgggccggcagggcattaatcccgccggagggaggggcggcggcggccaatgaggcagggccgccgagtttcggtcgataccgcgcgacgggccggggcggagggcccggggcagccgggttaatgtttgccgagcggacgcgctccccgagccgcgggtacccctcgctggtccgctgggctgccgtccagcgggagagacaaaagtcgcaagggaaggggaaaaacgaactgagtttgtgtcactgtcttggtggacttttcgagctaacctgtatttgagaaaaacttcagtctcttgggaaaggagaggcagtgacaaaaatgctgagtttcttccgtagaacactagggcgtcggtctatgcgtaaacatgcagagaaggaacgactccgagaagcacaacgcgccgccacacatattcctgcagctggagattctaagtccatcatcacgtgtcgggtgtcccttctggatggtactgatgttagtgtggacttgccaaaaaaagccaaaggacaagagttgtttgatcagattatgtaccacctggacctgattgaaagcgactattttggtctgagatttatggattcagcacaagtagcacattggttggatggtacaaaaagcatcaaaaagcaagtaaaaattggttcaccctattgtctgcatcttcgagttaagttttattcctcagaaccaaataaccttcgtgaggagctaacccggtatttatttgttcttcagttaaaacaagatattctcagtggaaaattagactgtccctttgatacagcagtgcaattggcagcttataatctgcaagctgaacttggtgactatgatcttgctgagcatagtcctgaacttgtctcagagttcagattcgtgcctattcagactgaagagatggaactggctatttttgagaaatggaaggaatacagaggtcaaacaccagcacaggctgaaaccaattatctgaataaagccaaatggctagaaatgtatggggttgatatgcatgtggtcaaggctagagatgggaatgactatagtttgggactaacaccaacaggagtccttgtttttgaaggagataccaaaattggcttatttttttggccgaagataaccagattggattttaagaagaataaattaaccttggtggttgtagaagatgatgatcagggcaaagaacaggaacatacatttgtctttagactggatcatccaaaagcatgcaaacatttatggaaatgtgctgtggagcatcatgctttcttccgccttcgaggccccgtccaaaagagttctcatcgatcaggatttattcgactaggatcacgatttagatatagtgggaaaacagagtatcagaccacaaaaaccaataaagcaagaagatcaacatcctttgaaagaaggcccagcaaacgatattctagacgaactctacaaatgaaagcatgtgctacaaaacctgaagaacttagtgttcacaataatgtttcgacccaaagtaatggctcccaacaggcttgggggatgagatctgctctgcctgtgagtccttccatttcctctgctcctgtgccagtggagatagagaatcttccacagagtcctggaacagaccagcatgacaggaaatggctctctgctgccagcgactgctgtcaacgtggtggaaaccagtggaacacaagggccttgcccccaccccagaccgcacatagaaactacactgactttgttcatgagcacaatgtgaagaatgcaggaatccgtcatgatgttcattttcctggccatacagccatgactgagatatgagtgttgagcctcttaggctttgggactctttgtcatgcaagttgatggtatacattatctggtgtttataaaggattaatcacattaggagtatttgggagaatttacagtgagtcactagttgttcagtgctgtttgtaattgaattcttccatgaaagggacaaggaatcaaggaagccatatagcatcaatgataatgacaaatgtttgtgttgaaaagagtgtgtataccattgtggttttggaagagttttcagaccttagtatgttcacacatcaccagactgtatctcaggagaaggtttgtgtttgtgaacaaggtgcccattattcccccaccacatgccatccaaagagatcgaggttaaaagaatcagacacactaaaaacacagtggaagcatgtctaggcataatatatcagccttttgagatatttattaaaaacttgttcttatacactattttaatatgtctaaagtgacacataccttaatttaagtgcctaagattttaattaatataatttttaattacaaacacttttactttttaataaacacgaatattttaacttaccaaaagatttagagatcacattaataatgtggctcatgtatagagaaatctgaatggttagttttgaatggttaactgattaacattcagttatcataacagttaaccagtggttaactgaatggttacattactactgaatggttctataaaatgaaaaacatatttactttgtcttttcatttgactggcttttctctttcatctcatacacctgacagattacccaggtttgcaacagtctcataatctgatcctgtataacctttaaaataaaattctgaagccaaaacca

SEQ ID NO: 9758 - DNA, 3167 bp, Homo sapiens
  source 1..3167: mol_type = unassigned DNA
gtcctccggggattagagccggtgggctcgttgtgggcgccatttctcggcgtctaccgaggagccgcccctttctcagccttgctcggctcttccccgctctggtcgccggggctgcgccgtccccagctcagtgacaaaaatgctgagtttcttccgtagaacactagggcgtcggtctatgcgtaaacatgcagagaaggaacgactccgagaagcacaacgcgccgccacacatattcctgcagctggagattctaagtccatcatcacgtgtcgggtgtcccttctggatggtactgatgttagtgtggacttgccaaaaaaagccaaaggacaagagttgtttgatcagattatgtaccacctggacctgattgaaagcgactattttggtctgagatttatggattcagcacaagtagcacattggttggatggtacaaaaagcatcaaaaagcaagtaaaaattggttcaccctattgtctgcatcttcgagttaagttttattcctcagaaccaaataaccttcgtgaggagctaacccggtatttatttgttcttcagttaaaacaagatattctcagtggaaaattagactgtccctttgatacagcagtgcaattggcagcttataatctgcaagctgaacttggtgactatgatcttgctgagcatagtcctgaacttgtctcagagttcagattcgtgcctattcagactgaagagatggaactggctatttttgagaaatggaaggaatacagaggtcaaacaccagcacaggctgaaaccaattatctgaataaagccaaatggctagaaatgtatggggttgatatgcatgtggtcaaggctagagatgggaatgactatagtttgggactaacaccaacaggagtccttgtttttgaaggagataccaaaattggcttatttttttggccgaagataaccagattggattttaagaagaataaattaaccttggtggttgtagaagatgatgatcagggcaaagaacaggaacatacatttgtctttagactggatcatccaaaagcatgcaaacatttatggaaatgtgctgtggagcatcatgctttcttccgccttcgaggccccgtccaaaagagttctcatcgatcaggatttattcgactaggatcacgatttagatatagtgggaaaacagagtatcagaccacaaaaaccaataaagcaagaagatcaacatcctttgaaagaaggcccagcaaacgatattctagacgaactctacaaatgaaagcatgtgctacaaaacctgaagaacttagtgttcacaataatgtttcgacccaaagtaatggctcccaacaggcttgggggatgagatctgctctgcctgtgagtccttccatttcctctgctcctgtgccagtggagatagagaatcttccacagagtcctggaacagaccagcatgacaggaaatgcattcctctgaatattgatttgctgaatagcccagacttattggaagcaacgattggtgatgtaattggggcatctgacactatggaaacatcccaagcactgaatgacgttaatgtagccaccaggcttccgggattaggggaacctgaagttgaatatgagacattaaaagacacctcagagaagctcaaacagcttgagatggagaacagtcctttgctgtcccctcgatccaacatcgatgttaacataaacagccaggaggaagtggtgaagttgactgagaaatgccttaataatgtcattgagagcccaggattgaatgtcatgagagttcctcctgacttcaagagtaacattttgaaggctcaagtagaagcagtgcataaggttacaaaagaagatagcttattaagtcataaaaatgccaatgttcaggatgctgccacaaacagtgctgtgttaaatgagaataatgtgcccctccccaaagagtctcttgagactctgatgcttatcacacctgccgacagtggttctgttctaaaggaagctacagatgaattggatgccttgcttgcatctctaactgagaatctaattgatcacacagttgcacctcaggtgtcttccacatccatgatcacaccccggtggattgttccgctctggtcccattttggcagaagaagctgtcctgaagcagaagtgtttactgaccactgagctctgagggcctgtagctggaatacgcatctctccagcattccgtcctgggatccgtttcagctagaatatgttggattcaggagcttgtccattatttgtaggtaaaaaaagctgcacgtagatttgacttcaactccgtaaaaaagacagctgtattttccgtccaactggaattgttgaatcacactgcatagctgcccaaaagagagtgtttggtcttgaactttctatacttttataaatgttacaaattcccgaaagaagggaatttctttttctggggtttccttcaaactcttggctccacctagcggttctatttgttcataacaacttcataacaagcctgcctctggtagtcaacagccttttgaaagctatttccatctagtatcagggtgagagcatccttgatctggctgcctgttagagaaattgcacttttcctgacttacctagaaatcaagaatttaggaaattaatgtggacactataaaggcagacttagggccaacttttttttttttttacaattattacaacactaaagagaagtttagaatatagagagtttttaaatgtctcccattcttttgatttcttactgtactggctatcttaatatttcaagtttacatcaagataaaccctgagaagaactacggagaaatcaaataaaatcctgtcatatttttttcaccctgcctttccacaggaagcactcacaggcaccacacacgtatcatgtaacttatcagtggggtgggttactgttgaagagaccctggggcatttacctcaggcatctgcactcctccgagcccggtggagaatgcaggctgctgtagtctcaggtaatgaaggcacagcacagcagtactccacattgtttcctatttggacatagacttcatttcctttcagtataagctgaataaatttagagctttcaaactgg

SEQ ID NO: 9759 - DNA, 6410 bp, Homo sapiens
  source 1..6410: mol_type = unassigned DNA
atgctgagtttcttccgtagaacactagggcgtcggtctatgcgtaaacatgcagagaaggaacgactccgagaagcacaacgcgccgccacacatattcctgcagctggagattctaagtccatcatcacgtgtcgggtgtcccttctggatggtactgatgttagtgtggacttgccaaaaaaagccaaaggacaagagttgtttgatcagattatgtaccacctggacctgattgaaagcgactattttggtctgagatttatggattcagcacaagtagcacattggttggatggtacaaaaagcatcaaaaagcaagtaaaaattggttcaccctattgtctgcatcttcgagttaagttttattcctcagaaccaaataaccttcgtgaggagctaacccggtatttatttgttcttcagttaaaacaagatattctcagtggaaaattagactgtccctttgatacagcagtgcaattggcagcttataatctgcaagctgaacttggtgactatgatcttgctgagcatagtcctgaacttgtctcagagttcagattcgtgcctattcagactgaagagatggaactggctatttttgagaaatggaaggaatacagaggtcaaacaccagcacaggctgaaaccaattatctgaataaagccaaatggctagaaatgtatggggttgatatgcatgtggtcaaggctagagatgggaatgactatagtttgggactaacaccaacaggagtccttgtttttgaaggagataccaaaattggcttatttttttggccgaagataaccagattggattttaagaagaataaattaaccttggtggttgtagaagatgatgatcagggcaaagaacaggaacatacatttgtctttagactggatcatccaaaagcatgcaaacatttatggaaatgtgctgtggagcatcatgctttcttccgccttcgaggccccgtccaaaagagttctcatcgatcaggatttattcgactaggatcacgatttagatatagtgggaaaacagagtatcagaccacaaaaaccaataaagcaagaagatcaacatcctttgaaagaaggcccagcaaacgatattctagacgaactctacaaatgaaagcatgtgctacaaaacctgaagaacttagtgttcacaataatgtttcgacccaaagtaatggctcccaacaggcttgggggatgagatctgctctgcctgtgagtccttccatttcctctgctcctgtgccagtggagatagagaatcttccacagagtcctggaacagaccagcatgacaggaaatgcattcctctgaatattgatttgctgaatagcccagacttattggaagcaacgattggtgatgtaattggggcatctgacactatggaaacatcccaagcactgaatgacgttaatgtagccaccaggcttccgggattaggggaacctgaagttgaatatgagacattaaaagacacctcagagaagctcaaacagcttgagatggagaacagtcctttgctgtcccctcgatccaacatcgatgttaacataaacagccaggaggaagtggtgaagttgactgagaaatgccttaataatgtcattgagagcccaggattgaatgtcatgagagttcctcctgacttcaagagtaacattttgaaggctcaagtagaagcagtgcataaggttacaaaagaagatagcttattaagtcataaaaatgccaatgttcaggatgctgccacaaacagtgctgtgttaaatgagaataatgtgcccctccccaaagagtctcttgagactctgatgcttatcacacctgccgacagtggttctgttctaaaggaagctacagatgaattggatgccttgcttgcatctctaactgagaatctaattgatcacacagttgcacctcaggtgtcttccacatccatgatcacaccccggtggattgttccgagtggtgccatgtctaatggacttgcgggatgtgaaatgcttttgacagggaaggagggacatggtaataaagatggaatctcactgatctctcccccagcgccattcttggtagatgctgtgaccagctctggtcccattttggcagaagaagctgtcctgaagcagaagtgtttactgaccactgagctctgagggcctgtagctggaatacgcatctctccagcattccgtcctgggatccgtttcagctagaatatgttggattcaggagcttgtccattatttgtaggtaaaaaaagctgcacgtagatttgacttcaactccgtaaaaaagacagctgtattttccgtccaactggaattgttgaatcacactgcatagctgcccaaaagagagtgtttggtcttgaactttctatacttttataaatgttacaaattcccgaaagaagggaatttctttttctggggtttccttcaaactcttggctccacctagcggttctatttgttcataacaacttcataacaagcctgcctctggtagtcaacagccttttgaaagctatttccatctagtatcagggtgagagcatccttgatctggctgcctgttagagaaattgcacttttcctgacttacctagaaatcaagaatttaggaaattaatgtggacactataaaggcagacttagggccaacttttttttttttttacaattattacaacactaaagagaagtttagaatatagagagtttttaaatgtctcccattcttttgatttcttactgtactggctatcttaatatttcaagtttacatcaagataaaccctgagaagaactacggagaaatcaaataaaatcctgtcatatttttttcaccctgcctttccacaggaagcactcacaggcaccacacacgtatcatgtaacttatcagtggggtgggttactgttgaagagaccctggggcatttacctcaggcatctgcactcctccgagcccggtggagaatgcaggctgctgtagtctcaggtaatgaaggcacagcacagcagtactccacattgtttcctatttggacatagacttcatttcctttcagtataagctgaataaatttagagctttcaaactggaaaaaaaaatgaaacaaaacaaatacaccaagaccaaaataggcaataggaacaggggtgaagggatgttgtttcttaaatacctaccatgtatgaagctatacacagcatataccgaaagaacctgcattgcactaggaattctgtgttagtttaaaagagatctctaaaacttccccatccctttgggcctgtacaaagaaattctggatgttaaaataatatatactcatcacagaaaaataaagtatagcaatgtccatctgtaattctaatacccagaaataacgctatttagctttataattttcgaatgaacaaggtaaacctcggttgccatggggaagaaggatgatgtggaaaccatattggtaaagttgttaatccctcgttatggagaactgatcttaagctatacctcctggaatttgctttctagttttctgtcctgcaatatgtatataattaagcactaatttgtactgcttagcataaaagaacatccagtcttagatccttaaaacttcatggattggactttcctgggctccttataacataatcgtgtgtccaggcaaacgcacactagtgtctgactggaaagctcaggaattttaatcttgcactgtttcccagggagctgtagtgattggaacccacgtttgcacaaaacatttttgcagaaggaaagtcaacacttcttgctggctgcctccccttagccattatgctaaaaacagcttctgagtttcactggtggggctcttgccagttcttaattataggacatattttctcaaagctgaaggtgacacctagaaccaggggcttgacccaggacatgatggaatgagcatcaaattttcagtgtcttggcaaccgtagatgtcctacagggttaccgttgtgctgctcaccacagagcagctgaggcattatgccttggaagacctaaatctcccatccagttcaggaggtgacaacatccttattttaaacttcctaaaattaggaattaggtagttggacatagtctgtgacctttatgtcgttggatacctgtattcttgacagttagaatattggtagggactttgttaaaattcacttgaatttcaagctcagaggaaactttgtctcatgccctgacatgaagtggcaaacacggaagttcatacttgaatgctgaattggccccgacagattaaatgcgtgttggggattggtttcctgtcatagctgctgctgctgccatgcgcagagctgctgtaacagctcttcctgttctgctcccctgagaacagtgtggtggggagaggcagggctgaggtggtctacgaatgtggcaggtagggaaggggagatgtctgtctcttgagaagagagaggcatgtgtgccggcatccttgatgggttcaaagagaaaggttggagatgatagtgggtgagaagcaggctggtgagactgggctgaggttggagaaggggcagccgggggcactgctgagggtttgccgtgcacgcctcggacggagcacggtggggtggcggggagcagatagtgctgcctccctgcgggcagacaggagaggaacctcaactcagtccatttcatagccctgataggggaagtgggagttgacaggatggtttaaaataagacgtgaaggtttcagttacctgctctagactttgcctgagaacttgtaaattaatcagtgagacctaatttgtgacatgtcagtagcatcatcttttgacacacaggaggtcatggtcatttcattcctactcttcaggagacactgctgaacagaggaatgattctgttccttgtgtgcttacttccttaacatttatacattgttttaagaaaaaacttttaaaaatatttcttatagtctcctaacatttgtctctagcctttgcctttgtacaatcacagatatcctatggagatttaaggatgaaagccctgagttgttcttgggttcttggatctggactacttgttatcttatgcttctcacttctggctaaaacttgcacctcttcttctcttagctaagccccaaaatgaagatttccttcagaagtcttgttagcagaattatttatcagtcacagagagaaaaatctgctatttttctaagtaagagtctcgagaagcagagtttttgtcttgtcattgagaggagtcagcagtcttgttctgtaaaggaccagagatggtaaatactgtcccactcagctctgctggcgcagtacagcagcagcagccccagcacagctgtgttcctgcggagtcccctttacaaagccgctgacccctgatgtgaaactttgtagagcagcagagtggctgcgtgaaacgggaggctggcaggtcctcagataggttctgcagtgttacctgtcacttggaggcagccaacacttctggacattgcatccttattcacacatgtggcagctgaacgaggtgctgttgtgggtgtctcagctctgagggtctttgtgagctcccactgttgtgggtgtctcagctctgagggtctttgtgagctcccactgttgtgggtgtctcagctctgagggtctttgtgagttcccaccaacttttaattattcatgcccttgaccatgtggttgcttggagacctggggtcttctgcagactgaagaagacacatttctagattatttgtcctttttatcctctcaaaaatttaaacactgtacctcttcagtggtcagaagaaagttggaaacttttcctacatattaggcgttagtatgaggacatttgtttgaattatagaaatttgccctgagctgaactgggttgtgttaacacattggtagagctatgattccttcccagttctaagagatacgatctgtaagtccctatgtcaccacattgcttgagatgatcattcagttacttgtcaggatttctcctcttcagagagatttttttttatagcacagattcctttgccccttttatctccttatctggatatgataagtggttatgagggtctcactaactattttgtgtttaccttttatatgtgtaaaactttgcagtagcatttaaagtgtaatttatttttctatcaagtgcactattcatttagtgtgttccagttttatatgacttgtattagaaacactgcactgagttgtttgtacactgaaatgagaactctagatgtaactctattcaaataaaccttcgtgagacattc

SEQ ID NO: 9760 - DNA, 3514 bp, Homo sapiens
  source 1..3514: mol_type = unassigned DNA
cagaattgttgggcttcatcttggctctgtgctgcctggaggggagacctaggataggctcctgatctgcaaaatggggataatcccagctgccacttaagtgagacaagtgcctgactgacagaagttcttgcccccggggagctggtgtggacagaggagggagcctagacatggaggagaaggactacagtgaggccgatggcctttcggagaggaccacgcccagcaaggcccagaaatcgccccagaagattgccaagaaatacaagagtgccatctgccgggtcactctgcttgatgcctcggagtatgagtgtgaggtggagaaacatggccggggccaggtgctgtttgacctggtctgtgaacacctcaacctcctagagaaggactacttcggcctgaccttctgtgatgctgacagccagaagaactggctggacccctccaaggagatcaagaagcagatccggagtagcccctggaattttgccttcacagtcaagttctacccgcctgatcctgcccagctgacagaagacatcacaagatactacctgtgcctgcagctgcgggcagacatcatcacgggccggctgccatgctcctttgtcacgcatgccctactgggctcctacgctgtgcaggctgagctgggtgactatgatgctgaggagcatgtgggcaactatgtcagcgagctccgcttcgcccctaaccagacccgggagctggaggagaggatcatggagctgcataagacatatagggggatgaccccgggagaagcagaaatccacttcttagagaatgccaagaagctttccatgtacggagtagacctgcaccatgccaaggactctgagggcatcgacatcatgttaggcgtttgtgccaatggcctgctcatctaccgggaccggctgagaatcaaccgctttgcctggcccaagatcctcaagatctcctacaagaggagtaacttctatatcaagatccggcctggggagtatgagcaatttgagagcacaattggctttaagctcccaaaccaccggtcagccaagagactgtggaaggtctgcatcgagcatcatacattcttccggctggtgtcccctgagcccccacccaagggcttcctggtgatgggctccaagttccggtacagtgggaggacccaggcacagactcgccaggccagcgccctcattgaccggcctgcacccttctttgagcgttcttccagcaaacggtacaccatgtcccgcagccttgatggagcagagttctcccgcccagcctcggtcagcgagaaccatgatgcagggcctgacggtgacaagcgggatgaggatggcgagtctggggggcaacggtcagaggctgaggagggagaggtcaggactccaaccaagatcaaggagctaaagttcttagacaagccagaagatgtcttgctgaagcaccaggccagcatcaatgagctcaaaaggaccctgaaggagcccaacagcaaactcatccaccgggatcgagactgggaacgggagcgcaggctgccctcctcccccgcctccccctcccccaagggcacccctgagaaagccaatgagagagcagggctgagggagggctccgaggagaaagtcaaaccaccacgtccccgggccccagagagtgacacaggcgatgaggaccaggaccaggagagggacacggtgttcctgaaggacaaccacctggccattgagcgcaagtgctccagcatcacggtcagctctacgtctagcctggaggctgaggtggacttcacggtcattggtgactaccatggcagcgccttcgaagacttctcccgcagcctgcctgagctcgaccgggacaaaagcgactcggacactgagggcctgctgttctcccgggatctcaacaagggggcccccagccaggatgatgagtctgggggcattgaggacagcccggatcgaggggcctgctccaccccggatatgccccagtttgagcccgtgaaaacagaaaccatgactgtcagcagtctggccattagaaagaagattgagccggaggccgtactgcagaccagagtctccgctatggataacacccaggagaacagtctcaagtccgggaagggggcagctgccatgatcccaggcccacagacggtggccacggaaatccgttctctttctccgatcatcgggaaagatgtcctcaccagcacctacggcgccactgcggaaaccctctcaacctccaccaccacccatgtcaccaaaactgtgaaaggagggttttctgagacaaggatcgagaagcgaatcatcattactggggatgaagatgtcgatcaagaccaggccctggctttggccatcaaggaggccaaactgcagcatcctgatatgctggtaaccaaagctgtcgtatacagagaaacagacccatccccagaggagagggacaagaagccacaggaatcctgacctctgtgaagagatcctggcatttctggtccaacccaagccagagaaccattaagaaggggccttcattctggattctccgacgcaacactgacgtcccagctgcgacgtactgtcactgatgagagactgggaagggaaaagcatatatatatagatatatagagatatagatatatatacaggaaacaccgcatccttgcactgctgctggggctggcagagcagttggctgacagcaacaaccgacatctgaacacctacatttcctttgcagacaaattgaagaactggtgggatttttttcaagaaaaaaaattatataataactataatcccttgctcacccctttcccccgccaaataagaaacgcaagccagaccacgatgattgtagaagtccctcccgccctggttctgcacgttacagttagcagacgagcaattccatttgttcttctccagcatctctaaggcccacttgaatgcaaaggaaaacacttgcacagcaaagcaagagaagtcacagcagcaagacacgcacagtcaaccattttccgagaaaaaaagaaaattccccacttggaaagaaagaggaggaacactggattcttactttctggatcttgacactgggctgcaaaacctaccttcctctctcccgcctcccctcaccctcaactctcaatgtcttgctgtcattttctgtctcggctccctcctcccccttcccccttcccccaccccacacccttcaccctctgtgtcctggtccttctgagggccactgcagatgactctcctttgaaatgagaaaaagaaaagaaagcaagaacagaaaacgaagccacaggaagggaagtagacattgtatgcttatggtttctcattatgaaggtgcagcttgtaggaggtttgtacggatgtgctttgaagttatgtatattacatataacaggaaaaaatattaaaataaacagtgctggtaagtatgaagctga

SEQ ID NO: 9761 - DNA, 6266 bp, Homo sapiens
  source 1..6266: mol_type = unassigned DNA
catcagcgggcgggggtgtcgccgaacaggctgctccgcagagcccgccgcgaccccgcgccgccccgccccgcggcctgcctgccagaggagccgagggggccgcccctcgcccaacctgcccgacatggggaaccccgggcccaggcgtgctggtcaccatgacaacagagacaggccccgactctgaggtgaagaaagctcaggaggaggccccgcagcagcccgaggctgctgccgctgtgaccacccctgtgacccctgcaggccacggccacccagaggccaactccaatgagaagcatccatcccagcaggacacgcggcctgctgaacagagcctagacatggaggagaaggactacagtgaggccgatggcctttcggagaggaccacgcccagcaaggcccagaaatcgccccagaagattgccaagaaatacaagagtgccatctgccgggtcactctgcttgatgcctcggagtatgagtgtgaggtggagaaacatggccggggccaggtgctgtttgacctggtctgtgaacacctcaacctcctagagaaggactacttcggcctgaccttctgtgatgctgacagccagaagaactggctggacccctccaaggagatcaagaagcagatccggagtagcccctggaattttgccttcacagtcaagttctacccgcctgatcctgcccagctgacagaagacatcacaagatactacctgtgcctgcagctgcgggcagacatcatcacgggccggctgccatgctcctttgtcacgcatgccctactgggctcctacgctgtgcaggctgagctgggtgactatgatgctgaggagcatgtgggcaactatgtcagcgagctccgcttcgcccctaaccagacccgggagctggaggagaggatcatggagctgcataagacatatagggggatgaccccgggagaagcagaaatccacttcttagagaatgccaagaagctttccatgtacggagtagacctgcaccatgccaaggactctgagggcatcgacatcatgttaggcgtttgtgccaatggcctgctcatctaccgggaccggctgagaatcaaccgctttgcctggcccaagatcctcaagatctcctacaagaggagtaacttctatatcaagatccggcctggggagtatgagcaatttgagagcacaattggctttaagctcccaaaccaccggtcagccaagagactgtggaaggtctgcatcgagcatcatacattcttccggctggtgtcccctgagcccccacccaagggcttcctggtgatgggctccaagttccggtacagtgggaggacccaggcacagactcgccaggccagcgccctcattgaccggcctgcacccttctttgagcgttcttccagcaaacggtacaccatgtcccgcagccttgatggagcagagttctcccgcccagcctcggtcagcgagaaccatgatgcagggcctgacggtgacaagcgggatgaggatggcgagtctggggggcaacggtcagaggctgaggagggagaggtcaggactccaaccaagatcaaggagctaaagccggagcaggaaaccacgccgagacacaagcaggagttcttagacaagccagaagatgtcttgctgaagcaccaggccagcatcaatgagctcaaaaggaccctgaaggagcccaacagcaaactcatccaccgggatcgagactgggaacgggagcgcaggctgccctcctcccccgcctccccctcccccaagggcacccctgagaaagccaatgagagagcagggctgagggagggctccgaggagaaagtcaaaccaccacgtccccgggccccagagagtgacacaggcgatgaggaccaggaccaggagagggacacggtgttcctgaaggacaaccacctggccattgagcgcaagtgctccagcatcacggtcagctctacgtctagcctggaggctgaggtggacttcacggtcattggtgactaccatggcagcgccttcgaagacttctcccgcagcctgcctgagctcgaccgggacaaaagcgactcggacactgagggcctgctgttctcccgggatctcaacaagggggcccccagccaggatgatgagtctgggggcattgaggacagcccggatcgaggggcctgctccaccccggatatgccccagtttgagcccgtgaaaacagaaaccatgactgtcagcagtctggccattagaaagaagattgagccggaggccgtactgcagaccagagtctccgctatggataacacccagcaggttgatgggagtgcctcagtggggagggagttcatagcaaccactccctccatcaccacggagaccatatcgaccaccatggagaacagtctcaagtccgggaagggggcagctgccatgatcccaggcccacagacggtggccacggaaatccgttctctttctccgatcatcgggaaagatgtcctcaccagcacctacggcgccactgcggaaaccctctcaacctccaccaccacccatgtcaccaaaactgtgaaaggagggttttctgagacaaggatcgagaagcgaatcatcattactggggatgaagatgtcgatcaagaccaggccctggctttggccatcaaggaggccaaactgcagcatcctgatatgctggtaaccaaagctgtcgtatacagagaaacagacccatccccagaggagagggacaagaagccacaggaatcctgacctctgtgaagagatcctggcatttctggtccaacccaagccagagaaccattaagaaggggccttcattctggattctccgacgcaacactgacgtcccagctgcgacgtactgtcactgatgagagactgggaagggaaaagcatatatatatagatatatagagatatagatatatatacaggaaacaccgcatccttgcactgctgctggggctggcagagcagttggctgacagcaacaaccgacatctgaacacctacatttcctttgcagacaaattgaagaactggtgggatttttttcaagaaaaaaaattatataataactataatcccttgctcacccctttcccccgccaaataagaaacgcaagccagaccacgatgattgtagaagtccctcccgccctggttctgcacgttacagttagcagacgagcaattccatttgttcttctccagcatctctaaggcccacttgaatgcaaaggaaaacacttgcacagcaaagcaagagaagtcacagcagcaagacacgcacagtcaaccattttccgagaaaaaaagaaaattccccacttggaaagaaagaggaggaacactggattcttactttctggatcttgacactgggctgcaaaacctaccttcctctctcccgcctcccctcaccctcaactctcaatgtcttgctgtcattttctgtctcggctccctcctcccccttcccccttcccccaccccacacccttcaccctctgtgtcctggtccttctgagggccactgcagatgactctcctttgaaatgagaaaaagaaaagaaagcaagaacagaaaacgaagccacaggaagggaagtagacattgtatgcttatggtttctcattatgaaggtgcagcttgtaggaggtttgtacggatgtgctttgaagttatgtatattacatataacaggaaaaaatattaaaataaacagtgctggtaagtatgaagctgacattctaaaattataattatctgactgtgattgatgtatcctgaggttcctagatctcactgaactggcccagctaaggagacctggactctgggtgtgggttggctcacagtaggggctgacgggttcagtgtagtaatactgtgtgtggtgtttgtaattggttgattggtggggaggggtggggggccctaatggagaggtgtgggtttggcaagaaagaagcaacacagatgtcgtccccaaaatgccagttcaagacaccttctccctgcccccctggtagtaacagtcagggcctggtctgtgctcaggtactgggtcccagtctgggactctgctgctgaagttgccacagtagaggtccctggcttagtccttatctccctacggggcttgccttggttttcagtcttctctctctttctctcttttttttttttttgccacattctgcccttccctgaccccattgtaataaccaactccatatccaaagggaggtggtgctctcagccattgtagaagatggtggctttaacctgactgtctaaaaattcccagctaagccttttcctctactctcttccttgttctgaatcatttcttcttctcaggccaaagtagccatggtaaggaggcttcatggggcagaccctgaaagatcaaaactgcatttgcaaagccctcccctgtcccaggacaaagctgagactgacgggtgatgttgctcataggctccagctctgcataagaccttggcttggagacctccctctcagtcaacagctgaactctgagcttgtgcccagaaattaccccaagaccacaggaacccttcaagaagctcccatcacaagcttggcattgctctctgccacacgtgggcttcctcaggcttgtctgccacaagctacttctctgagctcagaaagtgccccttgatgagggaaaatgtcccactgcactgcgaatttctcagttccattttacctcccagtcctccttctaaaccagttaataaattcattccacaagtatttactgattacctgcttgtgccagggactattctcaggctgaagaaggtgggaggggagggcggaacctgaggagccacctgagccagctttatatttcaaccatggctggcccatctgagagcatctccccactctcgccaacctatcggggcatagcccagggatgcccccaggcggcccaggttagatgcgtccctttggcttgtcagtgatgacatacaccttagctgcttagctggtgctggcctgaggcagggcaggaaatcagaatagcatttgcttctctgggcaaatgggaagttcagcggggcagcagaatcagtggcattccccctggtgcaggccggtgggtccactccaactccccctgagtgtagcagcacactttccatacaccaggttctttctacaatcctggtggaaaagccacagaaccttcttcctgcccttcttgagagttccccctctttctgggtcaagagctggagtggtggctccatcctctctgggccacttcggtctaggaactcatctttgcaggaaccaggagtcctgagcacactgaacacacctcagagggaggatccttgttgtggattttgcacctggctttggggcaggggtgaagtgaccaggcttagcttgtggagtttatgggccaccagggtttggggaaatcaccatcccgcggatgctgtgacctcccttctacggagatgcaggcagtgccacgagggaggaggggacctgcaaagctagaatctagggcactgtttcctccccatccttctctttgtagagaatagagacgtttgtcttgtctgtcttcaacctacttttccttttctcttttttgtttctcatcctctctgtgccacctctccacccaggaggccatgtagcatagtggaaaaagtccctgagggcggttaggagttctgggtgaccatcctggctcagctcctaactcaccatgtgacatcaggctatccccattccccctcttgggcctcagtttcccgacttgcaaaataagcagaaagaaccagatgctctccagggtctttttctactttgctatctcatgggtcttcattttctcttattttgttttctctggatcttttccatctgagggtacaggaagtaccaggacctgtttcagtttttgaatcctgcaagcacattccaagactggcctgaaactgcatgagcaacatcactcgaaataattttttttttcaaaagcaccttaacaaccaattgcgatgctgtcctgttcctttttactcacacccttctctcctttctcgtccccatgctcccccacctcagtgctccgtgctgtatgcgtgtgctctctgttcttgtatactcaatataagtgaaataaatgtgtttgatgctgaaccata

SEQ ID NO: 9762 - DNA, 8421 bp, Homo sapiens
  source 1..8421: mol_type = unassigned DNA
agtcggcatccatcagcgggcgggggtgtcgccgaacaggctgctccgcagagcccgccgcgaccccgcgccgccccgccccgcggcctgcctgccagaggagccgagggggccgcccctcgcccaacctgcccgacatggggaaccccgggcccaggcgtgctggtcaccatgacaacagagacaggccccgactctgaggtgaagaaagctcaggaggaggccccgcagcagcccgaggctgctgccgctgtgaccacccctgtgacccctgcaggccacggccacccagaggccaactccaatgagaagcatccatcccagcaggacacgcggcctgctgaacagagcctagacatggaggagaaggactacagtgaggccgatggcctttcggagaggaccacgcccagcaaggcccagaaatcgccccagaagattgccaagaaatacaagagtgccatctgccgggtcactctgcttgatgcctcggagtatgagtgtgaggtggagaaacatggccggggccaggtgctgtttgacctggtctgtgaacacctcaacctcctagagaaggactacttcggcctgaccttctgtgatgctgacagccagaagaactggctggacccctccaaggagatcaagaagcagatccggagtagcccctggaattttgccttcacagtcaagttctacccgcctgatcctgcccagctgacagaagacatcacaagatactacctgtgcctgcagctgcgggcagacatcatcacgggccggctgccatgctcctttgtcacgcatgccctactgggctcctacgctgtgcaggctgagctgggtgactatgatgctgaggagcatgtgggcaactatgtcagcgagctccgcttcgcccctaaccagacccgggagctggaggagaggatcatggagctgcataagacatatagggggatgaccccgggagaagcagaaatccacttcttagagaatgccaagaagctttccatgtacggagtagacctgcaccatgccaaggactctgagggcatcgacatcatgttaggcgtttgtgccaatggcctgctcatctaccgggaccggctgagaatcaaccgctttgcctggcccaagatcctcaagatctcctacaagaggagtaacttctatatcaagatccggcctggggagtatgagcaatttgagagcacaattggctttaagctcccaaaccaccggtcagccaagagactgtggaaggtctgcatcgagcatcatacattcttccggctggtgtcccctgagcccccacccaagggcttcctggtgatgggctccaagttccggtacagtgggaggacccaggcacagactcgccaggccagcgccctcattgaccggcctgcacccttctttgagcgttcttccagcaaacggtacaccatgtcccgcagccttgatggagcagagttctcccgcccagcctcggtcagcgagaaccatgatgcagggcctgacggtgacaagcgggatgaggatggcgagtctggggggcaacggtcagaggctgaggagggagaggtcaggactccaaccaagatcaaggagctaaagccggagcaggaaaccacgccgagacacaagcaggagttcttagacaagccagaagatgtcttgctgaagcaccaggccagcatcaatgagctcaaaaggaccctgaaggagcccaacagcaaactcatccaccgggatcgagactgggaacgggagcgcaggctgccctcctcccccgcctccccctcccccaagggcacccctgagaaagccaatgagtcccagaggacccaggacatctctcagcgggacttggtacctgagcctggagcagccgcaggcttggaagtgttcactcagaaaagcctcgcagcatctcctgagggttcagagcattgggtatttatagaaagagagtacactaggccagaagagctcggtctcctaaaagtgaccaccatgcagcaggaagaaaggcaggcaggccttgctggtatccttgccaacggcagactctccaaggtagacgttctggtggacaagttcaaagtggaagtggccacagaagaaatggtgggaaacagaagagcaaacacccagcaacaaggaaaaatgattgcaagtcctgaagactttgagtcagtgggggaggaaggcccctggatcagggaaagcccaggaggggctgccctggcttccggccgcacattggcagaaaagctcctcgagggctctgagctcagggcagacaccagagaggcaaccatcaggaaccgctgcatgtcagatggtcagccggagggccagacagagctgaggaaggggctggaggagcctcacacttgtgggagacccactgctccagggaccaggccagcagaggtggacgtcctctctccagcctccgacaagggaggactccagtcgtttctattggatccagcccacgcagaagccagagctgagttgagcaatgaaactgatacttcctttgcagagaggagcttctatttaaattatgaagaaaaagactcagaagaccaagtcctccctccacccctggaggagagaaaagggcgcctggatgcccctcccggaggtgagcccaggccgacgctgaattccttagacctgagggtttctgctgctgcttccagcaggagcaaggacgaagcccacatgacttccccaaaggaaggggcagggacccccaagaaccatggaggacctggtgacctgaagggatctcccgcaggacagacgtttgctgaaggctgggaagatgcccagtggggagtggaaggagagtttccccacctgacagccagcgcagcccgagaggaagggacccccgtgagtggagatttgctgggaaaggctgaggaaagtcccacagaggaactgaagaagcaccctcctcacagaggacagggcgtgcatcccgacccccaggcctgcgcccttcctcgggccatccctctgaatgtcaggaagccagtcaaaccagacagaggcaacttcccacccaaagagaggggagtggttcccacccagaaaggaggggctgagctgaaggaccgcgaggcttcagcatttcttcacatggaggtgatcattcccctgccagcctcccctggtcattctgaggacctggcagctctggaggaagcttctccaagcccaacctcccatgggtcaggggagccttcggagctcagggagccctttcttagacatgtccatctttcgaaagccagcccagagcccaaggaccaagtagggtttgtggtgtcccctgccacaggaggtgagcgcaggcctcctcccatcaccagcagaaagcccagagtagtccctgaagaagctgaggggcgcatacctctggggtttgggttcccttcagggaagcgaagggagatgacctctttccaggctggggaccaagagggctccctagaagatattagcaagacctcagtggccaacaaaattcggatatttgagacccacggagctgaaactcgccgaatgagtgagggtgaagcaaggtcccttccaaatgacgtatcttcagaggcacccgtgggacaagcagagcagcagcggagtacgctctcagacctgggcttcgcccaactccagcccccaggggactttgccagccccaaagccacacattccacagtgatacctctggctaccagacacttcagggaggacacttctgcatcctaccaggaagcacacacggaactagagcccgtgtcccccaattcaggctgtgaaaccacgctggcagaagctactggaactgggaacaaatccggagatgcggtcagggaagagaagcgctccaccaacttagcagccaacacccctgggaagggggggcgcctgagatttgccagcccctcgggccctcagagagcagggctgagggagggctccgaggagaaagtcaaaccaccacgtccccgggccccagagagtgacacaggcgatgaggaccaggaccaggagagggacacggtgttcctgaaggacaaccacctggccattgagcgcaagtgctccagcatcacggtcagctctacgtctagcctggaggctgaggtggacttcacggtcattggtgactaccatggcagcgccttcgaagacttctcccgcagcctgcctgagctcgaccgggacaaaagcgactcggacactgagggcctgctgttctcccgggatctcaacaagggggcccccagccaggatgatgagtctgggggcattgaggacagcccggatcgaggggcctgctccaccccggatatgccccagtttgagcccgtgaaaacagaaaccatgactgtcagcagtctggccattagaaagaagattgagccggaggccgtactgcagaccagagtctccgctatggataacacccagcaggttgatgggagtgcctcagtggggagggagttcatagcaaccactccctccatcaccacggagaccatatcgaccaccatggagaacagtctcaagtccgggaagggggcagctgccatgatcccaggcccacagacggtggccacggaaatccgttctctttctccgatcatcgggaaagatgtcctcaccagcacctacggcgccactgcggaaaccctctcaacctccaccaccacccatgtcaccaaaactgtgaaaggagggttttctgagacaaggatcgagaagcgaatcatcattactggggatgaagatgtcgatcaagaccaggccctggctttggccatcaaggaggccaaactgcagcatcctgatatgctggtaaccaaagctgtcgtatacagagaaacagacccatccccagaggagagggacaagaagccacaggaatcctgacctctgtgaagagatcctggcatttctggtccaacccaagccagagaaccattaagaaggggccttcattctggattctccgacgcaacactgacgtcccagctgcgacgtactgtcactgatgagagactgggaagggaaaagcatatatatatagatatatagagatatagatatatatacaggaaacaccgcatccttgcactgctgctggggctggcagagcagttggctgacagcaacaaccgacatctgaacacctacatttcctttgcagacaaattgaagaactggtgggatttttttcaagaaaaaaaattatataataactataatcccttgctcacccctttcccccgccaaataagaaacgcaagccagaccacgatgattgtagaagtccctcccgccctggttctgcacgttacagttagcagacgagcaattccatttgttcttctccagcatctctaaggcccacttgaatgcaaaggaaaacacttgcacagcaaagcaagagaagtcacagcagcaagacacgcacagtcaaccattttccgagaaaaaaagaaaattccccacttggaaagaaagaggaggaacactggattcttactttctggatcttgacactgggctgcaaaacctaccttcctctctcccgcctcccctcaccctcaactctcaatgtcttgctgtcattttctgtctcggctccctcctcccccttcccccttcccccaccccacacccttcaccctctgtgtcctggtccttctgagggccactgcagatgactctcctttgaaatgagaaaaagaaaagaaagcaagaacagaaaacgaagccacaggaagggaagtagacattgtatgcttatggtttctcattatgaaggtgcagcttgtaggaggtttgtacggatgtgctttgaagttatgtatattacatataacaggaaaaaatattaaaataaacagtgctggtaagtatgaagctgacattctaaaattataattatctgactgtgattgatgtatcctgaggttcctagatctcactgaactggcccagctaaggagacctggactctgggtgtgggttggctcacagtaggggctgacgggttcagtgtagtaatactgtgtgtggtgtttgtaattggttgattggtggggaggggtggggggccctaatggagaggtgtgggtttggcaagaaagaagcaacacagatgtcgtccccaaaatgccagttcaagacaccttctccctgcccccctggtagtaacagtcagggcctggtctgtgctcaggtactgggtcccagtctgggactctgctgctgaagttgccacagtagaggtccctggcttagtccttatctccctacggggcttgccttggttttcagtcttctctctctttctctcttttttttttttttgccacattctgcccttccctgaccccattgtaataaccaactccatatccaaagggaggtggtgctctcagccattgtagaagatggtggctttaacctgactgtctaaaaattcccagctaagccttttcctctactctcttccttgttctgaatcatttcttcttctcaggccaaagtagccatggtaaggaggcttcatggggcagaccctgaaagatcaaaactgcatttgcaaagccctcccctgtcccaggacaaagctgagactgacgggtgatgttgctcataggctccagctctgcataagaccttggcttggagacctccctctcagtcaacagctgaactctgagcttgtgcccagaaattaccccaagaccacaggaacccttcaagaagctcccatcacaagcttggcattgctctctgccacacgtgggcttcctcaggcttgtctgccacaagctacttctctgagctcagaaagtgccccttgatgagggaaaatgtcccactgcactgcgaatttctcagttccattttacctcccagtcctccttctaaaccagttaataaattcattccacaagtatttactgattacctgcttgtgccagggactattctcaggctgaagaaggtgggaggggagggcggaacctgaggagccacctgagccagctttatatttcaaccatggctggcccatctgagagcatctccccactctcgccaacctatcggggcatagcccagggatgcccccaggcggcccaggttagatgcgtccctttggcttgtcagtgatgacatacaccttagctgcttagctggtgctggcctgaggcagggcaggaaatcagaatagcatttgcttctctgggcaaatgggaagttcagcggggcagcagaatcagtggcattccccctggtgcaggccggtgggtccactccaactccccctgagtgtagcagcacactttccatacaccaggttctttctacaatcctggtggaaaagccacagaaccttcttcctgcccttcttgagagttccccctctttctgggtcaagagctggagtggtggctccatcctctctgggccacttcggtctaggaactcatctttgcaggaaccaggagtcctgagcacactgaacacacctcagagggaggatccttgttgtggattttgcacctggctttggggcaggggtgaagtgaccaggcttagcttgtggagtttatgggccaccagggtttggggaaatcaccatcccgcggatgctgtgacctcccttctacggagatgcaggcagtgccacgagggaggaggggacctgcaaagctagaatctagggcactgtttcctccccatccttctctttgtagagaatagagacgtttgtcttgtctgtcttcaacctacttttccttttctcttttttgtttctcatcctctctgtgccacctctccacccaggaggccatgtagcatagtggaaaaagtccctgagggcggttaggagttctgggtgaccatcctggctcagctcctaactcaccatgtgacatcaggctatccccattccccctcttgggcctcagtttcccgacttgcaaaataagcagaaagaaccagatgctctccagggtctttttctactttgctatctcatgggtcttcattttctcttattttgttttctctggatcttttccatctgagggtacaggaagtaccaggacctgtttcagtttttgaatcctgcaagcacattccaagactggcctgaaactgcatgagcaacatcactcgaaataattttttttttcaaaagcaccttaacaaccaattgcgatgctgtcctgttcctttttactcacacccttctctcctttctcgtccccatgctcccccacctcagtgctccgtgctgtatgcgtgtgctctctgttcttgtatactcaatataagtgaaataaatgtgtttgatgctgaaccata

SEQ ID NO: 9763 - DNA, 2652 bp, Homo sapiens
  source 1..2652: mol_type = unassigned DNA
ctggtcaccatgacaacagagacaggccccgactctgaggtgaagaaagctcaggaggaggccccgcagcagcccgaggctgctgccgctgtgaccacccctgtgacccctgcaggccacggccacccagaggccaactccaatgagaagcatccatcccagcaggacacgcggcctgctgaacagagcctagacatggaggagaaggactacagtgaggccgatggcctttcggagaggaccacgcccagcaaggcccagaaatcgccccagaagattgccaagaaatacaagagtgccatctgccgggtcactctgcttgatgcctcggagtatgagtgtgaggtggagaaacatggccggggccaggtgctgtttgacctggtctgtgaacacctcaacctcctagagaaggactacttcggcctgaccttctgtgatgctgacagccagaagaactggctggacccctccaaggagatcaagaagcagatccggagtagcccctggaattttgccttcacagtcaagttctacccgcctgatcctgcccagctgacagaagacatcacaagatactacctgtgcctgcagctgcgggcagacatcatcacgggccggctgccatgctcctttgtcacgcatgccctactgggctcctacgctgtgcaggctgagctgggtgactatgatgctgaggagcatgtgggcaactatgtcagcgagctccgcttcgcccctaaccagacccgggagctggaggagaggatcatggagctgcataagacatatagggggatgaccccgggagaagcagaaatccacttcttagagaatgccaagaagctttccatgtacggagtagacctgcaccatgccaaggactctgagggcatcgacatcatgttaggcgtttgtgccaatggcctgctcatctaccgggaccggctgagaatcaaccgctttgcctggcccaagatcctcaagatctcctacaagaggagtaacttctatatcaagatccggcctggggagtatgagcaatttgagagcacaattggctttaagctcccaaaccaccggtcagccaagagactgtggaaggtctgcatcgagcatcatacattcttccggctggtgtcccctgagcccccacccaagggcttcctggtgatgggctccaagttccggtacagtgggaggacccaggcacagactcgccaggccagcgccctcattgaccggcctgcacccttctttgagcgttcttccagcaaacggtacaccatgtcccgcagccttgatggagcagagttctcccgcccagcctcggtcagcgagaaccatgatgcagggcctgacggtgacaagcgggatgaggatggcgagtctggggggcaacggtcagaggctgaggagggagaggtcaggactccaaccaagatcaaggagctaaagccggagcaggaaaccacgccgagacacaagcaggagttcttagacaagccagaagatgtcttgctgaagcaccaggccagcatcaatgagctcaaaaggaccctgaaggagcccaacagcaaactcatccaccgggatcgagactgggaacgggagcgcaggctgccctcctcccccgcctccccctcccccaagggcacccctgagaaagccaatgagagagcagggctgagggagggctccgaggagaaagtcaaaccaccacgtccccgggccccagagagtgacacaggcgatgaggaccaggaccaggagagggacacggtgttcctgaaggacaaccacctggccattgagcgcaagtgctccagcatcacggtcagctctacgtctagcctggaggctgaggtggacttcacggtcattggtgactaccatggcagcgccttcgaagacttctcccgcagcctgcctgagctcgaccgggacaaaagcgactcggacactgagggcctgctgttctcccgggatctcaacaagggggcccccagccaggatgatgagtctgggggcattgaggacagcccggatcgaggggcctgctccaccccggatatgccccagtttgagcccgtgaaaacagaaaccatgactgtcagcagtctggccattagaaagaagattgagccggaggccgtactgcagaccagagtctccgctatggataacacccaggttgatgggagtgcctcagtggggagggagttcatagcaaccactccctccatcaccacggagaccatatcgaccaccatggagaacagtctcaagtccgggaagggggcagctgccatgatcccaggcccacagacggtggccacggaaatccgttctctttctccgatcatcgggaaagatgtcctcaccagcacctacggcgccactgcggaaaccctctcaacctccaccaccacccatgtcaccaaaactgtgaaaggagggttttctgagacaaggatcgagaagcgaatcatcattactggggatgaagatgtcgatcaagaccaggccctggctttggccatcaaggaggccaaactgcagcatcctgatatgctggtaaccaaagctgtcgtatacagagaaacagacccatccccagaggagagggacaagaagccacaggaatcctga

SEQ ID NO: 9764 - DNA, 763 bp, Homo sapiens
  source 1..763: mol_type = unassigned DNA
tcggcatccatcagcgggcgggggtgtcgccgaacaggctgctccgcagagcccgccgcgaccccgcgccgccccgccccgcggcctgcctgccagaggagccgagggggccgcccctcgcccaacctgcccgacatggggaaccccgggcccagagcctagacatggaggagaaggactacagtgaggccgatggcctttcggagaggaccacgcccagcaaggcccagaaatcgccccagaagattgccaagaaatacaagagtgccatctgccgggtcactctgcttgatgcctcggagtatgagtgtgaggtggagaaacatggccggggccaggtgctgtttgacctggtctgtgaacacctcaacctcctagagaaggactacttcggcctgaccttctgtgatgctgacagccagaagaactggctggacccctccaaggagatcaagaagcagatccggagtagcccctggaattttgccttcacagtcaagttctacccgcctgatcctgcccagctgacagaagacatcacaagatactacctgtgcctgcagctgcgggcagacatcatcacgggccggctgccatgctcctttgtcacgcatgccctactgggctcctacgctgtgcaggctgagctgggtgactatgatgctgaggagcatgtgggcaactatgtcagcgagctccgcttcgcccctaaccagacccgggagctggaggagaggatcatggagctgcataagacatatag

SEQ ID NO: 9765 - DNA, 5565 bp, Homo sapiens
  source 1..5565: mol_type = unassigned DNA
atggttttcttggggaggatcaatgaggtagaacctgcaaagggcttagcagagagcctagcacctactgagcgctcagtaaagagcctagacatggaggagaaggactacagtgaggccgatggcctttcggagaggaccacgcccagcaaggcccagaaatcgccccagaagattgccaagaaatacaagagtgccatctgccgggtcactctgcttgatgcctcggagtatgagtgtgaggtggagaaacatggccggggccaggtgctgtttgacctggtctgtgaacacctcaacctcctagagaaggactacttcggcctgaccttctgtgatgctgacagccagaagaactggctggacccctccaaggagatcaagaagcagatccggagtagcccctggaattttgccttcacagtcaagttctacccgcctgatcctgcccagctgacagaagacatcacaagatactacctgtgcctgcagctgcgggcagacatcatcacgggccggctgccatgctcctttgtcacgcatgccctactgggctcctacgctgtgcaggctgagctgggtgactatgatgctgaggagcatgtgggcaactatgtcagcgagctccgcttcgcccctaaccagacccgggagctggaggagaggatcatggagctgcataagacatatagggggatgaccccgggagaagcagaaatccacttcttagagaatgccaagaagctttccatgtacggagtagacctgcaccatgccaaggactctgagggcatcgacatcatgttaggcgtttgtgccaatggcctgctcatctaccgggaccggctgagaatcaaccgctttgcctggcccaagatcctcaagatctcctacaagaggagtaacttctatatcaagatccggcctggggagtatgagcaatttgagagcacaattggctttaagctcccaaaccaccggtcagccaagagactgtggaaggtctgcatcgagcatcatacattcttccggctggtgtcccctgagcccccacccaagggcttcctggtgatgggctccaagttccggtacagtgggaggacccaggcacagactcgccaggccagcgccctcattgaccggcctgcacccttctttgagcgttcttccagcaaacggtacaccatgtcccgcagccttgatggagcagagttctcccgcccagcctcggtcagcgagaaccatgatgcagggcctgacggtgacaagcgggatgaggatggcgagtctggggggcaacggtcagaggctgaggagggagaggtcaggactccaaccaagatcaaggagctaaagttcttagacaagccagaagatgtcttgctgaagcaccaggccagcatcaatgagctcaaaaggaccctgaaggagcccaacagcaaactcatccaccgggatcgagactgggaacgggagcgcaggctgccctcctcccccgcctccccctcccccaagggcacccctgagaaagccaatgagcccgtgaaaacagaaaccatgactgtcagcagtctggccattagaaagaagattgagccggaggccgtactgcagaccagagtctccgctatggataacacccagcaggttgatgggagtgcctcagtggggagggagttcatagcaaccactccctccatcaccacggagaccatatcgaccaccatggagaacagtctcaagtccgggaagggggcagctgccatgatcccaggcccacagacggtggccacggaaatccgttctctttctccgatcatcgggaaagatgtcctcaccagcacctacggcgccactgcggaaaccctctcaacctccaccaccacccatgtcaccaaaactgtgaaaggagggttttctgagacaaggatcgagaagcgaatcatcattactggggatgaagatgtcgatcaagaccaggccctggctttggccatcaaggaggccaaactgcagcatcctgatatgctggtaaccaaagctgtcgtatacagagaaacagacccatccccagaggagagggacaagaagccacaggaatcctgacctctgtgaagagatcctggcatttctggtccaacccaagccagagaaccattaagaaggggccttcattctggattctccgacgcaacactgacgtcccagctgcgacgtactgtcactgatgagagactgggaagggaaaagcatatatatatagatatatagagatatagatatatatacaggaaacaccgcatccttgcactgctgctggggctggcagagcagttggctgacagcaacaaccgacatctgaacacctacatttcctttgcagacaaattgaagaactggtgggatttttttcaagaaaaaaaattatataataactataatcccttgctcacccctttcccccgccaaataagaaacgcaagccagaccacgatgattgtagaagtccctcccgccctggttctgcacgttacagttagcagacgagcaattccatttgttcttctccagcatctctaaggcccacttgaatgcaaaggaaaacacttgcacagcaaagcaagagaagtcacagcagcaagacacgcacagtcaaccattttccgagaaaaaaagaaaattccccacttggaaagaaagaggaggaacactggattcttactttctggatcttgacactgggctgcaaaacctaccttcctctctcccgcctcccctcaccctcaactctcaatgtcttgctgtcattttctgtctcggctccctcctcccccttcccccttcccccaccccacacccttcaccctctgtgtcctggtccttctgagggccactgcagatgactctcctttgaaatgagaaaaagaaaagaaagcaagaacagaaaacgaagccacaggaagggaagtagacattgtatgcttatggtttctcattatgaaggtgcagcttgtaggaggtttgtacggatgtgctttgaagttatgtatattacatataacaggaaaaaatattaaaataaacagtgctggtaagtatgaagctgacattctaaaattataattatctgactgtgattgatgtatcctgaggttcctagatctcactgaactggcccagctaaggagacctggactctgggtgtgggttggctcacagtaggggctgacgggttcagtgtagtaatactgtgtgtggtgtttgtaattggttgattggtggggaggggtggggggccctaatggagaggtgtgggtttggcaagaaagaagcaacacagatgtcgtccccaaaatgccagttcaagacaccttctccctgcccccctggtagtaacagtcagggcctggtctgtgctcaggtactgggtcccagtctgggactctgctgctgaagttgccacagtagaggtccctggcttagtccttatctccctacggggcttgccttggttttcagtcttctctctctttctctcttttttttttttttgccacattctgcccttccctgaccccattgtaataaccaactccatatccaaagggaggtggtgctctcagccattgtagaagatggtggctttaacctgactgtctaaaaattcccagctaagccttttcctctactctcttccttgttctgaatcatttcttcttctcaggccaaagtagccatggtaaggaggcttcatggggcagaccctgaaagatcaaaactgcatttgcaaagccctcccctgtcccaggacaaagctgagactgacgggtgatgttgctcataggctccagctctgcataagaccttggcttggagacctccctctcagtcaacagctgaactctgagcttgtgcccagaaattaccccaagaccacaggaacccttcaagaagctcccatcacaagcttggcattgctctctgccacacgtgggcttcctcaggcttgtctgccacaagctacttctctgagctcagaaagtgccccttgatgagggaaaatgtcccactgcactgcgaatttctcagttccattttacctcccagtcctccttctaaaccagttaataaattcattccacaagtatttactgattacctgcttgtgccagggactattctcaggctgaagaaggtgggaggggagggcggaacctgaggagccacctgagccagctttatatttcaaccatggctggcccatctgagagcatctccccactctcgccaacctatcggggcatagcccagggatgcccccaggcggcccaggttagatgcgtccctttggcttgtcagtgatgacatacaccttagctgcttagctggtgctggcctgaggcagggcaggaaatcagaatagcatttgcttctctgggcaaatgggaagttcagcggggcagcagaatcagtggcattccccctggtgcaggccggtgggtccactccaactccccctgagtgtagcagcacactttccatacaccaggttctttctacaatcctggtggaaaagccacagaaccttcttcctgcccttcttgagagttccccctctttctgggtcaagagctggagtggtggctccatcctctctgggccacttcggtctaggaactcatctttgcaggaaccaggagtcctgagcacactgaacacacctcagagggaggatccttgttgtggattttgcacctggctttggggcaggggtgaagtgaccaggcttagcttgtggagtttatgggccaccagggtttggggaaatcaccatcccgcggatgctgtgacctcccttctacggagatgcaggcagtgccacgagggaggaggggacctgcaaagctagaatctagggcactgtttcctccccatccttctctttgtagagaatagagacgtttgtcttgtctgtcttcaacctacttttccttttctcttttttgtttctcatcctctctgtgccacctctccacccaggaggccatgtagcatagtggaaaaagtccctgagggcggttaggagttctgggtgaccatcctggctcagctcctaactcaccatgtgacatcaggctatccccattccccctcttgggcctcagtttcccgacttgcaaaataagcagaaagaaccagatgctctccagggtctttttctactttgctatctcatgggtcttcattttctcttattttgttttctctggatcttttccatctgagggtacaggaagtaccaggacctgtttcagtttttgaatcctgcaagcacattccaagactggcctgaaactgcatgagcaacatcactcgaaataattttttttttcaaaagcaccttaacaaccaattgcgatgctgtcctgttcctttttactcacacccttctctcctttctcgtccccatgctcccccacctcagtgctccgtgctgtatgcgtgtgctctctgttcttgtatactcaatataagtgaaataaatgtgtttgatgctgaaccata

SEQ ID NO: 9766 - DNA, 3631 bp, Homo sapiens
  source 1..3631: mol_type = unassigned DNA
gcatttctgcgcagctctagcgcgcctcggagcccgccggggcagccgccggacaccaggaccgcgagccagacagctcccggaagccgcgccgccgccgccaggtgcctgactgacagaagttcttgcccccggggagctggtgtggacagaggaggggccctggaagtgaccactgggctgagtagctcatcagcttccccacactgaagcccgaggggtctcctgctggcttctgagagctgacggaacaggttccagcaaggcagaccctgacacagaagccagacctgtccagcagggaccccatacactgagcctagacatggaggagaaggactacagtgaggccgatggcctttcggagaggaccacgcccagcaaggcccagaaatcgccccagaagattgccaagaaatacaagagtgccatctgccgggtcactctgcttgatgcctcggagtatgagtgtgaggtggagaactggctggacccctccaaggagatcaagaagcagatccggagtagcccctggaattttgccttcacagtcaagttctacccgcctgatcctgcccagctgacagaagacatcacaagatactacctgtgcctgcagctgcgggcagacatcatcacgggccggctgccatgctcctttgtcacgcatgccctactgggctcctacgctgtgcaggctgagctgggtgactatgatgctgaggagcatgtgggcaactatgtcagcgagctccgcttcgcccctaaccagacccgggagctggaggagaggatcatggagctgcataagacatatagggggatgaccccgggagaagcagaaatccacttcttagagaatgccaagaagctttccatgtacggagtagacctgcaccatgccaaggactctgagggcatcgacatcatgttaggcgtttgtgccaatggcctgctcatctaccgggaccggctgagaatcaaccgctttgcctggcccaagatcctcaagatctcctacaagaggagtaacttctatatcaagatccggcctggggagtatgagcaatttgagagcacaattggctttaagctcccaaaccaccggtcagccaagagactgtggaaggtctgcatcgagcatcatacattcttccggctggtgtcccctgagcccccacccaagggcttcctggtgatgggctccaagttccggtacagtgggaggacccaggcacagactcgccaggccagcgccctcattgaccggcctgcacccttctttgagcgttcttccagcaaacggtacaccatgtcccgcagccttgatggagcagagttctcccgcccagcctcggtcagcgagaaccatgatgcagggcctgacggtgacaagcgggatgaggatggcgagtctggggggcaacggtcagaggctgaggagggagaggtcaggactccaaccaagatcaaggagctaaagttcttagacaagccagaagatgtcttgctgaagcaccaggccagcatcaatgagctcaaaaggaccctgaaggagcccaacagcaaactcatccaccgggatcgagactgggaacgggagcgcaggctgccctcctcccccgcctccccctcccccaagggcacccctgagaaagccaatgagagagcagggctgagggagggctccgaggagaaagtcaaaccaccacgtccccgggccccagagagtgacacaggcgatgaggaccaggaccaggagagggacacggtgttcctgaaggacaaccacctggccattgagcgcaagtgctccagcatcacggtcagctctacgtctagcctggaggctgaggtggacttcacggtcattggtgactaccatggcagcgccttcgaagacttctcccgcagcctgcctgagctcgaccgggacaaaagcgactcggacactgagggcctgctgttctcccgggatctcaacaagggggcccccagccaggatgatgagtctgggggcattgaggacagcccggatcgaggggcctgctccaccccggatatgccccagtttgagcccgtgaaaacagaaaccatgactgtcagcagtctggccattagaaagaagattgagccggaggccgtactgcagaccagagtctccgctatggataacacccagcaggttgatgggagtgcctcagtggggagggagttcatagcaaccactccctccatcaccacggagaccatatcgaccaccatggagaacagtctcaagtccgggaagggggcagctgccatgatcccaggcccacagacggtggccacggaaatccgttctctttctccgatcatcgggaaagatgtcctcaccagcacctacggcgccactgcggaaaccctctcaacctccaccaccacccatgtcaccaaaactgtgaaaggagggttttctgagacaaggatcgagaagcgaatcatcattactggggatgaagatgtcgatcaagaccaggccctggctttggccatcaaggaggccaaactgcagcatcctgatatgctggtaaccaaagctgtcgtatacagagaaacagacccatccccagaggagagggacaagaagccacaggaatcctgacctctgtgaagagatcctggcatttctggtccaacccaagccagagaaccattaagaaggggccttcattctggattctccgacgcaacactgacgtcccagctgcgacgtactgtcactgatgagagactgggaagggaaaagcatatatatatagatatatagagatatagatatatatacaggaaacaccgcatccttgcactgctgctggggctggcagagcagttggctgacagcaacaaccgacatctgaacacctacatttcctttgcagacaaattgaagaactggtgggatttttttcaagaaaaaaaattatataataactataatcccttgctcacccctttcccccgccaaataagaaacgcaagccagaccacgatgattgtagaagtccctcccgccctggttctgcacgttacagttagcagacgagcaattccatttgttcttctccagcatctctaaggcccacttgaatgcaaaggaaaacacttgcacagcaaagcaagagaagtcacagcagcaagacacgcacagtcaaccattttccgagaaaaaaagaaaattccccacttggaaagaaagaggaggaacactggattcttactttctggatcttgacactgggctgcaaaacctaccttcctctctcccgcctcccctcaccctcaactctcaatgtcttgctgtcattttctgtctcggctccctcctcccccttcccccttcccccaccccacacccttcaccctctgtgtcctggtccttctgagggccactgcagatgactctcctttgaaatgagaaaaagaaaagaaagcaagaacagaaaacgaagccacaggaagggaagtagacattgtatgcttatggtttctcattatgaaggtgcagcttgtaggaggtttgtacggatgtgctttgaagttatgtatattacatataacaggaaaaaatattaaaataaacagtgctggt

SEQ ID NO: 9767 - DNA, 3126 bp, Homo sapiens
  source 1..3126: mol_type = unassigned DNA
gcatttctgcgcagctctagcgcgcctcggagcccgccggggcagccgccggacaccaggaccgcgagccagacagctcccggaagccgcgccgccgccgccaggtgcctgactgacagaagttcttgcccccggggagctggtgtggacagaggaggggccctggaagtgaccactgggctgagtagctcatcagcttccccacactgaagcccgaggggtctcctgctggcttctgagagctgacggaacaggttccagcaaggcagaccctgacacagaagccagacctgtccagcagggaccccatacactgagcctagacatggaggagaaggactacagtgaggccgatggcctttcggagaggaccacgcccagcaaggcccagaaatcgccccagaagattgccaagaaatacaagagtgccatctgccgggtcactctgcttgatgcctcggagtatgagtgtgaggtggagaactggctggacccctccaaggagatcaagaagcagatccggagtagcccctggaattttgccttcacagtcaagttctacccgcctgatcctgcccagctgacagaagacatcacaagatactacctgtgcctgcagctgcgggcagacatcatcacgggccggctgccatgctcctttgtcacgcatgccctactgggctcctacgctgtgcaggctgagctgggtgactatgatgctgaggagcatgtgggcaactatgtcagcgagctccgcttcgcccctaaccagacccgggagctggaggagaggatcatggagctgcataagacatatagggggatgaccccgggagaagcagaaatccacttcttagagaatgccaagaagctttccatgtacggagtagacctgcaccatgccaaggactctgagggcatcgacatcatgttaggcgtttgtgccaatggcctgctcatctaccgggaccggctgagaatcaaccgctttgcctggcccaagatcctcaagatctcctacaagaggagtaacttctatatcaagatccggcctggggagtatgagcaatttgagagcacaattggctttaagctcccaaaccaccggtcagccaagagactgtggaaggtctgcatcgagcatcatacattcttccggctggtgtcccctgagcccccacccaagggcttcctggtgatgggctccaagttccggtacagtgggaggacccaggcacagactcgccaggccagcgccctcattgaccggcctgcacccttctttgagcgttcttccagcaaacggtacaccatgtcccgcagccttgatggagcagagttctcccgcccagcctcggtcagcgagaaccatgatgcagggcctgacggtgacaagcgggatgaggatggcgagtctggggggcaacggtcagaggctgaggagggagaggtcaggactccaaccaagatcaaggagctaaagttcttagacaagccagaagatgtcttgctgaagcaccaggccagcatcaatgagctcaaaaggaccctgaaggagcccaacagcaaactcatccaccgggatcgagactgggaacgggagcgcaggctgccctcctcccccgcctccccctcccccaagggcacccctgagaaagccaatgagagagcagggctgagggagggctccgaggagaaagtcaaaccaccacgtccccgggccccagagagtgacacaggcgatgaggaccaggaccaggagagggacacggtgttcctgaaggacaaccacctggccattgagcgcaagtgctccagcatcacggtcagctctacgtctagcctggaggctgaggtggacttcacggtcattggtgactaccatggcagcgccttcgaagacttctcccgcagcctgcctgagctcgaccgggacaaaagcgactcggacactgagggcctgctgttctcccgggatctcaacaagggggcccccagccaggatgatgagtctgggggcattgaggacagcccggatcgaggggcctgctccaccccggatatgccccagtttgagcccgtgaaaacagaaaccatgactgtcagcagtctggccattagaaagaagattgagccggaggccgtactgcagaccagagtctccgctatggataacacccagcaggttgatgggagtgcctcagtggggagggagttcatagcaaccactccctccatcaccacggagaccatatcgaccaccatggagaacagtctcaagtccgggaagggggcagctgccatgatcccaggcccacagacggtggccacggaaatccgttctctttctccgatcatcgggaaagatgtcctcaccagcacctacggcgccactgcggaaaccctctcaacctccaccaccacccatgtcaccaaaactgtgaaaggagggttttctgagacaaggatcgagaagcgaatcatcattactggggatgaagatgtcgatcaagaccaggccctggctttggccatcaaggaggccaaactgcagcatcctgatatgctggtaaccaaagctgtcgtatacagagaaacagacccatccccagaggagagggacaagaagccacaggaatcctgacctctgtgaagagatcctggcatttctggtccaacccaagccagagaaccattaagaaggggccttcattctggattctccgacgcaacactgacgtcccagctgcgacgtactgtcactgatgagagactgggaagggaaaagcatatatatatagatatatagagatatagatatatatacaggaaacaccgcatccttgcactgctgctggggctggcagagcagttggctgacagcaacaaccgacatctgaacacctacatttcctttgcagacaaattgaagaactggtgggatttttttcaaaaaaagaaaagaaagcaagaacagaaaacgaagccacaggaagggaagtagacattgtatgcttatggtttctcattatgaaggtgcagcttgtaggaggtttgtacggatgtgctttgaagttatgtatattacatataacaggaaaaaatattaaaataaacagtgctggt

SEQ ID NO: 9768 - DNA, 3840 bp, Homo sapiens
  source 1..3840: mol_type = unassigned DNA
cgcctcggagcccgccggggcagccgccggacaccaggaccgcgagccagacagctcccggaagccgcgccgccgccgccagccacagcacagccggacagaggaggtggattaggagttcccgggagggagcctgctcagcctttccctgacatttgggcaaatgtgtggggagatgcggagctcaaggcgtgctggtcaccatgacaacagagacaggccccgactctgaggtgaagaaagctcaggaggaggccccgcagcagcccgaggctgctgccgctgtgaccacccctgtgacccctgcaggccacggccacccagaggccaactccaatgagaagcatccatcccagcaggacacgcggcctgctgaacagagcctagacatggaggagaaggactacagtgaggccgatggcctttcggagaggaccacgcccagcaaggcccagaaatcgccccagaagattgccaagaaatacaagagtgccatctgccgggtcactctgcttgatgcctcggagtatgagtgtgaggtggagaaacatggccggggccaggtgctgtttgacctggtctgtgaacacctcaacctcctagagaaggactacttcggcctgaccttctgtgatgctgacagccagaagaactggctggacccctccaaggagatcaagaagcagatccggagtagcccctggaattttgccttcacagtcaagttctacccgcctgatcctgcccagctgacagaagacatcacaagatactacctgtgcctgcagctgcgggcagacatcatcacgggccggctgccatgctcctttgtcacgcatgccctactgggctcctacgctgtgcaggctgagctgggtgactatgatgctgaggagcatgtgggcaactatgtcagcgagctccgcttcgcccctaaccagacccgggagctggaggagaggatcatggagctgcataagacatatagggggatgaccccgggagaagcagaaatccacttcttagagaatgccaagaagctttccatgtacggagtagacctgcaccatgccaaggactctgagggcatcgacatcatgttaggcgtttgtgccaatggcctgctcatctaccgggaccggctgagaatcaaccgctttgcctggcccaagatcctcaagatctcctacaagaggagtaacttctatatcaagatccggcctggggagtatgagcaatttgagagcacaattggctttaagctcccaaaccaccggtcagccaagagactgtggaaggtctgcatcgagcatcatacattcttccggctggtgtcccctgagcccccacccaagggcttcctggtgatgggctccaagttccggtacagtgggaggacccaggcacagactcgccaggccagcgccctcattgaccggcctgcacccttctttgagcgttcttccagcaaacggtacaccatgtcccgcagccttgatggagcagagttctcccgcccagcctcggtcagcgagaaccatgatgcagggcctgacggtgacaagcgggatgaggatggcgagtctggggggcaacggtcagaggctgaggagggagaggtcaggactccaaccaagatcaaggagctaaagccggagcaggaaaccacgccgagacacaagcaggagttcttagacaagccagaagatgtcttgctgaagcaccaggccagcatcaatgagctcaaaaggaccctgaaggagcccaacagcaaactcatccaccgggatcgagactgggaacgggagcgcaggctgccctcctcccccgcctccccctcccccaagggcacccctgagaaagccaatgagagagcagggctgagggagggctccgaggagaaagtcaaaccaccacgtccccgggccccagagagtgacacaggcgatgaggaccaggaccaggagagggacacggtgttcctgaaggacaaccacctggccattgagcgcaagtgctccagcatcacggtcagctctacgtctagcctggaggctgaggtggacttcacggtcattggtgactaccatggcagcgccttcgaagacttctcccgcagcctgcctgagctcgaccgggacaaaagcgactcggacactgagggcctgctgttctcccgggatctcaacaagggggcccccagccaggatgatgagtctgggggcattgaggacagcccggatcgaggggcctgctccaccccggatatgccccagtttgagcccgtgaaaacagaaaccatgactgtcagcagtctggccattagaaagaagattgagccggaggccgtactgcagaccagagtctccgctatggataacacccaggttgatgggagtgcctcagtggggagggagttcatagcaaccactccctccatcaccacggagaccatatcgaccaccatggagaacagtctcaagtccgggaagggggcagctgccatgatcccaggcccacagacggtggccacggaaatccgttctctttctccgatcatcgggaaagatgtcctcaccagcacctacggcgccactgcggaaaccctctcaacctccaccaccacccatgtcaccaaaactgtgaaaggagggttttctgagacaaggatcgagaagcgaatcatcattactggggatgaagatgtcgatcaagaccaggccctggctttggccatcaaggaggccaaactgcagcatcctgatatgctggtaaccaaagctgtcgtatacagagaaacagacccatccccagaggagagggacaagaagccacaggaatcctgacctctgtgaagagatcctggcatttctggtccaacccaagccagagaaccattaagaaggggccttcattctggattctccgacgcaacactgacgtcccagctgcgacgtactgtcactgatgagagactgggaagggaaaagcatatatatatagatatatagagatatagatatatatacaggaaacaccgcatccttgcactgctgctggggctggcagagcagttggctgacagcaacaaccgacatctgaacacctacatttcctttgcagacaaattgaagaactggtgggatttttttcaagaaaaaaaattatataataactataatcccttgctcacccctttcccccgccaaataagaaacgcaagccagaccacgatgattgtagaagtccctcccgccctggttctgcacgttacagttagcagacgagcaattccatttgttcttctccagcatctctaaggcccacttgaatgcaaaggaaaacacttgcacagcaaagcaagagaagtcacagcagcaagacacgcacagtcaaccattttccgagaaaaaaagaaaattccccacttggaaagaaagaggaggaacactggattcttactttctggatcttgacactgggctgcaaaacctaccttcctctctcccgcctcccctcaccctcaactctcaatgtcttgctgtcattttctgtctcggctccctcctcccccttcccccttcccccaccccacacccttcaccctctgtgtcctggtccttctgagggccactgcagatgactctcctttgaaatgagaaaaagaaaagaaagcaagaacagaaaacgaagccacaggaagggaagtagacattgtatgcttatggtttctcattatgaaggtgcagcttgtaggaggtttgtacggatgtgctttgaagttatgtatattacatataacaggaaaaaatattaaaataaacagtgctggtaagtatg

SEQ ID NO: 9769 - DNA, 2677 bp, Homo sapiens
  source 1..2677: mol_type = unassigned DNA
gcatttctgcgcagctctagcgcgcctcggagcccgccggggcagccgccggacaccaggaccgcgagccagacagctcccggaagccgcgccgccgccgccaggcgtgctggtcaccatgacaacagagacaggccccgactctgaggtgaagaaagctcaggaggaggccccgcagcagcccgaggctgctgccgctgtgaccacccctgtgacccctgcaggccacggccacccagaggccaactccaatgagaagcatccatcccagcaggacacgcggcctgctgaacagagcctagacatggaggagaaggactacagtgaggccgatggcctttcggagaggaccacgcccagcaaggcccagaaatcgccccagaagattgccaagaaatacaagagtgccatctgccgggtcactctgcttgatgcctcggagtatgagtgtgaggtggagaaacatggccggggccaggtgctgtttgacctggtctgtgaacacctcaacctcctagagaaggactacttcggcctgaccttctgtgatgctgacagccagaagaactggctggacccctccaaggagatcaagaagcagatccggagtagcccctggaattttgccttcacagtcaagttctacccgcctgatcctgcccagctgacagaagacatcacaagatactacctgtgcctgcagctgcgggcagacatcatcacgggccggctgccatgctcctttgtcacgcatgccctactgggctcctacgctgtgcaggctgagctgggtgactatgatgctgaggagcatgtgggcaactatgtcagcgagctccgcttcgcccctaaccagacccgggagctggaggagaggatcatggagctgcataagacatatagggggatgaccccgggagaagcagaaatccacttcttagagaatgccaagaagctttccatgtacggagtagacctgcaccatgccaaggactctgagggcatcgacatcatgttaggcgtttgtgccaatggcctgctcatctaccgggaccggctgagaatcaaccgctttgcctggcccaagatcctcaagatctcctacaagaggagtaacttctatatcaagatccggcctggggagtatgagcaatttgagagcacaattggctttaagctcccaaaccaccggtcagccaagagactgtggaaggtctgcatcgagcatcatacattcttccggctggtgtcccctgagcccccacccaagggcttcctggtgatgggctccaagttccggtacagtgggaggacccaggcacagactcgccaggccagcgccctcattgaccggcctgcacccttctttgagcgttcttccagcaaacggtacaccatgtcccgcagccttgatggagcagagttctcccgcccagcctcggtcagcgagaaccatgatgcagggcctgacggtgacaagcgggatgaggatggcgagtctggggggcaacggtcagaggctgaggagggagaggtcaggactccaaccaagatcaaggagctaaagccggagcaggaaaccacgccgagacacaagcaggagttcttagacaagccagaagatgtcttgctgaagcaccaggccagcatcaatgagctcaaaaggaccctgaaggagcccaacagcaaactcatccaccgggatcgagactgggaacgggagcgcaggctgccctcctcccccgcctccccctcccccaagggcacccctgagaaagccaatgagagagcagggctgagggagggctccgaggagaaagtcaaaccaccacgtccccgggccccagagagtgacacaggcgatgaggaccaggaccaggagagggacacggtgttcctgaaggacaaccacctggccattgagcgcaagtgctccagcatcacggtcagctctacgtctagcctggaggctgaggtggacttcacggtcattggtgactaccatggcagcgccttcgaagacttctcccgcagcctgcctgagctcgaccgggacaaaagcgactcggacactgagggcctgctgttctcccgggatctcaacaagggggcccccagccaggatgatgagtctgggggcattgaggacagcccggatcgaggggcctgctccaccccggatatgccccagtttgagcccgtgaaaacagaaaccatgactgtcagcagtctggccattagaaagaagattgagccggaggccgtactgcagaccagagtctccgctatggataacacccaggagaacagtctcaagtccgggaagggggcagctgccatgatcccaggcccacagacggtggccacggaaatccgttctctttctccgtctgcagatcatcgggaaagatgtcctcaccagcacctacggcgccactgcggaaaccctctcaacctccaccaccacccatgtcaccaaaactgtgaaaggagggttttctgagacaaggatcgagaagcgaatcatcattactggggatgaagatgtcgatcaagaccaggccctggctttggccatcaaggaggccaaactgcagcatcctgatatgctggtaaccaaagctgtcgtatacagagaaacagacccatccccagaggagagggacaagaagccaca

SEQ ID NO: 9770 - DNA, 652 bp, Homo sapiens
  source 1..652: mol_type = unassigned DNA
agagcaggagcgagcgcgcgagagagcggggcatttctgcgcagctctagcgcgcctcggagcccgccggggcagccgccggacaccaggaccgcgagccagacagctcccggaagccgcgccgccgccgccaggcgtgctggtcaccatgacaacagagacaggccccgactctgaggtgaagaaagctcaggaggaggccccgcagcagcccgaggctgctgccgctgtgaccacccctgtgacccctgcaggccacggccacccagaggccaactccaatgagaagcatccatcccagcaggacacgcggcctgctgaacagagcctagacatggaggagaaggactacagtgaggccgatggcctttcggagaggaccacgcccagcaaggcccagaaatcgccccagaagattgccaagaaatacaagagtgccatctgccgggtcactctgcttgatgcctcggagtatgagtgtgaggtggagaaacatggccggggccaggtgctgtttgacctggtctgtgaacacctcaacctcctagagaaggactacttcggcctgaccttctgtgatgctgacagccagaagaactggctggacccctccaaggagatcaagaagcagatccggagtagcccctggaat

SEQ ID NO: 9771 - DNA, 460 bp, Homo sapiens
  source 1..460: mol_type = unassigned DNA
tctcctgctggcttctgagagctgacggaacaggttccagcaaggcagaccctgacacagaagccagacctgtccagcagggaccccatacactgggaggcttcctgggaaactggaaggcagaagccacgcagacttctagtcctggttccactgcttactcggctgctgttcgtacctgcctcatggttttcttggggaggatcaatgaggtagaacctgcaaagggcttagcagagagcctagcacctactgagcgctcagtaaaggcgtgctggtcaccatgacaacagagacaggccccgactctgaggtgaagaaagctcaggaggaggccccgcagcagcccgaggctgctgccgctgtgaccacccctgtgacccctgcaggccacggccacccagaggccaactccaatgagaagcatccatcccagcaggacacgcggcctgctgaacag

SEQ ID NO: 9772 - DNA, 896 bp, Homo sapiens
  source 1..896: mol_type = unassigned DNA
cgagagagcggggcatttctgcgcagctctagcgcgcctcggagcccgccggggcagccgccggacaccaggaccgcgagccagacagctcccggaagccgcgccgccgccgccagagcctagacatggaggagaaggactacagtgaggccgatggcctttcggagaggaccacgcccagcaaggcccagaaatcgccccagaagattgccaagaaatacaagagtgccatctgccgggtcactctgcttgatgcctcggagtatgagtgtgaggtggagaaacatggccggggccaggtgctgtttgacctggtctgtgaacacctcaacctcctagagaaggactacttcggcctgaccttctgtgatgctgacagccagaagaactggctggacccctccaaggagatcaagaagcagatccggagtagcccctggaattttgccttcacagtcaagttctacccgcctgatcctgcccagctgacagaagacatcacaagatactacctgtgcctgcagctgcgggcagacatcatcacgggccggctgccatgctcctttgtcacgcatgccctactgggctcctacgctgtgcaggctgagctgggtgactatgatgctgaggagcatgtgggcaactatgtcagcgagctccgcttcgcccctaaccagacccgggagctggaggagaggatcatggagctgcataagacatatagggggatgaccccgggagaagcagaaatccacttcttagagaatgccaagaagctttccatgtacggagtagacctgcaccatgccaaggactctgagggcatcgacatcatgttaggcgtttgtgccaatggcctgctcatctaccgggaccggctgagaatcaaccgcttt

SEQ ID NO: 9773 - DNA, 210 bp, Homo sapiens
  source 1..210: mol_type = unassigned DNA
ctttcagatgctatcttgggctcgctgaacacgggtgcctgactgacagaagttcttgcccccggggagctggtgtggacagaggagggagcctagacatggaggagaaggactacagtgaggccgatggcctttcggagaggaccacgcccagcaaggcccagaaatcgccccagaagattgccaagaaatacaagagtgccatctgcc

SEQ ID NO: 9774 - DNA, 864 bp, Homo sapiens
  source 1..864: mol_type = unassigned DNA
cctcagtggggagggagttcatagcaaccactccctccatcaccacggagaccatatcgaccaccatgatcatcgggaaagatgtcctcaccagcacctacggcgccactgcggaaaccctctcaacctccaccaccacccatgtcaccaaaactgtgaaaggagggttttctgagacaaggatcgagaagcgaatcatcattactggggatgaagatgtcgatcaagaccaggccctggctttggccatcaaggaggccaaactgcagcatcctgatatgctggtaaccaaagctgtcgtatacagagaaacagacccatccccagaggagagggacaagaagccacaggaatcctgacctctgtgaagagatcctggcatttctggtccaacccaagccagagaaccattaagaaggggccttcattctggattctccgacgcaacactgacgtcccagctgcgacgtactgtcactgatgagagactgggaagggaaaagcatatatatatagatatatagagatatagatatatatacaggaaacaccgcatccttgcactgctgctggggctggcagagcagttggctgacagcaacaaccgacatctgaacacctacatttcctttgcagacaaattgaagaactggtgggatttttttcaagaaaaaaaattatataataactataatcccttgctcacccctttcccccgccaaataagaaacgcaagccagaccacgatgattgtagaagtccctcccgccctggttctgcacgttacagttagcagacgagcaattccatttgttcttctccagcatctctaaggcccacttgaatgcaaaggaaaacacttgc

SEQ ID NO: 9775 - DNA, 5863 bp, Homo sapiens
  source 1..5863: mol_type = unassigned DNA
gtgcctgactgacagaagttcttgcccccggggagctggtgtggacagaggagggagcctagacatggaggagaaggactacagtgaggccgatggcctttcggagaggaccacgcccagcaaggcccagaaatcgccccagaagattgccaagaaatacaagagtgccatctgccgggtcactctgcttgatgcctcggagtatgagtgtgaggtggagaaacatggccggggccaggtgctgtttgacctggtctgtgaacacctcaacctcctagagaaggactacttcggcctgaccttctgtgatgctgacagccagaagaactggctggacccctccaaggagatcaagaagcagatccggagtagcccctggaattttgccttcacagtcaagttctacccgcctgatcctgcccagctgacagaagacatcacaagatactacctgtgcctgcagctgcgggcagacatcatcacgggccggctgccatgctcctttgtcacgcatgccctactgggctcctacgctgtgcaggctgagctgggtgactatgatgctgaggagcatgtgggcaactatgtcagcgagctccgcttcgcccctaaccagacccgggagctggaggagaggatcatggagctgcataagacatatagggggatgaccccgggagaagcagaaatccacttcttagagaatgccaagaagctttccatgtacggagtagacctgcaccatgccaaggactctgagggcatcgacatcatgttaggcgtttgtgccaatggcctgctcatctaccgggaccggctgagaatcaaccgctttgcctggcccaagatcctcaagatctcctacaagaggagtaacttctatatcaagatccggcctggggagtatgagcaatttgagagcacaattggctttaagctcccaaaccaccggtcagccaagagactgtggaaggtctgcatcgagcatcatacattcttccggctggtgtcccctgagcccccacccaagggcttcctggtgatgggctccaagttccggtacagtgggaggacccaggcacagactcgccaggccagcgccctcattgaccggcctgcacccttctttgagcgttcttccagcaaacggtacaccatgtcccgcagccttgatggagcagagttctcccgcccagcctcggtcagcgagaaccatgatgcagggcctgacggtgacaagcgggatgaggatggcgagtctggggggcaacggtcagaggctgaggagggagaggtcaggactccaaccaagatcaaggagctaaagttcttagacaagccagaagatgtcttgctgaagcaccaggccagcatcaatgagctcaaaaggaccctgaaggagcccaacagcaaactcatccaccgggatcgagactgggaacgggagcgcaggctgccctcctcccccgcctccccctcccccaagggcacccctgagaaagccaatgagagagcagggctgagggagggctccgaggagaaagtcaaaccaccacgtccccgggccccagagagtgacacaggcgatgaggaccaggaccaggagagggacacggtgttcctgaaggacaaccacctggccattgagcgcaagtgctccagcatcacggtcagctctacgtctagcctggaggctgaggtggacttcacggtcattggtgactaccatggcagcgccttcgaagacttctcccgcagcctgcctgagctcgaccgggacaaaagcgactcggacactgagggcctgctgttctcccgggatctcaacaagggggcccccagccaggatgatgagtctgggggcattgaggacagcccggatcgaggggcctgctccaccccggatatgccccagtttgagcccgtgaaaacagaaaccatgactgtcagcagtctggccattagaaagaagattgagccggaggccgtactgcagaccagagtctccgctatggataacacccaggagaacagtctcaagtccgggaagggggcagctgccatgatcccaggcccacagacggtggccacggaaatccgttctctttctccgatcatcgggaaagatgtcctcaccagcacctacggcgccactgcggaaaccctctcaacctccaccaccacccatgtcaccaaaactgtgaaaggagggttttctgagacaaggatcgagaagcgaatcatcattactggggatgaagatgtcgatcaagaccaggccctggctttggccatcaaggaggccaaactgcagcatcctgatatgctggtaaccaaagctgtcgtatacagagaaacagacccatccccagaggagagggacaagaagccacaggaatcctgacctctgtgaagagatcctggcatttctggtccaacccaagccagagaaccattaagaaggggccttcattctggattctccgacgcaacactgacgtcccagctgcgacgtactgtcactgatgagagactgggaagggaaaagcatatatatatagatatatagagatatagatatatatacaggaaacaccgcatccttgcactgctgctggggctggcagagcagttggctgacagcaacaaccgacatctgaacacctacatttcctttgcagacaaattgaagaactggtgggatttttttcaagaaaaaaaattatataataactataatcccttgctcacccctttcccccgccaaataagaaacgcaagccagaccacgatgattgtagaagtccctcccgccctggttctgcacgttacagttagcagacgagcaattccatttgttcttctccagcatctctaaggcccacttgaatgcaaaggaaaacacttgcacagcaaagcaagagaagtcacagcagcaagacacgcacagtcaaccattttccgagaaaaaaagaaaattccccacttggaaagaaagaggaggaacactggattcttactttctggatcttgacactgggctgcaaaacctaccttcctctctcccgcctcccctcaccctcaactctcaatgtcttgctgtcattttctgtctcggctccctcctcccccttcccccttcccccaccccacacccttcaccctctgtgtcctggtccttctgagggccactgcagatgactctcctttgaaatgagaaaaagaaaagaaagcaagaacagaaaacgaagccacaggaagggaagtagacattgtatgcttatggtttctcattatgaaggtgcagcttgtaggaggtttgtacggatgtgctttgaagttatgtatattacatataacaggaaaaaatattaaaataaacagtgctggtaagtatgaagctgacattctaaaattataattatctgactgtgattgatgtatcctgaggttcctagatctcactgaactggcccagctaaggagacctggactctgggtgtgggttggctcacagtaggggctgacgggttcagtgtagtaatactgtgtgtggtgtttgtaattggttgattggtggggaggggtggggggccctaatggagaggtgtgggtttggcaagaaagaagcaacacagatgtcgtccccaaaatgccagttcaagacaccttctccctgcccccctggtagtaacagtcagggcctggtctgtgctcaggtactgggtcccagtctgggactctgctgctgaagttgccacagtagaggtccctggcttagtccttatctccctacggggcttgccttggttttcagtcttctctctctttctctcttttttttttttttgccacattctgcccttccctgaccccattgtaataaccaactccatatccaaagggaggtggtgctctcagccattgtagaagatggtggctttaacctgactgtctaaaaattcccagctaagccttttcctctactctcttccttgttctgaatcatttcttcttctcaggccaaagtagccatggtaaggaggcttcatggggcagaccctgaaagatcaaaactgcatttgcaaagccctcccctgtcccaggacaaagctgagactgacgggtgatgttgctcataggctccagctctgcataagaccttggcttggagacctccctctcagtcaacagctgaactctgagcttgtgcccagaaattaccccaagaccacaggaacccttcaagaagctcccatcacaagcttggcattgctctctgccacacgtgggcttcctcaggcttgtctgccacaagctacttctctgagctcagaaagtgccccttgatgagggaaaatgtcccactgcactgcgaatttctcagttccattttacctcccagtcctccttctaaaccagttaataaattcattccacaagtatttactgattacctgcttgtgccagggactattctcaggctgaagaaggtgggaggggagggcggaacctgaggagccacctgagccagctttatatttcaaccatggctggcccatctgagagcatctccccactctcgccaacctatcggggcatagcccagggatgcccccaggcggcccaggttagatgcgtccctttggcttgtcagtgatgacatacaccttagctgcttagctggtgctggcctgaggcagggcaggaaatcagaatagcatttgcttctctgggcaaatgggaagttcagcggggcagcagaatcagtggcattccccctggtgcaggccggtgggtccactccaactccccctgagtgtagcagcacactttccatacaccaggttctttctacaatcctggtggaaaagccacagaaccttcttcctgcccttcttgagagttccccctctttctgggtcaagagctggagtggtggctccatcctctctgggccacttcggtctaggaactcatctttgcaggaaccaggagtcctgagcacactgaacacacctcagagggaggatccttgttgtggattttgcacctggctttggggcaggggtgaagtgaccaggcttagcttgtggagtttatgggccaccagggtttggggaaatcaccatcccgcggatgctgtgacctcccttctacggagatgcaggcagtgccacgagggaggaggggacctgcaaagctagaatctagggcactgtttcctccccatccttctctttgtagagaatagagacgtttgtcttgtctgtcttcaacctacttttccttttctcttttttgtttctcatcctctctgtgccacctctccacccaggaggccatgtagcatagtggaaaaagtccctgagggcggttaggagttctgggtgaccatcctggctcagctcctaactcaccatgtgacatcaggctatccccattccccctcttgggcctcagtttcccgacttgcaaaataagcagaaagaaccagatgctctccagggtctttttctactttgctatctcatgggtcttcattttctcttattttgttttctctggatcttttccatctgagggtacaggaagtaccaggacctgtttcagtttttgaatcctgcaagcacattccaagactggcctgaaactgcatgagcaacatcactcgaaataattttttttttcaaaagcaccttaacaaccaattgcgatgctgtcctgttcctttttactcacacccttctctcctttctcgtccccatgctcccccacctcagtgctccgtgctgtatgcgtgtgctctctgttcttgtatactcaatataagtgaaataaatgtgtttgatgctgaaccata

SEQ ID NO: 9776 - DNA, 896 bp, Homo sapiens
  source 1..896: mol_type = unassigned DNA
tccgcgtcccggggaccccgccgcgtcgggtcccgcgtgtgcgtgtggggtggccgccgagggcggcgggctcgattcccgatctttgggcactgacaggccggcgggccggctccaggagccgcgggcttcggtagctccttggatattcctttctgcaagtgatcaggcaaagataaattccattttacagatgaggaagctgaggcctgtgaagggaaagtgacctggctacacagccggaacctgaatgcaggacattctgcccctgtcgtggtggtattggagccagctaatgccaccattcgaggttgcaggagcagcacctgaccagaaatccagagcttgtttaaaggaccctgaaatttgaagactatccacacatatctactttctggatatccacggagagaccatgggctttttcatcaaggaggcctgagttcaaatccttcttctatgtctgattctctctgtgaccttgggtgcctgactgacagaagttcttgcccccggggagctggtgtggacagaggaggggcgtgctggtcaccatgacaacagagacaggccccgactctgaggtgaagaaagctcaggaggaggccccgcagcagcccgaggctgctgccgctgtgaccacccctgtgacccctgcaggccacggccacccagaggccaactccaatgagaagcatccatcccagcaggacacgcggcctgctgaacagagcctagacatggaggagaaggactacagtgaggccgatggcctttcggagaggaccacgcccagcaaggcccagaaatcgccccagaagattgccaagaaatacaagagtgccatctgccgggtcactctgcttgatgcctcggagtatgagtgtgaggtggag

SEQ ID NO: 9777 - DNA, 769 bp, Homo sapiens
  source 1..769: mol_type = unassigned DNA
cgcctcggagcccgccggggcagccgccggacaccaggaccgcgagccagacagctcccggaagccgcgccgccgccgccagccacagcacagccggacagaggaggtggattaggagttcccgggagggagcctgctcagcctttccctgacatttgggcaaatgtgtggggagatgcggagctcaaggcgtgctggtcaccatgacaacagagacaggccccgactctgaggtgaagaaagctcaggaggaggccccgcagcagcccgaggctgctgccgctgtgaccacccctgtgacccctgcaggccacggccacccagaggccaactccaatgagaagcatccatcccagcaggacacgcggcctgctgaacagagcctagacatggaggagaaggactacagtgaggccgatggcctttcggagaggaccacgcccagcaaggcccagaaatcgccccagaagattgccaagaaatacaagagtgccatctgccgggtcactctgcttgatgcctcggagtatgagtgtgaggtggagaaacatggccggggccaggtgctgtttgacctggtctgtgaacacctcaacctcctagagaaggactacttcggcctgaccttctgtgatgctgacagccagaagaactggctggacccctccaaggagatcaagaagcagatccggagtagcccctggaattttgccttcacagtcaagttctacccgcctgatcctgcccagctgacagaagacatcacaag

SEQ ID NO: 9778 - DNA, 4613 bp, Homo sapiens
  source 1..4613: mol_type = unassigned DNA
gtcgcgggaggggcttccgccgcgagggggcggggccggccctcagagtcctctgacggccccagtcagggaatttcaatttgaaacctagcggagggaggaggcaggcgcggctgccggcggctgggactgaagagggacgggtcccgcggcgagcgagctcctgagcataagctgtggccatgactactgaagtaggctctgtgtctgaagtgaagaaggactctagccagttaggaacagatgcaaccaaggaaaaacctaaagaagtagcagaaaatcagcagaatcagtcttccgatccagaggaggaaaaaggttcccagccacctcctgcagctgaaagccaaagtagtctacgccgccagaagagagagaaggaaacatcggagagcaggggtatttctcggttcataccgccatggcttaagaagcaaaagtcatataccttagtagtggccaaagatggaggagataaaaaagagcctacccaagctgttgttgaagaacaggtcttagataaagaggaaccccttccagaagaacagagacaggctaagggtgatgctgaagaaatggctcagaagaaacaagagattaaagttgaagtcaaggaagaaaaaccctcagtgagcaaggaagaaaaaccctcagtgagcaaagtggagatgcagcctactgaattagtaagtaaggagagagaagagaaggtaaaagaaacacaggaagacaaattagaaggaggagcagcaaaaagggagaccaaggaagtgcagaccaatgagctgaaagcagagaaggcatctcaaaaagtcaccaagaagaccaaaactgtccagtgtaaagtgaccctcttagatggcaccgaatacagctgtgacctggagaaacatgccaagggacaagtgttatttgacaaagtgtgtgaacacctcaatctcttggagaaagactactttggacttttgtttcaggaaagccctgagcagaaaaactggttagatcctgctaaagaaataaagagacaactgagaaaccttccatggctattcacttttaatgtgaagttttatcctcctgatccttctcaattgactgaagatatcaccagatacttcttgtgccttcagctccggcaggacattgcctctggccgcctgccctgctcttttgtgactcatgctctcctgggatcctacaccctgcaggctgaacttggtgactatgacccagaagaacatggcagcatcgacctcagtgaattccagtttgcccctactcagactaaggagctggaagagaaggtggcagagctgcacaaaacccacaggggcttatcgccagcacaagctgattcccagttcttagaaaatgcaaagaggctttccatgtatggtgttgacctacatcatgccaaggactcagaaggtgtggacatcaagctgggcgtgtgtgctaatggacttctcatttacaaagacagactgcgaatcaatcgttttgcttggccgaaaatcttaaaaatttcctataaacgcagtaacttctacattaaagtcagaccggcagagctggaacagtttgagagtaccattggattcaaactgccaaaccaccgggcagcgaaaagactatggaaagtgtgcgtggagcatcatactttctacaggcttgtttctccagagcagccaccaaaagccaagttcctgaccttggggtccaaatttcgctatagtggccgcacccaagcacagacccgccaggccagcaccctcatagataggccagcaccacactttgagcgcacttctagtaaacgggtctccaggagtctagatggagctccgattggtgtcatggaccaaagtcttatgaaggattttcctggcgctgctggggagatttcagcctatggacctggacttgtcagcattgccgtggtacaagatggggacggcaggagggaagtgagaagcccaactaaagccccacatttgcagctcattgaaggaaagaaaaattccttgagagtagaaggggataatatttatgtcagacatagcaatttaatgttggaggaactggataaggcccaggaggacatactgaaacatcaggctagcattagtgaactcaagcgcaattttatggaatccacacctgagccgcgccctaatgaatgggaaaaacgacgtatcacacctctgtccctacagacacaagggagaaaaggagaccatcttttcaaggatattttatccgtgaaggagaagtacctgatgccgacaatatggacagttgaagaaaaagctcaggagacggacaagacacgtgctcccgagtcagaagggccttgcactggagccagggatgctgttaagagttcacatgagactctgaatatagtggaggagaagaagcgggcagaggttgggaaagacgaaagagtaatcacagaagaaatgaatggtaaagagatatcacctgggagtggtcctggggagattcgtaaggtggagcctgtgacacaaaaagactccacctccctgtcttctgagagcagcagcagcagcagtgagagtgaggaggaagacgtgggagagtaccgtccccaccaccgagtgaccgagggcaccatcagggaggaacaggagtatgaagaagaggtggaggaagaaccccgcccggcagccaaggtagtagagagggaggaagcagtgcccgaagccagcccagtcacacaagcaggtgccagtgtaatcacagtagaaacagtgatccaggaaaatgtaggtgcccaaaagatacccggagagaagagtgtacacgaaggcgctcttaagcaagacatgggagaagaagcagaggaagagccacagaaagttaacggagaggtgtcccatgttgacattgatgttttgccacaaattatttgttgttcagagccaccagtggtaaaaacagagatggtaacaatttctgatgcctcacaaaggacagaaatctccaccaaggaagtccccattgtccaaactgagaccaaaaccatcacatatgagtctccacagattgatggcggggctggtggtgattcgggcacgttactgaccgcacaaaccatcacatctgagtccgtgtcaacaacgacaaccacacacatcaccaagactgtaaaaggtggaatttctgaaacaagaattgagaaacgcattgtgatcacaggagatggagatattgatcatgaccaggcactggctcaggcgatcagggaagccagagagcagcaccctgacatgtcggtcacaagagtggtggtacacaaagaaacagagttggctgaggaaggggaagattaagtaagaaagtcattttttaaacaacactcaactttgtgaacccctgaagattttttgaccgttccaagtcttaatgccacaccactattccagcgaatttatgctacaactggtaacaatgaccagaagcctgaagaattaaaatgccaacaccaaacctttccttaccagctctggtctatattgctcccatgcatttaatatattattttgttttataaccacttctaaatattctcagttctttctttttgttgttgttaattaaggggttttggttttgttttctgtttactttgtgtgcaactacctgcttttaatgactcactttgatcaaatgacagtgaacaaagccagcccaagctggtaaggtgctgttcacttgaacaggtgctgttgcgcagaaaggaaactctgtgactaatttagatagtggctttccttcttctggattcttttcattgaattctcacagtaaatatttacggagttttcaaattgcagcaaatatactgtatgagaaaatattaatacagattaaaagcctttcttacatcttgaaaattttctaatatttgagaatttcacagggatgttttttatattggacccttttgactttccagtcctgtgactttctacttttagtagagagtcagaatctctggactggagaataatgaagaagttcactgactgtgcactgtgcttagagaccctgccgcaccacagtgccaatgcttgtcagacacatgcccttcggcagcattccagaacaggagggaagagaaagagaaaactttcttcccttctactaaaagattcaggcagcttaaaaccttagtgctttctttcttaacatacccacatttcaattctttccattatttgaacacttgggtagaactcttgctttgtattaaacctctttgtctacacatgtaaaacttaccttttgttattgagcaggcctatctctttcagatagttttatgattcacacaggtttgaggatgctggggagagggggagggggctgtggtggtgttctgttggttacaagaaagttataccatttaaagctggcaccagagacccgatagggacttattaactatattgaacattttttcctttgcctttgaccctatgtatagttacgatgccagattagatttatagcagcctcaagttgtattaaatgatattttgcttcctgtaatactattataaaataaagtttgtttattctctaaa

SEQ ID NO: 9779 - DNA, 4457 bp, Homo sapiens
  source 1..4457: mol_type = unassigned DNA
gtcgcgggaggggcttccgccgcgagggggcggggccggccctcagagtcctctgacggccccagtcagggaatttcaatttgaaacctagcggagggaggaggcaggcgcggctgccggcggctgggactgaagagggacgggtcccgcggcgagcgagctcctgagcataagctgtggccatgactactgaagtaggctctgtgtctgaagtgaagaaggactctagccagttaggaacagatgcaaccaaggaaaaacctaaagaagtagcagaaaatcagcagaatcagtcttccgatccagaggaggaaaaaggttcccagccacctcctgcagctgaaagccaaagtagtctacgccgccagaagagagagaaggaaacatcggagagcaggggtatttctcggttcataccgccatggcttaagaagcaaaagtcatataccttagtagtggccaaagatggaggagataaaaaagagcctacccaagctgttgttgaagaacaggtcttagataaagaggaaccccttccagaagaacagagacaggctaagggtgatgctgaagaaatggctcagaagaaacaagagattaaagttgaagtcaaggaagaaaaaccctcagtgagcaaggaagaaaaaccctcagtgagcaaagtggagatgcagcctactgaattagtaagtaaggagagagaagagaaggtaaaagaaacacaggaagacaaattagaaggaggagcagcaaaaagggagaccaaggaagtgcagaccaatgagctgaaagcagagaaggcatctcaaaaagtcaccaagaagaccaaaactgtccagtgtaaagtgaccctcttagatggcaccgaatacagctgtgacctggagaaacatgccaagggacaagtgttatttgacaaagtgtgtgaacacctcaatctcttggagaaagactactttggacttttgtttcaggaaagccctgagcagaaaaactggttagatcctgctaaagaaataaagagacaactgagaaaccttccatggctattcacttttaatgtgaagttttatcctcctgatccttctcaattgactgaagatatcaccagatacttcttgtgccttcagctccggcaggacattgcctctggccgcctgccctgctcttttgtgactcatgctctcctgggatcctacaccctgcaggctgaacttggtgactatgacccagaagaacatggcagcatcgacctcagtgaattccagtttgcccctactcagactaaggagctggaagagaaggtggcagagctgcacaaaacccacaggggcttatcgccagcacaagctgattcccagttcttagaaaatgcaaagaggctttccatgtatggtgttgacctacatcatgccaaggactcagaaggtgtggacatcaagctgggcgtgtgtgctaatggacttctcatttacaaagacagactgcgaatcaatcgttttgcttggccgaaaatcttaaaaatttcctataaacgcagtaacttctacattaaagtcagaccggcagagctggaacagtttgagagtaccattggattcaaactgccaaaccaccgggcagcgaaaagactatggaaagtgtgcgtggagcatcatactttctacaggcttgtttctccagagcagccaccaaaagccaagttcctgaccttggggtccaaatttcgctatagtggccgcacccaagcacagacccgccaggccagcaccctcatagataggccagcaccacactttgagcgcacttctagtaaacgggtctccaggagtctagatggagctccgattggtgtcatggaccaaagtcttatgaaggattttcctggcgctgctggggagatttcagcctatggacctggacttgtcagcattgccgtggtacaagatggggacggcaggagggaagtgagaagcccaactaaagccccacatttgcagctcattgaaggaaagaaaaattccttgagagtagaaggggataatatttatgtcagacatagcaatttaatgttggaggaactggataaggcccaggaggacatactgaaacatcaggctagcattagtgaactcaagcgcaattttatggaatccacacctgagccgcgccctaatgaatgggaaaaacgacgtatcacacctctgtccctacagacacaagggagttcacatgagactctgaatatagtggaggagaagaagcgggcagaggttgggaaagacgaaagagtaatcacagaagaaatgaatggtaaagagatatcacctgggagtggtcctggggagattcgtaaggtggagcctgtgacacaaaaagactccacctccctgtcttctgagagcagcagcagcagcagtgagagtgaggaggaagacgtgggagagtaccgtccccaccaccgagtgaccgagggcaccatcagggaggaacaggagtatgaagaagaggtggaggaagaaccccgcccggcagccaaggtagtagagagggaggaagcagtgcccgaagccagcccagtcacacaagcaggtgccagtgtaatcacagtagaaacagtgatccaggaaaatgtaggtgcccaaaagatacccggagagaagagtgtacacgaaggcgctcttaagcaagacatgggagaagaagcagaggaagagccacagaaagttaacggagaggtgtcccatgttgacattgatgttttgccacaaattatttgttgttcagagccaccagtggtaaaaacagagatggtaacaatttctgatgcctcacaaaggacagaaatctccaccaaggaagtccccattgtccaaactgagaccaaaaccatcacatatgagtctccacagattgatggcggggctggtggtgattcgggcacgttactgaccgcacaaaccatcacatctgagtccgtgtcaacaacgacaaccacacacatcaccaagactgtaaaaggtggaatttctgaaacaagaattgagaaacgcattgtgatcacaggagatggagatattgatcatgaccaggcactggctcaggcgatcagggaagccagagagcagcaccctgacatgtcggtcacaagagtggtggtacacaaagaaacagagttggctgaggaaggggaagattaagtaagaaagtcattttttaaacaacactcaactttgtgaacccctgaagattttttgaccgttccaagtcttaatgccacaccactattccagcgaatttatgctacaactggtaacaatgaccagaagcctgaagaattaaaatgccaacaccaaacctttccttaccagctctggtctatattgctcccatgcatttaatatattattttgttttataaccacttctaaatattctcagttctttctttttgttgttgttaattaaggggttttggttttgttttctgtttactttgtgtgcaactacctgcttttaatgactcactttgatcaaatgacagtgaacaaagccagcccaagctggtaaggtgctgttcacttgaacaggtgctgttgcgcagaaaggaaactctgtgactaatttagatagtggctttccttcttctggattcttttcattgaattctcacagtaaatatttacggagttttcaaattgcagcaaatatactgtatgagaaaatattaatacagattaaaagcctttcttacatcttgaaaattttctaatatttgagaatttcacagggatgttttttatattggacccttttgactttccagtcctgtgactttctacttttagtagagagtcagaatctctggactggagaataatgaagaagttcactgactgtgcactgtgcttagagaccctgccgcaccacagtgccaatgcttgtcagacacatgcccttcggcagcattccagaacaggagggaagagaaagagaaaactttcttcccttctactaaaagattcaggcagcttaaaaccttagtgctttctttcttaacatacccacatttcaattctttccattatttgaacacttgggtagaactcttgctttgtattaaacctctttgtctacacatgtaaaacttaccttttgttattgagcaggcctatctctttcagatagttttatgattcacacaggtttgaggatgctggggagagggggagggggctgtggtggtgttctgttggttacaagaaagttataccatttaaagctggcaccagagacccgatagggacttattaactatattgaacattttttcctttgcctttgaccctatgtatagttacgatgccagattagatttatagcagcctcaagttgtattaaatgatattttgcttcctgtaatactattataaaataaagtttgtttattctctaaa

SEQ ID NO: 9780 - DNA, 4456 bp, Homo sapiens
  source 1..4456: mol_type = unassigned DNA
cgggaggggcttccgccgcgagggggcggggccggccctcagagtcctctgacggccccagtcagggaatttcaatttgaaacctagcggagggaggaggcaggcgcggctgccggcggctgggactgaagagggacgggtcccgcggcgagcgagctcctgaggtacggcgtcgggcataagctgtggccatgactactgaagtaggctctgtgtctgaagtgaagaaggactctagccagttaggaacagatgcaaccaaggaaaaacctaaagaagtagcagaaaatcagcagaatcagtcttccgatccagaggaggaaaaaggttcccagccacctcctgcagctgaaagccaaagtagtctacgccgccagaagagagagaaggaaacatcggagagcaggggtatttctcggttcataccgccatggcttaagaagcaaaagtcatataccttagtagtggccaaagatggaggagataaaaaagagcctacccaagctgttgttgaagaacaggtcttagataaagaggaaccccttccagaagaacagagacaggctaagggtgatgctgaagaaatggctcagaagaaacaagagattaaagttgaagtcaaggaagaaaaaccctcagtgagcaaggaagaaaaaccctcagtgagcaaagtggagatgcagcctactgaattagtaagtaaggagagagaagagaaggtaaaagaaacacaggaagacaaattagaaggaggagcagcaaaaagggagaccaaggaagtgcagaccaatgagctgaaagcagagaaggcatctcaaaaagtcaccaagaagaccaaaactgtccagtgtaaagtgaccctcttagatggcaccgaatacagctgtgacctggagaaacatgccaagggacaagtgttatttgacaaagtgtgtgaacacctcaatctcttggagaaagactactttggacttttgtttcaggaaagccctgagcagaaaaactggttagatcctgctaaagaaataaagagacaactgagaaaccttccatggctattcacttttaatgtgaagttttatcctcctgatccttctcaattgactgaagatatcaccagatacttcttgtgccttcagctccggcaggacattgcctctggccgcctgccctgctcttttgtgactcatgctctcctgggatcctacaccctgcaggctgaacttggtgactatgacccagaagaacatggcagcatcgacctcagtgaattccagtttgcccctactcagactaaggagctggaagagaaggtggcagagctgcacaaaacccacaggggcttatcgccagcacaagctgattcccagttcttagaaaatgcaaagaggctttccatgtatggtgttgacctacatcatgccaaggactcagaaggtgtggacatcaagctgggcgtgtgtgctaatggacttctcatttacaaagacagactgcgaatcaatcgttttgcttggccgaaaatcttaaaaatttcctataaacgcagtaacttctacattaaagtcagaccggcagagctggaacagtttgagagtaccattggattcaaactgccaaaccaccgggcagcgaaaagactatggaaagtgtgcgtggagcatcatactttctacaggcttgtttctccagagcagccaccaaaagccaagttcctgaccttggggtccaaatttcgctatagtggccgcacccaagcacagacccgccaggccagcaccctcatagataggccagcaccacactttgagcgcacttctagtaaacgggtctccaggagtctagatggagctccgattggtgtcatggaccaaagtcttatgaaggattttcctggcgctgctggggagatttcagcctatggacctggacttgtcagcattgccgtggtacaagatggggacggcaggagggaagtgagaagcccaactaaagccccacatttgcagctcattgaaggaaagaaaaattccttgagagtagaaggggataatatttatgtcagacatagcaatttaatgttggaggaactggataaggcccaggaggacatactgaaacatcaggctagcattagtgaactcaagcgcaattttatggaatccacacctgagccgcgccctaatgaatgggaaaaacgacgtatcacacctctgtccctacagacacaagggagttcacatgagactctgaatatagtggaggagaagaagcgggcagaggttgggaaagacgaaagagtaatcacagaagaaatgaatggtaaagagatatcacctgggagtggtcctggggagattcgtaaggtggagcctgtgacacaaaaagactccacctccctgtcttctgagagcagcagcagcagcagtgagagtgaggaggaagacgtgggagagtaccgtccccaccaccgagtgaccgagggcaccatcagggaggaacaggagtatgaagaagaggtggaggaagaaccccgcccggcagccaaggtagtagagagggaggaagcagtgcccgaagccagcccagtcacacaagcaggtgccagtgtaatcacagtagaaacagtgatccaggaaaatgtaggtgcccaaaagatacccggagagaagagtgtacacgaaggcgctcttaagcaagacatgggagaagaagcagaggaagagccacagaaagttaacggagaggtgtcccatgttgacattgatgttttgccacaaattatttgttgttcagagccaccagtggtaaaaacagagatggtaacaatttctgatgcctcacaaaggacagaaatctccaccaaggaagtccccattgtccaaactgagaccaaaaccatcacatatgagtctccacagattgatggcggggctggtggtgattcgggcacgttactgaccgcacaaaccatcacatctgagtccgtgtcaacaacgacaaccacacacatcaccaagactgtaaaaggtggaatttctgaaacaagaattgagaaacgcattgtgatcacaggagatggagatattgatcatgaccaggcactggctcaggcgatcagggaagccagagagcagcaccctgacatgtcggtcacaagagtggtggtacacaaagaaacagagttggctgaggaaggggaagattaaaaagtcattttttaaacaacactcaactttgtgaacccctgaagattttttgaccgttccaagtcttaatgccacaccactattccagcgaatttatgctacaactggtaacaatgaccagaagcctgaagaattaaaatgccaacaccaaacctttccttaccagctctggtctatattgctcccatgcatttaatatattattttgttttataaccacttctaaatattctcagttctttctttttgttgttgttaattaaggggttttggttttgttttctgtttactttgtgtgcaactacctgcttttaatgactcactttgatcaaatgacagtgaacaaagccagcccaagctggtaaggtgctgttcacttgaacaggtgctgttgcgcagaaaggaaactctgtgactaatttagatagtggctttccttcttctggattcttttcattgaattctcacagtaaatatttacggagttttcaaattgcagcaaatatactgtatgagaaaatattaatacagattaaaagcctttcttacatcttgaaaattttctaatatttgagaatttcacagggatgttttttatattggacccttttgactttccagtcctgtgactttctacttttagtagagagtcagaatctctggactggagaataatgaagaagttcactgactgtgcactgtgcttagagaccctgccgcaccacagtgccaatgcttgtcagacacatgcccttcggcagcattccagaacaggagggaagagaaagagaaaactttcttcccttctactaaaagattcaggcagcttaaaaccttagtgctttctttcttaacatacccacatttcaattctttccattatttgaacacttgggtagaactcttgctttgtattaaacctctttgtctacacatgtaaaacttaccttttgttattgagcaggcctatctctttcagatagttttatgattcacacaggtttgaggatgctggggagagggggagggggctgtggtggtgttctgttggttacaagaaagttataccatttaaagctggcaccagagacccgatagggacttattaactatattgaacattttttcctttgcctttgaccctatgtatagttacgatgccagattagatttatagcagcctcaagttgtattaaatgatattttgcttcctgtaatactattataaaataaagtttgtttattct

SEQ ID NO: 9781 - DNA, 3369 bp, Homo sapiens
  source 1..3369: mol_type = unassigned DNA
agcggagggaggaggcaggcgcggctgccggcggctgggactgaagagggacgggtcccgcggcgagcgagctcctgagcataagctgtggccatgactactgaagtaggctctgtgtctgaagtgaagaaggactctagccagttaggaacagatgcaaccaaggaaaaacctaaagaagtagcagaaaatcagcagaatcagtcttccgatccagaggaggaaaaaggttcccagccacctcctgcagctgaaagccaaagtagtctacgccgccagaagagagagaaggaaacatcggagagcaggggtatttctcggttcataccgccatggcttaagaagcaaaagtcatataccttagtagtggccaaagatggaggagataaaaaagagcctacccaagctgttgttgaagaacaggtcttagataaagaggaaccccttccagaagaacagagacaggctaagggtgatgctgaagaaatggctcagaagaaacaagagattaaagttgaagtcaaggaagaaaaaccctcagtgagcaaggaagaaaaaccctcagtgagcaaagtggagatgcagcctactgaattagtaagtaaggagagagaagagaaggtaaaagaaacacaggaagacaaattagaaggaggagcagcaaaaagggagaccaaggaagtgcagaccaatgagctgaaagcagagaaggcatctcaaaaagtcaccaagaagaccaaaactgtccagtgtaaagtgaccctcttagatggcaccgaatacagctgtgacctggagaaacatgccaagggacaagtgttatttgacaaagtgtgtgaacacctcaatctcttggagaaagactactttggacttttgtttcaggaaagccctgagcagaaaaactggttagatcctgctaaagaaataaagagacaactgagaaaccttccatggctattcacttttaatgtgaagttttatcctcctgatccttctcaattgactgaagatatcaccagatacttcttgtgccttcagctccggcaggacattgcctctggccgcctgccctgctcttttgtgactcatgctctcctgggatcctacaccctgcaggctgaacttggtgactatgacccagaagaacatggcagcatcgacctcagtgaattccagtttgcccctactcagactaaggagctggaagagaaggtggcagagctgcacaaaacccacaggggcttatcgccagcacaagctgattcccagttcttagaaaatgcaaagaggctttccatgtatggtgttgacctacatcatgccaaggactcagaaggtgtggacatcaagctgggcgtgtgtgctaatggacttctcatttacaaagacagactgcgaatcaatcgttttgcttggccgaaaatcttaaaaatttcctataaacgcagtaacttctacattaaagtcagaccggcagagctggaacagtttgagagtaccattggattcaaactgccaaaccaccgggcagcgaaaagactatggaaagtgtgcgtggagcatcatactttctacaggcttgtttctccagagcagccaccaaaagccaagttcctgaccttggggtccaaatttcgctatagtggccgcacccaagcacagacccgccaggccagcaccctcatagataggccagcaccacactttgagcgcacttctagtaaacgggtctccaggagtctagatggagctccgattggtgtcatggaccaaagtcttatgaaggattttcctggcgctgctggggagatttcagcctatggacctggacttgtcagcattgccgtggtacaagatggggacggcaggagggaagtgagaagcccaactaaagccccacatttgcagctcattgaaggaaagactgtaaaaggtggaatttctgaaacaagaattgagaaacgcattgtgatcacaggagatggagatattgatcatgaccaggcactggctcaggcgatcagggaagccagagagcagcaccctgacatgtcggtcacaagagtggtggtacacaaagaaacagagttggctgaggaaggggaagattaagtaagaaagtcattttttaaacaacactcaactttgtgaacccctgaagattttttgaccgttccaagtcttaatgccacaccactattccagcgaatttatgctacaactggtaacaatgaccagaagcctgaagaattaaaatgccaacaccaaacctttccttaccagctctggtctatattgctcccatgcatttaatatattattttgttttataaccacttctaaatattctcagttctttctttttgttgttgttaattaaggggttttggttttgttttctgtttactttgtgtgcaactacctgcttttaatgactcactttgatcaaatgacagtgaacaaagccagcccaagctggtaaggtgctgttcacttgaacaggtgctgttgcgcagaaaggaaactctgtgactaatttagatagtggctttccttcttctggattcttttcattgaattctcacagtaaatatttacggagttttcaaattgcagcaaatatactgtatgagaaaatattaatacagattaaaagcctttcttacatcttgaaaattttctaatatttgagaatttcacagggatgttttttatattggacccttttgactttccagtcctgtgactttctacttttagtagagagtcagaatctctggactggagaataatgaagaagttcactgactgtgcactgtgcttagagaccctgccgcaccacagtgccaatgcttgtcagacacatgcccttcggcagcattccagaacaggagggaagagaaagagaaaactttcttcccttctactaaaagattcaggcagcttaaaaccttagtgctttctttcttaacatacccacatttcaattctttccattatttgaacacttgggtagaactcttgctttgtattaaacctctttgtctacacatgtaaaacttaccttttgttattgagcaggcctatctctttcagatagttttatgattcacacaggtttgaggatgctggggagagggggagggggctgtggtggtgttctgttggttacaagaaagttataccatttaaagctggcaccagagacccgatagggacttattaactatattgaacattttttcctttgcctttgaccctatgtatagttacgatgccagattagatttatagcagcctcaagttgtattaaatgatattttgcttcctgtaatactattataaaataaagtttgtttattctct

SEQ ID NO: 9782 - DNA, 3910 bp, Homo sapiens
  source 1..3910: mol_type = unassigned DNA
gaggaggcaggcgcggctgccggcggctgggactgaagagggacgggtcccgcggcgagcgagctcctgaggtacggcgtcgggcataagctgtggccatgactactgaagtaggctctgtgtctgaagtgaagaaggactctagccagttaggaacagatgcaaccaaggaaaaacctaaagaagtagcagaaaatcagcagaatcagtcttccgatccagaggaggaaaaaggttcccagccacctcctgcagctgaaagccaaagtagtctacgccgccagaagagagagaaggaaacatcggagagcaggggtatttctcggttcataccgccatggcttaagaagcaaaagtcatataccttagtagtggccaaagatggaggagataaaaaagagcctacccaagctgttgttgaagaacaggtcttagataaagaggaaccccttccagaagaacagagacaggctaagggtgatgctgaagaaatggctcagaagaaacaagagattaaagttgaagtcaaggaagaaaaaccctcagtgagcaaggaagaaaaaccctcagtgagcaaagtggagatgcagcctactgaattagtaagtaaggagagagaagagaaggtaaaagaaacacaggaagacaaattagaaggaggagcagcaaaaagggagaccaaggaagtgcagaccaatgagctgaaagcagagaaggcatctcaaaaagtcaccaagaagaccaaaactgtccagtgtaaagtgaccctcttagatggcaccgaatacagctgtgacctggagaaacatgccaagggacaagtgttatttgacaaagtgtgtgaacacctcaatctcttggagaaagactactttggacttttgtttcaggaaagccctgagcagaaaaactggttagatcctgctaaagaaataaagagacaactgagaaaccttccatggctattcacttttaatgtgaagttttatcctcctgatccttctcaattgactgaagatatcaccagatacttcttgtgccttcagctccggcaggacattgcctctggccgcctgccctgctcttttgtgactcatgctctcctgggatcctacaccctgcaggctgaacttggtgactatgacccagaagaacatggcagcatcgacctcagtgaattccagtttgcccctactcagactaaggagctggaagagaaggtggcagagctgcacaaaacccacaggggcttatcgccagcacaagctgattcccagttcttagaaaatgcaaagaggctttccatgtatggtgttgacctacatcatgccaaggactcagaaggtgtggacatcaagctgggcgtgtgtgctaatggacttctcatttacaaagacagactgcgaatcaatcgttttgcttggccgaaaatcttaaaaatttcctataaacgcagtaacttctacattaaagtcagaccggcagagctggaacagtttgagagtaccattggattcaaactgccaaaccaccgggcagcgaaaagactatggaaagtgtgcgtggagcatcatactttctacaggcttgtttctccagagcagccaccaaaagccaagttcctgaccttggggtccaaatttcgctatagtggccgcacccaagcacagacccgccaggccagcaccctcatagataggccagcaccacactttgagcgcacttctagtaaacgggtctccaggagtctagatggagctccgattggtgtcatggaccaaagtcttatgaaggattttcctggcgctgctggggagatttcagcctatggacctggacttgtcagcattgccgtggtacaagatggggacggcaggagggaagtgagaagcccaactaaagccccacatttgcagctcattgaaggaaagagttcacatgagactctgaatatagtggaggagaagagcgggcagaggttgggaaagacgaaagagtaatcacagaagaaatgaatggtaaagagatatcacctgggagtggtcctggggagattcgtaaggtggagcctgtgacacaaaaagactccacctccctgtcttctgagagcagcagcagcagcagtgagagtgaggaggaagacgtgggagagtaccgtccccaccaccgagtgaccgagggcaccatcagggaggaacaggagtatgaagaagaggtggaggaagaaccccgcccggcagccaagccaccagtggtaaaaacagagatggtaacaatttctgatgcctcacaaaggacagaaatctccaccaaggaagtccccattgtccaaactgagaccaaaaccatcacatatgagtctccacagattgatggcggggctggtggtgattcgggcacgttactgaccgcacaaaccatcacatctgagtccgtgtcaacaacgacaaccacacacatcaccaagactgtaaaaggtggaatttctgaaacaagaattgagaaacgcattgtgatcacaggagatggagatattgatcatgaccaggcactggctcaggcgatcagggaagccagagagcagcaccctgacatgtcggtcacaagagtggtggtacacaaagaaacagagttggctgaggaaggggaagattaagtaagaaagtcattttttaaacaacactcaactttgtgaacccctgaagattttttgaccgttccaagtcttaatgccacaccactattccagcgaatttatgctacaactggtaacaatgaccagaagcctgaagaattaaaatgccaacaccaaacctttccttaccagctctggtctatattgctcccatgcatttaatatattattttgttttataaccacttctaaatattctcagttctttctttttgttgttgttaattaaggggttttggttttgttttctgtttactttgtgtgcaactacctgcttttaatgactcactttgatcaaatgacagtgaacaaagccagcccaagctggtaaggtgctgttcacttgaacaggtgctgttgcgcagaaaggaaactctgtgactaatttagatagtggctttccttcttctggattcttttcattgaattctcacagtaaatatttacggagttttcaaattgcagcaaatatactgtatgagaaaatattaatacagattaaaagcctttcttacatcttgaaaattttctaatatttgagaatttcacagggatgttttttatattggacccttttgactttccagtcctgtgactttctacttttagtagagagtcagaatctctggactggagaataatgaagaagttcactgactgtgcactgtgcttagagaccctgccgcaccacagtgccaatgcttgtcagacacatgcccttcggcagcattccagaacaggagggaagagaaagagaaaactttcttcccttctactaaaagattcaggcagcttaaaaccttagtgctttctttcttaacatacccacatttcaattctttccattatttgaacacttgggtagaactcttgctttgtattaaacctctttgtctacacatgtaaaacttaccttttgttattgagcaggcctatctctttcagatagttttatgattcacacaggtttgaggatgctggggagagggggagggggctgtggtggtgttctgttggttacaagaaagttataccatttaaagctggcaccagagacccgatagggacttattaactatattgaacattttttcctttgcctttgaccctatgtatagttacgatgccagattagatttatagcagcctcaagttgtattaaatgatattttgcttcctgtaatactattataaaataaagtttgtttattctct

SEQ ID NO: 9783 - DNA, 3677 bp, Homo sapiens
  source 1..3677: mol_type = unassigned DNA
ccgcgagggggcggggccggccctcagagtcctctgacggccccagtcagggaatttcaatttgaaacctagcggagggaggaggcaggcgcggctgccggcggctgggactgaagagggacgggtcccgcggcgagcgagctcctgaggtacggcgtcgggcataagctgtggccatgactactgaagtaggctctgtgtctgaagtgaagaaggactctagccagttaggaacagatgcaaccaaggaaaaacctaaagaagtagcagaaaatcagcagaatcagtcttccgatccagaggaggaaaaaggttcccagccacctcctgcagctgaaagccaaagtagtctacgccgccagaagagagagaaggaaacatcggagagcaggggtatttctcggttcataccgccatggcttaagaagcaaaagtcatataccttagtagtggccaaagatggaggagataaaaaagagcctacccaagctgttgttgaagaacaggtcttagataaagaggaaccccttccagaagaacagagacaggctaagggtgatgctgaagaaatggctcagaagaaacaagagattaaagttgaagtcaaggaagaaaaaccctcagtgagcaaggaagaaaaaccctcagtgagcaaagtggagatgcagcctactgaattagtaagtaaggagagagaagagaaggtaaaagaaacacaggaagacaaattagaaggaggagcagcaaaaagggagaccaaggaagtgcagaccaatgagctgaaagcagagaaggcatctcaaaaagtcaccaagaagaccaaaactgtccagtgtaaagtgaccctcttagatggcaccgaatacagctgtgacctggagaaacatgccaagggacaagtgttatttgacaaagtgtgtgaacacctcaatctcttggagaaagactactttggacttttgtttcaggaaagccctgagcagaaaaactggttagatcctgctaaagaaataaagagacaactgagaaaccttccatggctattcacttttaatgtgaagttttatcctcctgatccttctcaattgactgaagatatcaccagatacttcttgtgccttcagctccggcaggacattgcctctggccgcctgccctgctcttttgtgactcatgctctcctgggatcctacaccctgcaggctgaacttggtgactatgacccagaagaacatggcagcatcgacctcagtgaattccagtttgcccctactcagactaaggagctggaagagaaggtggcagagctgcacaaaacccacaggggcttatcgccagcacaagctgattcccagttcttagaaaatgcaaagaggctttccatgtatggtgttgacctacatcatgccaaggactcagaaggtgtggacatcaagctgggcgtgtgtgctaatggacttctcatttacaaagacagactgcgaatcaatcgttttgcttggccgaaaatcttaaaaatttcctataaacgcagtaacttctacattaaagtcagaccggcagagctggaacagtttgagagtaccattggattcaaactgccaaaccaccgggcagcgaaaagactatggaaagtgtgcgtggagcatcatactttctacaggcttgtttctccagagcagccaccaaaagccaagttcctgaccttggggtccaaatttcgctatagtggccgcacccaagcacagacccgccaggccagcaccctcatagataggccagcaccacactttgagcgcacttctagtaaacgggtctccaggagtctagatggagctccgattggtgtcatggaccaaagtcttatgaaggattttcctggcgctgctggggagatttcagcctatggacctggacttgtcagcattgccgtggtacaagatggggacggcaggagggaagtgagaagcccaactaaagccccacatttgcagctcattgaaggaaagccaccagtggtaaaaacagagatggtaacaatttctgatgcctcacaaaggacagaaatctccaccaaggaagtccccattgtccaaactgagaccaaaaccatcacatatgagtctccacagattgatggcggggctggtggtgattcgggcacgttactgaccgcacaaaccatcacatctgagtccgtgtcaacaacgacaaccacacacatcaccaagactgtaaaaggtggaatttctgaaacaagaattgagaaacgcattgtgatcacaggagatggagatattgatcatgaccaggcactggctcaggcgatcagggaagccagagagcagcaccctgacatgtcggtcacaagagtggtggtacacaaagaaacagagttggctgaggaaggggaagattaagtaagaaagtcattttttaaacaacactcaactttgtgaacccctgaagattttttgaccgttccaagtcttaatgccacaccactattccagcgaatttatgctacaactggtaacaatgaccagaagcctgaagaattaaaatgccaacaccaaacctttccttaccagctctggtctatattgctcccatgcatttaatatattattttgttttataaccacttctaaatattctcagttctttctttttgttgttgttaattaaggggttttggttttgttttctgtttactttgtgtgcaactacctgcttttaatgactcactttgatcaaatgacagtgaacaaagccagcccaagctggtaaggtgctgttcacttgaacaggtgctgttgcgcagaaaggaaactctgtgactaatttagatagtggctttccttcttctggattcttttcattgaattctcacagtaaatatttacggagttttcaaattgcagcaaatatactgtatgagaaaatattaatacagattaaaagcctttcttacatcttgaaaattttctaatatttgagaatttcacagggatgttttttatattggacccttttgactttccagtcctgtgactttctacttttagtagagagtcagaatctctggactggagaataatgaagaagttcactgactgtgcactgtgcttagagaccctgccgcaccacagtgccaatgcttgtcagacacatgcccttcggcagcattccagaacaggagggaagagaaagagaaaactttcttcccttctactaaaagattcaggcagcttaaaaccttagtgctttctttcttaacatacccacatttcaattctttccattatttgaacacttgggtagaactcttgctttgtattaaacctctttgtctacacatgtaaaacttaccttttgttattgagcaggcctatctctttcagatagttttatgattcacacaggtttgaggatgctggggagagggggagggggctgtggtggtgttctgttggttacaagaaagttataccatttaaagctggcaccagagacccgatagggacttattaactatattgaacattttttcctttgcctttgaccctatgtatagttacgatgccagattagatttatagcagcctcaagttgtattaaatgatattttgcttcctgtaatactattataaaataaagtttgtttattctctaaa

SEQ ID NO: 9784 - DNA, 1138 bp, Homo sapiens
  source 1..1138: mol_type = unassigned DNA
cttggggtccaaatttcgctatagtggccgcacccaagcacagacccgccaggccagcaccctcatagataggccagcaccacactttgagcgcacttctagtaaacgggtctccaggagtctagatggagctccgattggtgtcatggaccaaagtcttatgaaggattttcctggcgctgctggggagatttcagcctatggacctggacttgtcagcattgccgtggtacaagatggggacggcaggagggaagtgagaagcccaactaaagccccacatttgcagctcattgaaggaaagaaaaattccttgagagtagaaggggataatatttatgtcagacatagcaatttaatgttggaggaactggataaggcccaggaggacatactgaaacatcaggctagcattagtgaactcaagcgcaattttatggaatccacacctgagccgcgccctaatgaatgggaaaaacgacgtatcacacctctgtccctacagacacaagggagaaaaggagaccatcttttcaaggatattttatccgtgaaggagaagtacctgatgccgacaatatggacagttgaagaaaaagctcaggagacggacaagacacgtgctcccgagtcagaagggccttgcactggagccagggatgctgttaagagttcacatgagactctgaatatagtggaggagaagaagcgggcagaggttgggaaagacgaaagagtaatcacagaagaaatgaatggtaaagagatatcacctgggagtggtcctggggagattcgtaaggtggagcctgtgacacaaaaagactccacctccctgtcttctgagagcagcagcagcagcagtgagagtgaggaggaagacgtgggagagtaccgtccccaccaccgagtgaccgagggcaccatcagggaggaacaggagtatgaagaagaggtggaggaagaaccccgcccggcagccaaggtagtagagagggaggaagcagtgcccgaagccagcccagtcacacaagcaggtgccagtgtaatcacagtagaaacagtgatccaggaaaatgtaggtgcccaaaagatacccggagagaagagtgtacacgaaggcgctcttaagcaagac

SEQ ID NO: 9785 - DNA, 3090 bp, Homo sapiens
  source 1..3090: mol_type = unassigned DNA
agaattccttagtactgttatttctcttgttggaaacccaagtgtgttctagcatctatgaggatgtatctgtaacctttactcctgacatttgtaagtctaatctcaaaagctccttatctccctattattgtagtatttggagaccagatgaattttagctagtttttttttctaaccttaaattatgtaattatatataagagtcactatagggtattttataaggaaggtactattctgttgtctttaacaaatgtatgtgaaaagtgaaacatggctttttgaaaatttagactatataacactaagattgggcctcatagtgctcctttatttaaaattaggtgtttggtttgaggatttttacccctatataaggcaaatttttttcaagtatcctacctctgtgctactaagtcagcattaacatgtacaatatatttttgattattttgttaaatgtggcctggtgatttagtgcctcatattctatggatcctaccaatacatacagtaaatcacaaaatttagagcaaacctaaagaaaaatgtaaagataattgcagtgagtatgcattgtaggacaattgttaaaagtttacctgaggaatgtcaaagatcaacattttagggaattaaatgttgaccaaggagttggaagatgtttcttaacagattattgaatgtctgtgtctcatttttcacatctgataaagactctgagctccttgcttacctctgaaaaatactatgaatggttaaaaaggtaagccgtttgaactctcagatttgacactatcatcctaattaagaaggaaaaggatatatattaggaattaacctataaaggttaaatgatttgcctttgataagggagtcaatatttttattctcaccattttttcccttgagtcaaaattcagtcagtatttgttagttttaaacttctacattcattcttttgaatcatcagatattgagaaatgtccaactatgaaaaactgttcttatttaaagaattttatgtaagtggttatatttcaaagattatttttaaatacccaccattttaatatgaaactagttaaataagccaatccccctcccccagccagaaaagaaatccatatttaacaaactgaatcataggttgaacatttgttccccaatataaagctaaaaacgaattttacatcattatactttaccccatcactagttgctttagacatttcaaattagaacagattgaattatgccatttttgcactctcatattcttgttcctgagtacaaaatattcaaaagcagagcataatctagggactgagaaagagtgaagcttccatcctccattccacctttgcaaaggatcatttccatcattcgtacaacactgtaggtgaagaaagaccaaagaggcttaatattctgcatcttctgagggcctcacagtaaaggcgaagatggaagaagaggaaacgcagctggaagaggaactggataaggcccaggaggacatactgaaacatcaggctagcattagtgaactcaagcgcaattttatggaatccacacctgagccgcgccctaatgaatgggaaaaacgacgtatcacacctctgtccctacagacacaagggagttcacatgagactctgaatatagtggaggagaagaagcgggcagaggttgggaaagacgaaagagtaatcacagaagaaatgaatggtaaagagatatcacctgggagtggtcctggggagattcgtaaggtggagcctgtgacacaaaaagactccacctccctgtcttctgagagcagcagcagcagcagtgagagtgaggaggaagacgtgggagagtaccgtccccaccaccgagtgaccgagggcaccatcagggaggaacaggagtatgaagaagaggtggaggaagaaccccgcccggcagccaaggtagtagagagggaggaagcagtgcccgaagccagcccagtcacacaagcaggtgccagtgtaatcacagtagaaacagtgatccaggaaaatgtaggtgcccaaaagatacccggagagaagagtgtacacgaaggcgctcttaagcaagacatgggagaagaagcagaggaagagccacagaaagttaacggagaggtgtcccatgttgacattgatgttttgccacaaattatttgttgttcagagccaccagtggtaaaaacagagatggtaacaatttctgatgcctcacaaaggacagaaatctccaccaaggaagtccccattgtccaaactgagaccaaaaccatcacatatgagtctccacagattgatggcggggctggtggtgattcgggcacgttactgaccgcacaaaccatcacatctgagtccgtgtcaacaacgacaaccacacacatcaccaagactgtaaaaggtggaatttctgaaacaagaattgagaaacgcattgtgatcacaggagatggagatattgatcatgaccaggcactggctcaggcgatcagggaagccagagagcagcaccctgacatgtcggtcacaagagtggtggtacacaaagaaacagagttggctgaggaaggggaagattaagtaagaaagtcattttttaaacaacactcaactttgtgaacccctgaagattttttgaccgttccaagtcttaatgccacaccactattccagcgaatttatgctacaactggtaacaatgaccagaagcctgaagaattaaaatgccaacaccaaacctttccttaccagctctggtctatattgctcccatgcatttaatatattattttgttttataaccacttctaaatattctcagttctttctttttgttgttgttaattaaggggttttggttttgttttctgtttactttgtgtgcaactacctgcttttaatgactcactttgatcaaatgacagtgaacaaagccagcccaagctggtaaggtgctgttcacttgaacaggtgctgttgcgcagaaaggaaactctgtgactaatttagatagtggctttccttcttctggattcttttcattgaattc

SEQ ID NO: 9786 - DNA, 2568 bp, Homo sapiens
  source 1..2568: mol_type = unassigned DNA
aatttcaatttgaaacctagcggagggaggaggcaggcgcggctgccggcggctgggactgaagagggacgggtcccgcggcgagcgagctcctgaggtacggcgtcgggcataagctgtggccatgactactgaagtaggctctgtgtctgaagtgaagaaggactctagccagttaggaacagatgcaaccaaggaaaaacctaaagaagtagcagaaaatcagcagaatcagtcttccgatccagaggaggaaaaaggttcccagccacctcctgcagctgaaagccaaagtagtctacgccgccagaagagagagaaggaaacatcggagagcaggggtatttctcggttcataccgccatggcttaagaagcaaaagtcatataccttagtagtggccaaagatggaggagataaaaaagagcctacccaagctgttgttgaagaacaggtcttagataaagaggaaccccttccagaagaacagagacaggctaagggtgatgctgaagaaatggctcagaagaaacaagagattaaagttgaagtcaaggaagaaaaaccctcagtgagcaaggaagaaaaaccctcagtgagcaaagtggagatgcagcctactgaattagtaagtaaggagagagaagagaaggtaaaagaaacacaggaagacaaattagaaggaggagcagcaaaaagggagaccaaggaagtgcagaccaatgagctgaaagcagagaaggcatctcaaaaagtcaccaagaagaccaaaactgtccagtgtaaagtgaccctcttagatggcaccgaatacagctgtgacctggagaaacatgccaagggacaagtgttatttgacaaagtgtgtgaacacctcaatctcttggagaaagactactttggacttttgtttcaggaaagccctgagcagaaaaactggttagatcctgctaaagaaataaagagacaactgagaaaccttccatggctattcacttttaatgtgaagttttatcctcctgatccttctcaattgactgaagatatcaccagatacttcttgtgccttcagctccggcaggacattgcctctggccgcctgccctgctcttttgtgactcatgctctcctgggatcctacaccctgcaggctgaacttggtgactatgacccagaagaacatggcagcatcgacctcagtgaattccagtttgcccctactcagactaaggagctggaagagaaggtggcagagctgcacaaaacccacaggggcttatcgccagcacaagctgattcccagttcttagaaaatgcaaagaggctttccatgtatggtgttgacctacatcatgccaaggactcagaaggtgtggacatcaagctgggcgtgtgtgctaatggacttctcatttacaaagacagactgcgaatcaatcgttttgcttggccgaaaatcttaaaaatttcctataaacgcagtaacttctacattaaagtcagaccggcagagctggaacagtttgagagtaccattggattcaaactgccaaaccaccgggcagcgaaaagactatggaaagtgtgcgtggagcatcatactttctacaggcttgtttctccagagcagccaccaaaagccaagttcctgaccttggggtccaaatttcgctatagtggccgcacccaagcacagacccgccaggccagcaccctcatagataggccagcaccacactttgagcgcacttctagtaaacgggtctccaggagtctagatggagctccgattggtgtcatggaccaaagtcttatgaaggattttcctggcgctgctggggagatttcagcctatggacctggacttgtcagcattgccgtggtacaagatggggacggcaggagggaagtgagaagcccaactaaagccccacatttgcagctcattgaaggaaagactgtaaaaggtggaatttctgaaacaagaattgagaaacgcattgtgatcacaggagatggagatattgatcatgaccaggcactggctcaggcgatcagggaagccagagagcagcaccctgacatgtcggtcacaagagtggtggtacacaaagaaacagagttggctgaggaaggggaagattaagtaagaaagtcattttttaaacaacactcaactttgtgaacccctgaagattttttgaccgttccaagtcttaatgccacaccactattccagcgaatttatgctacaactggtaacaatgaccagaagcctgaagaattaaaatgccaacaccaaacctttccttaccagctctggtctatattgctcccatgcatttaatatattattttgttttataaccacttctaaatattctcagttctttctttttgttgttgttaattaaggggttttggttttgttttctgtttactttgtgtgcaactacctgcttttaatgactcactttgatcaaatgacagtgaacaaagccagcccaagctggtaaggtgctgttcacttgaacaggtgctgttgcgcagaaaggaaactctgtgact

SEQ ID NO: 9787 - DNA, 552 bp, Homo sapiens
  source 1..552: mol_type = unassigned DNA
gatgcagacatagcctatttggcagctattttatgatagtggtgaacagcacacaaaactccttcagaccctcccaacataagctgtggccatgactactgaagtaggctctgtgtctgaagtgaagaaggactctagccagttaggaacagatgcaaccaaggaaaaacctaaagaagtagcagaaaatcagcagaatcagtcttccgatccagaggaggaaaaaggttcccagccacctcctgcagctgaaagccaaagtagtctacgccgccagaagagagagaaggaaacatcggagagcaggggtatttctcggttcataccgccatggcttaagaagcaaaagtcatataccttagtagtggccaaagatggaggagataaaaaagagcctacccaagctgttgttgaagaacaggtcttagataaagaggaaccccttccagaagaacagagacaggctaagggtgatgctgaagaaatggctcagaagaaacaagagattaaagttgaagtcaaggaagaaaaaccctcagtgagcaaggaaga

SEQ ID NO: 9788 - DNA, 3663 bp, Homo sapiens
  source 1..3663: mol_type = unassigned DNA
actgtacttaaggcgtttatcctaatccaggcgtccttggattgcacggtgccagcaagcaaggtggtaacagtgatcacagcctgggctgcaggtgtgagttctgaggagatctatggtttacccagcgaatttattactgataaatcataagctgtggccatgactactgaagtaggctctgtgtctgaagtgaagaaggactctagccagttaggaacagatgcaaccaaggaaaaacctaaagaagtagcagaaaatcagcagaatcagtcttccgatccagaggaggaaaaaggttcccagccacctcctgcagctgaaagccaaagtagtctacgccgccagaagagagagaaggaaacatcggagagcaggggtatttctcggttcataccgccatggcttaagaagcaaaagtcatataccttagtagtggccaaagatggaggagataaaaaagagcctacccaagctgttgttgaagaacaggtcttagataaagaggaaccccttccagaagaacagagacaggctaagggtgatgctgaagaaatggctcagaagaaacaagagattaaagttgaagtcaaggaagaaaaaccctcagtgagcaaggaagaaaaaccctcagtgagcaaagtggagatgcagcctactgaattagtaagtaaggagagagaagagaaggtaaaagaaacacaggaagacaaattagaaggaggagcagcaaaaagggagaccaaggaagtgcagaccaatgagctgaaagcagagaaggcatctcaaaaagtcaccaagaagaccaaaactgtccagtgtaaagtgaccctcttagatggcaccgaatacagctgtgacctggagaaacatgccaagggacaagtgttatttgacaaagtgtgtgaacacctcaatctcttggagaaagactactttggacttttgtttcaggaaagccctgagcagaaaaactggttagatcctgctaaagaaataaagagacaactgagaaaccttccatggctattcacttttaatgtgaagttttatcctcctgatccttctcaattgactgaagatatcaccagatacttcttgtgccttcagctccggcaggacattgcctctggccgcctgccctgctcttttgtgactcatgctctcctgggatcctacaccctgcaggctgaacttggtgactatgacccagaagaacatggcagcatcgacctcagtgaattccagtttgcccctactcagactaaggagctggaagagaaggtggcagagctgcacaaaacccacaggggcttatcgccagcacaagctgattcccagttcttagaaaatgcaaagaggctttccatgtatggtgttgacctacatcatgccaaggactcagaaggtgtggacatcaagctgggcgtgtgtgctaatggacttctcatttacaaagacagactgcgaatcaatcgttttgcttggccgaaaatcttaaaaatttcctataaacgcagtaacttctacattaaagtcagaccggcagagctggaacagtttgagagtaccattggattcaaactgccaaaccaccgggcagcgaaaagactatggaaagtgtgcgtggagcatcatactttctacaggcttgtttctccagagcagccaccaaaagccaagttcctgaccttggggtccaaatttcgctatagtggccgcacccaagcacagacccgccaggccagcaccctcatagataggccagcaccacactttgagcgcacttctagtaaacgggtctccaggagtctagatggagctccgattggtgtcatggaccaaagtcttatgaaggattttcctggcgctgctggggagatttcagcctatggacctggacttgtcagcattgccgtggtacaagatggggacggcaggagggaagtgagaagcccaactaaagccccacatttgcagctcattgaaggaaagccaccagtggtaaaaacagagatggtaacaatttctgatgcctcacaaaggacagaaatctccaccaaggaagtccccattgtccaaactgagaccaaaaccatcacatatgagtctccacagattgatggcggggctggtggtgattcgggcacgttactgaccgcacaaaccatcacatctgagtccgtgtcaacaacgacaaccacacacatcaccaagactgtaaaaggtggaatttctgaaacaagaattgagaaacgcattgtgatcacaggagatggagatattgatcatgaccaggcactggctcaggcgatcagggaagccagagagcagcaccctgacatgtcggtcacaagagtggtggtacacaaagaaacagagttggctgaggaaggggaagattaagtaagaaagtcattttttaaacaacactcaactttgtgaacccctgaagattttttgaccgttccaagtcttaatgccacaccactattccagcgaatttatgctacaactggtaacaatgaccagaagcctgaagaattaaaatgccaacaccaaacctttccttaccagctctggtctatattgctcccatgcatttaatatattattttgttttataaccacttctaaatattctcagttctttctttttgttgttgttaattaaggggttttggttttgttttctgtttactttgtgtgcaactacctgcttttaatgactcactttgatcaaatgacagtgaacaaagccagcccaagctggtaaggtgctgttcacttgaacaggtgctgttgcgcagaaaggaaactctgtgactaatttagatagtggctttccttcttctggattcttttcattgaattctcacagtaaatatttacggagttttcaaattgcagcaaatatactgtatgagaaaatattaatacagattaaaagcctttcttacatcttgaaaattttctaatatttgagaatttcacagggatgttttttatattggacccttttgactttccagtcctgtgactttctacttttagtagagagtcagaatctctggactggagaataatgaagaagttcactgactgtgcactgtgcttagagaccctgccgcaccacagtgccaatgcttgtcagacacatgcccttcggcagcattccagaacaggagggaagagaaagagaaaactttcttcccttctactaaaagattcaggcagcttaaaaccttagtgctttctttcttaacatacccacatttcaattctttccattatttgaacacttgggtagaactcttgctttgtattaaacctctttgtctacacatgtaaaacttaccttttgttattgagcaggcctatctctttcagatagttttatgattcacacaggtttgaggatgctggggagagggggagggggctgtggtggtgttctgttggttacaagaaagttataccatttaaagctggcaccagagacccgatagggacttattaactatattgaacattttttcctttgcctttgaccctatgtatagttacgatgccagattagatttatagcagcctcaagttgtattaaatgatattttgcttcctgtaatactattataaaataaagtttgtttattctctaaa

SEQ ID NO: 9789 - DNA, 585 bp, Homo sapiens
  source 1..585: mol_type = unassigned DNA
aaaaacagcaactctaaactggctctggatatgtcataagctgtggccatgactactgaagtaggctctgtgtctgaagtgaagaaggactctagccagttaggaacagatgcaaccaaggaaaaacctaaagaagtagcagaaaatcagcagaatcagtcttccgatccagaggaggaaaaaggttcccagccacctcctgcagctgaaagccaaagtagtctacgccgccagaagagagagaaggaaacatcggagagcaggggtatttctcggttcataccgccatggcttaagaagcaaaagtcatataccttagtagtggccaaagatggaggagataaaaaagagcctacccaagctgttgttgaagaacaggtcttagataaagaggaaccccttccagaagaacagagacaggctaagggtgatgctgaagaaatggctcagaagaaacaagagattaaagttgaagtcaaggaagaaaaaccctcagtgagcaaggaagaaaaaccctcagtgagcaaagtggagatgcagcctactgaattagtaagtaaggagagagaagagaaggtaaaagaa

SEQ ID NO: 9790 - DNA, 3914 bp, Homo sapiens
  source 1..3914: mol_type = unassigned DNA
gaggaggcaggcgcggctgccggcggctgggactgaagagggacgggtcccgcggcgagcgagctcctgaggtacggcgtcgggcataagctgtggccatgactactgaagtaggctctgtgtctgaagtgaagaaggactctagccagttaggaacagatgcaaccaaggaaaaacctaaagaagtagcagaaaatcagcagaatcagtcttccgatccagaggaggaaaaaggttcccagccacctcctgcagctgaaagccaaagtagtctacgccgccagaagagagagaaggaaacatcggagagcaggggtatttctcggttcataccgccatggcttaagaagcaaaagtcatataccttagtagtggccaaagatggaggagataaaaaagagcctacccaagctgttgttgaagaacaggtcttagataaagaggaaccccttccagaagaacagagacaggctaagggtgatgctgaagaaatggctcagaagaaacaagagattaaagttgaagtcaaggaagaaaaaccctcagtgagcaaggaagaaaaaccctcagtgagcaaagtggagatgcagcctactgaattagtaagtaaggagagagaagagaaggtaaaagaaacacaggaagacaaattagaaggaggagcagcaaaaagggagaccaaggaagtgcagaccaatgagctgaaagcagagaaggcatctcaaaaagtcaccaagaagaccaaaactgtccagtgtaaagtgaccctcttagatggcaccgaatacagctgtgacctggagaaacatgccaagggacaagtgttatttgacaaagtgtgtgaacacctcaatctcttggagaaagactactttggacttttgtttcaggaaagccctgagcagaaaaactggttagatcctgctaaagaaataaagagacaactgagaaaccttccatggctattcacttttaatgtgaagttttatcctcctgatccttctcaattgactgaagatatcaccagatacttcttgtgccttcagctccggcaggacattgcctctggccgcctgccctgctcttttgtgactcatgctctcctgggatcctacaccctgcaggctgaacttggtgactatgacccagaagaacatggcagcatcgacctcagtgaattccagtttgcccctactcagactaaggagctggaagagaaggtggcagagctgcacaaaacccacaggggcttatcgccagcacaagctgattcccagttcttagaaaatgcaaagaggctttccatgtatggtgttgacctacatcatgccaaggactcagaaggtgtggacatcaagctgggcgtgtgtgctaatggacttctcatttacaaagacagactgcgaatcaatcgttttgcttggccgaaaatcttaaaaatttcctataaacgcagtaacttctacattaaagtcagaccggcagagctggaacagtttgagagtaccattggattcaaactgccaaaccaccgggcagcgaaaagactatggaaagtgtgcgtggagcatcatactttctacaggcttgtttctccagagcagccaccaaaagccaagttcctgaccttggggtccaaatttcgctatagtggccgcacccaagcacagacccgccaggccagcaccctcatagataggccagcaccacactttgagcgcacttctagtaaacgggtctccaggagtctagatggagctccgattggtgtcatggaccaaagtcttatgaaggattttcctggcgctgctggggagatttcagcctatggacctggacttgtcagcattgccgtggtacaagatggggacggcaggagggaagtgagaagcccaactaaagccccacatttgcagctcattgaaggaaagagttcacatgagactctgaatatagtggaggagaagaagcgggcagaggttgggaaagacgaaagagtaatcacagaagaaatgaatggtaaagagatatcacctgggagtggtcctggggagattcgtaaggtggagcctgtgacacaaaaagactccacctccctgtcttctgagagcagcagcagcagcagtgagagtgaggaggaagacgtgggagagtaccgtccccaccaccgagtgaccgagggcaccatcagggaggaacaggagtatgaagaagaggtggaggaagaaccccgcccggcagccaagccaccagtggtaaaaacagagatggtaacaatttctgatgcctcacaaaggacagaaatctccaccaaggaagtccccattgtccaaactgagaccaaaaccatcacatatgagtctccacagattgatggcggggctggtggtgattcgggcacgttactgaccgcacaaaccatcacatctgagtccgtgtcaacaacgacaaccacacacatcaccaagactgtaaaaggtggaatttctgaaacaagaattgagaaacgcattgtgatcacaggagatggagatattgatcatgaccaggcactggctcaggcgatcagggaagccagagagcagcaccctgacatgtcggtcacaagagtggtggtacacaaagaaacagagttggctgaggaaggggaagattaagtaagaaagtcattttttaaacaacactcaactttgtgaacccctgaagattttttgaccgttccaagtcttaatgccacaccactattccagcgaatttatgctacaactggtaacaatgaccagaagcctgaagaattaaaatgccaacaccaaacctttccttaccagctctggtctatattgctcccatgcatttaatatattattttgttttataaccacttctaaatattctcagttctttctttttgttgttgttaattaaggggttttggttttgttttctgtttactttgtgtgcaactacctgcttttaatgactcactttgatcaaatgacagtgaacaaagccagcccaagctggtaaggtgctgttcacttgaacaggtgctgttgcgcagaaaggaaactctgtgactaatttagatagtggctttccttcttctggattcttttcattgaattctcacagtaaatatttacggagttttcaaattgcagcaaatatactgtatgagaaaatattaatacagattaaaagcctttcttacatcttgaaaattttctaatatttgagaatttcacagggatgttttttatattggacccttttgactttccagtcctgtgactttctacttttagtagagagtcagaatctctggactggagaataatgaagaagttcactgactgtgcactgtgcttagagaccctgccgcaccacagtgccaatgcttgtcagacacatgcccttcggcagcattccagaacaggagggaagagaaagagaaaactttcttcccttctactaaaagattcaggcagcttaaaaccttagtgctttctttcttaacatacccacatttcaattctttccattatttgaacacttgggtagaactcttgctttgtattaaacctctttgtctacacatgtaaaacttaccttttgttattgagcaggcctatctctttcagatagttttatgattcacacaggtttgaggatgctggggagagggggagggggctgtggtggtgttctgttggttacaagaaagttataccatttaaagctggcaccagagacccgatagggacttattaactatattgaacattttttcctttgcctttgaccctatgtatagttacgatgccagattagatttatagcagcctcaagttgtattaaatgatattttgcttcctgtaatactattataaaataaagtttgtttattctctaaa

SEQ ID NO: 9791 - DNA, 565 bp, Homo sapiens
  source 1..565: mol_type = unassigned DNA
acgcgcggtgcgggtcgggcccgctgtaggctcgcgtccgcgcccccagctgccgcctgcgccgtctgggagctgcggagagggacgcgtgtttcgtgctccgatccttacaattcccacacccaggccatctcaccacagatggcttgttttttctcctcctgcgcctgggggccgagggttgggagcatttttagcataagctgtggccatgactactgaagtaggctctgtgtctgaagtgaagaaggactctagccagttaggaacagatgcaaccaaggaaaaacctaaagaagtagcagaaaatcagcagaatcagtcttccgatccagaggaggaaaaaggttcccagccacctcctgcagctgaaagccaaagtagtctacgccgccagaagagagagaaggaaacatcggagagcaggggtatttctcggttcataccgccatggcttaagaagcaaaagtcatataccttagtagtggccaaagatggaggagataaaaaagagcctacccaagctgttgttgaagaacaggtcttagataaagaggaacccctt

SEQ ID NO: 9792 - DNA, 4360 bp, Homo sapiens
  source 1..4360: mol_type = unassigned DNA
ctgaaatggacttgctttcagacatttcagaggaagacccctttggggaggctgaccagatcacactagacagcttagagcacctttccacaggtgaaatatcggagcagggggattctgaagttgctatgcctgatttggtcttggattctgccatagccccttctcagcctgactgtccttctcccatccatgggaagactcttaaagcagctgacgacagtgattctgagtttggttacttctccttcagtttctccaaatgttttccctccggcttcccctcccttcttgatgaagatggatatcttgctttccccagcctccccaaggtctgggtctccttcctccccgctggtgtgcagcactatgtcccaatcacctccccttcattcattccttcccttatcctcatctttgggctacttctgtctgcttctcagtcagttcctttttctcttgccttttcccttcctctggctctatccctctgctatctggaggctaaagccgcctcctttaatgtttcttatgactgtgacttgaatgacaagctcgaggaagaggaagtagttgctggcatgcctacgtaagctcagtttgtggagtcaacacaatacactttatcttaaacccttcctaatatagagtgtaaatgtgtgcatacatttcaccactgattaccctcaacatagtagtacctgcacattttcacacacacaatattttagtgcatgagaaataagtgtagacacttctccttcattgataccattgaccagttccacacattctaagttaggagcgaaattgtaggattattttacaaatatctagatcaaagtagatttgtaacagaaggtgtgggggaggagggaaggaggagggaacctgtattgcccgtaacaatccatacagggtctctccattttgcaaacagatattaatgctgttcctttaggatgacatctttttgttttgatatagaatttaggatgcagtggacataactgttcctgatgtatattagtagaattccttagtactgttatttctcttgttggaaacccaagtgtgttctagcatctatgaggatgtatctgtaacctttactcctgacatttgtaagtctaatctcaaaagctccttatctccctattattgtagtatttggagaccagatgaattttagctagtttttttttctaaccttaaattatgtaattatatataagagtcactatagggtattttataaggaaggtactattctgttgtctttaacaaatgtatgtgaaaagtgaaacatggctttttgaaaatttagactatataacactaagattgggcctcatagtgctcctttatttaaaattaggtgtttggtttgaggatttttacccctatataaggcaaatttttttcaagtatcctacctctgtgctactaagtcagcattaacatgtacaatatatttttgattattttgttaaatgtggcctggtgatttagtgcctcatattctatggatcctaccaatacatacagtaaatcacaaaatttagagcaaacctaaagaaaaatgtaaagataattgcagtgagtatgcattgtaggacaattgttaaaagtttacctgaggaatgtcaaagatcaacattttagggaattaaatgttgaccaaggagttggaagatgtttcttaacagattattgaatgtctgtgtctcatttttcacatctgataaagactctgagctccttgcttacctctgaaaaatactatgaatggttaaaaaggtaagccgtttgaactctcagatttgacactatcatcctaattaagaaggaaaaggatatatattaggaattaacctataaaggttaaatgatttgcctttgataagggagtcaatatttttattctcaccattttttcccttgagtcaaaattcagtcagtatttgttagttttaaacttctacattcattcttttgaatcatcagatattgagaaatgtccaactatgaaaaactgttcttatttaaagaattttatgtaagtggttatatttcaaagattatttttaaatacccaccattttaatatgaaactagttaaataagccaatccccctcccccagccagaaaagaaatccatatttaacaaactgaatcataggttgaacatttgttccccaatataaagctaaaaacgaattttacatcattatactttaccccatcactagttgctttagacatttcaaattagaacagattgaattatgccatttttgcactctcatattcttgttcctgagtacaaaatattcaaaagcagagcataatctagggactgagaaagagtgaagcttccatcctccattccacctttgcaaaggatcatttccatcattcgtacaacactgtaggtgaagaaagaccaaagaggcttaatattctgcatcttctgagggcctcacagtaaaggcgaagatggaagaagaggaaacgcagctggaagagaaaaattccttgagagtagaaggggataatatttatgtcagacatagcaatttaatgttggaggaactggataaggcccaggaggacatactgaaacatcaggctagcattagtgaactcaagcgcaattttatggaatccacacctgagccgcgccctaatgaatgggaaaaacgacgtatcacacctctgtccctacagacacaagggacacgtgctcccgagtcagaagggccttgcactggagccagggatgctgttaagccaccagtggtaaaaacagagatggtaacaatttctgatgcctcacaaaggacagaaatctccaccaaggaagtccccattgtccaaactgagaccaaaaccatcacatatgagtctccacagactgtaaaaggtggaatttctgaaacaagaattgagaaacgcattgtgatcacaggagatggagatattgatcatgaccaggcactggctcaggcgatcagggaagccagagagcagcaccctgacatgtcggtcacaagagtggtggtacacaaagaaacagagttggctgaggaaggggaagattaagtaagaaagtcattttttaaacaacactcaactttgtgaacccctgaagattttttgaccgttccaagtcttaatgccacaccactattccagcgaatttatgctacaactggtaacaatgaccagaagcctgaagaattaaaatgccaacaccaaacctttccttaccagctctggtctatattgctcccatgcatttaatatattattttgttttataaccacttctaaatattctcagttctttctttttgttgttgttaattaaggggttttggttttgttttctgtttactttgtgtgcaactacctgcttttaatgactcactttgatcaaatgacagtgaacaaagccagcccaagctggtaaggtgctgttcacttgaacaggtgctgttgcgcagaaaggaaactctgtgactaatttagatagtggctttccttcttctggattcttttcattgaattctcacagtaaatatttacggagttttcaaattgcagcaaatatactgtatgagaaaatattaatacagattaaaagcctttcttacatcttgaaaattttctaatatttgagaatttcacagggatgttttttatattggacccttttgactttccagtcctgtgactttctacttttagtagagagtcagaatctctggactggagaataatgaagaagttcactgactgtgcactgtgcttagagaccctgccgcaccacagtgccaatgcttgtcagacacatgcccttcggcagcattccagaacaggagggaagagaaagagaaaactttcttcccttctactaaaagattcaggcagcttaaaaccttagtgctttctttcttaacatacccacatttcaattctttccattatttgaacacttgggtagaactcttgctttgtattaaacctctttgtctacacatgtaaaacttaccttttgttattgagcaggcctatctctttcagatagttttatgattcacacaggtttgaggatgctggggagagggggagggggctgtggtggtgttctgttggttacaagaaagttataccatttaaagctggcaccagagacccgatagggacttattaactatattgaacattttttcctttgcctttgaccctatgtatagttacgatgccagattagatttatagcagcctcaagttgtattaaatgatattttgcttcctgtaatactattataaaataaagtttgtttattctct

SEQ ID NO: 9793 - DNA, 588 bp, Homo sapiens
  source 1..588: mol_type = unassigned DNA
ttatagctcttattccctttgtagttagctatttaaatgccctgctctcacactgctggagccacattttatacaggtctgtgtcctcagcagctatcagcaagcacaaagcaattcctcatggaatgaatggatctttacaaaacccaaaagtacagtattaaaatcaagatttcatgggcagaggtaatgcataagctgtggccatgactactgaagtaggctctgtgtctgaagtgaagaaggactctagccagttaggaacagatgcaaccaaggaaaaacctaaagaagtagcagaaaatcagcagaatcagtcttccgatccagaggaggaaaaaggttcccagccacctcctgcagctgaaagccaaagtagtctacgccgccagaagagagagaaggaaacatcggagagcaggggtatttctcggttcataccgccatggcttaagaagcaaaagtcatataccttagtagtggccaaagatggaggagataaaaaagagcctacccaagctgttgttgaagaacaggtcttagataaagaggaaccccttccagaagaacagagacaggctaagggtg

SEQ ID NO: 9794 - DNA, 591 bp, Homo sapiens
  source 1..591: mol_type = unassigned DNA
gaacttcggcttcatcctgtgacttgctcagatgtctttatgtgatccatagtattgtagaaaaacctcagattcaaatgaaagatatgcataagctgtggccatgactactgaagtaggctctgtgtctgaagtgaagaaggactctagccagttaggaacagatgcaaccaaggaaaaacctaaagaagtagcagaaaatcagcagaatcagtcttccgatccagaggaggaaaaaggttcccagccacctcctgcagctgaaagccaaagtagtctacgccgccagaagagagagaaggaaacatcggagagcaggggtatttctcggttcataccgccatggcttaagaagcaaaagtcatataccttagtagtggccaaagatggaggagataaaaaagagcctacccaagctgttgttgaagaacaggtcttagataaagaggaaccccttccagaagaacagagacaggctaagggtgatgctgaagaaatggctcagaagaaacaagagattaaagttgaagtcaaggaagaaaaaccctcagtgagcaaggaagaaaaaccctcagtgagcaaagtggagat

SEQ ID NO: 9795 - DNA, 4706 bp, Homo sapiens
  source 1..4706: mol_type = unassigned DNA
cgtcgtccgcggagcctgaccctgcgccaggacggaggaggctgtgcccatgtaactgtcctgaagtactgcggtggccccctcccccgcggctgggagggcaggcaggacgaggttggctttcctcgcacggtctctgggcgtgggcccccgccgcagctccgcggagcctcggtgtctcctgcaacagggggcggggggaacagcggcgagcagccctgggctgcggcttcctccccacgcccgagtctcctgcgcaccgccgccgaggacgcgcgcccgagcctagtccccacgccgcggcgcgcccgggctccctgctgatcccagaacaatcaaccatgacgaccgaatctggatcagactcggaatccaagccggaccaggaggccgagccccaggaggcggcgggggcgcaggggcgcgcgggggcgcccgtgccggagccgcccaaggaggagcagcagcaggccctggagcagttcgccgccgctgcagcgcacagcaccccggtgcggagggaggtcactgacaaggaacaggagtttgctgccagggctgcaaaacagctcgaatatcagcaattagaagacgataaactttctcagaaatcatctagcagtaaactctctcggtctccattaaagattgtcaaaaagcctaaaagcatgcagtgcaaagtgatacttctcgatggatcagaatatacctgtgatgtagagaaacgctccagaggacaagtgctgtttgataaagtgtgtgaacacttgaacttgctagagaaagactactttgggcttacgtatcgagatgctgaaaaccagaagaattggttggaccctgctaaggaaataaaaaaacaggttcgaagtggtgcttggcacttttcatttaatgtgaaattttatccaccagaccctgcccaactatctgaagatatcaccaggtactacctctgcttgcagttgcgagatgacatcgtgtccggaaggctgccctgctcctttgttaccctggccttgctgggctcctacactgtccagtcagagctcggagactatgacccagatgaatgtgggagcgattacattagtgagttccgctttgcaccaaaccacactaaagaactggaagacaaagtgatcgagctgcacaagagccacagaggaatgacgccagcagaagcagagatgcatttcttggaaaatgccaaaaaattatcaatgtatggggtagatttacatcatgctaaggactcagaaggggtagaaattatgttaggagtttgtgcaagtggtctgttgatatatcgcgaccggctgcgaataaacagatttgcctggcccaaggttctaaagatttcatacaaacggaacaacttttacattaagatccggccgggagagtttgaacaatttgaaagcaccattgggtttaagctgccaaaccatcgagctgccaagcgtttatggaaagtatgtgttgagcatcatacatttttcagactactgttaccagaagcacctcccaagaaattcctaaccttgggttccaagtttcgttatagtggcaggacacaagcgcaaacgagaagagccagtgcgttgatagatcgcccagcaccttactttgaacgctcatccagcaaacgttataccatgtctcgcagcttggatggagaggttggtactggccagtacgccacaacaaaaggcatctctcagaccaacttgatcaccactgtgactccggagaagaaggctgaggaggagcgggacgaggaagaggacaaacggaggaagggggaagaagtcacgcccatctcggccatccggcacgagggaaagtcacctgggcttggcactgactcatgtcccttgtcacccccatccacccattgtgcccccacatctcccacagagctccgtaggaggtgtaaggagaatgactgcaaactgccaggttatgagccgtccagagctgagcacctgcctggagagcccgccttggactctgatggcccagggaggccttacctaggggatcaagatgtggcttttagctacagacagcaaactggcaaggggaccaccctgttctccttctccttgcagctccctgagtcattcccctccctcctagatgatgatggatacctctctttccccaacctttctgaaaccaacctcctgccccagagcttgcagcattacctcccgatccgctcaccgtcccttgtgccctgtttcctcttcatctttttctttctgctgtctgcctccttctcagtgccatacgctctcactctctccttccctctggctctgtgcctctgctacctggagcccaaggcggcctccttgagcgcctccctagacaatgacccgagtgacagttcagaggaagagactgacagtgagcgcacggacaccgcagccgacggggagaccactgccactgagtcggaccaggaggaagatgcagagctcaaggcacaggagctagaaaaaactcaagatgacctgatgaaacatcaaaccaacattagcgagctgaaaagaaccttcttagaaacctcaacagacactgccgtaacgaatgaatgggagaagaggctttccacctcccccgtgcgactggccgccaggcaggaggatgcccccatgatcgaaccacttgtccctgaagagactaagcagtcttctggggaaaagctcatggatggctctgaaatcttcagtttattagagtctgcgcgaaaaccaacagaattcataggaggggttacttctacttctcaaagctgggttcagaaaatggaaaccaagacggagtccagtggaatagagacggaacccaccgtgcaccacctgccgcttagcactgagaaggtggtgcaggagaccgtgttggtggaggagcggcgtgtggtgcacgcgagtggggatgcttcttactcggcgggagacagcggggatgctgcagcacagcccgcattcacaggcattaaagggaaagagggctctgccttgacggagggggctaaagaggaaggaggggaggaggtcgctaaagctgtcctggaacaggaagagacagccgctgcttcccgtgagcgacaagaggagcagagtgcagccatccacatttcagaaactttggaacaaaaacctcattttgagtcctcaacggtgaagacggaaaccatcagttttggcagtgtttcaccgggaggagtaaagctagaaatttccacgaaggaagtgccagtagttcacaccgaaaccaaaaccatcacatatgaatcatcacaggtcgatccaggcacagatctggagccaggcgtgctgatgagtgcacagacgatcacatctgaaaccaccagtaccaccaccactacgcacatcaccaaaactgtgaaagggggcatttcagagacaagaattgagaagcgaatagtcatcacgggggatgcagacattgaccatgaccaggcgctggctcaggcaattaaagaggccaaagagcagcaccctgacatgtcagtgaccaaagtagtggtccataaagagacagagatcacaccagaagatggagaggattgaccagaggaataacttagcttgcacatgaatgcagtcatgcaaaccgttaggaaaaccagagcctatatggagttccctcttctaacccaactgacttgtatctgtccgtggaaaatttcagtccagaagaattgaccttgaccattaataaagacactggcagagagatcttcccataataaagcaatctgattcagcatcactaaaccgataatgcatgaagcaacgataaaattacaaaagagcagcatttttaattttcacaaaatgtctcagttttcagctatacctgcacgttcataaccaacaatataaaccgtggtctcatgtaacacataaacaattcatgcctttcatagtttattattattaaagtctaaacaaaattgcaatttcttaggtaaccttatatttacaataaatgaagattaccctcaaatgctagaagctgtctaggtccgtccggtgtgtcagattttcctcagattagatgtgccaataaccaagtttattcagtaaacaacttgtacttgtttcatctggttttattactctcacccataaacagtaatgactctctgaccctctggaaatatgtaatgcttccaatcttgctttgtgtatctcatttaatttgttataaggtagtactgattttagcatattaatgcgatttcttccttgttgtttgctttggtctgtgttcaatccagagagcttaaattgtcattattttgggaagaaaacctgtatttttgttagtttacaatattatgaaatttcacttcaggagaaactgctgggcttcctgtggctttgttttcttagttactttttccgtgccgtgtattttttaattgatttttcttcttttacttgaaaagaaagtgttttattttcaaatctggtccatatttacattctagttcagagccaagccttaaactgtacagaatttccactgtaattaaaactatttagtgttagttataaatagccttcaaaaagagagattctccattacacgatcacctgcatcacagcccatggtgaatgtatgtttctgcatagcgaaataaaaatggcaaatgcactgaaagc

SEQ ID NO: 9796 - DNA, 3492 bp, Homo sapiens
  source 1..3492: mol_type = unassigned DNA
gttatttgatttgccttggctgtggggaattctgtgctcagaagcaaggactggagcagtgaagtcattgtcctgcctggtgttgtgacatcactatggctcaaaggaaacaagggtggggcaggcaaaaccagaccatctgaagcatcttgctggctttaaaactttgcctgatcaatcaatgagactcctttctcaagttgaactgcattgcgagaacaatcaaccatgacgaccgaatctggatcagactcggaatccaagccggaccaggaggccgagccccaggaggcggcgggggcgcaggggcgcgcgggggcgcccgtgccggagccgcccaaggaggagcagcagcaggccctggagcagttcgccgccgctgcagcgcacagcaccccggtgcggagggaggtcactgacaaggaacaggagtttgctgccagggctgcaaaacagctcgaatatcagcaattagaagacgataaactttctcagaaatcatctagcagtaaactctctcggtctccattaaagattgtcaaaaagcctaaaagcatgcagtgcaaagtgatacttctcgatggatcagaatatacctgtgatgtagagaaacgctccagaggacaagtgctgtttgataaagtgtgtgaacacttgaacttgctagagaaagactactttgggcttacgtatcgagatgctgaaaaccagaagaattggttggaccctgctaaggaaataaaaaaacaggttcgaagtggtgcttggcacttttcatttaatgtgaaattttatccaccagaccctgcccaactatctgaagatatcaccaggtactacctctgcttgcagttgcgagatgacatcgtgtccggaaggctgccctgctcctttgttaccctggccttgctgggctcctacactgtccagtcagagctcggagactatgacccagatgaatgtgggagcgattacattagtgagttccgctttgcaccaaaccacactaaagaactggaagacaaagtgatcgagctgcacaagagccacagaggaatgacgccagcagaagcagagatgcatttcttggaaaatgccaaaaaattatcaatgtatggggtagatttacatcatgctaaggactcagaaggggtagaaattatgttaggagtttgtgcaagtggtctgttgatatatcgcgaccggctgcgaataaacagatttgcctggcccaaggttctaaagatttcatacaaacggaacaacttttacattaagatccggccgggagagtttgaacaatttgaaagcaccattgggtttaagctgccaaaccatcgagctgccaagcgtttatggaaagtatgtgttgagcatcatacatttttcagactactgttaccagaagcacctcccaagaaattcctaaccttgggttccaagtttcgttatagtggcaggacacaagcgcaaacgagaagagccagtgcgttgatagatcgcccagcaccttactttgaacgctcatccagcaaacgttataccatgtctcgcagcttggatggagaggttggtactggccagtacgccacaacaaaaggcatctctcagaccaacttgatcaccactgtgactccggagaagaaggctgaggaggagcgggacgaggaagaggacaaacggaggaagggggaagaagtcacgcccatctcggccatccggcacgagggaaagtcacctgggcttggcactgactcatgtcccttgtcacccccatccacccattgtgcccccacatctcccacagagctccgtaggaggtgtaaggagaatgactgcaaactgccaggttatgagccgtccagagctgagcacctgcctggagagcccgccttggactctgatggcccagggaggccttacctaggggatcaagatgtggcttttagctacagacagcaaactggcaaggggaccaccctgttctccttctccttgcagctccctgagtcattcccctccctcctagatgatgatggatacctctctttccccaacctttctgaaaccaacctcctgccccagagcttgcagcattacctcccgatccgctcaccgtcccttgtgccctgtttcctcttcatctttttctttctgctgtctgcctccttctcagtgccatacgctctcactctctccttccctctggctctgtgcctctgctacctggagcccaaggcggcctccttgagcgcctccctagacaatgacccgagtgacagttcagaggaagagactgacagtgagcgcacggacaccgcagccgacggggagaccactgccactgagtcggaccaggaggaagatgcagagctcaaggcacaggagctagaaaaaactcaagatgacctgatgaaacatcaaaccaacattagcgagctgaaaagaaccttcttagaaacctcaacagacactgccgtaacgaatgaatgggagaagaggctttccacctcccccgtgcgactggccgccaggcaggaggatgcccccatgatcgaaccacttgtccctgaagagactaagcagtcttctggggaaaagctcatggatggctctgaaatcttcagtttattagagtctgcgcgaaaaccaacagaattcataggaggggttacttctacttctcaaagctgggttcagaaaatggaaaccaagacggagtccagtggaatagagacggaacccaccgtgcaccacctgccgcttagcactgagaaggtggtgcaggagaccgtgttggtggaggagcggcgtgtggtgcacgcgagtggggatgcttcttactcggcgggagacagcggggatgctgcagcacagcccgcattcacaggcattaaagggaaagagggctctgccttgacggagggggctaaagaggaaggaggggaggaggtcgctaaagctgtcctggaacaggaagagacagccgctgcttcccgtgagcgacaagaggagcagagtgcagccatccacatttcagaaactttggaacaaaaacctcattttgagtcctcaacggtgaagacggaaaccatcagttttggcagtgtttcaccgggaggagtaaagctagaaatttccacgaaggaagtgccagtagttcacaccgaaaccaaaaccatcacatatgaatcatcacaggtcgatccaggcacagatctggagccaggcgtgctgatgagtgcacagacgatcacatctgaaaccaccagtaccaccaccactacgcacatcaccaaaactgtgaaagggggcatttcagagacaagaattgagaagcgaatagtcatcacgggggatgcagacattgaccatgaccaggcgctggctcaggcaattaaagaggccaaagagcagcaccctgacatgtcagtgaccaaagtagtggtccataaagagacagagatcacaccagaagatggagaggattga

SEQ ID NO: 9797 - DNA, 2826 bp, Homo sapiens
  source 1..2826: mol_type = unassigned DNA
gttatttgatttgccttggctgtggggaattctgtgctcagaagcaaggactggagcagtgaagtcattgtcctgcctggtgttgtgacatcactatggctcaaaggaaacaagggtggggcaggcaaaaccagaccatctgaagcatcttgctggctttaaaactttgcctgatcaatcaatgagactcctttctcaagttgaactgcattgcgagaacaatcaaccatgacgaccgaatctggatcagactcggaatccaagccggaccaggaggccgagccccaggaggcggcgggggcgcaggggcgcgcgggggcgcccgtgccggagccgcccaaggaggagcagcagcaggccctggagcagttcgccgccgctgcagcgcacagcaccccggtgcggagggaggtcactgacaaggaacaggagtttgctgccagggctgcaaaacagctcgaatatcagcaattagaagacgataaactttctcagaaatcatctagcagtaaactctctcggtctccattaaagattgtcaaaaagcctaaaagcatgcagtgcaaagtgatacttctcgatggatcagaatatacctgtgatgtagagaaacgctccagaggacaagtgctgtttgataaagtgtgtgaacacttgaacttgctagagaaagactactttgggcttacgtatcgagatgctgaaaaccagaagaattggttggaccctgctaaggaaataaaaaaacaggttcgaagtggtgcttggcacttttcatttaatgtgaaattttatccaccagaccctgcccaactatctgaagatatcaccaggtactacctctgcttgcagttgcgagatgacatcgtgtccggaaggctgccctgctcctttgttaccctggccttgctgggctcctacactgtccagtcagagctcggagactatgacccagatgaatgtgggagcgattacattagtgagttccgctttgcaccaaaccacactaaagaactggaagacaaagtgatcgagctgcacaagagccacagaggaatgacgccagcagaagcagagatgcatttcttggaaaatgccaaaaaattatcaatgtatggggtagatttacatcatgctaaggactcagaaggggtagaaattatgttaggagtttgtgcaagtggtctgttgatatatcgcgaccggctgcgaataaacagatttgcctggcccaaggttctaaagatttcatacaaacggaacaacttttacattaagatccggccgggagagtttgaacaatttgaaagcaccattgggtttaagctgccaaaccatcgagctgccaagcgtttatggaaagtatgtgttgagcatcatacatttttcagactactgttaccagaagcacctcccaagaaattcctaaccttgggttccaagtttcgttatagtggcaggacacaagcgcaaacgagaagagccagtgcgttgatagatcgcccagcaccttactttgaacgctcatccagcaaacgttataccatgtctcgcagcttggatggagcatcagtgaatgaaaaccatgaaatatacatgaaggattctatgtctgctgcagaggttggtactggccagtacgccacaacaaaaggcatctctcagaccaacttgatcaccactgtgactccggagaagaaggctgaggaggagcgggacgaggaagaggacaaacggaggaagggggaagaagtcacgcccatctcggccatccggcacgagggaaagactgacagtgagcgcacggacaccgcagccgacggggagaccactgccactgaggagctagaaaaaactcaagatgacctgatgaaacatcaaaccaacattagcgagctgaaaagaaccttcttagaaacctcaacagacactgccgtaacgaatgaatgggagaagaggctttccacctcccccgtgcgactggccgccaggcaggaggatgcccccatgatcgaaccacttgtccctgaagagaaaatggaaaccaagacggagtccagtggaatagagacggaacccaccgtgcaccacctgccgcttagcactgagaaggtggtgcaggagaccgtgttggtggaggagcggcgtgtggtgcacgcgagtggggatgcttcttactcggcgggagacagcggggatgctgcagcacagcccgcattcacaggcattaaagggaaagagggctctgccttgacggagggggctaaagaggaaggaggggaggaggtcgctaaagctgtcctggaacaggaagagacagccgctgcttcccgtgagcgacaagaggagcagagtgcagccatccacatttcagaaactttggaacaaaaacctcattttgagtcctcaacggtgaagacggaaaccatcagttttggcagtgtttcaccgggaggagtaaagctagaaatttccacgaaggaagtgccagtagttcacaccgaaaccaaaaccatcacatatgaatcatcacaggtcgatccaggcacagatctggagccaggcgtgctgatgagtgcacagacgatcacatctgaaaccaccagtaccaccaccactacgcacatcaccaaaactgtgaaagggggcatttcagagacaagaattgagaagcgaatagtcatcacgggggatgcagacattgaccatgaccaggcgctggctcaggcaattaaagaggccaaagagcagcaccctgacatgtcagtgaccaaagtagtggtccataaagagacagagatcacaccagaagatggagaggattga

SEQ ID NO: 9798 - DNA, 1647 bp, Homo sapiens
  source 1..1647: mol_type = unassigned DNA
aagaaggctgaggaggagcgggacgaggaagaggacaaacggaggaagggggaagaagtcacgcccatctcggccatccggcacgagggaaagactgacagtgagcgcacggacaccgcagccgacggggagaccactgccactgaggagctagaaaaaactcaagatgacctgatgaaacatcaaaccaacattagcgagctgaaaagaaccttcttagaaacctcaacagacactgccgtaacgaatgaatgggagaagaggctttccacctcccccgtgcgactggccgccaggcaggaggatgcccccatgatcgaaccacttgtccctgaagagaccaaagaagaaacagagatttctgaaaaagttatatttttgcagcaaggaagcgctccattccttgagtctcagactaagcagtcttctggggaaaagctcatggatggctctgaaatcttcagtttattagagtctgcgcgaaaaccaacagaattcataggaggggttacttctacttctcaaagctgggttcagaaaatggaaaccaagacggagtccagtggaatagagacggaacccaccgtgcaccacctgccgcttagcactgagaaggtggtgcaggagaccgtgttggtggaggagcggcgtgtggtgcacgcgagtggggatgcttcttactcggcgggagacagcggggatgctgcagcacagcccgcattcacaggcattaaagggaaagagggctctgccttgacggagggggctaaagaggaaggaggggaggaggtcgctaaagctgtcctggaacaggaagagacagccgctgcttcccgtgagcgacaagaggagcagagtgcagccatccacatttcagaaactttggaacaaaaacctcattttgagtcctcaacggtgaagacggaaaccatcagttttggcagtgtttcaccgggaggagtaaagctagaaatttccacgaaggaagtgccagtagttcacaccgaaaccaaaaccatcacatatgaatcatcacaggtcgatccaggcacagatctggagccaggcgtgctgatgagtgcacagacgatcacatctgaaaccaccagtaccaccaccactacgcacatcaccaaaactgtgaaagggggcatttcagagacaagaattgagaagcgaatagtcatcacgggggatgcagacattgaccatgaccaggcgctggctcaggcaattaaagaggccaaagagcagcaccctgacatgtcagtgaccaaagtagtggtccataaagagacagagatcacaccagaagatggagaggattgaccagaggaataacttagcttgcacatgaatgcagtcatgcaaaccgttaggaaaaccagagcctatatggagttccctcttctaacccaactgacttgtatctgtccgtggaaaatttcagtccagaagaattgaccttgaccattaataaagacactggcagagagatcttcccataataaagcaatctgattcagcatcactaaaccgataatgcatgaagcaacgataaaattacaaaagagcagcatttttaattttcacaaaatgtctcagttttcagctatacctgcacgttcataaccaacaatataaacc

SEQ ID NO: 9799 - DNA, 3771 bp, Homo sapiens
  source 1..3771: mol_type = unassigned DNA
ttcctccccacgcccgagtctcctgcgcaccgccgccgaggacgcgcgcccgagcctagtccccacgccgcggcgcgcccgggctccctgctgatcccagaacaatcaaccatgacgaccgaatctggatcagactcggaatccaagccggaccaggaggccgagccccaggaggcggcgggggcgcaggggcgcgcgggggcgcccgtgccggagccgcccaaggaggagcagcgcacagcaccccggtgcggagggaggtcactgacaaggaacaggagtttgctgccagggctgcaaaacagctcgaatatcagcaattagaagacgataaactttctcagaaatcatctagcagtaaactctctcggtctccattaaagattgtcaaaaagcctaaaagcatgcagtgcaaagtgatacttctcgatggatcagaatatacctgtgatgtagagaaacgctccagaggacaagtgctgtttgataaagtgtgtgaacacttgaacttgctagagaaagactactttgggcttacgtatcgagatgctgaaaaccagaagaattggttggaccctgctaaggaaataaaaaaacaggttcgaagtggtgcttggcacttttcatttaatgtgaaattttatccaccagaccctgcccaactatctgaagatatcaccaggtactacctctgcttgcagttgcgagatgacatcgtgtccggaaggctgccctgctcctttgttaccctggccttgctgggctcctacactgtccagtcagagctcggagactatgacccagatgaatgtgggagcgattacattagtgagttccgctttgcaccaaaccacactaaagaactggaagacaaagtgatcgagctgcacaagagccacagaggaatgacgccagcagaagcagagatgcatttcttggaaaatgccaaaaaattatcaatgtatggggtagatttacatcatgctaaggactcagaaggggtagaaattatgttaggagtttgtgcaagtggtctgttgatatatcgcgaccggctgcgaataaacagatttgcctggcccaaggttctaaagatttcatacaaacggaacaacttttacattaagatccggccgggagagtttgaacaatttgaaagcaccattgggtttaagctgccaaaccatcgagctgccaagcgtttatggaaagtatgtgttgagcatcatacatttttcagactactgttaccagaagcacctcccaagaaattcctaaccttgggttccaagtttcgttatagtggcaggacacaagcgcaaacgagaagagccagtgcgttgatagatcgcccagcaccttactttgaacgctcatccagcaaacgttataccatgtctcgcagcttggatggagcatcagtgaatgaaaaccatgaaatatacatgaaggattctatgtctgctgcagaggttggtactggccagtacgccacaacaaaaggcatctctcagaccaacttgatcaccactgtgactccggagaagaaggctgaggaggagcgggacgaggaagaggacaaacggaggaagggggaagaagtcacgcccatctcggccatccggcacgagggaaagactgacagtgagcgcacggacaccgcagccgacggggagaccactgccactgaggagctagaaaaaactcaagatgacctgatgaaacatcaaaccaacattagcgagctgaaaagaaccttcttagaaacctcaacagacactgccgtaacgaatgaatgggagaagaggctttccacctcccccgtgcgactggccgccaggcaggaggatgcccccatgatcgaaccacttgtccctgaagagaaaatggaaaccaagacggagtccagtggaatagagacggaacccaccgtgcaccacctgccgcttagcactgagaaggtggtgcaggagaccgtgttggtggaggagcggcgtgtggtgcacgcgagtggggatgcttcttactcggcgggagacagcggggatgctgcagcacagcccgcattcacaggcattaaagggaaagagggctctgccttgacggagggggctaaagaggaaggaggggaggaggtcgctaaagctgtcctggaacaggaagagacagccgctgcttcccgtgagcgacaagaggagcagagtgcagccatccacatttcagaaactttggaacaaaaacctcattttgagtcctcaacggtgaagacggaaaccatcagttttggcagtgtttcaccgggaggagtaaagctagaaatttccacgaaggaagtgccagtagttcacaccgaaaccaaaaccatcacatatgaatcatcacaggtcgatccaggcacagatctggagccaggcgtgctgatgagtgcacagacgatcacatctgaaaccaccagtaccaccaccactacgcacatcaccaaaactgtgaaagggggcatttcagagacaagaattgagaagcgaatagtcatcacgggggatgcagacattgaccatgaccaggcgctggctcaggcaattaaagaggccaaagagcagcaccctgacatgtcagtgaccaaagtagtggtccataaagagacagagatcacaccagaagatggagaggattgaccagaggaataacttagcttgcacatgaatgcagtcatgcaaaccgttaggaaaaccagagcctatatggagttccctcttctaacccaactgacttgtatctgtccgtggaaaatttcagtccagaagaattgaccttgaccattaataaagacactggcagagagatcttcccataataaagcaatctgattcagcatcactaaaccgataatgcatgaagcaacgataaaattacaaaagagcagcatttttaattttcacaaaatgtctcagttttcagctatacctgcacgttcataaccaacaatataaaccgtggtctcatgtaacacataaacaattcatgcctttcatagtttattattattaaagtctaaacaaaattgcaatttcttaggtaaccttatatttacaataaatgaagattaccctcaaatgctagaagctgtctaggtccgtccggtgtgtcagattttcctcagattagatgtgccaataaccaagtttattcagtaaacaacttgtacttgtttcatctggttttattactctcacccataaacagtaatgactctctgaccctctggaaatatgtaatgcttccaatcttgctttgtgtatctcatttaatttgttataaggtagtactgattttagcatattaatgcgatttcttccttgttgtttgctttggtctgtgttcaatccagagagcttaaattgtcattattttgggaagaaaacctgtatttttgttagtttacaatattatgaaatttcacttcaggagaaactgctgggcttcctgtggctttgttttcttagttactttttccgtgccgtgtattttttaattgatttttcttcttttacttgaaaagaaagtgttttattttcaaatctggtccatatttacattctagttcagagccaagccttaaactgtacagaatttccactgtaattaaaactatttagtgttagttataaatagccttcaaaaagagagattctccattacacgatcacctgcatcacagcccatggtgaatgtatgtttctgcatagcgaaataaaaatggcaaatgcactg

SEQ ID NO: 9800 - DNA, 1656 bp, Homo sapiens
  source 1..1656: mol_type = unassigned DNA
gaaggctgaggaggagcgggacgaggaagaggacaaacggaggaagggggaagaagtcacgcccatctcggccatccggcacgagggaaagactgacagtgagcgcacggacaccgcagccgacggggagaccactgccactgaggagctagaaaaaactcaagatgacctgatgaaacatcaaaccaacattagcgagctgaaaagaaccttcttagaaacctcaacagacactgccgtaacgaatgaatgggagaagaggctttccacctcccccgtgcgactggccgccaggcaggaggatgcccccatgatcgaaccacttgtccctgaagagccaagtgtgataaagaaaatgcaggaaggagactctgctgactctgtggttacttctcgtcaaataattttccagaaaactgtcccatcaaccctagagactaagcagtcttctggggaaaagctcatggatggctctgaaatcttcagtttattagagtctgcgcgaaaaccaacagaattcataggaggggttacttctacttctcaaagctgggttcagaaaatggaaaccaagacggagtccagtggaatagagacggaacccaccgtgcaccacctgccgcttagcactgagaaggtggtgcaggagaccgtgttggtggaggagcggcgtgtggtgcacgcgagtggggatgcttcttactcggcgggagacagcggggatgctgcagcacagcccgcattcacaggcattaaagggaaagagggctctgccttgacggagggggctaaagaggaaggaggggaggaggtcgctaaagctgtcctggaacaggaagagacagccgctgcttcccgtgagcgacaagaggagcagagtgcagccatccacatttcagaaactttggaacaaaaacctcattttgagtcctcaacggtgaagacggaaaccatcagttttggcagtgtttcaccgggaggagtaaagctagaaatttccacgaaggaagtgccagtagttcacaccgaaaccaaaaccatcacatatgaatcatcacaggtcgatccaggcacagatctggagccaggcgtgctgatgagtgcacagacgatcacatctgaaaccaccagtaccaccaccactacgcacatcaccaaaactgtgaaagggggcatttcagagacaagaattgagaagcgaatagtcatcacgggggatgcagacattgaccatgaccaggcgctggctcaggcaattaaagaggccaaagagcagcaccctgacatgtcagtgaccaaagtagtggtccataaagagacagagatcacaccagaagatggagaggattgaccagaggaataacttagcttgcacatgaatgcagtcatgcaaaccgttaggaaaaccagagcctatatggagttccctcttctaacccaactgacttgtatctgtccgtggaaaatttcagtccagaagaattgaccttgaccattaataaagacactggcagagagatcttcccataataaagcaatctgattcagcatcactaaaccgataatgcatgaagcaacgataaaattacaaaagagcagcatttttaattttcacaaaatgtctcagttttcagctatacctgcacgttcataacc

SEQ ID NO: 9801 - DNA, 2083 bp, Homo sapiens
  source 1..2083: mol_type = unassigned DNA
aggtggcaacttggaggtgccgccaccgcagctgcgggaggagcccgggtctggcggccccttccagcctccaggagctctttcccgccgccgagcccgagactggaccccggagaattcgaaggaaagagcccctgcggagggacctgtgagcagccctacctctctctgcccttgcgctactttttttctccaaggaaggttgtgcctgcgggctgcgaacaagctccgggaggggccccaaaggaaggcttcggtgactcagactcggaatccaagccggaccaggaggccgagccccaggaggcggcgggggcgcaggggcgcgcgggggcgcccgtgccggagccgcccaaggaggagcagcagcaggccctggagcagttcgccgccgctgcagcgcacagcaccccggtgcggagggaggtcactgacaaggaacaggagtttgctgccagggctgcaaaacagctcgaatatcagcaattagaagacgataaactttctcagaaatcatctagcagtaaactctctcggtctccattaaagattgtcaaaaagcctaaaagcatgcagtgcaaagtgatacttctcgatggatcagaatatacctgtgatgtagagaaacgctccagaggacaagtgctgtttgataaagtgtgtgaacacttgaacttgctagagaaagactactttgggcttacgtatcgagatgctgaaaaccagaagaattggttggaccctgctaaggaaataaaaaaacaggttcgaagtggtgcttggcacttttcatttaatgtgaaattttatccaccagaccctgcccaactatctgaagatatcaccaggtactacctctgcttgcagttgcgagatgacatcgtgtccggaaggctgccctgctcctttgttaccctggccttgctgggctcctacactgtccagtcagagctcggagactatgacccagatgaatgtgggagcgattacattagtgagttccgctttgcaccaaaccacactaaagaactggaagacaaagtgatcgagctgcacaagagccacagaggaatgacgccagcagaagcagagatgcatttcttggaaaatgccaaaaaattatcaatgtatggggtagatttacatcatgctaaggactcagaaggggtagaaattatgttaggagtttgtgcaagtggtctgttgatatatcgcgaccggctgcgaataaacagatttgcctggcccaaggttctaaagatttcatacaaacggaacaacttttacattaagatccggccgggagagtttgaacaatttgaaagcaccattgggtttaagctgccaaaccatcgagctgccaagcgtttatggaaagtatgtgttgagcatcatacatttttcagactactgttaccagaagcacctcccaagaaattcctaaccttgggttccaagtttcgttatagtggcaggacacaagcgcaaacgagaagagccagtgcgttgatagatcgcccagcaccttactttgaacgctcatccagcaaacgttataccatgtctcgcagcttggatggagcatcagtgaatgaaaaccatgaaatatacatgaaggattctatgtctgctgcagaggttggtactggccagtacgccacaacaaaaggcatctctcagaccaacttgatcaccactgtgactccggagaagaaggctgaggaggagcgggacgaggaagaggacaaacggaggaagggggaagaagtcacgcccatctcggccatccggcacgagggaaagactgacagtgagcgcacggacaccgcagccgacggggagaccactgccactgaggagctagaaaaaactcaagatgacctgatgaaacatcaaaccaacattagcgagctgaaaagaaccttcttagaaacctcaacagacactgccgtaacgaatgaatgggagaagaggctttccacctcccccgtgcgactggccgccaggcaggaggatgcccccatgatcgaaccacttgtccctgaagagaaaatggaaaccaagacggagtccagtggaatag

SEQ ID NO: 9802 - DNA, 3284 bp, Homo sapiens
  source 1..3284: mol_type = unassigned DNA
gttatttgatttgccttggctgtggggaattctgtgctcagaagcaaggactggagcagtgaagtcattgtcctgcctggtgttgtgacatcactatggctcaaaggaaacaagggtggggcaggcaaaaccagaccatctgaagcatcttgctggctttaaaactttgcctgatcaatcaatgagactcctttctcaagttgaactgcattgcgagaacaatcaaccatgacgaccgaatctggatcagactcggaatccaagccggaccaggaggccgagccccaggaggcggcgggggcgcaggggcgcgcgggggcgcccgtgccggagccgcccaaggaggagcagcagcaggccctggagcagttcgccgccgctgcagcgcacagcaccccggtgcggagggaggtcactgacaaggaacaggagtttgctgccagggctgcaaaacagctcgaatatcagcaattagaagacgataaactttctcagaaatcatctagcagtaaactctctcggtctccattaaagattgtcaaaaagcctaaaagcatgcagtgcaaagtgatacttctcgatggatcagaatatacctgtgatgtagagaaacgctccagaggacaagtgctgtttgataaagtgtgtgaacacttgaacttgctagagaaagactactttgggcttacgtatcgagatgctgaaaaccagaagaattggttggaccctgctaaggaaataaaaaaacaggttcgaagtggtgcttggcacttttcatttaatgtgaaattttatccaccagaccctgcccaactatctgaagatatcaccaggtactacctctgcttgcagttgcgagatgacatcgtgtccggaaggctgccctgctcctttgttaccctggccttgctgggctcctacactgtccagtcagagctcggagactatgacccagatgaatgtgggagcgattacattagtgagttccgctttgcaccaaaccacactaaagaactggaagacaaagtgatcgagctgcacaagagccacagaggaatgacgccagcagaagcagagatgcatttcttggaaaatgccaaaaaattatcaatgtatggggtagatttacatcatgctaaggactcagaaggggtagaaattatgttaggagtttgtgcaagtggtctgttgatatatcgcgaccggctgcgaataaacagatttgcctggcccaaggttctaaagatttcatacaaacggaacaacttttacattaagatccggccgggagagtttgaacaatttgaaagcaccattgggtttaagctgccaaaccatcgagctgccaagcgtttatggaaagtatgtgttgagcatcatacatttttcagactactgttaccagaagcacctcccaagaaattcctaaccttgggttccaagtttcgttatagtggcaggacacaagcgcaaacgagaagagccagtgcgttgatagatcgcccagcaccttactttgaacgctcatccagcaaacgttataccatgtctcgcagcttggatggagcatcagtgaatgaaaaccatgaaatatacatgaaggattctatgtctgctgcagaggttggtactggccagtacgccacaacaaaaggcatctctcagaccaacttgatcaccactgtgactccggagaagaaggctgaggaggagcgggacgaggaagaggacaaacggaggaagggggaagaagtcacgcccatctcggccatccggcacgagggaaagactgacagtgagcgcacggacaccgcagccgacggggagaccactgccactgagtcggaccaggaggaagatgcagagctcaaggcacaggagctagaaaaaactcaagatgacctgatgaaacatcaaaccaacattagcgagctgaaaagaaccttcttagaaacctcaacagacactgccgtaacgaatgaatgggagaagaggctttccacctcccccgtgcgactggccgccaggcaggaggatgcccccatgatcgaaccacttgtccctgaagagactaagcagtcttctggggaaaagctcatggatggctctgaaatcttcagtttattagagtctgcgcgaaaaccaacagaattcataggaggggttacttctacttctcaaagctgggttcagaaaatggaaaccaagacggagtccagtggaatagagacggaacccaccgtgcaccacctgccgcttagcactgagaaggtggtgcaggagaccgtgttggtggaggagcggcgtgtggtgcacgcgagtggggatgcttcttactcggcgggagacagcggggatgctgcagcacagcccgcattcacaggcattaaagggaaagagggctctgccttgacggagggggctaaagaggaaggaggggaggaggtcgctaaagctgtcctggaacaggaagagacagccgctgcttcccgtgagcgacaagaggagcagagtgcagccatccacatttcagaaactttggaacaaaaacctcattttgagtcctcaacggtgaagacggaaaccatcagttttggcagtgtttcaccgggaggagtaaagctagaaatttccacgaaggaagtgccagtagttcacaccgaaaccaaaaccatcacatatgaatcatcacaggtcgatccaggcacagatctggagccaggcgtgctgatgagtgcacagacgatcacatctgaaaccaccagtaccaccaccactacgcacatcaccaaaactgtgaaagggggcatttcagagacaagaattgagaagcgaatagtcatcacgggggatgcagacattgaccatgaccaggaataacttagcttgcacatgaatgcagtcatgcaaaccgttaggaaaaccagagcctatatggagttccctcttctaacccaactgacttgtatctgtccgtggaaaatttcagtccagaagaattgaccttgaccattaataaagacactggcagagagatcttcccataataaagcaatctgattcagcatcactaaaccgataatgcatgaagcaacgataaaattacaaaagagcagcatttttaattttcacaaaatgtctcagttttcagctatacctgcacgttcataaccaacaatataaaccgtggtctcatgtaacacataaacaattcatgcctttcatagtttattattattaaagtctaaacaaaattgcaatttcttaggtaaccttatatttac

SEQ ID NO: 9803 - DNA, 3190 bp, Homo sapiens
  source 1..3190: mol_type = unassigned DNA
ctttggcgcgtcctgctcagaagccggggagctcctggccggcggctggcggggaagcgcggcgcgggaggaggtattgggagacaaaagaagctcatctataaacattttccatgaatcaagcagaaacttgggttttaaaggattcgcatagaacgggatgccacaggcaaggacagatcccctgaggctgtggaatgagtggggacatccccgcccatctctggtcttgactcggaatccaagccggaccaggaggccgagccccaggaggcggcgggggcgcaggggcgcgcgggggcgcccgtgccggagccgcccaaggaggagcagcagcaggccctggagcagttcgccgccgctgcagcgcacagcaccccggtgcggagggaggtcactgacaaggaacaggagtttgctgccagggctgcaaaacagctcgaatatcagcaattagaagacgataaactttctcagaaatcatctagcagtaaactctctcggtctccattaaagattgtcaaaaagcctaaaagcatgcagtgcaaagtgatacttctcgatggatcagaatatacctgtgatgtagagaaacgctccagaggacaagtgctgtttgataaagtgtgtgaacacttgaacttgctagagaaagactactttgggcttacgtatcgagatgctgaaaaccagaagaattggttggaccctgctaaggaaataaaaaaacaggttcgaagtggtgcttggcacttttcatttaatgtgaaattttatccaccagaccctgcccaactatctgaagatatcaccaggtactacctctgcttgcagttgcgagatgacatcgtgtccggaaggctgccctgctcctttgttaccctggccttgctgggctcctacactgtccagtcagagctcggagactatgacccagatgaatgtgggagcgattacattagtgagttccgctttgcaccaaaccacactaaagaactggaagacaaagtgatcgagctgcacaagagccacagaggaatgacgccagcagaagcagagatgcatttcttggaaaatgccaaaaaattatcaatgtatggggtagatttacatcatgctaaggactcagaaggggtagaaattatgttaggagtttgtgcaagtggtctgttgatatatcgcgaccggctgcgaataaacagatttgcctggcccaaggttctaaagatttcatacaaacggaacaacttttacattaagatccggccgggagagtttgaacaatttgaaagcaccattgggtttaagctgccaaaccatcgagctgccaagcgtttatggaaagtatgtgttgagcatcatacatttttcagactactgttaccagaagcacctcccaagaaattcctaaccttgggttccaagtttcgttatagtggcaggacacaagcgcaaacgagaagagccagtgcgttgatagatcgcccagcaccttactttgaacgctcatccagcaaacgttataccatgtctcgcagcttggatggagcatcagtgaatgaaaaccatgaaatatacatgaaggattctatgtctgctgcagaggttggtactggccagtacgccacaacaaaaggcatctctcagaccaacttgatcaccactgtgactccggagaagaaggctgaggaggagcgggacgaggaagaggacaaacggaggaagggggaagaagtcacgcccatctcggccatccggcacgagggaaagactgacagtgagcgcacggacaccgcagccgacggggagaccactgccactgaggagctagaaaaaactcaagatgacctgatgaaacatcaaaccaacattagcgagctgaaaagaaccttcttagaaacctcaacagacactgccgtaacgaatgaatgggagaagaggctttccacctcccccgtgcgactggccgccaggcaggaggatgcccccatgatcgaaccacttgtccctgaagagaaaatggaaaccaagacggagtccagtggaatagagacggaacccaccgtgcaccacctgccgcttagcactgagaaggtggtgcaggagaccgtgttggtggaggagcggcgtgtggtgcacgcgagtggggatgcttcttactcggcgggagacagcggggatgctgcagcacagcccgcattcacaggcattaaagggaaagagggctctgccttgacggagggggctaaagaggaaggaggggaggaggtcgctaaagctgtcctggaacaggaagagacagccgctgcttcccgtgagcgacaagaggagcagagtgcagccatccacatttcagaaactttggaacaaaaacctcattttgagtcctcaacggtgaagacggaaaccatcagttttggcagtgtttcaccgggaggagtaaagctagaaatttccacgaaggaagtgccagtagttcacaccgaaaccaaaaccatcacatatgaatcatcacaggtcgatccaggcacagatctggagccaggcgtgctgatgagtgcacagacgatcacatctgaaaccaccagtaccaccaccactacgcacatcaccaaaactgtgaaagggggcatttcagagacaagaattgagaagcgaatagtcatcacgggggatgcagacattgaccatgaccaggcgctggctcaggcaattaaagaggccaaagagcagcaccctgacatgtcagtgaccaaagtagtggtccataaagagacagagatcacaccagaagatggagaggattgaccagaggaataacttagcttgcacatgaatgcagtcatgcaaaccgttaggaaaaccagagcctatatggagttccctcttctaacccaactgacttgtatctgtccgtggaaaatttcagtccagaagaattgaccttgaccattaataaagacactggcagagagatcttcccataataaagcaatctgattcagcatcactaaaccgataatgcatgaagcaacgataaaattacaaaagagcagcatttttaattttcacaaaatgtctcagttttcagctatacctgcacgttcataaccaacaatataaaccgtggtctcatgtaacacataaacaattcatgcctttcatagtttattattattaaagtctaaac

SEQ ID NO: 9804 - DNA, 4553 bp, Homo sapiens
  source 1..4553: mol_type = unassigned DNA
tggatatgggactcctgtttgtggcctcctctcttccagagtcttccagtgcagtccagataacatctctgagagtctcttgagaccactgaagcaagaggcttcaaggtttgttctaggcttctctagttggcaggtcttccccatcccaccccctcccccagggctgccaggcgtattcctgcctgggcctcctggcacaagagataaaatgaacagggttactcccagtaactggtccaggagataccagcagagagggagtaggagagaagaaacatgtcagggtgctcacaggagtagtggggggaggttttgctatttccagattcttaagccaacaaaagtgccttcatattttctgtctggaagacagaaagcccagaaggagcccagaagcaacagtttgagagaggcgctttctgcggccaagtggataagaggagcggcctgcaaccatgggacagggtgagccaagccagcgctcgacagggcttgctggactgtatgcagcccccgcagcatcacctgttttcattaaaggaagtgggatggatgccctgggtatcaagagctgtgactttcaggcagcaagaaacaatgaggagcaccacaccaaggccctcagctcccggcgcctctttgtgaggagggggcagcccttcaccatcatcctgtacttccgcgctccagtccgtgcatttctgcctgccctgaagaaggtggccctcactgcacaaactggagagcagccttccaagatcaacaggacccaagccacattcccaatttccagtctgggggaccgaaagtggtggagtgcagtggtggaggagagagatgcccagtcctggaccatctctgtgaccacacctgcggacgctgtcattggccactactcgcttctgctgcaggtctcaggcaggaagcaactcctcttgggtcagttcacactgctttttaacccctggaatagagaggatgctgtgttcctgaagaatgaggctcagcgcatggagtacttgttgaaccagaatggtctcatctacctgggtacagctgactgcatccaggcagagtcctgggactttggccagttcgagggggatgtcattgacctcagcctgcgcttgctgagcaaggacaagcaggtagagaagtggagccagccggtgcacgtggcccgtgtgttgggtgccttgctgcattttctcaaggagcagagggtcctgcccaccccgcagacccaggccacccaggaaggggccttgctgaacaagcgccggggcagcgtgcccatcctgcggcagtggctcaccggccgaggccgacctgtgtatgatggccaggcctgggtgttggctgctgttgcttgcacagtgctgcgatgcctgggaatccctgcccgcgtggtgaccacgtttgcctcagcacagggcaccggtgggcgtcttctcatagatgaatactataatgaggagggacttcagaacggagaaggccagagaggcagaatctggatcttccagacttccacagagtgctggatgacgcggcctgccttgccccagggttatgatggatggcagattctgcacccaagtgctcctaatggaggtggagtcctggggtcctgtgatctggtgccggtcagagcagtcaaggaggggacgctggggctgaccccagcagtgtcagacctttttgctgccataaatgcctcatgtgtggtctggaagtgctgtgaggatgggacactggagttgactgactccaacacaaagtatgttggcaacaacatcagcaccaagggtgtgggcagtgaccgctgcgaggacatcactcagaactacaagtatcctgaagggtctcttcaggaaaaagaggtgctggagagagtcgagaaagagaaaatggaacgtgagaaagacaacggcatccgtcctcccagtctcgagactgccagtcctctgtacctgctcttgaaagcacccagctccctacccctgagaggggatgcccagatctcagtgacgctggttaatcacagtgagcaggagaaggcagtgcagctggcaattggggtccaggctgtacactacaacggtgtccttgctgccaagctctggaggaagaagctgcacctcacgctcagtgccaacctggaaaagataataaccatcggcctgttcttctccaattttgagcgaaacccacccgagaacaccttccttagactcaccgccatggcaacacactctgaatccaaccttagctgctttgctcaggaagacattgccatttgtagaccacaccttgccatcaagatgccagagaaagcagagcagtatcaacccctcacagcctcagtcagcctccagaactccctagatgcccccatggaggactgtgtgatctccatcctgggaagggggctcattcacagagagaggagctacagattccgttcagtgtggcctgaaaacaccatgtgtgccaagttccagttcacgccaacacatgtggggctccagagactcactgtggaagtggactgcaacatgttccagaacctaaccaactataaaagcgtcaccgtggtagcccctgaactatcagcttaaacttccagctctatcaccactctcctgccaacccttgttctacaatctaaaccaaacatgtgctaggaagagaaactttgcgtctcagtgtttgtgttgctataaaggaataactgaggctgggtagtttaaaagaaaagagctttatttggctcacggctctgcaggctgtacaagaaacagtgagggcttcaggctgcttccacttatgcaggaagatgaagggaggcaacgtgagcagagatcacagggcaagaatgggttgaggggtaggggtaagtgccaggtgccagcctcgttttaacagccagctctggggtgggggagggacatatagagcgagaacttactcattaccccaccaatggaacgaagccattcatgagggatccaaacacctcccattaggccccacctccaacactgggaatccaatttcagcatgaggtttgcagggttgaatatccaaactacatcactttatcagataaatgagtagtcattcaggttgaaaaggtgctcagatacctttaaggagtacattcagattgttcaggttcaggttttttgcaaccattttactgctcattaatacattcattaacttacagataagggaaaggacctaacacttaaatcattctaatatttctgatgaagtgggatattatcccaaaatggaatttttaggtaatcttaaaattacattgatcaagctgggctcggtggctcacatctgtaatcccagcactttgggaggctgacgtgggcagatcacctgaggtcaggagtttgagaccagcctggccaacatggtgaaaccccatctctactaaaaatacaaaaattagctggacatggtggtgtgcatctgtagtcccagctacttgagaggctgaagccagagaattgcttgagaacctgggaggcggaggttgcagtgagccgagagtgtgccactgcactccagcttgggggacagagcaagactccatctcaaaaaaaaaaaaaaaaaaaaaaaaattacattgatcagtgctttccctgatcattatccttaaagatccaaacatgactgaacgaagttatacaatacaggacctgagagaataattcagctagaggtaagtctttatattagagttctatattcattaagtatcccacaattaaagtctgatgttaataacatgaatttggtccagtagagaaatataaaagtatataaaaaataggctctatatgaaaggataaaagaactagactgttgtacaatgttattattttgtttatgttattttgttgccttgacactctgtcagtttgattttagttccttcccttcatgacacttgttaacaatacaaaatggcacttcaaaacagtaagctaaaactcatttggcttaaggaatttcaaccccaaccccaagtatacattagtcactcaaagaatgactgctgttgctgattatacctaaagacagcagaaaggcatatgttatgaattacacctacaaaaggaagatgatgggcatgagaggtggcggagacctgtaggacatgcataatgccctattcagctcaccagaatatacatcattatagatttacactgctttccaatatgcagtcttctagactgatgcaaaagtataattaagtggtgatggttttgcaaaaggatgaactgaaaaggcccttaaaattacataaaatctcttacacactaaaaaatttttgatttataaaaatttggtatttacatttggggacacacgtaaccaaggacaacacaagtatgtataaggaaaataaatctgttcaataaggtgggcaaacctaacaaatgagctcaatgccaatatattttagagacatggagtaatctgtgataatattcagaaggacttgctgataataatatata

SEQ ID NO: 9805 - DNA, 1976 bp, Homo sapiens
  source 1..1976: mol_type = unassigned DNA
gcccagaaggagcccagaagcaacagtttgagagaggcgctttctgcggccaagtggataagaggagcggcctgcaaccatgggacaggccctgggtatcaagagctgtgactttcaggcagcaagaaacaatgaggagcaccacaccaaggccctcagctcccggcgcctctttgtgaggagggggcagcccttcaccatcatcctgtacttccgcgctccagtccgtgcatttctgcctgccctgaagaaggtggccctcactgcacaaactggagagcagccttccaagatcaacaggacccaagccacattcccaatttccagtctgggggaccgaaagtggtggagtgcagtggtggaggagagagatgcccagtcctggaccatctctgtgaccacacctgcggacgctgtcattggccactactcgcttctgctgcaggtctcaggcaggaagcaactcctcttgggtcagttcacactgctttttaacccctggaatagagaggatgctgtgttcctgaagaatgaggctcagcgcatggagtacttgttgaaccagaatggtctcatctacctgggtacagctgactgcatccaggcagagtcctgggactttggccagttcgagggggatgtcattgacctcagcctgcgcttgctgagcaaggacaagcaggtagagaagtggagccagccggtgcacgtggcccgtgtgttgggtgccttgctgcattttctcaaggagcagagggtcctgcccaccccgcagacccaggccacccaggaaggggccttgctgaacaagcgccggggcagcgtgcccatcctgcggcagtggctcaccggccgaggccgacctgtgtatgatggccaggcctgggtgttggctgctgttgcttgcacagtgctgcgatgcctgggaatccctgcccgcgtggtgaccacgtttgcctcagcacagggcaccggtgggcgtcttctcatagatgaatactataatgaggagggacttcagaacggagaaggccagagaggcagaatctggaagtgctgtgaggatgggacactggagttgactgactccaacacaaagtatgttggcaacaacatcagcaccaagggtgtgggcagtgaccgctgcgaggacatcactcagaactacaagtatcctgaagggtctcttcaggaaaaagaggtgctggagagagtcgagaaagagaaaatggaacgtgagaaagacaacggcatccgtcctcccagtctcgagactgccagtcctctgtacctgctcttgaaagcacccagctccctacccctgagaggggatgcccagatctcagtgacgctggttaatcacagtgagcaggagaaggcagtgcagctggcaattggggtccaggctgtacactacaacggtgtccttgctgccaagctctggaggaagaagctgcacctcacgctcagtgccaacctggaaaagataataaccatcggcctgttcttctccaattttgagcgaaacccacccgagaacaccttccttagactcaccgccatggcaacacactctgaatccaaccttagctgctttgctcaggaagacattgccatttgtagaccacaccttgccatcaagatgccagagaaagcagagcagtatcaacccctcacagcctcagtcagcctccagaactccctagatgcccccatggaggactgtgtgatctccatcctgggaagggggctcattcacagagagaggagctacagattccgttcagtgtggcctgaaaacaccatgtgtgccaagttccagttcacgccaacacatgtggggctccagagactcactgtggaagtggactgcaacatgttccagaacctaaccaactataaaagcgtcaccgtggtagcccctgaactatcagcttaaacttccagctctatcaccactctcctgccaacccttg

SEQ ID NO: 9806 - DNA, 2446 bp, Homo sapiens
  source 1..2446: mol_type = unassigned DNA
ccccagggctgccaggcgtattcctgcctgggcctcctggcacaagagataaaatgaacagggttactcccagtaactggtccaggagataccagcagagagggagtaggagagaagaaacatgtcagggtgctcacaggagtagtggggggaggttttgctatttccagattcttaagccaacaaaagtgccttcatattttctgtctggaagacagaaagcccagaaggagcccagaagcaacagtttgagagaggcgctttctgcggccaagtggataagaggagcggcctgcaaccatgggacaggccctgggtatcaagagctgtgactttcaggcagcaagaaacaatgaggagcaccacaccaaggccctcagctcccggcgcctctttgtgaggagggggcagcccttcaccatcatcctgtacttccgcgctccagtccgtgcatttctgcctgccctgaagaaggtggccctcactgcacaaactggagagcagccttccaagatcaacaggacccaagccacattcccaatttccagtctgggggaccgaaagtggtggagtgcagtggtggaggagagagatgcccagtcctggaccatctctgtgaccacacctgcggacgctgtcattggccactactcgcttctgctgcaggtctcaggcaggaagcaactcctcttgggtcagttcacactgctttttaacccctggaatagagaggatgctgtgttcctgaagaatgaggctcagcgcatggagtacttgttgaaccagaatggtctcatctacctgggtacagctgactgcatccaggcagagtcctgggactttggccagttcgagggggatgtcattgacctcagcctgcgcttgctgagcaaggacaagcaggtagagaagtggagccagccggtgcacgtggcccgtgtgttgggtgccttgctgcattttctcaaggagcagagggtcctgcccaccccgcagacccaggccacccaggaaggggccttgctgaacaagcgccggggcagcgtgcccatcctgcggcagtggctcaccggccgaggccgacctgtgtatgatggccaggcctgggtgttggctgctgttgcttgcacagtgctgcgatgcctgggaatccctgcccgcgtggtgaccacgtttgcctcagcacagggcaccggtgggcgtcttctcatagatgaatactataatgaggagggacttcagaacggagaaggccagagaggcagaatctggatcttccagacttccacagagtgctggatgacgcggcctgccttgccccagggttatgatggatggcagattctgcacccaagtgctcctaatggaggtggagtcctggggtcctgtgatctggtgccggtcagagcagtcaaggaggggacgctggggctgaccccagcagtgtcagacctttttgctgccataaatgcctcatgtgtggtctggaagtgctgtgaggatgggacactggagttgactgactccaacacaaagtatgttggcaacaacatcagcaccaagggtgtgggcagtgaccgctgcgaggacatcactcagaactacaagtatcctgaagggtctcttcaggaaaaagaggtgctggagagagtcgagaaagagaaaatggaacgtgagaaagacaacggcatccgtcctcccagtctcgagactgccagtcctctgtacctgctcttgaaagcacccagctccctacccctgagaggggatgcccagatctcagtgacgctggttaatcacagtgagcaggagaaggcagtgcagctggcaattggggtccaggctgtacactacaacggtgtccttgctgccaagctctggaggaagaagctgcacctcacgctcagtgccaacctggaaaagataataaccatcggcctgttcttctccaattttgagcgaaacccacccgagaacaccttccttagactcaccgccatggcaacacactctgaatccaaccttagctgctttgctcaggaagacattgccatttgtagaccacaccttgccatcaagatgccagagaaagcagagcagtatcaacccctcacagcctcagtcagcctccagaactccctagatgcccccatggaggactgtgtgatctccatcctgggaagggggctcattcacagagagaggagctacagattccgttcagtgtggcctgaaaacaccatgtgtgccaagttccagttcacgccaacacatgtggggctccagagactcactgtggaagtggactgcaacatgttccagaacctaaccaactataaaagcgtcaccgtggtagcccctgaactatcagcttaaacttccagctctatcaccactctcctgccaacccttgttctacaatctaaaccaaacatgtgctaggaag

SEQ ID NO: 9807 - DNA, 2098 bp, Homo sapiens
  source 1..2098: mol_type = unassigned DNA
gaaacatgtcagggtgctcacaggagtagtggggggaggttttgctatttccagattcttaagccaacaaaagtgccttcatattttctgtctggaagacagaaagcccagaaggagcccagaagcaacagtttgagagaggcgctttctgcggccaagtggataagaggagcggcctgcaaccatgggacaggccctgggtatcaagagctgtgactttcaggcagcaagaaacaatgaggagcaccacaccaaggccctcagctcccggcgcctctttgtgaggagggggcagcccttcaccatcatcctgtacttccgcgctccagtccgtgcatttctgcctgccctgaagaaggtggccctcactgcacaaactgaggatgctgtgttcctgaagaatgaggctcagcgcatggagtacttgttgaaccagaatggtctcatctacctgggtacagctgactgcatccaggcagagtcctgggactttggccagttcgagggggatgtcattgacctcagcctgcgcttgctgagcaaggacaagcaggtagagaagtggagccagccggtgcacgtggcccgtgtgttgggtgccttgctgcattttctcaaggagcagagggtcctgcccaccccgcagacccaggccacccaggaaggggccttgctgaacaagcgccggggcagcgtgcccatcctgcggcagtggctcaccggccgaggccgacctgtgtatgatggccaggcctgggtgttggctgctgttgcttgcacagtgctgcgatgcctgggaatccctgcccgcgtggtgaccacgtttgcctcagcacagggcaccggtgggcgtcttctcatagatgaatactataatgaggagggacttcagaacggagaaggccagagaggcagaatctggatcttccagacttccacagagtgctggatgacgcggcctgccttgccccagggttatgatggatggcagattctgcacccaagtgctcctaatggaggtggagtcctggggtcctgtgatctggtgccggtcagagcagtcaaggaggggacgctggggctgaccccagcagtgtcagacctttttgctgccataaatgcctcatgtgtggtctggaagtgctgtgaggatgggacactggagttgactgactccaacacaaagtatgttggcaacaacatcagcaccaagggtgtgggcagtgaccgctgcgaggacatcactcagaactacaagtatcctgaagggtctcttcaggaaaaagaggtgctggagagagtcgagaaagagaaaatggaacgtgagaaagacaacggcatccgtcctcccagtctcgagactgccagtcctctgtacctgctcttgaaagcacccagctccctacccctgagaggggatgcccagatctcagtgacgctggttaatcacagtgagcaggagaaggcagtgcagctggcaattggggtccaggctgtacactacaacggtgtccttgctgccaagctctggaggaagaagctgcacctcacgctcagtgccaacctggaaaagataataaccatcggcctgttcttctccaattttgagcgaaacccacccgagaacaccttccttagactcaccgccatggcaacacactctgaatccaaccttagctgctttgctcaggaagacattgccatttgtagaccacaccttgccatcaagatgccagagaaagcagagcagtatcaacccctcacagcctcagtcagcctccagaactccctagatgcccccatggaggactgtgtgatctccatcctgggaagggggctcattcacagagagaggagctacagattccgttcagtgtggcctgaaaacaccatgtgtgccaagttccagttcacgccaacacatgtggggctccagagactcactgtggaagtggactgcaacatgttccagaacctaaccaactataaaagcgtcaccgtggtagcccctgaactatcagcttaaacttccagctctatcaccactctcctgccaacccttgttctacaatctaaaccaaacatgtgctaggaagag

SEQ ID NO: 9808 - DNA, 2554 bp, Homo sapiens
  source 1..2554: mol_type = unassigned DNA
gttgcctggttgtgagagtcaggggagcagggacaggtccaagacaaggaaggcagttgggctgtgggaatggggagcccagggaaggcctccagagctggcctggagagtcaccgccgagggatgaggacgcgccagcccgggggaacgcgccagctgctttcgcggccccaagcgcgcagcgcccagcagccgcgccgagcctgacacgctgtcctctcccctcgcgcacagggctctgcgagtgacccggcgggcgagctccgtgctgcatggaacggctgcagaagcaaccacttacctcccccgggagcgtgagcccctcccgagattccagtgtgcctggctctccctccagcatcgtggccaagatggacaatcaggtgctgggctacaaggacctggctgccatccccaaggacaaggccatcctggacatcgagcggcccgacctcatgatctacgagcctcacttcacttattccctcctggaacacgtggagctgcctcgcagccgcgagcgctcgctgtcacccaaatccacatcccccccaccatccccagaggtgtgggcggacagccggtcgcctggaatcatctctcaggcctcggcccccagaaccactggaaccccccggaccagcctgccccatttccaccaccctgagacctcccgcccagattccaacatctacaagaagcctcccatctataagcagagagagtccgtgggaggcagccctcagaccaagcacctcatcgaggatctcatcatcgagtcatccaagtttcctgcagcccagcccccagaccccaaccagccagccaaaatcgaaaccgactactggccatgccccccgtctctggctgttgtggagacagaatggaggaagcggaaggcgtctcggaggggagcagaggaagaggaggaggaggaagatgacgactctggagaggagatgaaggctctcagggagcgtcagagagaggaactcagtaaggttacttccaacttgggaaagatgatcttgaaagaagagatggaaaagtcattgccgatccgaaggaaaacccgctctctgcctgaccggacacccttccatacctccttgcaccagggaacgtctaaatcttcctctctccccgcctatggcaggaccaccctgagccggctacagtccacagagttcagcccatcagggagtgagactggaagcccaggcctgcagaacggagagggccagagggggaggatggaccgggggaactccctgccctgtgtgctggagcagaagatctatccctatgaaatgctagtggtgaccaacaaggggcgaaccaagctgccaccgggggtggatcggatgcggcttgagaggcatctgtctgccgaggacttctcaagggtatttgccatgtcccctgaagagtttggcaagctggctctgtggaagcggaatgagctcaagaagaaggcctctctcttctgatggcccccacctgctccgggacggcccccttacccctgctgcttcagggtttttccccggcgggttgggaggggcaggaggtggggtggaaatagggtgggctcctttcctcaggtagagtggggggccaaaacctctgcagtccccggcagtgagctatggactttcttccccctcacaaggctgggggcctcctgctctcgtccctggccctccctgcacagggcaaagccagtctgggctctggcacacagagttcatgtttgcgccctctccctgcccctcaccccagagggtgaggaggaatgaggggcattggtggttaggccggttggctgtcttgaacagctggagggaagatgcaggggtgggaagcggccaggcagaaagagctccaggctcttgtgtcgcccacccagccctcccatactcactcctgacagctttcctgcactgcagcctcctgctcctctgactctagtgggaacaggccccagctcagcctccggcagggaggtcacccctccacttcagcttgccctgacctccgctcgcaaaccccgagcttccaagccttttgctccagccctgcggcttccccagaagcctgggcttagggtggagatgccgcctacacacgatcctggccctccacctgcctccaggccacgaaatgggaattccagcactaagccaggcaccgggcagaagctgggccttccgcctcccttggatggggtcaagaggccaggcctggcacattttggagtgtcctggctaccagctctcacctacacccacgcacccccccacacactatgctctctcaagaatgtaatttattggggcccccccagctgctttcctcacctgcccctgccctaccttacacccccagcttgacttctttccagtccacgtgtgtatataatgatatctatatttttgcccaggtctgggtattgctcctgcccagaccctgacatccctttccactgtgtgtgtgaccatgctgggggagggggactctgcttggaattaaaaggttgcattgggtccctaca

SEQ ID NO: 9809 - DNA, 2772 bp, Homo sapiens
  source 1..2772: mol_type = unassigned DNA
gagaaaagatgaagaaagccaagaaaagggaccagaagagaaagcagaaagacaggaggaagaaagggagagagggccaggcagtcgcactgtgaacagaacaggagaaggcgaagcggggcaaagttccctgcccaccgacgccagcctgcttggatgacttgcctcgtttcataattcacttactgtctgcaccagccggcctccagcctggctggaccctgctgcctgtgtggcccggagccagaggcccccacactcccagctgctcttctacagatgccatcaacgagcaggactctgggtggctccactgtctaagcctggagagtcaccgccgagggatgaggacgcgccagcccgggggaacgcgccagctgctttcgcggccccaagcgcgcagcgcccagcagccgcgccgagcctgacacgctgtcctctcccctcgcgcacagggctctgcgagtgacccggcgggcgagctccgtgctgcatggaacggctgcagaagcaaccacttacctcccccgggagcgtgagcccctcccgagattccagtgtgcctggctctccctccagcatcgtggccaagatggacaatcaggtgctgggctacaaggacctggctgccatccccaaggacaaggccatcctggacatcgagcggcccgacctcatgatctacgagcctcacttcacttattccctcctggaacacgtggagctgcctcgcagccgcgagcgctcgctgtcacccaaatccacatcccccccaccatccccagaggtgtgggcggacagccggtcgcctggaatcatctctcaggcctcggcccccagaaccactggaaccccccggaccagcctgccccatttccaccaccctgagacctcccgcccagattccaacatctacaagaagcctcccatctataagcagagagagtccgtgggaggcagccctcagaccaagcacctcatcgaggatctcatcatcgagtcatccaagtttcctgcagcccagcccccagaccccaaccagccagccaaaatcgaaaccgactactggccatgccccccgtctctggctgttgtggagacagaatggaggaagcggaaggcgtctcggaggggagcagaggaagaggaggaggaggaagatgacgactctggagaggagatgaaggctctcagggagcgtcagagagaggaactcagtaaggttacttccaacttgggaaagatgatcttgaaagaagagatggaaaagtcattgccgatccgaaggaaaacccgctctctgcctgaccggacacccttccatacctccttgcaccagggaacgtctaaatcttcctctctccccgcctatggcaggaccaccctgagccggctacagtccacagagttcagcccatcagggagtgagactggaagcccaggtctccagaacggagagggccagagggggaggatggaccgggggaactccctgccctgtgtgctggagcagaagatctatccctatgaaatgctagtggtgaccaacaaggggcgaaccaagctgccaccgggggtggatcggatgcggcttgagaggcatctgtctgccgaggacttctcaagggtatttgccatgtcccctgaagagtttggcaagctggctctgtggaagcggaatgagctcaagaagaaggcctctctcttctgatggcccccacctgctccgggacggcccccttacccctgctgcttcagggtttttccccggcgggttgggaggggcaggaggtggggtggaaatagggtgggctcctttcctcaggtagagtggggggccaaaacctctgcagtccccggcagtgagctatggactttcttccccctcacaaggctgggggcctcctgctctcgtccctggccctccctgcacagggcaaagccagtctgggctctggcacacagagttcatgtttgcgccctctccctgcccctcaccccagagggtgaggaggaatgaggggcattggtggttaggccggttggctgtcttgaacagctggagggaagatgcaggggtgggaagcggccaggcagaaagagctccaggctcttgtgtcgcccacccagccctcccatactcactcctgacagctttcctgcactgcagcctcctgctcctctgactctagtgggaacaggccccagctcagcctccggcagggaggtcacccctccacttcagcttgccctgacctccgctcgcaaaccccgagcttccaagccttttgctccagccctgcggcttccccagaagcctgggcttagggtggagatgccgcctacacacgatcctggccctccacctgcctccaggccacgaaatgggaattccagcactaagccaggcaccgggcagaagctgggccttccgcctcccttggatggggtcaagaggccaggcctggcacattttggagtgtcctggctaccagctctcacctacacccacgcacccccccacacactatgctctctcaagaatgtaatttattggggcccccccagctgctttcctcacctgcccctgccctaccttacacccccagcttgacttctttccagtccacgtgtgtatataatgatatctatatttttgcccaggtctgggtattgctcctgcccagaccctgacatccctttccactgtgtgtgtgaccatgctgggggagggggactctgcttggaattaaaaggttgcattgggtccct

SEQ ID NO: 9810 - DNA, 2081 bp, Homo sapiens
  source 1..2081: mol_type = unassigned DNA
gttgcctggttgtgagagtcaggggagcagggacaggtccaagacaaggaaggcagttgggctgtgggaatggggagcccagggaaggcctccagagctggcctggagagtcaccgccgagggatgaggacgcgccagcccgggggaacgcgccagctgctttcgcggccccaagcgcgcagcgcccagcagccgcgccgagcctgacacgctgtcctctcccctcgcgcacagggctctgcgagtgacccggcgggcgagctccgtgctgcatggaacggctgcagaagcaaccacttacctcccccgggagcgtgagcccctcccgagattccagtgtgcctggctctccctccagcatcgtggccaagatggacaatcaggtgctgggctacaaggacctggctgccatccccaaggacaaggccatcctggacatcgagcggcccgacctcatgatctacgagcctcacttcacttattccctcctggaacacgtggagctgcctcgcagccgcgagcgctcgctgtcacccaaatccacatcccccccaccatccccagaggtgtgggcggacagccggtcgcctggaatcatctctcaggcctcggcccccagaaccactggaaccccccggaccagcctgccccatttccaccaccctgagacctcccgcccagattccaacatctacaagaagcctcccatctataagcagagagagtccgtgggaggcagccctcagaccaagcacctcatcgaggatctcatcatcgagtcatccaagtttcctgcagcccagcccccagaccccaaccagccagccaaaatcgaaaccgactactggccatgccccccgtctctggctgttgtggagacagaatggaggaagcggaaggcgtctcggaggggagcagaggaagaggaggaggaggaagatgacgactctggagaggagatgaaggctctcagggagcgtcagagagaggaactcagtaaggttacttccaacttgggaaagatgatcttgaaagaagagatggaaaagtcattgccgatccgaaggaaaacccgctctctgcctgaccggacacccttccatacctccttgcaccagggaacgtctaaatcttcctctctccccgcctatggcaggaccaccctgagccggctacagtccacagagttcagcccatcagggagtgagactggaagcccaggcctgcagaacggagagggccagagggggaggatggaccgggggaactccctgccctgtgtgctggagcagaagatctatccctatgaaatgctagtggtgaccaacaaggggcgaaccaagctgccaccgggggtggatcggatgcggcttgagaggcatctgtctgccgaggacttctcaagggtatttgccatgtcccctgaagagtttggcaagctggctctgtggaagcggaatgagctcaagaagaaggcctctctcttcggggcattggtggttaggccggttggctgtcttgaacagctggagggaagatgcaggggtgggaagcggccaggcagaaagagctccaggctcttgtgtcgcccacccagccctcccatactcactcctgacagctttcctgcactgcagcctcctgctcctctgactctagtgggaacaggccccagctcagcctccggcagggaggtcacccctccacttcagcttgccctgacctccgctcgcaaaccccgagcttccaagccttttgctccagccctgcggcttccccagaagcctgggcttagggtggagatgccgcctacacacgatcctggccctccacctgcctccaggccacgaaatgggaattccagcactaagccaggcaccgggcagaagctgggccttccgcctcccttggatggggtcaagaggccaggcctggcacattttggagtgtcctggctaccagctctcacctacacccacgcacccccccacacactatgctctctcaagaatgtaatttattggggcccccccagctgctttcctcacctgcccctgccctaccttacacccccagcttga

SEQ ID NO: 9811 - DNA, 2601 bp, Homo sapiens
  source 1..2601: mol_type = unassigned DNA
agagaagcctatcgacagggcctgggggagggaggaggcagcagggccggagtccacccaggacatctggcaccagtgaccttgtggggaaaggagccaagaacggggcgtcggggggcctgggacccccctgcctgagagatacaggaatcctggccccgtgttgtggacacaagcgcccatcctcaaggtcctgagaactcctgaacttccaaagcctggagagtcaccgccgagggatgaggacgcgccagcccgggggaacgcgccagctgctttcgcggccccaagcgcgcagcgcccagcagccgcgccgagcctgacacgctgtcctctcccctcgcgcacagggctctgcgagtgacccggcgggcgagctccgtgctgcatggaacggctgcagaagcaaccacttacctcccccgggagcgtgagcccctcccgagattccagtgtgcctggctctccctccagcatcgtggccaagatggacaatcaggtgctgggctacaaggacctggctgccatccccaaggacaaggccatcctggacatcgagcggcccgacctcatgatctacgagcctcacttcacttattccctcctggaacacgtggagctgcctcgcagccgcgagcgctcgctgtcacccaaatccacatcccccccaccatccccagaggtgtgggcggacagccggtcgcctggaatcatctctcaggcctcggcccccagaaccactggaaccccccggaccagcctgccccatttccaccaccctgagacctcccgcccagattccaacatctacaagaagcctcccatctataagcagagagagtccgtgggaggcagccctcagaccaagcacctcatcgaggatctcatcatcgagtcatccaagtttcctgcagcccagcccccagaccccaaccagccagccaaaatcgaaaccgactactggccatgccccccgtctctggctgttgtggagacagaatggaggaagcggaaggcgtctcggaggggagcagaggaagaggaggaggaggaagatgacgactctggagaggagatgaaggctctcagggagcgtcagagagaggaactcagtaaggttacttccaacttgggaaagatgatcttgaaagaagagatggaaaagtcattgccgatccgaaggaaaacccgctctctgcctgaccggacacccttccatacctccttgcaccagggaacgtctaaatcttcctctctccccgcctatggcaggaccaccctgagccggctacagtccacagagttcagcccatcagggagtgagactggaagcccaggcctgcagatctatccctatgaaatgctagtggtgaccaacaaggggcgaaccaagctgccaccgggggtggatcggatgcggcttgagaggcatctgtctgccgaggacttctcaagggtatttgccatgtcccctgaagagtttggcaagctggctctgtggaagcggaatgagctcaagaagaaggcctctctcttctgatggcccccacctgctccgggacggcccccttacccctgctgcttcagggtttttccccggcgggttgggaggggcaggaggtggggtggaaatagggtgggctcctttcctcaggtagagtggggggccaaaacctctgcagtccccggcagtgagctatggactttcttccccctcacaaggctgggggcctcctgctctcgtccctggccctccctgcacagggcaaagccagtctgggctctggcacacagagttcatgtttgcgccctctccctgcccctcaccccagagggtgaggaggaatgaggggcattggtggttaggccggttggctgtcttgaacagctggagggaagatgcaggggtgggaagcggccaggcagaaagagctccaggctcttgtgtcgcccacccagccctcccatactcactcctgacagctttcctgcactgcagcctcctgctcctctgactctagtgggaacaggccccagctcagcctccggcagggaggtcacccctccacttcagcttgccctgacctccgctcgcaaaccccgagcttccaagccttttgctccagccctgcggcttccccagaagcctgggcttagggtggagatgccgcctacacacgatcctggccctccacctgcctccaggccacgaaatgggaattccagcactaagccaggcaccgggcagaagctgggccttccgcctcccttggatggggtcaagaggccaggcctggcacattttggagtgtcctggctaccagctctcacctacacccacgcacccccccacacactatgctctctcaagaatgtaatttattggggcccccccagctgctttcctcacctgcccctgccctaccttacacccccagcttgacttctttccagtccacgtgtgtatataatgatatctatatttttgcccaggtctgggtattgctcctgcccagaccctgacatccctttccactgtgtgtgtgaccatgctgggggagggggactctgcttggaattaaaaggttgcattgggtccct

SEQ ID NO: 9812 - DNA, 2573 bp, Homo sapiens
  source 1..2573: mol_type = unassigned DNA
gagaaaagatgaagaaagccaagaaaagggaccagaagagaaagcagaaagacaggaggaagaaagggagagagggccaggcagtcgcactgtgaacagaacaggagaaggcgaagcggggcaaagttccctgcccaccgacgccagcctgcttggatgacttgcctcgtttcataattcacttactgtctgcaccagccggcctccagcctggctggaccctgctgcctgtgtggcccggagccagaggcccccacactcccagctgctcttctacagatgccatcaacgagcaggactctgggtggctccactgtctaagggctctgcgagtgacccggcgggcgagctccgtgctgcatggaacggctgcagaagcaaccacttacctcccccgggagcgtgagcccctcccgagattccagtgtgcctggctctccctccagcatcgtggccaagatggacaatcaggtgctgggctacaaggacctggctgccatccccaaggacaaggccatcctggacatcgagcggcccgacctcatgatctacgagcctcacttcacttattccctcctggaacacgtggagctgcctcgcagccgcgagcgctcgctgtcacccaaatccacatcccccccaccatccccagaggtgtgggcggacagccggtcgcctggaatcatctctcaggcctcggcccccagaaccactggaaccccccggaccagcctgccccatttccaccaccctgagacctcccgcccagattccaacatctacaagaagcctcccatctataagcagagagagtccgtgggaggcagccctcagaccaagcacctcatcgaggatctcatcatcgagtcatccaagtttcctgcagcccagcccccagaccccaaccagccagccaaaatcgaaaccgactactggccatgccccccgtctctggctgttgtggagacagaatggaggaagcggaaggcgtctcggaggggagcagaggaagaggaggaggaggaagatgacgactctggagaggagatgaaggctctcagggagcgtcagagagaggaactcagtaaggttacttccaacttgggaaagatgatcttgaaagaagagatggaaaagtcattgccgatccgaaggaaaacccgctctctgcctgaccggacacccttccatacctccttgcaccagggaacgtctaaatcttcctctctccccgcctatggcaggaccaccctgagccggctacagtccacagagttcagcccatcagggagtgagactggaagcccaggcctgcagatctatccctatgaaatgctagtggtgaccaacaaggggcgaaccaagctgccaccgggggtggatcggatgcggcttgagaggcatctgtctgccgaggacttctcaagggtatttgccatgtcccctgaagagtttggcaagctggctctgtggaagcggaatgagctcaagaagaaggcctctctcttctgatggcccccacctgctccgggacggcccccttacccctgctgcttcagggtttttccccggcgggttgggaggggcaggaggtggggtggaaatagggtgggctcctttcctcaggtagagtggggggccaaaacctctgcagtccccggcagtgagctatggactttcttccccctcacaaggctgggggcctcctgctctcgtccctggccctccctgcacagggcaaagccagtctgggctctggcacacagagttcatgtttgcgccctctccctgcccctcaccccagagggtgaggaggaatgaggggcattggtggttaggccggttggctgtcttgaacagctggagggaagatgcaggggtgggaagcggccaggcagaaagagctccaggctcttgtgtcgcccacccagccctcccatactcactcctgacagctttcctgcactgcagcctcctgctcctctgactctagtgggaacaggccccagctcagcctccggcagggaggtcacccctccacttcagcttgccctgacctccgctcgcaaaccccgagcttccaagccttttgctccagccctgcggcttccccagaagcctgggcttagggtggagatgccgcctacacacgatcctggccctccacctgcctccaggccacgaaatgggaattccagcactaagccaggcaccgggcagaagctgggccttccgcctcccttggatggggtcaagaggccaggcctggcacattttggagtgtcctggctaccagctctcacctacacccacgcacccccccacacactatgctctctcaagaatgtaatttattggggcccccccagctgctttcctcacctgcccctgccctaccttacacccccagcttgacttctttccagtccacgtgtgtatataatgatatctatatttttgcccaggtctgggtattgctcctgcccagaccctgacatccctttccactgtgtgtgtgaccatgctgggggagggggactctgcttggaattaaaaggttgcattgggtccct

SEQ ID NO: 9813 - DNA, 2508 bp, Homo sapiens
  source 1..2508: mol_type = unassigned DNA
tctctgaggaagaggcagcgggaggcacagcttcctcctccccccctccctgctgccgcggctgagccgggcctgagctgccggcaggttgtcttggcaacaggaggtggagaggagatgcgccgagggatggaggtgtatgtcaccgaggaggctgctgcgctcctgccccacgccctgggcccttgaagggctctgcgagtgacccggcgggcgagctccgtgctgcatggaacggctgcagaagcaaccacttacctcccccgggagcgtgagcccctcccgagattccagtgtgcctggctctccctccagcatcgtggccaagatggacaatcaggtgctgggctacaaggacctggctgccatccccaaggacaaggccatcctggacatcgagcggcccgacctcatgatctacgagcctcacttcacttattccctcctggaacacgtggagctgcctcgcagccgcgagcgctcgctgtcacccaaatccacatcccccccaccatccccagaggtgtgggcggacagccggtcgcctggaatcatctctcaggcctcggcccccagaaccactggaaccccccggaccagcctgccccatttccaccaccctgagacctcccgcccagattccaacatctacaagaagcctcccatctataagcagagagagtccgtgggaggcagccctcagaccaagcacctcatcgaggatctcatcatcgagtcatccaagtttcctgcagcccagcccccagaccccaaccagccagccaaaatcgaaaccgactactggccatgccccccgtctctggctgttgtggagacagaatggaggaagcggaaggcgtctcggaggggagcagaggaagaggaggaggaggaagatgacgactctggagaggagatgaaggctctcagggagcgtcagagagaggaactcagtaaggttacttccaacttgggaaagatgatcttgaaagaagagatggaaaagtcattgccgatccgaaggaaaacccgctctctgcctgaccggacacccttccatacctccttgcaccagggaacgtctaaatcttcctctctccccgcctatggcaggaccaccctgagccggctacagtccacagagttcagcccatcagggagtgagactggaagcccaggtctccagaacggagagggccagagggggaggatggaccgggggaactccctgccctgtgtgctggagcagaagatctatccctatgaaatgctagtggtgaccaacaaggggcgaaccaagctgccaccgggggtggatcggatgcggcttgagaggcatctgtctgccgaggacttctcaagggtatttgccatgtcccctgaagagtttggcaagctggctctgtggaagcggaatgagctcaagaagaaggcctctctcttctgatggcccccacctgctccgggacggcccccttacccctgctgcttcagggtttttccccggcgggttgggaggggcaggaggtggggtggaaatagggtgggctcctttcctcaggtagagtggggggccaaaacctctgcagtccccggcagtgagctatggactttcttccccctcacaaggctgggggcctcctgctctcgtccctggccctccctgcacagggcaaagccagtctgggctctggcacacagagttcatgtttgcgccctctccctgcccctcaccccagagggtgaggaggaatgaggggcattggtggttaggccggttggctgtcttgaacagctggagggaagatgcaggggtgggaagcggccaggcagaaagagctccaggctcttgtgtcgcccacccagccctcccatactcactcctgacagctttcctgcactgcagcctcctgctcctctgactctagtgggaacaggccccagctcagcctccggcagggaggtcacccctccacttcagcttgccctgacctccgctcgcaaaccccgagcttccaagccttttgctccagccctgcggcttccccagaagcctgggcttagggtggagatgccgcctacacacgatcctggccctccacctgcctccaggccacgaaatgggaattccagcactaagccaggcaccgggcagaagctgggccttccgcctcccttggatggggtcaagaggccaggcctggcacattttggagtgtcctggctaccagctctcacctacacccacgcacccccccacacactatgctctctcaagaatgtaatttattggggcccccccagctgctttcctcacctgcccctgccctaccttacacccccagcttgacttctttccagtccacgtgtgtatataatgatatctatatttttgcccaggtctgggtattgctcctgcccagaccctgacatccctttccactgtgtgtgtgaccatgctgggggagggggactctgcttggaattaaaaggttgcattgggtccct

SEQ ID NO: 9814 - DNA, 2415 bp, Homo sapiens
  source 1..2415: mol_type = unassigned DNA
aggttgtcttggcaacaggaggtggagaggagatgcgccgagggatggaggtgtatgtcaccgaggaggctgctgcgctcctgccccacgccctgggcccttgaagcctggagagtcaccgccgagggatgaggacgcgccagcccgggggaacgcgccagctgctttcgcggccccaagcgcgcagcgcccagcagccgcgccgagcctgacacgctgtcctctcccctcgcgcacagggctctgcgagtgacccggcgggcgagctccgtgctgcatggaacggctgcagaaggccaagatggacaatcaggtgctgggctacaaggacctggctgccatccccaaggacaaggccatcctggacatcgagcggcccgacctcatgatctacgagcctcacttcacttattccctcctggaacacgtggagctgcctcgcagccgcgagcgctcgctgtcacccaaatccacatcccccccaccatccccagaggtgtgggcggacagccggtcgcctggaatcatctctcaggcctcggcccccagaaccactggaaccccccggaccagcctgccccatttccaccaccctgagacctcccgcccagattccaacatctacaagaagcctcccatctataagcagagagagtccgtgggaggcagccctcagaccaagcacctcatcgaggatctcatcatcgagtcatccaagtttcctgcagcccagcccccagaccccaaccagccagccaaaatcgaaaccgactactggccatgccccccgtctctggctgttgtggagacagaatggaggaagcggaaggcgtctcggaggggagcagaggaagaggaggaggaggaagatgacgactctggagaggagatgaaggctctcagggagcgtcagagagaggaactcagtaaggttacttccaacttgggaaagatgatcttgaaagaagagatggaaaagtcattgccgatccgaaggaaaacccgctctctgcctgaccggacacccttccatacctccttgcaccagggaacgtctaaatcttcctctctccccgcctatggcaggaccaccctgagccggctacagtccacagagttcagcccatcagggagtgagactggaagcccaggcctgcagatctatccctatgaaatgctagtggtgaccaacaaggggcgaaccaagctgccaccgggggtggatcggatgcggcttgagaggcatctgtctgccgaggacttctcaagggtatttgccatgtcccctgaagagtttggcaagctggctctgtggaagcggaatgagctcaagaagaaggcctctctcttctgatggcccccacctgctccgggacggcccccttacccctgctgcttcagggtttttccccggcgggttgggaggggcaggaggtggggtggaaatagggtgggctcctttcctcaggtagagtggggggccaaaacctctgcagtccccggcagtgagctatggactttcttccccctcacaaggctgggggcctcctgctctcgtccctggccctccctgcacagggcaaagccagtctgggctctggcacacagagttcatgtttgcgccctctccctgcccctcaccccagagggtgaggaggaatgaggggcattggtggttaggccggttggctgtcttgaacagctggagggaagatgcaggggtgggaagcggccaggcagaaagagctccaggctcttgtgtcgcccacccagccctcccatactcactcctgacagctttcctgcactgcagcctcctgctcctctgactctagtgggaacaggccccagctcagcctccggcagggaggtcacccctccacttcagcttgccctgacctccgctcgcaaaccccgagcttccaagccttttgctccagccctgcggcttccccagaagcctgggcttagggtggagatgccgcctacacacgatcctggccctccacctgcctccaggccacgaaatgggaattccagcactaagccaggcaccgggcagaagctgggccttccgcctcccttggatggggtcaagaggccaggcctggcacattttggagtgtcctggctaccagctctcacctacacccacgcacccccccacacactatgctctctcaagaatgtaatttattggggcccccccagctgctttcctcacctgcccctgccctaccttacacccccagcttgacttctttccagtccacgtgtgtatataatgatatctatatttttgcccaggtctgggtattgctcctgcccagaccctgacatccctttccactgtgtgtgtgaccatgctgggggagggggactctgcttggaattaaaaggttgcattgggtccct

SEQ ID NO: 9815 - DNA, 2658 bp, Homo sapiens
  source 1..2658: mol_type = unassigned DNA
aagacaggaggaagaaagggagagagggccaggcagtcgcactgtgaacagaacaggagaaggcgaagcggggcaaagttccctgcccaccgacgccagcctgcttggatgacttgcctcgtttcataattcacttactgtctgcaccagccggcctccagcctggctggaccctgctgcctgtgtggcccggagccagaggcccccacactcccagctgctcttctacagatgccatcaacgagcaggactctgggtggctccactgtctaagcctggagagtcaccgccgagggatgaggacgcgccagcccgggggaacgcgccagctgctttcgcggccccaagcgcgcagcgcccagcagccgcgccgagcctgacacgctgtcctctcccctcgcgcacagggctctgcgagtgacccggcgggcgagctccgtgctgcatggaacggctgcagaagcaaccacttacctcccccgggagcgtgagcccctcccgagattccagtgtgcctggctctccctccagcatcgtggccaagatggacaatcaggtgctgggctacaaggacctggctgccatccccaaggacaaggccatcctggacatcgagcggcccgacctcatgatctacgagcctcacttcacttattccctcctggaacacgtggagctgcctcgcagccgcgagcgctcgctgtcacccaaatccacatcccccccaccatccccagaggtgtgggcggacagccggtcgcctggaatcatctctcaggcctcggcccccagaaccactggaaccccccggaccagcctgccccatttccaccaccctgagacctcccgcccagattccaacatctacaagaagcctcccatctataagcagagagagtccgtgggaggcagccctcagaccaagcacctcatcgaggatctcatcatcgagtcatccaagtttcctgcagcccagcccccagaccccaaccagccagccaaaatcgaaaccgactactggccatgccccccgtctctggctgttgtggagacagaatggaggaagcggaaggcgtctcggaggggagcagaggaagaggaggaggaggaagatgacgactctggagaggagatgaaggctctcagggagcgtcagagagaggaactcagtaaggttacttccaacttgggaaagatgatcttgaaagaagagatggaaaagtcattgccgatccgaaggaaaacccgctctctgcctgaccggacacccttccatacctccttgcaccagggaacgtctaaatcttcctctctccccgcctatggcaggaccaccctgagccggctacagtccacagagttcagcccatcagggagtgagactggaagcccaggcctgcagatctatccctatgaaatgctagtggtgaccaacaaggggcgaaccaagctgccaccgggggtggatcggatgcggcttgagaggcatctgtctgccgaggacttctcaagggtatttgccatgtcccctgaagagtttggcaagctggctctgtggaagcggaatgagctcaagaagaaggcctctctcttctgatggcccccacctgctccgggacggcccccttacccctgctgcttcagggtttttccccggcgggttgggaggggcaggaggtggggtggaaatagggtgggctcctttcctcaggtagagtggggggccaaaacctctgcagtccccggcagtgagctatggactttcttccccctcacaaggctgggggcctcctgctctcgtccctggccctccctgcacagggcaaagccagtctgggctctggcacacagagttcatgtttgcgccctctccctgcccctcaccccagagggtgaggaggaatgaggggcattggtggttaggccggttggctgtcttgaacagctggagggaagatgcaggggtgggaagcggccaggcagaaagagctccaggctcttgtgtcgcccacccagccctcccatactcactcctgacagctttcctgcactgcagcctcctgctcctctgactctagtgggaacaggccccagctcagcctccggcagggaggtcacccctccacttcagcttgccctgacctccgctcgcaaaccccgagcttccaagccttttgctccagccctgcggcttccccagaagcctgggcttagggtggagatgccgcctacacacgatcctggccctccacctgcctccaggccacgaaatgggaattccagcactaagccaggcaccgggcagaagctgggccttccgcctcccttggatggggtcaagaggccaggcctggcacattttggagtgtcctggctaccagctctcacctacacccacgcacccccccacacactatgctctctcaagaatgtaatttattggggcccccccagctgctttcctcacctgcccctgccctaccttacacccccagcttgacttctttccagtccacgtgtgtatataatgatatctatatttttgcccaggtctgggtattgctcctgcccagaccctgacatccctttccactgtgtgtgtgaccatgctgggggagggggactctgcttggaattaaaaggttgcattgggtccct

SEQ ID NO: 9816 - DNA, 2735 bp, Homo sapiens
  source 1..2735: mol_type = unassigned DNA
ccagaagagaaagcagaaagacaggaggaagaaagggagagagggccaggcagtcgcactgtgaacagaacaggagaaggcgaagcggggcaaagttccctgcccaccgacgccagcctgcttggatgacttgcctcgtttcataattcacttactgtctgcaccagccggcctccagcctggctggaccctgctgcctgtgtggcccggagccagaggcccccacactcccagctgctcttctacagatgccatcaacgagcaggactctgggtggctccactgtctaagcctggagagtcaccgccgagggatgaggacgcgccagcccgggggaacgcgccagctgctttcgcggccccaagcgcgcagcgcccagcagccgcgccgagcctgacacgctgtcctctcccctcgcgcacagggctctgcgagtgacccggcgggcgagctccgtgctgcatggaacggctgcagaagcaaccacttacctcccccgggagcgtgagcccctcccgagattccagtgtgcctggctctccctccagcatcgtggccaagatggacaatcaggtgctgggctacaaggacctggctgccatccccaaggacaaggccatcctggacatcgagcggcccgacctcatgatctacgagcctcacttcacttattccctcctggaacacgtggagctgcctcgcagccgcgagcgctcgctgtcacccaaatccacatcccccccaccatccccagaggtgtgggcggacagccggtcgcctggaatcatctctcaggcctcggcccccagaaccactggaaccccccggaccagcctgccccatttccaccaccctgagacctcccgcccagattccaacatctacaagaagcctcccatctataagcagagagagtccgtgggaggcagccctcagaccaagcacctcatcgaggatctcatcatcgagtcatccaagtttcctgcagcccagcccccagaccccaaccagccagccaaaatcgaaaccgactactggccatgccccccgtctctggctgttgtggagacagaatggaggaagcggaaggcgtctcggaggggagcagaggaagaggaggaggaggaagatgacgactctggagaggagatgaaggctctcagggagcgtcagagagaggaactcagtaaggttacttccaacttgggaaagatgatcttgaaagaagagatggaaaagtcattgccgatccgaaggaaaacccgctctctgcctgaccggacacccttccatacctccttgcaccagggaacgtctaaatcttcctctctccccgcctatggcaggaccaccctgagccggctacagtccacagagttcagcccatcagggagtgagactggaagcccaggcctgcagaacggagagggccagagggggaggatggaccgggggaactccctgccctgtgtgctggagcagaagatctatccctatgaaatgctagtggtgaccaacaaggggcgaaccaagctgccaccgggggtggatcggatgcggcttgagaggcatctgtctgccgaggacttctcaagggtatttgccatgtcccctgaagagtttggcaagctggctctgtggaagcggaatgagctcaagaagaaggcctctctcttctgatggcccccacctgctccgggacggcccccttacccctgctgcttcagggtttttccccggcgggttgggaggggcaggaggtggggtggaaatagggtgggctcctttcctcaggtagagtggggggccaaaacctctgcagtccccggcagtgagctatggactttcttccccctcacaaggctgggggcctcctgctctcgtccctggccctccctgcacagggcaaagccagtctgggctctggcacacagagttcatgtttgcgccctctccctgcccctcaccccagagggtgaggaggaatgaggggcattggtggttaggccggttggctgtcttgaacagctggagggaagatgcaggggtgggaagcggccaggcagaaagagctccaggctcttgtgtcgcccacccagccctcccatactcactcctgacagctttcctgcactgcagcctcctgctcctctgactctagtgggaacaggccccagctcagcctccggcagggaggtcacccctccacttcagcttgccctgacctccgctcgcaaaccccgagcttccaagccttttgctccagccctgcggcttccccagaagcctgggcttagggtggagatgccgcctacacacgatcctggccctccacctgcctccaggccacgaaatgggaattccagcactaagccaggcaccgggcagaagctgggccttccgcctcccttggatggggtcaagaggccaggcctggcacattttggagtgtcctggctaccagctctcacctacacccacgcacccccccacacactatgctctctcaagaatgtaatttattggggcccccccagctgctttcctcacctgcccctgccctaccttacacccccagcttgacttctttccagtccacgtgtgtatataatgatatctatatttttgcccaggtctgggtattgctcctgcccagaccctgacatccctttccactgtgtgtgtgaccatgctgggggagggggactctgcttggaattaaaaggttgcattgg

SEQ ID NO: 9817 - DNA, 1569 bp, Homo sapiens
  source 1..1569: mol_type = unassigned DNA
gagatgcgccgagggatggaggtgtatgtcaccgaggaggctgctgcgctcctgccccacgccctgggcccttgaagcctggagagtcaccgccgagggatgaggacgcgccagcccgggggaacgcgccagctgctttcgcggccccaagcgcgcagcgcccagcagccgcgccgagcctgacacgctgtcctctcccctcgcgcacagggctctgcgagtgacccggcgggcgagctccgtgctgcatggaacggctgcagaaggccaagatggacaatcaggtgctgggctacaaggacctggctgccatccccaaggacaaggccatcctggacatcgagcggcccgacctcatgatctacgagcctcacttcacttattccctcctggaacacgtggagctgcctcgcagccgcgaggtgtgggcggacagccggtcgcctggaatcatctctcaggcctcggcccccagaaccactggaaccccccggaccagcctgccccatttccaccaccctgagacctcccgcccagattccaacatctacaagaagcctcccatctataagcagagagagtccgtgggaggcagccctcagaccaagcacctcatcgaggatctcatcatcgagtcatccaagtttcctgcagcccagcccccagaccccaaccagccagccaaaatcgaaaccgactactggccatgccccccgtctctggctgttgtggagacagaatggaggaagcggaaggcgtctcggaggggagcagaggaagaggaggaggaggaagatgacgactctggagaggagatgaaggctctcagggagcgtcagagagaggaactcagtaaggttacttccaacttgggaaagatgatcttgaaagaagagatggaaaagtcattgccgatccgaaggaaaacccgctctctgcctgaccggacacccttccatacctccttgcaccagggaacgtctaaatcttcctctctccccgcctatggcaggaccaccctgagccggctacagtccacagagttcagcccatcagggagtgagactggaagcccaggtctccagaacggagagggccagagggggaggatggaccgggggaactccctgccctgtgtgctggagcagaagatctatccctatgaaatgctagtggtgaccaacaaggggcgaaccaagctgccaccgggggtggatcggatgcggcttgagaggcatctgtctgccgaggacttctcaagggtatttgccatgtcccctgaagagtttggcaagctggctctgtggaagcggaatgagctcaagaagaaggcctctctcttctgatggcccccacctgctccgggacggcccccttacccctgctgcttcagggtttttccccggcgggttgggaggggcaggaggtggggtggaaatagggtgggctcctttcctcaggtagagtggggggccaaaacctctgcagtccccggcagtgagctatggactttcttccccctcacaaggctgggggcctcctgctctcgtccctggccctccctgcaca

SEQ ID NO: 9818 - DNA, 2441 bp, Homo sapiens
  source 1..2441: mol_type = unassigned DNA
cttagaggcgcctggtcgggaagggcctggtcagctgcgtccggcggaggcagctgctgacccagctgtggactgtgccgggggcgggggacggaggggcaggagccctgggctccccgtggcgggggctgtatcatggaccacctcggggcgtccctctggccccaggtcggctccctttgtctcctgctcgctggggccgcctgggcgcccccgcctaacctcccggaccccaagttcgagagcaaagcggccttgctggcggcccgggggcccgaagagcttctgtgcttcaccgagcggttggaggacttggtgtgtttctgggaggaagcggcgagcgctggggtgggcccgggcaactacagcttctcctaccagctcgaggatgagccatggaagctgtgtcgcctgcaccaggctcccacggctcgtggtgcggtgcgcttctggtgttcgctgcctacagccgacacgtcgagcttcgtgcccctagagttgcgcgtcacagcagcctccggcgctccgcgatatcaccgtgtcatccacatcaatgaagtagtgctcctagacgcccccgtggggctggtggcgcggttggctgacgagagcggccacgtagtgttgcgctggctcccgccgcctgagacacccatgacgtctcacatccgctacgaggtggacgtctcggccggcaacggcgcagggagcgtacagagggtggagatcctggagggccgcaccgagtgtgtgctgagcaacctgcggggccggacgcgctacaccttcgccgtccgcgcgcgtatggctgagccgagcttcggcggcttctggagcgcctggtcggagcctgtgtcgctgctgacgcctagcgacctggaccccctcatcctgacgctctccctcatcctcgtggtcatcctggtgctgctgaccgtgctcgcgctgctctcccaccgccgggctctgaagcagaagatctggcctggcatcccgagcccagagagcgagtttgaaggcctcttcaccacccacaagggtaacttccagctgtggctgtaccagaatgatggctgcctgtggtggagcccctgcacccccttcacggaggacccacctgcttccctggaagtcctctcagagcgctgctgggggacgatgcaggcagtggagccggggacagatgatgagggccccctgctggagccagtgggcagtgagcatgcccaggatacctatctggtgctggacaaatggttgctgccccggaacccgcccagtgaggacctcccagggcctggtggcagtgtggacatagtggccatggatgaaggctcagaagcatcctcctgctcatctgctttggcctcgaagcccagcccagagggagcctctgctgccagctttgagtacactatcctggaccccagctcccagctcttgcgtccatggacactgtgccctgagctgccccctaccccaccccacctaaagtacctgtaccttgtggtatctgactctggcatctcaactgactacagctcaggggactcccagggagcccaagggggcttatccgatggcccctactccaacccttatgagaacagccttatcccagccgctgagcctctgccccccagctatgtggcttgctcttaggacaccaggctgcagatgatcagggatccaatatgactcagagaaccagtgcagactcaagacttatggaacagggatggcgaggcctctctcaggagcaggggcattgctgattttgtctgcccaatccatcctgctcaggaaaccacaaccttgcagtatttttaaatatgtatagtttttttttgtatctatatatatatatacacatatgtatgtaagtttttctaccatgatttctacaaacaccctttaagtcccatcttcccctgggcataggccatagggatagaagttaaagttcttgagcttattcagaagctggatctgcaatctgaatgctactcataacataacaaaatagtatgttaaacagctcttaaatcttactggcttaccacattaaatgatttctctctcctaactcagctcaaatgggcagccatccatgggatgagtcagaggttcagactcttccagtctgtagctctaccttctcttagggtacttagatggatcccctgttctacaaactgccagtcagcaagggaagaaaaagggcagcaatgaccctcaatgggccatttgagggatctggcctggaaatgggcttcctctcttcttctcacacctcactggctggaaacagtcacatgaccccagtcacatgaaaggccaggaaacttagtttagctgtacacccaggaagggcaaagctgtttaagggccactagctagtctctgccactaataataataaaagtaattctgaatcaggc

SEQ ID NO: 9819 - DNA, 3531 bp, Homo sapiens
  source 1..3531: mol_type = unassigned DNA
agcggagcgccaggcagcgcggagcggaggccaggcccacagccgctccgcctcccggcccgcagatccccgacggccgcaccgcgggctcctctggcccgcaagaacacgtgcatggcgtcctggggaaggcgctgagtgcggagtcgcggcgccgcacgcggcaccatggccctggagcaggcgctgcaggcggcgcggcagggcgagctggacgtgctgaggtcgctgcacgccgcaggcctcctggggccctcgctgcgcgacccgctggacgcgctgcccgtgcaccacgcggcccgcgctgggaagctgcactgtctgcgcttcctggtggaggaagccgccctccccgccgcggcccgcgcccgcaacggcgccacaccggcccacgacgcctccgccaccggccacctcgcctgcctgcagtggctgctgtcgcagggcggctgcagagtgcaggacaaagacaattctggtgccacagtcttgcatctggctgcccgcttcggccaccccgaggtggtgaactggctcttgcatcatggcggtggggaccccaccgcggccacagacatgggcgccctgcctatccactacgctgccgccaaaggagacttcccctccctgaggcttctcgtcgagcactaccctgagggagtgaatgcccaaaccaagaacggtgccacgcccctgtacctggcgtgccaggagggccacctggaggtgacccagtacctggtgcaggaatgcggcgcagacccgcacgcgcgcgcccacgacggcatgaccccgctgcacgccgcggcgcagatgggccacagcccagtcatcgtgtggttggtgagctgcaccgacgtgagcctgtccgagcaggacaaagacggcgccaccgccatgcacttcgcggcgagccgcggccacaccaaggtgctcagctggctgctgctgcacggcggggagatctcggctgacctgtggggcgggaccccgctgcacgacgccgccgagaacggggagctagagtgctgccagatcctggtagtgaacggcgcggagctggacgtccgcgaccgcgacgggtacacggccgccgacctgtcggacttcaacggccacagccactgcacccgctacctgcgcacggtggagaacctgagcgtggagcaccgcgtgctttcccgggatccatccgcagagctggaggctaagcagccggattcaggcatgtcctcacccaataccacggtgtcggtccagccgctgaactttgacctcagctcgcctaccagcaccctctccaactacgactcctgctcctccagccactccagcatcaagggccagcaccctccatgtgggctttccagcgctagagctgcagacatacagagctacatggacatgctgaacccggagctgggcctgcctcggggcacgattgggaagcccacacccccaccacccccacccagcttccccccgccacccccgcccccaggcacccaactgcccccacccccacctggctacccagctcccaagcctcctgtaggaccacaggcagctgacatctacatgcagaccaagaacaaactccgccacgtggagacagaggccctcaagaaggagctgagctcctgtgacggccacgacgggctgcggaggcaggactccagccgcaagccccgcgccttcagcaagcagcccagcacgggggactactaccggcagctgggccgctgccccggcgagacgctggccgcacgcccgggcatggcgcacagcgaggaggtgcgtgcccgccagcccgcgcgcgccggctgcccgcgcctcggccctgccgcccgcggctcactcgaaggcccctccgctcccccgcaggcggcgctgcttcctgggaaccatgttcctaacggctgcgccgcggaccccaaggcgtccagggagctgccaccgccgcccccaccgccgccgccgcccctgccggaggccgcgagttcgccaccgccggccccgcctctgcccctcgagagcgctggccctggctgcgggcagcgccgctcctcctcgtccaccggcagcaccaagtctttcaacatgatgtccccgacgggcgacaactcggagctactggctgagattaaggcaggcaagagcctgaagccgacgccccagagcaaggggctgaccacagtgttctcaggcatcgggcagccggccttccagcccgattcgccgctgccttctgtgtcacctgcactgtcaccagtccggagccccacaccgccagctgcggggtttcagccgctgctcaatggaagcttggttcccgtgccgcccactactcctgcgccgggagtgcagctggacgtggaggctctcatccccacgcacgatgagcagggccggcccatccccgagtggaagcgccaggtgatggtgcgcaagatgcagctgaagatgcaggaggaggaggagcagaggcggaaggaggaggaggaggaggcccggctggccagcatgcccgcctggaggcgggacctcctgcggaagaagctggaagaagagagggagcagaagcggaaagaggaggagcgacagaagcaggaggagctgcggcgggagaaggaacagtcagagaagctgcggacgctgggctacgatgagagcaagctggcgccctggcagcgacaggtcatcctgaagaagggggacatcgctaagtactagaggccgcagactcctgtccgcagcctcgcagctccgtggggccctccgccccagccccagccagccaggccctggtggaaaggctgggagccgcacagccctcccctcctgcgctggaaaccctccctgacccccaccctggccccccgtatccccagcccttggcaacactggagtgcacacgccgccacggttgcccagaaaaagtgcccaagctgctgacgcaaacaacaacaaatgctgcttatttgcatgccgacttacatatatttgcatgttcgttgactatcaaagagtgcagagctctccccagccccgtgggtggtgactttgttttcctgcggggctcagccccctccaggatgcagccccctcccccgcaccccggaaccggcgtcgctggcgcatcctgggtggaggcaggccccgagctcggggaaggggttttcccttcctctctgacccagatctgcgcgcggcctagcccgggcctcatttcttatccccgccaagggtttcctctcagtcatttgtttaccagaaacatgaaaactgcctgtctggccgggccgcacttgtggcccccgggaccccacctctggccccacctccctcaagtctgcgccccgtccccagccagacccactcgctgccgggaccctttcactgccccggtggagtgaatagaggatgaggggccctgaccctgtgtctccaactgctgcaccccatcccgaccctgtctccgccacctcgcagccccattaaagcgctctcatctgggctccggttcactca

SEQ ID NO: 9820 - DNA, 1665 bp, Homo sapiens
  source 1..1665: mol_type = unassigned DNA
atggcgcacagcgaggaggcggcgctgcttcctgggaaccatgttcctaacggctgcgccgcggaccccaaggcgtccagggagctgccaccgccgcccccaccgccgccgccgcccctgccggaggccgcgagttcgccaccgccggccccgcctctgcccctcgagagcgctggccctggctgcgggcagcgccgctcctcctcgtccaccggcagcaccaagtctttcaacatgatgtccccgacgggcgacaactcggagctactggctgagattaaggcaggcaagagcctgaagccgacgccccagagcaaggggctgaccacagtgttctcaggcatcgggcagccggccttccagcccgattcgccgctgccttctgtgtcacctgcactgtcaccagtccggagccccacaccgccagctgcggggtttcagccgctgctcaatggaagcttggttcccgtgccgcccactactcctgcgccgggagtgcagctggacgtggaggctctcatccccacgcacgatgagcagggccggcccatccccgagtggaagcgccaggtgatggtgcgcaagatgcagctgaagatgcaggaggaggaggagcagaggcggaaggaggaggaggaggaggcccggctggccagcatgcccgcctggaggcgggacctcctgcggaagaagctggaagaagagagggagcagaagcggaaagaggaggagcgacagaagcaggaggagctgcggcgggagaaggaacagtcagagaagctgcggacgctgggctacgatgagagcaagctggcgccctggcagcgacaggtcatcctgaagaagggggacatcgctaagtactagaggccgcagactcctgtccgcagcctcgcagctccgtggggccctccgccccagccccagccagccaggccctggtggaaaggctgggagccgcacagccctcccctcctgcgctggaaaccctccctgacccccaccctggccccccgtatccccagcccttggcaacactggagtgcacacgccgccacggttgcccagaaaaagtgcccaagctgctgacgcaaacaacaacaaatgctgcttatttgcatgccgacttacatatatttgcatgttcgttgactatcaaagagtgcagagctctccccagccccgtgggtggtgactttgttttcctgcggggctcagccccctccaggatgcagccccctcccccgcaccccggaaccggcgtcgctggcgcatcctgggtggaggcaggccccgagctcggggaaggggttttcccttcctctctgacccagatctgcgcgcggcctagcccgggcctcatttcttatccccgccaagggtttcctctcagtcatttgtttaccagaaacatgaaaactgcctgtctggccgggccgcacttgtggcccccgggaccccacctctggccccacctccctcaagtctgcgccccgtccccagccagacccactcgctgccgggaccctttcactgccccggtggagtgaatagaggatgaggggccctgaccctgtgtctccaactgctgcaccccatcccgaccctgtctccgccacctcgcagccccattaaagcgctctcatctgggctccggttcactca

SEQ ID NO: 9821 - DNA, 641 bp, Homo sapiens
  source 1..641: mol_type = unassigned DNA
gacggcatgaccccgctgcacgccgcggcgcagatgggccacagcccagtcatcgtgtggttggacaaagacggcgccaccgccatgcacttcgcggcgagccgcggccacaccaaggtgctcagctggctgctgctgcacggcggggagatctcggctgacctgtggggcgggaccccgctgcacgacgccgccgagaacggggagctagagtgctgccagatcctggtagtgaacggcgcggagctggacgtccgcgaccgcgacgggtacacggccgccgacctgtcggacttcaacggccacagccactgcacccgctacctgcgcacggtggagaacctgagcgtggagcaccgcgtgctttcccgggatccatccgcagagctggaggctaagcagccggattcaggcatgtcctcacccaataccacggtgtcggtccagccgctgaactttgacctcagctcgcctaccagcaccctctccaactacgactcctgctcctccagccactccagcatcaagggccagcaccctccatgtgggctttccagcgctagagctgcagacatacagagctacatggacatgctgaacccggagctgggcctgcctcggggcacgattgggaagcccac

SEQ ID NO: 9822 - DNA, 750 bp, Homo sapiens
  source 1..750: mol_type = unassigned DNA
tgagattaaggcaggcaagagcctgaagccgacgccccagagcaaggggctgaccacagtgttctcaggcatcgggcagccggccttccagcccgattcgccgctgccttctgtgtcacctgcactgtcaccagtccggagccccacaccgccagctgcggggtttcagccgctgctcaatggaagcttggttcccgtgccgcccactactcctgcgccgggagtgcagctggacgtggaggctctcatccccacgcacgatgagcagggccggcccatccccgagtggaagcgccaggtgatggtgcgcaagatgcagctgaagatgcaggaggaggaggagcagaggcggaaggaggaggaggaggaggcccggctggccagcatgcccgcctggaggcgggacctcctgcggaagaagctggaagaagagagggagcagaagcggaaagaggaggagcgacagaagcaggaggagctgcggcgggagaaggaacagtcagagaagctgcggacgctgggctacgatgagagcaagctggcgccctggcagcgacagatttaataccgcgatctcagccaaactccggccgagaagttgagaaatgtcttcaccccctctcgacattcgttcgtgcttcttcgccttggctggagcgataggggcgagcaggggtggggccggctggtgctgctacgcagggccgtgccagcggcttaataagtgacataaaatgtctacacgcataa

SEQ ID NO: 9823 - DNA, 1335 bp, Homo sapiens
  source 1..1335: mol_type = unassigned DNA
atggcgcgggttggacccgggagggcgggggtctcttgccagggccggggccggggacggggcgggagcggtcagcggcgacctccaacctgggagatctcagactccgacgctgaggactccgccggctcggaggccgccgcgagagcccgggacccagcgggtgagcgcagggcggctgccgaggcgttgcggctgctgcggccggagcaggtcctgaagcgcctcgcggtgtgcgtggacacagccatcctggaagacgccggtgccgacgtcctgatggaggccctggaggccctgggctgcgagtgccgcatcgagccccagcgcccggcccgcagcctgcggtggacccgagcgagtcccgacccctgcccccgcagcctgcctcctgaagtgtgggctgcaggtgaacaggaattgctgctgctgctggagcccgaggagtttctgcagggcgtcgccacactgacccagatctctggcccaacccactgggtgccctggatctcccccgagaccaccgcccggccccacctggctgtcatcgggctggatgcctacctgtggtaccgctcactctcatgcccacagcagggctggctgggacgggggttcaggggaggtgggctctggcagaggccaagctcgggcagggcaggccccatggggagcggggaggaatggtcacctctgctcaggtctcgccagcacgtttcccgggggacacagcagccagagagcccgaaggtggccggtgccgaggtggccgtcagctggccggaggtggaagaggtgagggcctgtctgagctgggccctggtactcctgcagctctgggcaaacctggacgtgctactggtggcctcttggcaggagctgagtcggcacgtgtgcgccgttaccaaggctctcgcccagtatcccctcaagtgcgtgatgccaaggctgaaggggggcaggatcacctcaaggcagtaccgggaatcccaggccttctccttctgcacagcagggcgctgggcagccggcgagccagtggcaagagacggcgcagggctgcaggcggcctggcggaggcagatcaggcagttcagtcgggtcagcccagccgtggctgatgcagttgtcacagccttcccctccccccgccttctgcagcaggcgctggaggcctgcagcacggagcgggagcgcatgggcctcctggccgaccttcctgtgccgcccagtgaaggcgggcgtccccgcagggtggggcctgacctctcccgccgcatctgcctcttcctgaccacagccaaccctgatctcctgctggacctgggctcctga

SEQ ID NO: 9824 - DNA, 1161 bp, Homo sapiens
  source 1..1161: mol_type = unassigned DNA
atggcgcgggttggacccgggagggcgggggtctcttgccagggccggggccggggacggggcgggagcggtcagcggcgacctccaacctgggagatctcagactccgacgctgaggactccgccggctcggaggccgccgcgagagcccgggacccagcgggtgagcgcagggcggctgccgaggcgttgcggctgctgcggccggagcaggtcctgaagcgcctcgcggtgtgcgtggacacagccatcctggaagacgccggtgccgacgtcctgatggaggccctggaggccctgggctgcgagtgccgcatcgagccccagcgcccggcccgcagcctgcggtggacccgagcgagtcccgacccctgcccccgcagcctgcctcctgaagtgtgggctgcaggtgaacaggaattgctgctgctgctggagcccgaggagtttctgcagggcgtcgccacactgacccagatctctggcccaacccactgggtgccctggatctcccccgagaccaccgcccggccccacctggctgtcatcgggctggatgcctacctgtggtctcgccagcacgtttcccgggggacacagcagccagagagcccgaaggtggccggtgccgaggtggccgtcagctggccggaggtggaagaggtgagggcctgtctgagctgggccctggtactcctgcagctctgggcaaacctggacgtgctactggtggcctcttggcaggagctgagtcggcacgtgtgcgccgttaccaaggctctcgcccagtatcccctcaagtgcgtgatgccaaggctgaaggggggcaggatcacctcaaggcagtaccgggaatcccaggccttctccttctgcacagcagggcgctgggcagccggcgagccagtggcaagagacggcgcagggctgcaggcggcctggcggaggcagatcaggcagttcagtcgggtcagcccagccgtggctgatgcagttgtcacagccttcccctccccccgccttctgcagcaggcgctggaggcctgcagcacggagcgggagcgcatgggcctcctggccgtggggcctgacctctcccgccgcatctgcctcttcctgaccacagccaaccctgatctcctgctggacctgggctcctga

SEQ ID NO: 9825 - DNA, 4649 bp, Homo sapiens
  source 1..4649: mol_type = unassigned DNA
agtgagcgtggcggccatcttcgtcttctgggcacgtcagctgagccggttagggctgaagaggagcgttgcgcaagcgcacccaagacggtcacaggtaactcccatctgacgagcgaggcgtcgccgtcgtcgccggaagtttggtgtttgcgccgcgggggaggcggcggccgcagcagaagcagctgagtgtctcctgatacccggatgtgaggcgatccgctggcgctagtctgaccctccgccaggcaaaaggaagattgtctttggctatagagtttttttttttaaagattactaaacatacaggaagtgataagaagtatcattcatcagaagcatcattcatcaatcaacttgaagaaaaaggtgatatattatttctttaaggtgctgtgtgatgtgttaagagcatattagaaggaatggttttgtctaattttcttcatgagttatggtggctgagacatcgagtctatattttggggcaaaaactaaacggcagcacaaaaggaaatctatattaatagaatattttgttgaacaaaggaggttagataagaactgcaaaccaacagactcagcaaacaaggaaagaaacgtgttagccataagacatgtttcaagtgaatcgaagtccaataactgtagacttcagaagaaaaaagttttcaaaaattttatcaaaacaggtcactgataaataactcctccagtaatagagctaggcctgaaaccaaaattaattaaaaaattaacaaaacagattgaacctgaattaaatttcttttgataaaaaaacttattaaaaataatcaaaattttcctcaaatttttattaccttgtccaaagtaaagcaagtgtcttttagcattcatgccagcttttctcatgttctaggaatgacagaaaccttacttgaagcaaactagtatttttgttgaaaatgtatatcagcatcagttaaagttgatttttcagacctgctcctcagtaataatactagctagtcagcattcacgcctaccaggacacaaaaatcctcttcaaaactactcagaaaagaaagtcattactcaggaatgatgtccattcaggagaaatcaaaagagaattcctccaaagttactaaaaaaagtgacgataagaattcagaaacagaaattcaggattctcaaaagaatctagcaaaaaaatcaggtccaaaggagactataaaatcacaggctaaatcttccagtgaaagtaaaataaatcagccagaattggaaacacgcatgagtacaaggtcatcaaaggcagcatctaatgataaagctactaaatccattaataaaaatacggtgactgtgaggggatattcacaagaatctacaaaaaagaaattatctcagaaaaaattagtacatgaaaaccctaaagcaaatgaacagcttaaccggagatcacaaaggctacaacaattaacagaggtttcaagaaggtcgttacgcagtagagaaattcagggtcaagttcaagcagttaaacagagtttgccaccaactaaaaaagagcagtgtagcagtactcagagtaaatctaataaaacaagtcaaaaacatgtgaagagaaaagtactggaagtaaagtctgactctaaagaagatgaaaatctagtaattaatgaagtaataaattctcccaaagggaaaaaacgcaaggtagaacatcagacagcttgtgcttgtagttctcaatgcacgcaaggatctgaaaagtgtcctcagaagactactagaagagacgaaacgaaacctgtgcctgtaacttctgaggtgaaaagatcaaaaatggctacttcagtggtcccgaaaaagaatgagatgaagaagtcggttcatacacaagtgaatactaacacaacactcccaaaaagtccacagccatcagtgcctgaacaaagtgataatgagctggagcaagcaggaaagagcaaacgaggtagtattctccagctctgtgaagaaattgctggtgaaattgagtcagataatgtagaggtaaaaaaggaatcttcacaaatggaaagtgtaaaggaagaaaagcccacagaaataaaattggaagagaccagtgttgaaagacaaatacttcatcagaaggaaacaaatcaggatgtgcaatgtaatcgttttttcccaagtagaaaaacaaagcctgtgaaatgtatactaaatggaataaacagctcagccaagaagaactccaactggactaaaattaaactctcaaaatttaactctgtgcagcacaataagttggactctcaagtttcccctaaattaggcttattacgaaccagtttttcaccaccagctttagaaatgcatcatccagtgactcaaagtacgtttttagggacaaagctacatgatagaaatataacttgccagcaggaaaaaatgaaagaaattaattctgaagaagtgaaaattaatgatattacagtagaaattaataaaaccacagaaagggctcctgaaaattgtcatttggccaatgagataaaaccttctgacccaccattggataatcagatgaaacattcttttgattcagcatcaaataagaatttcagccaatgtttggaatccaagctagaaaacagtccagtggaaaatgttactgctgcttcgactctgctcagtcaagcaaaaattgatacaggagagaataaatttccaggttcagctccccaacagcatagtattctcagtaaccagacatctaaaagcagtgataacagggagacaccacgaaatcattctttgcctaagtgtaattcccatttggagataacaattccaaaggacttgaaactaaaagaagcagagaaaactgatgaaaaacagttgattatagatgcaggacaaaaaagatttggagcagtttcttgtaatgtttgtggaatgctgtatacagcttcaaatccagaagatgaaacacagcatctgcttttccacaaccagtttataagtgctgttaaatatgtgggctggaagaaagaaagaattctggctgaataccctgatggcaggataataatggttcttcctgaagacccaaagtatgccctgaaaaaggttgacgagattagagagatggttgacaatgatttaggttttcaacaggctccactaatgtgctattccagaactaaaacacttctcttcatttccaatgacaaaaaagtagttggctgcctaattgcggaacatatccaatggggctacagagttatagaagagaaacttccagttatcaggtcagaagaagaaaaagtcagatttgaaaggcaaaaagcctggtgctgctcaacattaccagagcctgcaatctgcgggatcagtcgaatatgggtattcagcatgatgcgtcggaagaaaattgcttctcgcatgattgaatgcctaaggagtaactttatatatggctcatatttgagcaaagaagaaattgctttctcagatcccactcctgatggaaagctgtttgcaacacagtactgtggcactggtcaatttctggtatataattttattaatggacagaatagcacgtaaaacaaattcttgcctacaccactagaagacatctattgaagagaatggattggttgctgactttaaccaggaactagggccatttttattacaatgaactcaggactggcaacaaccatatggttgttccattttcataaaattggaaacaatgcagtaatagcttattgttttgttttttaaagaagatattttattatcttttacagaaatttatgattgatgtattttatctatagttatttagacatgtttacatgcagcagataattgttcatagtggactgaaaactaatgcaaggactatggtctcagtgataagtatattttgaagttcttaatatggaaatataccagtgtagcttggtactgtatttttttatattgatctgctgataccagtgataggcttaaagattgtattttcacagagtggaaaccaatttttttagttattgttcaaggagggtgcaatattaagtgttttggaatttgaagctaatttttaaaaggcctgaactatactttgaagaaacccctatagaaaaggaaagctccagctaaataggaagaattagaatattgagcttttttttcctgatttttctctttcctatctttgatggaaggaggaagtagaaagtggtaaagaattgaggctttccttcttggagagctgtaaatgacaagcattaggaaaggtaccctcctagattcattattctttcattctggtttcacttttaaaataaatggcaacttggcacacctaggctgttaacaaatctcaaagaggtttataaaaacgtatagaatacttggaagcaaagtatggatgactcggtatctgctttgttattcctcagaaatactgcactgagtatatgccctcattactggacttcattttgatacttgtctatccttcatagtgccctctacttttaaagggtttatatgttgaaaaactgctgtggccttttatgacctgtatataatgtagaataaaaataataaaatacttgatagctttttctaag

SEQ ID NO: 9826 - DNA, 4773 bp, Homo sapiens
  source 1..4773: mol_type = unassigned DNA
agtgagcgtggcggccatcttcgtcttctgggcacgtcagctgagccggttagggctgaagaggagcgttgcgcaagcgcacccaagacggtcacaggtaactcccatctgacgagcgaggcgtcgccgtcgtcgccggaagtttggtgtttgcgccgcgggggaggcggcggccgcagcagaagcagctgagtgtctcctgatacccggatgtgaggcgatccgctggcgctagtctgaccctccgccaggcaaaaggaagattgtctttggctatagagtttttttttttaaagattactaaacatacaggaagtgataagaagtatcattcatcagaagcatcattcatcaatcaacttgaagaaaaaggtgatatattatttctttaaggtgctgtgtgatgtgttaagagcatattagaaggaatggttttgtctaattttcttcatgagttatggtggctgagacatcgagtctatattttggggcaaaaactaaacggcagcacaaaaggaaatctatattaatagaatattttgttgaacaaaggaggttagataagaactgcaaaccaacagactcagcaaacaaggaaagaaacgtgttagccataagacatgtttcaagtgaatcgaagtccaataactgtagacttcagaagaaaaaagttttcaaaaattttatcaaaacaggtcactgataaataactcctccagtaatagagctaggcctgaaaccaaaattaattaaaaaattaacaaaacagattgaacctgaattaaatttcttttgataaaaaaacttattaaaaataatcaaaattttcctcaaatttttattaccttgtccaaagtaaagcaagtgtcttttagcattcatgccagcttttctcatgttctaggaatgacagaaaccttacttgaagcaaactagtatttttgttgaaaatgtatatcagcatcagttaaagttgatttttcagacctgctcctcagtaataatactagctagtcagcattcacgcctaccaggacacaaaaatcctcttcaaaactactcagaaaagaaagtcattactcaggaatgatgtccattcaggagaaatcaaaagagaattcctccaaagttactaaaaaaagtgacgataagaattcagaaacagaaattcaggattctcaaaagaatctagcaaaaaaatcaggtccaaaggagactataaaatcacaggctaaatcttccagtgaaagtaaaataaatcagccagaattggaaacacgcatgagtacaaggtcatcaaaggcagcatctaatgataaagctactaaatccattaataaaaatacggtgactgtgaggggatattcacaagaatctacaaaaaagaaattatctcagaaaaaattagtacatgaaaaccctaaagcaaatgaacagcttaaccggagatcacaaaggctacaacaattaacagaggtttcaagaaggtcgttacgcagtagagaaattcagggtcaagttcaagcagttaaacagagtttgccaccaactaaaaaagagcagtgtagcagtactcagagtaaatctaataaaacaagtcaaaaacatgtgaagagaaaagtactggaagtaaagtctgactctaaagaagatgaaaatctagtaattaatgaagtaataaattctcccaaagggaaaaaacgcaaggtagaacatcagacagcttgtgcttgtagttctcaatgcacgcaaggatctgaaaagtgtcctcagaagactactagaagagacgaaacgaaacctgtgcctgtaacttctgaggtgaaaagatcaaaaatggctacttcagtggtcccgaaaaagaatgagatgaagaagtcggttcatacacaagtgaatactaacacaacactcccaaaaagtccacagccatcagtgcctgaacaaagtgataatgagctggagcaagcaggaaagagcaaacgaggtagtattctccagctctgtgaagaaattgctggtgaaattgagtcagataatgtagaggtaaaaaaggaatcttcacaaatggaaagtgtaaaggaagaaaagcccacagaaataaaattggaagagaccagtgttgaaagacaaatacttcatcagaaggaaacaaatcaggatgtgcaatgtaatcgttttttcccaagtagaaaaacaaagcctgtgaaatgtatactaaatggaataaacagctcagccaagaagaactccaactggactaaaattaaactctcaaaatttaactctgtgcagcacaataagttggactctcaagtttcccctaaattaggcttattacgaaccagtttttcaccaccagctttagaaatgcatcatccagtgactcaaagtacgtttttagggacaaagctacatgatagaaatataacttgccagcaggaaaaaatgaaagaaattaattctgaagaagtgaaaattaatgatattacagtagaaattaataaaaccacagaaagggctcctgaaaattgtcatttggccaatgagataaaaccttctgacccaccattggataatcagatgaaacattcttttgattcagcatcaaataagaatttcagccaatgtttggaatccaagctagaaaacagtccagtggaaaatgttactgctgcttcgactctgctcagtcaagcaaaaattgatacaggagagaataaatttccaggttcagctccccaacagcatagtattctcagtaaccagacatctaaaagcagtgataacagggagacaccacgaaatcattctttgcctaagtgtaattcccatttggagataacaattccaaaggacttgaaactaaaagaagcagagaaaactgatgaaaaacagttgattatagatgcaggacaaaaaagatttggagcagtttcttgtaatgtttgtggaatgctgtatacagcttcaaatccagaagatgaaacacagcatctgcttttccacaaccagtttataagtgctgttaaatatgtggttctgctcattaatcaccacgagtgtggatctgaagaagagtttattacctctctttttttgagtatgtttaacttcagatacacacaacgtagcttctccttccctattagattcttagaagggctggaagaaagaaagaattctggctgaataccctgatggcaggataataatggttcttcctgaagacccaaagtatgccctgaaaaaggttgacgagattagagagatggttgacaatgatttaggttttcaacaggctccactaatgtgctattccagaactaaaacacttctcttcatttccaatgacaaaaaagtagttggctgcctaattgcggaacatatccaatggggctacagagttatagaagagaaacttccagttatcaggtcagaagaagaaaaagtcagatttgaaaggcaaaaagcctggtgctgctcaacattaccagagcctgcaatctgcgggatcagtcgaatatgggtattcagcatgatgcgtcggaagaaaattgcttctcgcatgattgaatgcctaaggagtaactttatatatggctcatatttgagcaaagaagaaattgctttctcagatcccactcctgatggaaagctgtttgcaacacagtactgtggcactggtcaatttctggtatataattttattaatggacagaatagcacgtaaaacaaattcttgcctacaccactagaagacatctattgaagagaatggattggttgctgactttaaccaggaactagggccatttttattacaatgaactcaggactggcaacaaccatatggttgttccattttcataaaattggaaacaatgcagtaatagcttattgttttgttttttaaagaagatattttattatcttttacagaaatttatgattgatgtattttatctatagttatttagacatgtttacatgcagcagataattgttcatagtggactgaaaactaatgcaaggactatggtctcagtgataagtatattttgaagttcttaatatggaaatataccagtgtagcttggtactgtatttttttatattgatctgctgataccagtgataggcttaaagattgtattttcacagagtggaaaccaatttttttagttattgttcaaggagggtgcaatattaagtgttttggaatttgaagctaatttttaaaaggcctgaactatactttgaagaaacccctatagaaaaggaaagctccagctaaataggaagaattagaatattgagcttttttttcctgatttttctctttcctatctttgatggaaggaggaagtagaaagtggtaaagaattgaggctttccttcttggagagctgtaaatgacaagcattaggaaaggtaccctcctagattcattattctttcattctggtttcacttttaaaataaatggcaacttggcacacctaggctgttaacaaatctcaaagaggtttataaaaacgtatagaatacttggaagcaaagtatggatgactcggtatctgctttgttattcctcagaaatactgcactgagtatatgccctcattactggacttcattttgatacttgtctatccttcatagtgccctctacttttaaagggtttatatgttgaaaaactgctgtggccttttatgacctgtatataatgtagaataaaaataataaaatacttgatagctttttctaag

SEQ ID NO: 9827 - DNA, 3922 bp, Homo sapiens
  source 1..3922: mol_type = unassigned DNA
agatttttcacctcaccagggcgcgagaatcttggaaacagccaccagggtgggcggggcaagggctggtgctccaccaatcaccgagccagcccctggaagcgctgagccgtggccaatcggaacgcagcggcttcctcctagcctggcgcgcgattatttgaagacgctcacggagcggctggctaggctgaggagagctcgccgggctctgaggcgcaggaattcaataaagaaaatggcagctcttactccaaggaagaggaagcaggattctttgaagtgtgacagccttttacacttcactgaaaatctgtttccatcacctaataaaaagcactgtttttatcaaaacagtgataaaaatgaagaaaacctgcattgctctcaacaagagcattttgttttaagtgcgctcaaaacaactgaaataaatagactgccatcagcaaatcaaggctcaccatttaaatctgcgctctccactgtatctttttacaaccaaaataagtggtacctcaatccactggagagaaagctgataaaagagagtagatctacttgtctaaaaactaatgatgaagataaatcttttcccattgtgacagaaaaaatgcaaggaaaaccagtctgctccaagaagaacaacaaaaaaccacagaagagtttaactgctaagtatcaaccaaagtatagacacatcaagcctgtatcaaggaattctagaaattccaagcaaaatcgagtgatctataagccaattgtggagaaggaaaataattgtcattcagctgaaaataattccaatgctcctcgggttctgagccaaaaaataaaaccacaagttacactccagggtggagcagcattttttgttagaaaaaaatcttctcttagaaaatcgtccctggaaaatgagccgtcactgggacgcacccaaaagagtaaatcagaagtcattgaagattctgatgtagagactgtcagtgaaaaaaaaacttttgcgacaaggcaagtgccaaagtgcttggtcctagaagagaaattgaaaattggactactgagtgcaagcagtaaaaataaagagaaattaataaaggattcatcagatgacagagtttcttcaaaggaacataaagttgataaaaatgaggctttttcttcagaggattctcttggtgagaataagacaatttctcctaagtccactgtctatccaatcttcagtgcatcttcagtcaattcaaaaagatctttaggtgaagaacagttttctgtgggatctgtcaacttcatgaaacagaccaatatccagaaaaatactaataccagagatacaagtaaaaaaacaaaagaccagctcatcatcgacgctggtcagaaacattttggggctactgtgtgcaagtcttgtggtatgatatatactgcttccaaccctgaagatgaaatgcagcatgtacagcatcaccacaggtttctggaaggaatcaaatatgtgggttggaagaaagaacgtgtagtagcagagttttgggatgggaaaatcgtgttggttctgccacatgatccaagctttgctatcaaaaaggtagaagatgtccaagaacttgttgataatgaattgggcttccagcaagttgttcctaaatgtccaaacaaaataaaaacttttctttttatatctgatgaaaagagagtagttgggtgtttaattgcagaacccatcaaacaggcatttcgtgtcctgtctgaaccaattggtccagaatccccaagctctacggaatgtcctagggcttggcaatgttcagatgtaccagaacctgcagtctgtgggataagtagaatctgggttttcagactgaagagaagaaagcgcattgcaagacgactggttgataccctcaggaattgcttcatgtttggctgttttctcagcactgatgaaatagcattttctgacccaacaccagatggcaagttatttgcaaccaagtactgcaacacccctaatttcctcgtatataattttaatagttaaagctgatttcagttataaaggagttactatctggataagttcaaagagctccttattataaaatacaaactatttaatatcaaaataaaaaataccgagactcacactcatacacacacacacacacacgcacacacacatatcacagttttgttccttatgagttgaaaagtcaggaataaatttgttgaaaattatctggggattcaaaggaaaaatctttgggtgattccctgattagcactctgaatgtttaattatgaaactttgtagctataactggaaaattacctgactctttgtaagagtattaaatacaaagtgatttttctctagaaatgtgacctggtcttttataaagcccactcttagaccaggattatctaatgccacatcagaagcaaacaggcaaatttaaacttgggcaagtaatttctgtgcccaatttgtaaagggaattcctgaatttttttttttttttaatagaggcatgggtctcactgtgttgcccaggctggtctgaaacttttgggctcaagcgatcctcccaaaacgctgggattacagtcatgagccaccgtgcccagcctaattcctgacttctctatacagagtcttcacttgataggcactcgtctgtagtaactcagtttgaatatctttagaaaatgtttagaatttatttgtaacaagatggtaaggaataagattatcccatatgcatttctgtagagcagaatttgatagcttagtgttcaatctttttgaaaataaatgtttacctgtcatcagatttaattaaaattatacttagtaattgcactattacttagttaatttttgttgtatggaaatattggtagtactactttgggaacctgttactgacaattgatgtcattaacaaaatgcctagttggattagatgttttcattttctaattttttgcttgtttaaaatgcaccttacttgttctgagatacctggcaaaagtctttacaaaatgtatggtaatagaaccaaggttagtaaatatacataggctggtggatgagagaccatggaactgtgtaaatacacttaaatgttcacacatttttctagtgtaattcttggatactttaaaaagcaaaacattgttcaaattgttttgattctgaaaaatcattcaactgctaactggcaataagactctaggcaagtcgttttccagattgtaattatatgtagaaactattcatctgcattcattttatttgcctgtaagttaacatgtttccaaaatttaaaagcctgggtccccaaaagaatgtggaagtattaaaatgtatgtaattatgcaaacattttaatgctattttctgcacttatttcttttaaatattttatttaaaatttttaattaacattttgtttgcttaatgcttttgttatgaatcaattaaaattctttattttatacaactaaatctgattttaattattttattatgaaaatagtatatgttaaataaaattcagataatacagaaatagagattgccaaaagaagaggcttcccggccgggcgcggtggctcacgcctgtaatcccagcactttgggaggccgaggcgggtggatcatgaggtcaggagatcgagaccatcctggctaacaaggtgaaaccccgtctctactaaaaatacaaaaaattagccgggcgcggtggcgggcgcctgtagtcccagctactcgggaggctgaggcaggagaatggcgtgaacccgggaggcgagcttgcagtgagccgagattgcgccactgcagtccgcagtccggcctgggcgacagagcgagactccgtctcaaaaaaaaaaaaaaaaaaaaaaaaaaaaa

SEQ ID NO: 9828 - DNA, 2487 bp, Homo sapiens
  source 1..2487: mol_type = unassigned DNA
gctcacggagcggctggctaggctgaggagagctcgccgggctctgaggcgcaggaattcaataaagaaaatggcagctcttactccaaggaagaggaagcaggattctttgaagtgtgacagccttttacacttcactgaaaatctgtttccatcacctaataaaaagcactgtttttatcaaaacagtgataaaaatgaagaaaacctgcattgctctcaacaagagcattttgttttaagtgcgctcaaaacaactgaaataaatagactgccatcagcaaatcaaggctcaccatttaaatctgcgctctccactgtatctttttacaaccaaaataagtggtacctcaatccactggagagaaagctgataaaagagagtagatctacttgtctaaaaactaatgatgaagataaatcttttcccattgtgacagaaaaaatgcaaggaaaaccagtctgctccaagaagaacaacaaaaaaccacagaagagtttaactgctaagtatcaaccaaagtatagacacatcaagcctgtatcaaggaattctagaaattccaagcaaaatcgagtgatctataagccaattgtggagaaggaaaataattgtcattcagctgaaaataattccaatgctcctcgggttctgagccaaaaaataaaaccacaagttacactccagggtggagcagcattttttgttagaaaaaaatcttctcttagaaaatcgtccctggaaaatgagccgtcactgggacgcacccaaaagagtaaatcagaagtcattgaagattctgatgtagagactgtcagtgaaaaaaaaacttttgcgacaaggcaagtgccaaagtgcttggtcctagaagagaaattgaaaattggactactgagtgcaagcagtaaaaataaagagaaattaataaagatctttaggtgaagaacagttttctgtgggatctgtcaacttcatgaaacagaccaatatccagaaaaatactaataccagagatacaagtaaaaaaacaaaagaccagctcatcatcgacgctggtcagaaacattttggggctactgtgtgcaagtcttgtggtatgatatatactgcttccaaccctgaagatgaaatgcagcatgtacagcatcaccacaggtttctggaaggaatcaaatatgtgggttggaagaaagaacgtgtagtagcagagttttgggatgggaaaatcgtgttggttctgccacatgatccaagctttgctatcaaaaaggtagaagatgtccaagaacttgttgataatgaattgggcttccagcaagttgttcctaaatgtccaaacaaaataaaaacttttctttttatatctgatgaaaagagagtagttgggtgtttaattgcagaacccatcaaacaggcatttcgtgtcctgtctgaaccaattggtccagaatccccaagctctacggaatgtcctagggcttggcaatgttcagatgtaccagaacctgcagtctgtgggataagtagaatctgggttttcagactgaagagaagaaagcgcattgcaagacgactggttgataccctcaggaattgcttcatgtttggctgttttctcagcactgatgaaatagcattttctgacccaacaccagatgattgtagaagattaaataggtaccaggagacatgaaagaatcatcttcaacatttctcaagtagctgctgattatctccttttatggaggcataacaagctcctggaggcttctacagattctaaagggaaagatttcctgggaggttggtaaatattcaagaagctggtcagttggcagctgttttatagattccttgggattttctacctaaacaacatatcaactgcaaacggggacagtttcgtctcctttccaattttgccttctccattttcttgccttattttagtggctagggctataggactgctaaataaaactggcaagagcaggcatcctggtcttgttccctacttcagtatgatacctgcaggtttttcttgtagacagcctttttcaagctaagatcccttctatttctagttagctgagaggttaactagattttaaactaacttttaaatcaagaatggatgttggattttgtcaaacactttttcggtatctattgagatatgtagttttcaaatttgattaaagacttaaatgttggacctaaaaccataaaaaccctagaagaaaacctaggcaataccattcaggacataggcatgggcaacgacttcatgattaaaacaccaaaagcaatggcagcaaaagccaaaacagacaaatgggatctaattaaagagcttctgcacagcaaaagaaagtaccatcaaagtgaacaggcaacctacagaatgggagaacatttttgcaatcgacctatctgacaaagggctaatatccagaatctacaaagaactcaaacaaatttacaag

SEQ ID NO: 9829 - DNA, 1192 bp, Homo sapiens
  source 1..1192: mol_type = unassigned DNA
aaagcgagagtgagtgggaccggaggggcggggcatcatatgggcggggctgaggcgaggccccggcggccatcttgagccccgccttttacttcggcccgcttcttctggtcactccgccaccgtagaatcgcctaccatttggtgcaagcaaaaagcaatcagcaattggacaggaaaagaatggcattgaagcagatttccagcaacaagtgctttgggggattgcagaaagtttttgaacatgacagtgttgaactaaactgcaaaatgaaatttgctgtctacttaccaccaaaggcagaaacaggaaagtgccctgcactgtattggctctcaggtttaacttgcacagagcaaaattttatatcaaaatctggttatcatcagtctgcttcagaacatggtcttgttgtcattgctccagataccagccctcgtggctgcaatattaaaggtgaagatgagagctgggactttggcactggtgctggattttatgttgatgccactgaagatccttggaaaaccaactacagaatgtactcttatgtcacagaggagcttccccaactcataaatgccaattttccagtggatccccaaaggatgtctatttttggccactccatgggaggtcatggagctctgatctgtgctttgaaaaatcctggaaaatacaaatctgtgtcagcatttgctccaatttgcaaccctgtactctgtccctggggcaaaaaagcctttagtggatatttgggaacagatcaaagtaaatggaaggcttatgatgctacccaccttgtgaaatcctatccaggatctcagctggacatactaattgatcaagggaaagatgaccagtttcttttagatggacagttactccctgataacttcatagctgcctgtacagaaaagaaaatccccgttgtttttcgattgcaagagggttatgatcatagctactacttcattgcaacctttattactgaccacatcagacatcatgctaaatacctgaatgcatgaaaaaactccaaataagagaatctcttcaggattataaaagttgtaaaatgcaactgtattgctgagcaaaaaaaaaaaaaattcaaaacattggattttatagtgctaaaagggctttattctatagttgaatcacctctgaataaagatataaaaccta

SEQ ID NO: 9830 - DNA, 2379 bp, Homo sapiens
  source 1..2379: mol_type = unassigned DNA
gtgcagcattcgccatgctccgctcacgcgtgggagactgggctgtggggtaccggcccggaaagcacgcagcctccaaagccgccttcctcagggaaatttgcgtgaccttactgccctccgtctacaggccttgtacctctccaggccgatttttccacaatttaaatctcagttcacctggtatccagctccagcaacttagagcgtttcacgtcacgccgggcgccaggcgtcggcttgtataacctgaaaacgctcctgtttttctcatctgtgcagtgggttttgattcccaccatggccatcacccagtttcggttatttaaattttgtacctgcctagcaacagtattctcattcctaaagagattaatatgcagatctggcagaggacggaaattaagtggagaccaaataactttgccaactacagttgattattcatcagttcctaagcagacagatgttgaagagtggacttcctgggatgaagatgcacccaccagtgtaaagatcgaaggagggaatgggaatgtggcaacacaacaaaattctttggaacaactggaacctgactattttaaggacatgacaccaactattaggaaaactcagaaaattgttattaagaagagagaaccattgaattttggcatcccagatgggagcacaggtttctctagtagattagcagctacacaagatctgccttttattcatcagtcttctgaattaggtgacttagatacctggcaggaaaataccaatgcatgggaagaagaagaagatgcagcctggcaagcagaagaagttctgagacagcagaaactagcagacagagaaaagagagcagccgaacaacaaaggaagaaaatggaaaaggaagcacaacggctaatgaagaaggaacaaaacaaaattggtgtgaaactttcataacacatgttcaaattttatcatgccagtaggagaaatctcagctccacaacccaagcaacatttgtatggatttaagagtattttaagaagacatactgcttgattttaatacattgatcaggccatccaggacaccacgattctcccaaagtaccttgaactcttagtgattgagactcaaaaaaacaaaaaagacttgagacaatgttttcttcaacatgctccaaatataagacatttgtttgctgtacagaaagtatcacaaatggaatatatcagtacctctcaagctagtgtttctagctaaataaatgggtgtatataattttatggtggaaaagaactgtactgtctgttatgatttccttcaatgtgcataatgataaaataaataattttaatattcttttgtttccatggttacctgacctaaattagataaattgtagggctttagctttcttatttttgtcaaaagttggtgttgacatacattccctctaatttgaactggtattgtttacgtttgatacaacattaaggaatttgatgattttcatttcatgaaaatgacattaaatgcaataattttacttatcataaacattttgtacatcattattttcttttggattagtgttgtcatacatgtaatttatatcacatgtataaacattgaaaatcaactaaaatgacatttgttctacattataacttgtgagtttcaagaactagtattagtagttttttcctttcattatagattgtaagatgttgtggtatctttgagtgccttagttcttccttcctcccaaaagccattaatttacaaatgcttaaagccatcaggtcaaatatttcaaagcctttagatgatttctgtactagctttagatgtctgacgttatgtaggttacctgtgttcttggctaggaaaacattattgattcattaaatcataaaggtgggaataataatcttttatttatgatgttgattggctccaaaatagtcttaaggaaataaatactgggtctgtaggggaaaagtagacttcatagtttaaaatcccattaaccttttcaccgcagttgaaatgcatccagcctgattttcctatcattttggaatttttaaggatttttactttcttaagttactgcctagaatcaacattcggtgagattttgaaatgtcatagatactgtacaggccaaaccttactaatttattttacttaaagtgatattttatagaaaaatcataagttatacaatgagaaccctttaagcccttagcctaagctttcagactaaatgtgattatagaataagatgaaagttaactttggtacagagctttttatagccccaaattatatttccagttattatattcattagaatttctgctaataaactcccaacttaaatagaa

SEQ ID NO: 9831 - DNA, 1467 bp, Homo sapiens
  source 1..1467: mol_type = unassigned DNA
gatgaaggggcggccatggcagctgcgcagaggcaacgcaggctgctacggagcgcgcgcccggctttgaatgagcggggctgggagtgagcgggcggagcgcgagctcgaggaagagacaggcagcgcgcgtgagcgcgccttgtgtgcgcgcgcggcccgcggcagctcggagcctccgccgggcgggcggggagggggaggggcaggttttgattcccaccatggccatcacccagtttcggttatttaaattttgtacctgcctagcaacagtattctcattcctaaagagattaatatgcagatctggcagaggacggaaattaagtggagaccaaataactttgccaactacagttgattattcatcagttcctaagcagacagatgttgaagagtggacttcctgggatgaagatgcacccaccagtgtaaagatcgaaggagggaatgggaatgtggcaacacaacaaaattctttggaacaactggaacctgactattttaaggacatgacaccaactattaggaaaactcagaaaattgttattaagaagagagaaccattgaattttggcatcccagatgggagcacaggtttctctagtagattagcagctacacaagatctgccttttattcatcagtcttctgaattaggtgacttagatacctggcaggaaaataccaatgcatgggaagaagaagaagatgcagcctggcaagcagaagaagttctgagacagcagaaactagcagacagagaaaagagagcagccgaacaacaaaggaagaaaatggaaaaggaagcacaacggctaatgaagaaggaacaaaacaaaattggtgtgaaactttcataacacatgttcaaattttatcatgccagtaggagaaatctcagctccacaacccaagcaacatttgtatggatttaagagtattttaagaagacatactgcttgattttaatacattgatcaggccatccaggacaccacgattctcccaaagtaccttgaactcttagtgattgagactcaaaaaaacaaaaaagacttgagacaatgttttcttcaacatgctccaaatataagacatttgtttgctgtacagaaagtatcacaaatggaatatatcagtacctctcaagctagtgtttctagctaaataaatgggtgtatataattttatggtggaaaagaactgtactgtctgttatgatttccttcaatgtgcataatgataaaataaataattttaatattcttttgtttccatggttacctgacctaaattagataaattgtagggctttagctttcttatttttgtcaaaagttggtgttgacatacattccctctaatttgaactggtattgtttacgtttgatacaacattaaggaatttgatgattttcatttcatgaaaatgacattaaatgcaataattttacttatcat

SEQ ID NO: 9832 - DNA, 706 bp, Homo sapiens
  source 1..706: mol_type = unassigned DNA
atggcacagaatgttcgattttactaccagctctcacactccgcttctgtttccccttctcttacgggccgctgctcaaacctttatttatcaaatttaagttttgattcccaccatggccatcacccagtttcggttatttaaattttgtacctgcctagcaacagtattctcattcctaaagagattaatatgcagatctggcagaggacggaaattaagtggagaccaaataactttgccaactacagttgattattcatcagttcctaagcagacagatgttgaagagtggacttcctgggatgaagatgcacccaccagtgtaaagatcgaaggagggaatgggaatgtggcaacacaacaaaattctttggaacaactggaacctgactattttaaggacatgacaccaactattaggaaaactcagaaaattgttattaagaagagagaaccattgaattttggcatcccagatgggagcacaggtttctctagtagattagcagctacacaagatctgccttttattcatcagtcttctgaattaggtgacttagatacctggcaggaaaataccaatgcatgggaagaagaagaagatgcagcctggcaagcagaagaagttctgagacagcagaaactagcagacagagaaaagagagcagccgaacaacaaaggaagaaaatggaaaaggaagca

SEQ ID NO: 9833 - DNA, 777 bp, Homo sapiens
  source 1..777: mol_type = unassigned DNA
atggccatcacccagtttcggttatttaaattttgtacctgcctagcaacagtattctcattcctaaagagattaatatgcagatctggcagaggacggaaattaagtggagaccaaataactttgccaactacagttgattattcatcagttcctaagcagacagatgttgaagagtggacttcctgggatgaagatgcacccaccagtgtaaagatcgaaggagggaatgggaatgtggcaacacaacaaaattctttggaacaactggaacctgactattttaaggacatgacaccaactattaggaaaactcagaaaattgttattaagaagagagaaccattgaattttggcatcccagatgggagcacaggtttctctagtagattagcagctacacaagatctgccttttattcatcagtcttctgaattaggtgacttagatacctggcaggaaaataccaatgcatgggaagaagaagaagatgcagcctggcaagcagaagaagttctgagatccaggaccaatgtatgtttactctgctctctcctgtttcatcatcccactcctacctccactccctacattaaccaatcagtaaagatagagagagtgagtctgggtcagtggagttacggaaagagtaaggaacagcagaaactagcagacagagaaaagagagcagccgaacaacaaaggaagaaaatggaaaaggaagcacaacggctaatgaagaaggaacaaaacaaaattggtgtgaaactttcataa

SEQ ID NO: 9834 - DNA, 813 bp, Homo sapiens
  source 1..813: mol_type = unassigned DNA
ggtactcctaggtattggcatttctttaatagattcccagatttgtgaaccactggactaaatgagctccatggtaactttcaatttactagctatgtgactttggtcaagttatttgacctctcttaattcaatttcctcatctataaaatggatataaggaaatatattcatctgcaagttaaaaatatttaaagtattttaaatagtattatgttcatgtggttcaaactttaaaaggtacacagagatttaatatattctattttatacttttttattttttgaattgtagatttttgtattaatagatttaggtaaaattattttcaaaaactcagaatgaagggttttatccttacaaccattgaaaactcgaaaacctggtttttgacttgttaatatgatttaaattataattttaaaatttactgtgttatagtttctagagaaaggtaaaaaatatcttagatttttcttagtgcataataggtcttttcaggacaggagtatgacttttgaaatcaatttaatgcattttttgttttgtgcctcttccacaggttttgattcccaccatggccatcacccagtttcggttatttaaattttgtacctgcctagcaacagtattctcattcctaaagagattaatatgcagatctggcagaggacggaaattaagtggagaccaaataactttgccaactacagttgattattcatcagttcctaagcagacagatgttgaagagtggacttcctgggatgaagatgcacccaccagtgtaaagatcgaaggagggaatggga

SEQ ID NO: 9835 - DNA, 2215 bp, Homo sapiens
  source 1..2215: mol_type = unassigned DNA
aagcagccggcggcgccgccgagtgaggggacgcggcgcggtggggcggcgcggcccgaggaggcggcggaggaggggccgcccgcggcccccggctcactccggcactccgggccgctcggcccccatgcctgcccgaccgcgctgccggagccccaggtgaccagcgccatgtccagccaggtggtgggcattgagcctctctacatcaaggcagagccggccagccctgacagtccaaagggttcctcggagacagagaccgagcctcctgtggccctggcccctggtccagctcccactcgctgcctcccaggccacaaggaagaggaggatggggagggggctgggcctggcgagcagggcggtgggaagctggtgctcagctccctgcccaagcgcctctgcctggtctgtggggacgtggcctccggctaccactatggtgtggcatcctgtgaggcctgcaaagccttcttcaagaggaccatccaggggagcatcgagtacagctgtccggcctccaacgagtgtgagatcaccaagcggagacgcaaggcctgccaggcctgccgcttcaccaagtgcctgcgggtgggcatgctcaaggagggagtgcgcctggaccgcgtccggggtgggcggcagaagtacaagcggcggccggaggtggacccactgcccttcccgggccccttccctgctgggcccctggcagtcgctggaggcccccggaagacagcagccccagtgaatgcactggtgtctcatctgctggtggttgagcctgagaagctctatgccatgcctgaccccgcaggccctgatgggcacctcccagccgtggctaccctctgtgacctctttgaccgagagattgtggtcaccatcagctgggccaagagcatcccaggcttctcatcgctgtcgctgtctgaccagatgtcagtactgcagagcgtgtggatggaggtgctggtgctgggtgtggcccagcgctcactgccactgcaggatgagctggccttcgctgaggacttagtcctggatgaagagggggcacgggcagctggcctgggggaactgggggctgccctgctgcaactagtgcggcggctgcaggccctgcggctggagcgagaggagtatgttctactaaaggccttggcccttgccaattcagactctgtgcacatcgaagatgccgaggctgtggagcagctgcgagaagctctgcacgaggccctgctggagtatgaagccggccgggctggccccggagggggtgctgagcggcggcgggcgggcaggctgctgctcacgctaccgctcctccgccagacagcgggcaaagtgctggcccatttctatggggtgaagctggagggcaaggtgcccatgcacaagctgttcttggagatgctcgaggccatgatggactgaggcaaggggtgggactggtgggggttctggcaggacctgcctagcatggggtcagccccaagggctggggcggagctggggtctgggcagtgccacagcctgctggcagggccagggcaatgccatcagcccctgggaacaggccccacgccctctcctccccctcctagggggtgtcagaagctgggaacgtgtgtccaggctctgggcacagtgctgccccttgcaagccataacgtgcccccagagtgtagggggccttgcggaagccatagggggctgcacgggatgcgtgggaggcagaaacctatctcagggagggaaggggatggaggccagagtctcccagtgggtgatgcttttgctgctgcttaatcctaccccctcttcaaagcagagtgggacttggagagcaaaggcccatgcccccttcgctcctcctctcatcatttgcattgggcattagtgtccccccttgaagcaataactccaagcagactccagcccctggacccctggggtggccagggcttccccatcagctcccaacgagcctcctcagggggtaggagagcactgcctctatgccctgcagagcaataacactatatttatttttgggtttggccagggaggcgcagggacatggggcaagccagggcccagagcccttgactgtacagagactctattttaatgtatatttgctgcaaagagaaaccgcttttggttttaaacctttaatgagaaaaaaatatataataccgagctc

SEQ ID NO: 9836 - DNA, 2283 bp, Homo sapiens
  source 1..2283: mol_type = unassigned DNA
tagaggtctcccgcgggcggggagggggaggcgtagcaactttaggcaacttcccaaaggtgtgcgcaggttgggggcgggacgcggcgccccgggaggtggcggcctctgcgacagcgggagtataagagtggacctgcaggctggtcgcgaggaggtggagcggcgcccgccgtgtgcctgggaccggcatgctggggcaggagggcagccgcgtgtcaggtgaccagcgccatgtccagccaggtggtgggcattgagcctctctacatcaaggcagagccggccagccctgacagtccaaagggttcctcggagacagagaccgagcctcctgtggccctggcccctggtccagctcccactcgctgcctcccaggccacaaggaagaggaggatggggagggggctgggcctggcgagcagggcggtgggaagctggtgctcagctccctgcccaagcgcctctgcctggtctgtggggacgtggcctccggctaccactatggtgtggcatcctgtgaggcctgcaaagccttcttcaagaggaccatccaggggagcatcgagtacagctgtccggcctccaacgagtgtgagatcaccaagcggagacgcaaggcctgccaggcctgccgcttcaccaagtgcctgcgggtgggcatgctcaaggagggagtgcgcctggaccgcgtccggggtgggcggcagaagtacaagcggcggccggaggtggacccactgcccttcccgggccccttccctgctgggcccctggcagtcgctggaggcccccggaagacagcagccccagtgaatgcactggtgtctcatctgctggtggttgagcctgagaagctctatgccatgcctgaccccgcaggccctgatgggcacctcccagccgtggctaccctctgtgacctctttgaccgagagattgtggtcaccatcagctgggccaagagcatcccaggcttctcatcgctgtcgctgtctgaccagatgtcagtactgcagagcgtgtggatggaggtgctggtgctgggtgtggcccagcgctcactgccactgcaggatgagctggccttcgctgaggacttagtcctggatgaagagggggcacgggcagctggcctgggggaactgggggctgccctgctgcaactagtgcggcggctgcaggccctgcggctggagcgagaggagtatgttctactaaaggccttggcccttgccaattcagactctgtgcacatcgaagatgccgaggctgtggagcagctgcgagaagctctgcacgaggccctgctggagtatgaagccggccgggctggccccggagggggtgctgagcggcggcgggcgggcaggctgctgctcacgctaccgctcctccgccagacagcgggcaaagtgctggcccatttctatggggtgaagctggagggcaaggtgcccatgcacaagctgttcttggagatgctcgaggccatgatggactgaggcaaggggtgggactggtgggggttctggcaggacctgcctagcatggggtcagccccaagggctggggcggagctggggtctgggcagtgccacagcctgctggcagggccagggcaatgccatcagcccctgggaacaggccccacgccctctcctccccctcctagggggtgtcagaagctgggaacgtgtgtccaggctctgggcacagtgctgccccttgcaagccataacgtgcccccagagtgtagggggccttgcggaagccatagggggctgcacgggatgcgtgggaggcagaaacctatctcagggagggaaggggatggaggccagagtctcccagtgggtgatgcttttgctgctgcttaatcctaccccctcttcaaagcagagtgggacttggagagcaaaggcccatgcccccttcgctcctcctctcatcatttgcattgggcattagtgtccccccttgaagcaataactccaagcagactccagcccctggacccctggggtggccagggcttccccatcagctcccaacgagcctcctcagggggtaggagagcactgcctctatgccctgcagagcaataacactatatttatttttgggtttggccagggaggcgcagggacatggggcaagccagggcccagagcccttgactgtacagagactctattttaatgtatatttgctgcaaagagaaaccgcttttggttttaaacctttaatgagaaaaaaatatataataccgagctcaaaaa

SEQ ID NO: 9837 - DNA, 2218 bp, Homo sapiens
  source 1..2218: mol_type = unassigned DNA
tcctacaagcagccggcggcgccgccgagtgaggggacgcggcgcggtggggcggcgcggcccgaggaggcggcggaggaggggccgcccgcggcccccggctcactccggcactccgggccgctcggcccccatgcctgcccgaccgcgctgccggagccccaggtgaccagcgccatgtccagccaggtggtgggcattgagcctctctacatcaaggcagagccggccagccctgacagtccaaagggttcctcggagacagagaccgagcctcctgtggccctggcccctggtccagctcccactcgctgcctcccaggccacaaggaagaggaggatggggagggggctgggcctggcgagcagggcggtgggaagctggtgctcagctccctgcccaagcgcctctgcctggtctgtggggacgtggcctccggctaccactatggtgtggcatcctgtgaggcctgcaaagccttcttcaagaggaccatccaggggagcatcgagtacagctgtccggcctccaacgagtgtgagatcaccaagcggagacgcaaggcctgccaggcctgccgcttcaccaagtgcctgcgggtgggcatgctcaaggagggagtgcgcctggaccgcgtccggggtgggcggcagaagtacaagcggcggccggaggtggacccactgcccttcccgggccccttccctgctgggcccctggcagtcgctggaggcccccggaagacagccccagtgaatgcactggtgtctcatctgctggtggttgagcctgagaagctctatgccatgcctgaccccgcaggccctgatgggcacctcccagccgtggctaccctctgtgacctctttgaccgagagattgtggtcaccatcagctgggccaagagcatcccaggcttctcatcgctgtcgctgtctgaccagatgtcagtactgcagagcgtgtggatggaggtgctggtgctgggtgtggcccagcgctcactgccactgcaggatgagctggccttcgctgaggacttagtcctggatgaagagggggcacgggcagctggcctgggggaactgggggctgccctgctgcaactagtgcggcggctgcaggccctgcggctggagcgagaggagtatgttctactaaaggccttggcccttgccaattcagactctgtgcacatcgaagatgccgaggctgtggagcagctgcgagaagctctgcacgaggccctgctggagtatgaagccggccgggctggccccggagggggtgctgagcggcggcgggcgggcaggctgctgctcacgctaccgctcctccgccagacagcgggcaaagtgctggcccatttctatggggtgaagctggagggcaaggtgcccatgcacaagctgttcttggagatgctcgaggccatgatggactgaggcaaggggtgggactggtgggggttctggcaggacctgcctagcatggggtcagccccaagggctggggcggagctggggtctgggcagtgccacagcctgctggcagggccagggcaatgccatcagcccctgggaacaggccccacgccctctcctccccctcctagggggtgtcagaagctgggaacgtgtgtccaggctctgggcacagtgctgccccttgcaagccataacgtgcccccagagtgtagggggccttgcggaagccatagggggctgcacgggatgcgtgggaggcagaaacctatctcagggagggaaggggatggaggccagagtctcccagtgggtgatgcttttgctgctgcttaatcctaccccctcttcaaagcagagtgggacttggagagcaaaggcccatgcccccttcgctcctcctctcatcatttgcattgggcattagtgtccccccttgaagcaataactccaagcagactccagcccctggacccctggggtggccagggcttccccatcagctcccaacgagcctcctcagggggtaggagagcactgcctctatgccctgcagagcaataacactatatttatttttgggtttggccagggaggcgcagggacatggggcaagccagggcccagagcccttgactgtacagagactctattttaatgtatatttgctgcaaagagaaaccgcttttggttttaaacctttaatgagaaaaaaatatataataccgagctc

SEQ ID NO: 9838 - DNA, 742 bp, Homo sapiens
  source 1..742: mol_type = unassigned DNA
caggtgtgaaaagctctggaggtgttttcatgagtccgtgcctgtgcgtgtggatgtggggagacctagtgagagtgtgtgtgatcatgagccttgactgagttcgtggatggggtgtgcgctccaggagaagtgtgtgagcacaagtgtgagcaggagtgagcacgggtttgggaaggccggtgcaagtgtgaaagccctcagcagagagcgagcctgcgtgggcttgtggggctcctgagcaccccggtgagtggagtgtgtgaactcggtgtgagcacgtccactggccttgggtctgctctccaatgcagaatacccagatgagggcagggtctcagaggtccccccaacatctggagaaaactgggaagtatcctgctcctggctagggattccaggtgaccagcgccatgtccagccaggtggtgggcattgagcctctctacatcaaggcagagccggccagccctgacagtccaaagggttcctcggagacagagaccgagcctcctgtggccctggcccctggtccagctcccactcgctgcctcccaggccacaaggaagaggaggatggggagggggctgggcctggcgagcagggcggtgggaagctggtgctcagctccctgcccaagcgcctctgcctggtctgtggggacgtggcctccggctaccactatggtgtggcatcctgtgaggcctgcaaagccttcttcaagaggaccatccagggtga

SEQ ID NO: 9839 - DNA, 1794 bp, Homo sapiens
  source 1..1794: mol_type = unassigned DNA
tttaggccagaggtgatccagtgatttgggagctgcaggtcacacaggctgctcagagggctgctgaacaggatgtcctcggacgacaggcacctgggctccagctgcggctccttcatcaagactgagccgtccagcccgtcctcgggcatcgatgccctcagccaccacagccccagtggctcgtccgacgccagcggcggctttggcctggccctgggcacccacgccaacggtctggactcgccacccatgtttgcaggcgccgggctgggaggcaccccatgccgcaagagctacgaggactgtgccagcggcatcatggaggactcggccatcaagtgcgagtacatgctcaacgccatccccaagcgcctgtgcctcgtgtgcggggacattgcctctggctaccactacggcgtggcctcctgcgaggcttgcaaggccttcttcaagaggactatccaagggaacattgagtacagctgcccggccaccaacgagtgcgagatcaccaaacggaggcgcaagtcctgccaggcctgccgcttcatgaaatgcctcaaagtggggatgctgaaggaaggtgtgcgccttgatcgagtgcgtggaggccgtcagaaatacaagcgacggctggactcagagagcagcccatacctgagcttacaaatttctccacctgctaaaaagccattgaccaagattgtctcatacctactggtggctgagccggacaagctctatgccatgcctccccctggtatgcctgagggggacatcaaggccctgaccactctctgtgacctggcagaccgagagcttgtggtcatcattggctgggccaagcacatcccaggcttctcaagcctctccctgggggaccagatgagcctgctgcagagtgcctggatggaaatcctcatcctgggcatcgtgtaccgctcgctgccctatgacgacaagctggtgtacgctgaggactacatcatggatgaggagcactcccgcctcgcggggctgctggagctctaccgggccatcctgcagctggtacgcaggtacaagaagctcaaggtggagaaggaggagtttgtgacgctcaaggccctggccctcgccaactccgattccatgtacatcgaggatctagaggctgtccagaagctgcaggacctgctgcacgaggcactgcaggactacgagctgagccagcgccatgaggagccctggaggacgggcaagctgctgctgacactgccgctgctgcggcagacggccgccaaggccgtgcagcacttctatagcgtcaaactgcagggcaaagtgcccatgcacaaactcttcctggagatgctggaggccaaggcctgggccagggctgactcccttcaggagtggaggccactggagcaagtgccctctcccctccaccgagccaccaagaggcagcatgtgcatttcctaactcccttgccccctcccccatctgtggcctgggtgggcactgctcaggctggataccacctggaggttttccttccgcagagggcaggttggccaagagcagcttagaggatctcccaaggatgaaagaatgtcaagccatgatggaaaatgccccttccaatcagctgccttcacaagcagggatcagagcaactccccggggatccccaatccacgcccttctagtccaacccccctcaatgagagaggcaggcagatctcacccagcactaggacaccaggaggccagggaaagcatctctggctcaccatgtaacatctggc

SEQ ID NO: 9840 - DNA, 2713 bp, Homo sapiens
  source 1..2713: mol_type = unassigned DNA
tttaggccagaggtgatccagtgatttgggagctgcaggtcacacaggctgctcagagggctgctgaacaggatgtcctcggacgacaggcacctgggctccagctgcggctccttcatcaagactgagccgtccagcccgtcctcgggcatcgatgccctcagccaccacagccccagtggctcgtccgacgccagcggcggctttggcctggccctgggcacccacgccaacggtctggactcgccacccatgtttgcaggcgccgggctgggaggcaccccatgccgcaagagctacgaggactgtgccagcggcatcatggaggactcggccatcaagtgcgagtacatgctcaacgccatccccaagcgcctgtgcctcgtgtgcggggacattgcctctggctaccactacggcgtggcctcctgcgaggcttgcaaggccttcttcaagaggactatccaagggaacattgagtacagctgcccggccaccaacgagtgcgagatcaccaaacggaggcgcaagtcctgccaggcctgccgcttcatgaaatgcctcaaagtggggatgctgaaggaaggtgtgcgccttgatcgagtgcgtggaggccgtcagaaatacaagcgacggctggactcagagagcagcccatacctgagcttacaaatttctccacctgctaaaaagccattgaccaagattgtctcatacctactggtggctgagccggacaagctctatgccatgcctccccctggtatgcctgagggggacatcaaggccctgaccactctctgtgacctggcagaccgagagcttgtggtcatcattggctgggccaagcacatcccaggcttctcaagcctctccctgggggaccagatgagcctgctgcagagtgcctggatggaaatcctcatcctgggcatcgtgtaccgctcgctgccctatgacgacaagctggtgtacgctgaggactacatcatggatgaggagcactcccgcctcgcggggctgctggagctctaccgggccatcctgcagctggtacgcaggtacaagaagctcaaggtggagaaggaggagtttgtgacgctcaaggccctggccctcgccaactccgattccatgtacatcgaggatctagaggctgtccagaagctgcaggacctgctgcacgaggcactgcaggactacgagctgagccagcgccatgaggagccctggaggacgggcaagctgctgctgacactgccgctgctgcggcagacggccgccaaggccgtgcagcacttctatagcgtcaaactgcagggcaaagtgcccatgcacaaactcttcctggagatgctggaggccaaggttggccaagagcagcttagaggatctcccaaggatgaaagaatgtcaagccatgatggaaaatgccccttccaatcagctgccttcacaagcagggatcagagcaactccccggggatccccaatccacgcccttctagtccaacccccctcaatgagagaggcaggcagatctcacccagcactaggacaccaggaggccagggaaagcatctctggctcaccatgtaacatctggcttggagcaagtgggtgttctgcacaccaggcagctgcacctcactggatctagtgttgctgcgagtgacctcacttcagagcccctctagcagagtggggcggaagtcctgatggttggtgtccatgaggtggaagctgcttttatacttaaaactcagatcacaacaggaaatgtgtcagtaacaatggaactccatccaatgggaaagttcctggtactgaaggggtccattggacactcagaaaagaagttcaggggccaacttcttagctggaatcctggccagatgaggaccctctccggggaagggagaggactgacttagtggaaggtggtgaagtgaggagagtttaggggaaccttcccccagtggaacagatctcaagtttaccctaaacctgccatttctggaaaatctgtaaagaggaaacagcctgtctcagctgtactctcatgatacaggtcatttgaaatgaaccaagaaataaaacatgaaaatccaaccatggagaaggtggtatggctgggttttgtttggtccccttgtccttatacgttctaaagtttccagactggctttgtcactttgtgaactcgtcatgtgtgaaaaccaatctttgcatatagggaacttcctcgggccacactttaagaaccaagtaagaggctctcaagactccagcagagtcgggaggccatggcagcgccttagaggagctggaacctgcacccacctgtgtcggtggggggggcctcctttccccatagactctgccctccctctgtgcagatggaagtggcaggggagggtgaccagcttgtgacaagaagactgaagggtccagagtccatgctcacggaacagcaccaaagaaaagcactatgtggaaagattgttttattttctaataatgataatatggctggaatggcttcttaagatgtatatattttttaaaatggcagttccccattgcagcatcacctacttgtatgtctttctgcctctgtatatgttctcccagaaacccccatgtaaatcaaatgccctaggatgcttccatcctggtcccatgtatctggaatctaataaataaggaaagg

SEQ ID NO: 9841 - DNA, 2432 bp, Homo sapiens
  source 1..2432: mol_type = unassigned DNA
ttcaggaaaagccatcatgtttccgcagcatttatctgtcagcaggagactattatgagagcacaaactcacattgtattagcgttatcagttaattatgatccttgggaccagtgccagccaatgggctagcagtctgctgaccatcactcagggatataactccacacccccaaattcaagcatgtaagaagacagcaggtccgcagagaggtgtggtcagggacatttcccctggccgggagcccatggagcactgtcctcagagatgcgcaggttaggctcactgtctaggccaggcccaccttagtcactgtggactggcaatggaagctcttcctggacacacctgccctagccctcaccctggggtggaagagaaatgagcttggcttgcaactcagaccattccacggaggcatcctccccttcctgggctggtgaataaaagtttcctgaggtcaaggacttccttttccctgccaaaatggtgtccagaactttgaggccagaggtgatccagtgatttgggagctgcaggtcacacaggctgctcagagggctgctgaacaggatgtcctcggacgacaggcacctgggctccagctgcggctccttcatcaagactgagccgtccagcccgtcctcgggcatcgatgccctcagccaccacagccccagtggctcgtccgacgccagcggcggctttggcctggccctgggcacccacgccaacggtctggactcgccacccatgtttgcaggcgccgggctgggaggcaccccatgccgcaagagctacgaggactgtgccagcggcatcatggaggactcggccatcaagtgcgagtacatgctcaacgccatccccaagcgcctgtgcctcgtgtgcggggacattgcctctggctaccactacggcgtggcctcctgcgaggcttgcaaggccttcttcaagaggactatccaagggaacattgagtacagctgcccggccaccaacgagtgcgagatcaccaaacggaggcgcaagtcctgccaggcctgccgcttcatgaaatgcctcaaagtggggatgctgaaggaaggtgtgcgccttgatcgagtgcgtggaggccgtcagaaatacaagcgacggctggactcagagagcagcccatacctgagcttacaaatttctccacctgctaaaaagccattgaccaagattgtctcatacctactggtggctgagccggacaagctctatgccatgcctccccctggtatgcctgagggggacatcaaggccctgaccactctctgtgacctggcagaccgagagcttgtggtcatcattggctgggccaagcacatcccaggcttctcaagcctctccctgggggaccagatgagcctgctgcagagtgcctggatggaaatcctcatcctgggcatcgtgtaccgctcgctgccctatgacgacaagctggtgtacgctgaggactacatcatggatgaggagcactcccgcctcgcggggctgctggagctctaccgggccatcctgcagctggtacgcaggtacaagaagctcaaggtggagaaggaggagtttgtgacgctcaaggccctggccctcgccaactccgattccatgtacatcgaggatctagaggctgtccagaagctgcaggacctgctgcacgaggcactgcaggactacgagctgagccagcgccatgaggagccctggaggacgggcaagctgctgctgacactgccgctgctgcggcagacggccgccaaggccgtgcagcacttctatagcgtcaaactgcagggcaaagtgcccatgcacaaactcttcctggagatgctggaggccaaggcctgggccagggctgactcccttcaggagtggaggccactggagcaagtgccctctcccctccaccgagccaccaagaggcagcatgtgcatttcctaactcccttgccccctcccccatctgtggcctgggtgggcactgctcaggctggataccacctggaggttttccttccgcagagggcaggttggccaagagcagcttagaggatctcccaaggatgaaagaatgtcaagccatgatggaaaatgccccttccaatcagctgccttcacaagcagggatcagagcaactccccggggatccccaatccacgcccttctagtccaacccccctcaatgagagaggcaggcagatctcacccagcactaggacaccaggaggccagggaaagcatctctggctcaccatgtaacatctggcttggagcaagtgggtgttctgcacaccaggcagctgcacctcactggatctagtgttgctgcgagtgacctcacttcagagcccctctagcagagtggggcggaagtcctgatggttggtgtccatgaggtggaag

SEQ ID NO: 9842 - DNA, 2144 bp, Homo sapiens
  source 1..2144: mol_type = unassigned DNA
tccctgccaaaatggtgtccagaactttgaggccagaggtgatccagtgatttgggagctgcaggtcacacaggctgctcagagggctgctgaacaggatgtcctcggacgacaggcacctgggctccagctgcggctccttcatcaagactgagccgtccagcccgtcctcgggcatcgatgccctcagccaccacagccccagtggctcgtccgacgccagcggcggctttggcctggccctgggcacccacgccaacggtctggactcgccacccatgtttgcaggcgccgggctgggaggcaccccatgccgcaagagctacgaggactgtgccagcggcatcatggaggactcggccatcaagtgcgagtacatgctcaacgccatccccaagcgcctgtgcctcgtgtgcggggacattgcctctggctaccactacggcgtggcctcctgcgaggcttgcaaggccttcttcaagaggactatccaagggaacattgagtacagctgcccggccaccaacgagtgcgagatcaccaaacggaggcgcaagtcctgccaggcctgccgcttcatgaaatgcctcaaagtggggatgctgaaggaaggtgtgcgccttgatcgagtgcgtggaggccgtcagaaatacaagcgacggctggactcagagagcagcccatacctgagcttacaaatttctccacctgctaaaaagccattgaccaagattgtctcatacctactggtggctgagccggacaagctctatgccatgcctccccctggtatgcctgagggggacatcaaggccctgaccactctctgtgacctggcagaccgagagcttgtggtcatcattggctgggccaagcacatcccaggcttctcaagcctctccctgggggaccagatgagcctgctgcagagtgcctggatggaaatcctcatcctgggcatcgtgtaccgctcgctgccctatgacgacaagctggtgtacgctgaggactacatcatggatgaggagcactcccgcctcgcggggctgctggagctctaccgggccatcctgcagctggtacgcaggtacaagaagctcaaggtggagaaggaggagtttgtgacgctcaaggccctggccctcgccaactccgattccatgtacatcgaggatctagaggctgtccagaagctgcaggacctgctgcacgaggcactgcaggactacgagctgagccagcgccatgaggagccctggaggacgggcaagctgctgctgacactgccgctgctgcggcagacggccgccaaggccgtgcagcacttctatagcgtcaaactgcagggcaaagtgcccatgcacaaactcttcctggagatgctggaggccaaggttggccaagagcagcttagaggatctcccaaggatgaaagaatgtcaagccatgatggaaaatgccccttccaatcagctgccttcacaagcagggatcagagcaactccccggggatccccaatccacgcccttctagtccaacccccctcaatgagagaggcaggcagatctcacccagcactaggacaccaggaggccagggaaagcatctctggctcaccatgtaacatctggcttggagcaagtgggtgttctgcacaccaggcagctgcacctcactggatctagtgttgctgcgagtgacctcacttcagagcccctctagcagagtggggcggaagtcctgatggttggtgtccatgaggtggaagctgcttttatacttaaaactcagatcacaacaggaaatgtgtcagtaacaatggaactccatccaatgggaaagttcctggtactgaaggggtccattggacactcagaaaagaagttcaggggccaacttcttagctggaatcctggccagatgaggaccctctccggggaagggagaggactgacttagtggaaggtggtgaagtgaggagagtttaggggaaccttcccccagtggaacagatctcaagtttaccctaaacctgccatttctggaaaatctgtaaagaggaaacagcctgtctcagctgtactctcatgatacaggtcatttgaaatgaaccaagaaataaaacatgaaaatccaaccatgg

SEQ ID NO: 9843 - DNA, 1826 bp, Homo sapiens
  source 1..1826: mol_type = unassigned DNA
catggggctgggtggagttggaagtctagagctttttgctgttttgtttaagacctggttatggttgtgagacttttttttttttttttttttttttgtcagctgcctgttatatcaatcacggagtcgggatctatttataggttgggagtactgtgtccttagtcacaaagagacacagacaggggactgtcagctggtaccggaggagcggagcaacgagttatcagcaactgaaagcacctgaggggccgcacattccaccccagcccagtcctcgtcctccacgccagccccaagcatgctgctgaacaggatgtcctcggacgacaggcacctgggctccagctgcggctccttcatcaagactgagccgtccagcccgtcctcgggcatcgatgccctcagccaccacagccccagtggctcgtccgacgccagcggcggctttggcctggccctgggcacccacgccaacggtctggactcgccacccatgtttgcaggcgccgggctgggaggcaccccatgccgcaagagctacgaggactgtgccagcggcatcatggaggactcggccatcaagtgcgagtacatgctcaacgccatccccaagcgcctgtgcctcgtgtgcggggacattgcctctggctaccactacggcgtggcctcctgcgaggcttgcaaggccttcttcaagaggactatccaagggaacattgagtacagctgcccggccaccaacgagtgcgagatcaccaaacggaggcgcaagtcctgccaggcctgccgcttcatgaaatgcctcaaagtggggatgctgaaggaaggtgtgcgccttgatcgagtgcgtggaggccgtcagaaatacaagcgacggctggactcagagagcagcccatacctgagcttacaaatttctccacctgctaaaaagccattgaccaagattgtctcatacctactggtggctgagccggacaagctctatgccatgcctccccctggtatgcctgagggggacatcaaggccctgaccactctctgtgacctggcagaccgagagcttgtggtcatcattggctgggccaagcacatcccaggcttctcaagcctctccctgggggaccagatgagcctgctgcagagtgcctggatggaaatcctcatcctgggcatcgtgtaccgctcgctgccctatgacgacaagctggtgtacgctgaggactacatcatggatgaggagcactcccgcctcgcggggctgctggagctctaccgggccatcctgcagctggtacgcaggtacaagaagctcaaggtggagaaggaggagtttgtgacgctcaaggccctggccctcgccaactccgattccatgtacatcgaggatctagaggctgtccagaagctgcaggacctgctgcacgaggcactgcaggactacgagctgagccagcgccatgaggagccctggaggacgggcaagctgctgctgacactgccgctgctgcggcagacggccgccaaggccgtgcagcacttctatagcgtcaaactgcagggcaaagtgcccatgcacaaactcttcctggagatgctggaggccaaggttggccaagagcagcttagaggatctcccaaggatgaaagaatgtcaagccatgatggaaaatgccccttccaatcagctgccttcacaagcagggatcagagcaactccccggggatccccaatccacgcccttctagtccaacccccctcaatgagagaggcaggcagatctcacccagcactaggacaccaggaggccagggaaagcatc

SEQ ID NO: 9844 - DNA, 1427 bp, Homo sapiens
  source 1..1427: mol_type = unassigned DNA
tttaggccagaggtgatccagtgatttgggagctgcaggtcacacaggctgctcagagggctgctgaacaggatgtcctcggacgacaggcacctgggctccagctgcggctccttcatcaagactgagccgtccagcccgtcctcgggcatcgatgccctcagccaccacagccccagtggctcgtccgacgccagcggcggctttggcctggccctgggcacccacgccaacggtctggactcgccacccatgtttgcaggcgccgggctgggaggcaccccatgccgcaagagctacgaggactgtgccagcggcatcatggaggactcggccatcaagtgcgagtacatgctcaacgccatccccaagcgcctgtgcctcgtgtgcggggacattgcctctggctaccactacggcgtggcctcctgcgaggcttgcaaggccttcttcaagaggactatccaagggaacattgagtacagctgcccggccaccaacgagtgcgagatcaccaaacggaggcgcaagtcctgccaggcctgccgcttcatgaaatgcctcaaagtggggatgctgaaggaaggtgtgcgccttgatcgagtgcgtggaggccgtcagaaatacaagcgacggctggactcagagagcagcccatacctgagcttacaaatttctccacctgctaaaaagccattgaccaagattgtctcatacctactggtggctgagccggacaagctctatgccatgcctccccctggtatgcctgagggggacatcaaggccctgaccactctctgtgacctggcagaccgagagcttgtggtcatcattggctgggccaagcacatcccaggcttctcaagcctctccctgggggaccagatgagcctgctgcagagtgcctggatggaaatcctcatcctgggcatcgtgtaccgctcgctgccctatgacgacaagctggtgtacgctgaggactacatcatggatgaggagcactcccgcctcgcggggctgctggagctctaccgggccatcctgcagctggtacgcaggtacaagaagctcaaggtggagaaggaggagtttgtgacgctcaaggccctggccctcgccaactccgattccatgtacatcgaggatctagaggctgtccagaagctgcaggacctgctgcacgaggcactgcaggactacgagctgagccagcgccatgaggagccctggaggacgggcaagctgctgctgacactgccgctgctgcggcagacggccgccaaggccgtgcagcacttctatagcgtcaaactgcagggcaaagtgcccatgcacaaactcttcctggagatgctggaggccaaggtgtgatggccccgcacacggaccaatgcccacctacagacagacaaacggacagaccg

SEQ ID NO: 9845 - DNA, 1826 bp, Homo sapiens
  source 1..1826: mol_type = unassigned DNA
aagtccttgattaggagagtgtgagagctttggtcccaactggctgtgcctataggcttgtcactaggagaacatttgtgttaattgcactgtgctctgtcaaggaaactttgatttatagctggggtgcacaaataatggttgccggtcgcacatggattcggtagaactttgccttcctgaatctttttccctgcactacgaggaagaacttgaatgagacctgcctcatcagtcatgggatcatagtgtcacagatggaaaagcaactatcagctgaattgtactgaactacacacttggctaattcatcttattgctctacacatctaaaggaaggctcattctgttcttggagtctagacagcatcaggagttgggctcagtgaacaaaactttaatgtctagagcatttatgagggttttaatgattggaaaatctatcctgagaatgtggtcaccatatgtgacagccttgctttctatcttgtcttcagtttctggggcttctctgcagaatgtcaaacaaagatcgacacattgattccagctgttcgtccttcatcaagacggaaccttccagcccagcctccctgacggacagcgtcaaccaccacagccctggtggctcttcagacgccagtgggagctacagttcaaccatgaatggccatcagaacggacttgactcgccacctctctacccttctgctcctatcctgggaggtagtgggcctgtcaggaaactgtatgatgactgctccagcaccattgttgaagatccccagaccaagtgtgaatacatgctcaactcgatgcccaagagactgtgtttagtgtgtggtgacatcgcttctgggtaccactatggggtagcatcatgtgaagcctgcaaggcattcttcaagaggacaattcaaggcaatatagaatacagctgccctgccacgaatgaatgtgaaatcacaaagcgcagacgtaaatcctgccaggcttgccgcttcatgaagtgtttaaaagtgggcatgctgaaagaaggggtgcgtcttgacagagtacgtggaggtcggcagaagtacaagcgcaggatagatgcggagaacagcccatacctgaaccctcagctggttcagccagccaaaaagccatataacaagattgtctcacatttgttggtggctgaaccggagaagatctatgccatgcctgaccctactgtccccgacagtgacatcaaagccctcactacactgtgtgacttggccgaccgagagttggtggttatcattggatgggcgaagcatattccaggcttctccacgctgtccctggcggaccagatgagccttctgcagagtgcttggatggaaattttgatccttggtgtcgtataccggtctctttcgtttgaggatgaacttgtctatgcagacgattatataatggacgaagaccagtccaaattagcaggccttcttgatctaaataatgctatcctgcagctggtaaagaaatacaagagcatgaagctggaaaaagaagaatttgtcaccctcaaagctatagctcttgctaattcagactccatgcacatagaagatgttgaagccgttcagaagcttcaggatgtcttacatgaagcgctgcaggattatgaagctggccagcacatggaagaccctcgtcgagctggcaagatgctgatgacactgccactcctgaggcagacctctaccaaggccgtgcagcatttctacaacatcaaactagaaggcaaagtcccaatgcacaaactttttttggaaatgttggaggccaaggtctgc

SEQ ID NO: 9846 - DNA, 5197 bp, Homo sapiens
  source 1..5197: mol_type = unassigned DNA
ggttttgtagactttcatagccaaagaaaccggcttcggcttctttaaaatccccgacgactcacctgattaacctgctgcagttctgaccctgccaagagctgacaatttactggttcatcaatgaaacaatattaaattatgaagatgtaaggaaaaaatcctacgctaacactgtcgcagtttgaaaggcttctctgcagaatgtcaaacaaagatcgacacattgattccagctgttcgtccttcatcaagacggaaccttccagcccagcctccctgacggacagcgtcaaccaccacagccctggtggctcttcagacgccagtgggagctacagttcaaccatgaatggccatcagaacggacttgactcgccacctctctacccttctgctcctatcctgggaggtagtgggcctgtcaggaaactgtatgatgactgctccagcaccattgttgaagatccccagaccaagtgtgaatacatgctcaactcgatgcccaagagactgtgtttagtgtgtggtgacatcgcttctgggtaccactatggggtagcatcatgtgaagcctgcaaggcattcttcaagaggacaattcaaggcaatatagaatacagctgccctgccacgaatgaatgtgaaatcacaaagcgcagacgtaaatcctgccaggcttgccgcttcatgaagtgtttaaaagtgggcatgctgaaagaaggggtgcgtcttgacagagtacgtggaggtcggcagaagtacaagcgcaggatagatgcggagaacagcccatacctgaaccctcagctggttcagccagccaaaaagccatataacaagattgtctcacatttgttggtggctgaaccggagaagatctatgccatgcctgaccctactgtccccgacagtgacatcaaagccctcactacactgtgtgacttggccgaccgagagttggtggttatcattggatgggcgaagcatattccaggcttctccacgctgtccctggcggaccagatgagccttctgcagagtgcttggatggaaattttgatccttggtgtcgtataccggtctctttcgtttgaggatgaacttgtctatgcagacgattatataatggacgaagaccagtccaaattagcaggccttcttgatctaaataatgctatcctgcagctggtaaagaaatacaagagcatgaagctggaaaaagaagaatttgtcaccctcaaagctatagctcttgctaattcagactccatgcacatagaagatgttgaagccgttcagaagcttcaggatgtcttacatgaagcgctgcaggattatgaagctggccagcacatggaagaccctcgtcgagctggcaagatgctgatgacactgccactcctgaggcagacctctaccaaggccgtgcagcatttctacaacatcaaactagaaggcaaagtcccaatgcacaaactttttttggaaatgttggaggccaaggtctgactaaaagctccctgggccttcccatccttcatgttgaaaaagggaaaataaacccaagagtgatgtcgaagaaacttagagtttagttaacaacatcaaaaatcaacagactgcactgataatttagcagcaagactatgaagcagctttcagattcctccataggttcctgatgagtttctttctactttctccatcatcttctttcctctttcttcccacatttctctttctctttattttttctccttttcttctttcacctcccttatttctttgcttctttcattcctagttcccattctcctttattttcttcccgtctgcctgccttctttcttttctttacctactctcattcctctcttttctcatccttccccttttttctaaatttgaaatagctttagtttaaaaaaaaatcctcccttccccctttcctttccctttctttcctttttccctttccttttccctttcctttcctttcctcttgaccttctttccatctttctttttcttccttctgctgctgaacttttaaaagaggtctctaactgaagagagatggaagccagccctgccaaaggatggagatccataatatggatgccagtgaacttattgtgaaccatactgtccccaatgactaaggaatcaaagagagagaaccaacgttcctaaaagtacagtgcaacatatacaaattgactgagtgcagtattagatttcatgggagcagcctctaattagacaacttaagcaacgttgcatcggctgcttcttatcattgcttttccatctagatcagttacagccatttgattccttaattgttttttcaagtcttccaggtatttgttagtttagctactatgtaactttttcagggaatagtttaagctttattcattcatgcaatactaaagagaaataagaatactgcaattttgtgctggctttgaacaattacgaacaataatgaaggacaaatgaatcctgaaggaagatttttaaaaatgttttgtttcttcttacaaatggagatttttttgtaccagctttaccacttttcagccatttattaatatgggaatttaacttactcaagcaatagttgaagggaaggtgcatattatcacggatgcaatttatgttgtgtgccagtctggtcccaaacatcaatttcttaacatgagctccagtttacctaaatgttcactgacacaaaggatgagattacacctacagtgactctgagtagtcacatatataagcactgcacatgagatatagatccgtagaattgtcaggagtgcacctctctacttgggaggtacaattgccatatgatttctagctgccatggtggttaggaatgtgatactgcctgtttgcaaagtcacagaccttgcctcagaaggagctgtgagccagtattcatttaagaggcaataaggcaaatgccagaattaaaaaaaaaaatcatcaaagacagaaaatgcctgaccaaattctaaaacctaatccatataagtttattcatttaggaatgttcgtttaaattaatctgcagtttttaccaagagctaagccaatatatgtgcttttcaaccagtattgtcacagcatgaaagtcaagtcaggttccagactgttaagaggtgtaatctaatgaagaaatcaattagatgccccgaaatctacagtcgctgaataaccaataaacagtaacctccatcaaatgctataccaatggaccagtgttagtagctgctccctgtattatgtgaacagtcttattctatgtacacagatgtaattaaaattgtaatcctaacaaacaaaagaaatgtagttcagcttttcaatgtttcatgtttgctgtgcttttctgaattttatgttgcattcaaagactgttgtcttgttcttgtggtgtttggattcttgtggtgtgtgcttttagacacagggtagaattagagacaatattggatgtacaattcctcaggagactacagtagtatattctattccttaccagtaataaggttcttcctaataataattaagagattgaaactccaaacaagtattcattatgaacagatacacatcaaaatcataataatattttcaaaacaaggaataatttctctaatggtttattatagaataccaatgtatagcttagaaataaaactttgaatatttcaagaatatagataagtctaatttttaaatgctgtatatatggctttcactcaatcatctctcagatgttgttattaactcgctctgtgttgttgcaaaactttttggtgcagattcgtttccaaaactattgctactttgtgtgctttaaacaaaataccttgggttgatgaaacatcaacccagtgctaggaatactgtgtatctatcattagctatatgggactatattgtagattgtggtttctcagtagagaagtgactgtagtgtgattctagataaatcatcattagcaattcattcagatggtcaataacttgaaatttatagctgtgataggagttcagaaattggcacatccctttaaaaataacaacagaaaatacaactcctgggaaaaaaggtgctgattctataagattatttatatatgtaagtgtttaaaaagattattttccagaaagtttgtgcagggtttaagttgctactattcaactacactatatataaataaaatatatacaatatatacattgttttcactgtatcacattaaagtacttgggcttcagaagtaagagccaaccaactgaaaacctgagatggagatatgttcaaagaatgagatacaattttttagttttcagtttaagtaactctcagcattacaaaagagtaagtatctcacaaataggaaataaaactaaaacgtggatttaaaaagaactgcacgggctttagggtaaatgctcatcttaaacctcactagagggaagtcttctcaagtttcaagcaagaccatttacttaatgtgaagttttggaaagttataaaggtgtatgttttagccatatgattttaattttaattttgcttcttttaggttcgttcttatttaaagcaatatgattgtgtgactccttgtagttacacttgtgtttcaatcagatcagattgttgtatttattccactattttgcatttaaatgataacataaaagatataaaaaatttaaaactgctatttttcttatagaagagaaaatgggtgttggtgattgtattttaattatttaagcgtctctgtttacctgcctaggaaaacattttatggcagtcttatgtgcaaagatcgtaaaaggacaaaaaatttaaactgcttataataatccaggagttgcattatagccagtagtaaaaataataataataataataaaaccatgtctatagctgtagatgggcttcacatctgtaaagcaatcaattgtatatttttgtgatgtgtaccatactgtgtgctccagcaaatgtccatttgtgtaaatgtatttattttatattgtatatattgttaaatgcaaaaaggagatatgattctgtaactccaatcagttcagatgtgtaactcaaattattatgcctttcaggatgatggtagagcaatattaaacaagcttccacttt

SEQ ID NO: 9847 - DNA, 5431 bp, Homo sapiens
  source 1..5431: mol_type = unassigned DNA
tatccacacacagcatcggaatattgctagctaactcaacaaatgtgcaaatcaggggactgttgtgtgtgtaccgattcatgtctatactgtttttattggtgaagtaggaaattagtctaaatatttgattctgcagttgcatgtcaccaaattcagtgaggttagatgttaaatcatcttgttggctttgggctgaatttgatctaagagacaaaagtctcaaacaacagactacttactgccaccacatctcgattcaaagaatagttttcacatgttcgtggtgtggaaaggactttctgtttctcactaatttcttcagctataccaagagtggtgttgtctttgaacaggaaggacagcaaaaataaacataacagttttttcataagatacacagctgcattacacatcccaaaattgcttctctgcagaatgtcaaacaaagatcgacacattgattccagctgttcgtccttcatcaagacggaaccttccagcccagcctccctgacggacagcgtcaaccaccacagccctggtggctcttcagacgccagtgggagctacagttcaaccatgaatggccatcagaacggacttgactcgccacctctctacccttctgctcctatcctgggaggtagtgggcctgtcaggaaactgtatgatgactgctccagcaccattgttgaagatccccagaccaagtgtgaatacatgctcaactcgatgcccaagagactgtgtttagtgtgtggtgacatcgcttctgggtaccactatggggtagcatcatgtgaagcctgcaaggcattcttcaagaggacaattcaaggcaatatagaatacagctgccctgccacgaatgaatgtgaaatcacaaagcgcagacgtaaatcctgccaggcttgccgcttcatgaagtgtttaaaagtgggcatgctgaaagaaggggtgcgtcttgacagagtacgtggaggtcggcagaagtacaagcgcaggatagatgcggagaacagcccatacctgaaccctcagctggttcagccagccaaaaagccatataacaagattgtctcacatttgttggtggctgaaccggagaagatctatgccatgcctgaccctactgtccccgacagtgacatcaaagccctcactacactgtgtgacttggccgaccgagagttggtggttatcattggatgggcgaagcatattccaggcttctccacgctgtccctggcggaccagatgagccttctgcagagtgcttggatggaaattttgatccttggtgtcgtataccggtctctttcgtttgaggatgaacttgtctatgcagacgattatataatggacgaagaccagtccaaattagcaggccttcttgatctaaataatgctatcctgcagctggtaaagaaatacaagagcatgaagctggaaaaagaagaatttgtcaccctcaaagctatagctcttgctaattcagactccatgcacatagaagatgttgaagccgttcagaagcttcaggatgtcttacatgaagcgctgcaggattatgaagctggccagcacatggaagaccctcgtcgagctggcaagatgctgatgacactgccactcctgaggcagacctctaccaaggccgtgcagcatttctacaacatcaaactagaaggcaaagtcccaatgcacaaactttttttggaaatgttggaggccaaggtctgactaaaagctccctgggccttcccatccttcatgttgaaaaagggaaaataaacccaagagtgatgtcgaagaaacttagagtttagttaacaacatcaaaaatcaacagactgcactgataatttagcagcaagactatgaagcagctttcagattcctccataggttcctgatgagtttctttctactttctccatcatcttctttcctctttcttcccacatttctctttctctttattttttctccttttcttctttcacctcccttatttctttgcttctttcattcctagttcccattctcctttattttcttcccgtctgcctgccttctttcttttctttacctactctcattcctctcttttctcatccttccccttttttctaaatttgaaatagctttagtttaaaaaaaaatcctcccttccccctttcctttccctttctttcctttttccctttccttttccctttcctttcctttcctcttgaccttctttccatctttctttttcttccttctgctgctgaacttttaaaagaggtctctaactgaagagagatggaagccagccctgccaaaggatggagatccataatatggatgccagtgaacttattgtgaaccatactgtccccaatgactaaggaatcaaagagagagaaccaacgttcctaaaagtacagtgcaacatatacaaattgactgagtgcagtattagatttcatgggagcagcctctaattagacaacttaagcaacgttgcatcggctgcttcttatcattgcttttccatctagatcagttacagccatttgattccttaattgttttttcaagtcttccaggtatttgttagtttagctactatgtaactttttcagggaatagtttaagctttattcattcatgcaatactaaagagaaataagaatactgcaattttgtgctggctttgaacaattacgaacaataatgaaggacaaatgaatcctgaaggaagatttttaaaaatgttttgtttcttcttacaaatggagatttttttgtaccagctttaccacttttcagccatttattaatatgggaatttaacttactcaagcaatagttgaagggaaggtgcatattatcacggatgcaatttatgttgtgtgccagtctggtcccaaacatcaatttcttaacatgagctccagtttacctaaatgttcactgacacaaaggatgagattacacctacagtgactctgagtagtcacatatataagcactgcacatgagatatagatccgtagaattgtcaggagtgcacctctctacttgggaggtacaattgccatatgatttctagctgccatggtggttaggaatgtgatactgcctgtttgcaaagtcacagaccttgcctcagaaggagctgtgagccagtattcatttaagaggcaataaggcaaatgccagaattaaaaaaaaaaatcatcaaagacagaaaatgcctgaccaaattctaaaacctaatccatataagtttattcatttaggaatgttcgtttaaattaatctgcagtttttaccaagagctaagccaatatatgtgcttttcaaccagtattgtcacagcatgaaagtcaagtcaggttccagactgttaagaggtgtaatctaatgaagaaatcaattagatgccccgaaatctacagtcgctgaataaccaataaacagtaacctccatcaaatgctataccaatggaccagtgttagtagctgctccctgtattatgtgaacagtcttattctatgtacacagatgtaattaaaattgtaatcctaacaaacaaaagaaatgtagttcagcttttcaatgtttcatgtttgctgtgcttttctgaattttatgttgcattcaaagactgttgtcttgttcttgtggtgtttggattcttgtggtgtgtgcttttagacacagggtagaattagagacaatattggatgtacaattcctcaggagactacagtagtatattctattccttaccagtaataaggttcttcctaataataattaagagattgaaactccaaacaagtattcattatgaacagatacacatcaaaatcataataatattttcaaaacaaggaataatttctctaatggtttattatagaataccaatgtatagcttagaaataaaactttgaatatttcaagaatatagataagtctaatttttaaatgctgtatatatggctttcactcaatcatctctcagatgttgttattaactcgctctgtgttgttgcaaaactttttggtgcagattcgtttccaaaactattgctactttgtgtgctttaaacaaaataccttgggttgatgaaacatcaacccagtgctaggaatactgtgtatctatcattagctatatgggactatattgtagattgtggtttctcagtagagaagtgactgtagtgtgattctagataaatcatcattagcaattcattcagatggtcaataacttgaaatttatagctgtgataggagttcagaaattggcacatccctttaaaaataacaacagaaaatacaactcctgggaaaaaaggtgctgattctataagattatttatatatgtaagtgtttaaaaagattattttccagaaagtttgtgcagggtttaagttgctactattcaactacactatatataaataaaatatatacaatatatacattgttttcactgtatcacattaaagtacttgggcttcagaagtaagagccaaccaactgaaaacctgagatggagatatgttcaaagaatgagatacaattttttagttttcagtttaagtaactctcagcattacaaaagagtaagtatctcacaaataggaaataaaactaaaacgtggatttaaaaagaactgcacgggctttagggtaaatgctcatcttaaacctcactagagggaagtcttctcaagtttcaagcaagaccatttacttaatgtgaagttttggaaagttataaaggtgtatgttttagccatatgattttaattttaattttgcttcttttaggttcgttcttatttaaagcaatatgattgtgtgactccttgtagttacacttgtgtttcaatcagatcagattgttgtatttattccactattttgcatttaaatgataacataaaagatataaaaaatttaaaactgctatttttcttatagaagagaaaatgggtgttggtgattgtattttaattatttaagcgtctctgtttacctgcctaggaaaacattttatggcagtcttatgtgcaaagatcgtaaaaggacaaaaaatttaaactgcttataataatccaggagttgcattatagccagtagtaaaaataataataataataataaaaccatgtctatagctgtagatgggcttcacatctgtaaagcaatcaattgtatatttttgtgatgtgtaccatactgtgtgctccagcaaatgtccatttgtgtaaatgtatttattttatattgtatatattgttaaatgcaaaaaggagatatgattctgtaactccaatcagttcagatgtgtaactcaaattattatgcctttcaggatgatggtagagcaatattaaacaagcttccacttt

SEQ ID NO: 9848 - DNA, 5216 bp, Homo sapiens
  source 1..5216: mol_type = unassigned DNA
agctgacaatttactggttcatcaatgaaacaatattaaattatgaagatgtaaggaaaaaatcctacgctaacactgtcgcagtttgaaagctttaaaaagttgaagtctattggaaaccttcttataagaaaccttcctagtcagagaattcaactttcttcttttcttcattcatgaaaatgcagatccactgagaaagggaataaggcttctctgcagaatgtcaaacaaagatcgacacattgattccagctgttcgtccttcatcaagacggaaccttccagcccagcctccctgacggacagcgtcaaccaccacagccctggtggctcttcagacgccagtgggagctacagttcaaccatgaatggccatcagaacggacttgactcgccacctctctacccttctgctcctatcctgggaggtagtgggcctgtcaggaaactgtatgatgactgctccagcaccattgttgaagatccccagaccaagtgtgaatacatgctcaactcgatgcccaagagactgtgtttagtgtgtggtgacatcgcttctgggtaccactatggggtagcatcatgtgaagcctgcaaggcattcttcaagaggacaattcaaggcaatatagaatacagctgccctgccacgaatgaatgtgaaatcacaaagcgcagacgtaaatcctgccaggcttgccgcttcatgaagtgtttaaaagtgggcatgctgaaagaaggggtgcgtcttgacagagtacgtggaggtcggcagaagtacaagcgcaggatagatgcggagaacagcccatacctgaaccctcagctggttcagccagccaaaaagccatataacaagattgtctcacatttgttggtggctgaaccggagaagatctatgccatgcctgaccctactgtccccgacagtgacatcaaagccctcactacactgtgtgacttggccgaccgagagttggtggttatcattggatgggcgaagcatattccaggcttctccacgctgtccctggcggaccagatgagccttctgcagagtgcttggatggaaattttgatccttggtgtcgtataccggtctctttcgtttgaggatgaacttgtctatgcagacgattatataatggacgaagaccagtccaaattagcaggccttcttgatctaaataatgctatcctgcagctggtaaagaaatacaagagcatgaagctggaaaaagaagaatttgtcaccctcaaagctatagctcttgctaattcagactccatgcacatagaagatgttgaagccgttcagaagcttcaggatgtcttacatgaagcgctgcaggattatgaagctggccagcacatggaagaccctcgtcgagctggcaagatgctgatgacactgccactcctgaggcagacctctaccaaggccgtgcagcatttctacaacatcaaactagaaggcaaagtcccaatgcacaaactttttttggaaatgttggaggccaaggtctgactaaaagctccctgggccttcccatccttcatgttgaaaaagggaaaataaacccaagagtgatgtcgaagaaacttagagtttagttaacaacatcaaaaatcaacagactgcactgataatttagcagcaagactatgaagcagctttcagattcctccataggttcctgatgagtttctttctactttctccatcatcttctttcctctttcttcccacatttctctttctctttattttttctccttttcttctttcacctcccttatttctttgcttctttcattcctagttcccattctcctttattttcttcccgtctgcctgccttctttcttttctttacctactctcattcctctcttttctcatccttccccttttttctaaatttgaaatagctttagtttaaaaaaaaatcctcccttccccctttcctttccctttctttcctttttccctttccttttccctttcctttcctttcctcttgaccttctttccatctttctttttcttccttctgctgctgaacttttaaaagaggtctctaactgaagagagatggaagccagccctgccaaaggatggagatccataatatggatgccagtgaacttattgtgaaccatactgtccccaatgactaaggaatcaaagagagagaaccaacgttcctaaaagtacagtgcaacatatacaaattgactgagtgcagtattagatttcatgggagcagcctctaattagacaacttaagcaacgttgcatcggctgcttcttatcattgcttttccatctagatcagttacagccatttgattccttaattgttttttcaagtcttccaggtatttgttagtttagctactatgtaactttttcagggaatagtttaagctttattcattcatgcaatactaaagagaaataagaatactgcaattttgtgctggctttgaacaattacgaacaataatgaaggacaaatgaatcctgaaggaagatttttaaaaatgttttgtttcttcttacaaatggagatttttttgtaccagctttaccacttttcagccatttattaatatgggaatttaacttactcaagcaatagttgaagggaaggtgcatattatcacggatgcaatttatgttgtgtgccagtctggtcccaaacatcaatttcttaacatgagctccagtttacctaaatgttcactgacacaaaggatgagattacacctacagtgactctgagtagtcacatatataagcactgcacatgagatatagatccgtagaattgtcaggagtgcacctctctacttgggaggtacaattgccatatgatttctagctgccatggtggttaggaatgtgatactgcctgtttgcaaagtcacagaccttgcctcagaaggagctgtgagccagtattcatttaagaggcaataaggcaaatgccagaattaaaaaaaaaaatcatcaaagacagaaaatgcctgaccaaattctaaaacctaatccatataagtttattcatttaggaatgttcgtttaaattaatctgcagtttttaccaagagctaagccaatatatgtgcttttcaaccagtattgtcacagcatgaaagtcaagtcaggttccagactgttaagaggtgtaatctaatgaagaaatcaattagatgccccgaaatctacagtcgctgaataaccaataaacagtaacctccatcaaatgctataccaatggaccagtgttagtagctgctccctgtattatgtgaacagtcttattctatgtacacagatgtaattaaaattgtaatcctaacaaacaaaagaaatgtagttcagcttttcaatgtttcatgtttgctgtgcttttctgaattttatgttgcattcaaagactgttgtcttgttcttgtggtgtttggattcttgtggtgtgtgcttttagacacagggtagaattagagacaatattggatgtacaattcctcaggagactacagtagtatattctattccttaccagtaataaggttcttcctaataataattaagagattgaaactccaaacaagtattcattatgaacagatacacatcaaaatcataataatattttcaaaacaaggaataatttctctaatggtttattatagaataccaatgtatagcttagaaataaaactttgaatatttcaagaatatagataagtctaatttttaaatgctgtatatatggctttcactcaatcatctctcagatgttgttattaactcgctctgtgttgttgcaaaactttttggtgcagattcgtttccaaaactattgctactttgtgtgctttaaacaaaataccttgggttgatgaaacatcaacccagtgctaggaatactgtgtatctatcattagctatatgggactatattgtagattgtggtttctcagtagagaagtgactgtagtgtgattctagataaatcatcattagcaattcattcagatggtcaataacttgaaatttatagctgtgataggagttcagaaattggcacatccctttaaaaataacaacagaaaatacaactcctgggaaaaaaggtgctgattctataagattatttatatatgtaagtgtttaaaaagattattttccagaaagtttgtgcagggtttaagttgctactattcaactacactatatataaataaaatatatacaatatatacattgttttcactgtatcacattaaagtacttgggcttcagaagtaagagccaaccaactgaaaacctgagatggagatatgttcaaagaatgagatacaattttttagttttcagtttaagtaactctcagcattacaaaagagtaagtatctcacaaataggaaataaaactaaaacgtggatttaaaaagaactgcacgggctttagggtaaatgctcatcttaaacctcactagagggaagtcttctcaagtttcaagcaagaccatttacttaatgtgaagttttggaaagttataaaggtgtatgttttagccatatgattttaattttaattttgcttcttttaggttcgttcttatttaaagcaatatgattgtgtgactccttgtagttacacttgtgtttcaatcagatcagattgttgtatttattccactattttgcatttaaatgataacataaaagatataaaaaatttaaaactgctatttttcttatagaagagaaaatgggtgttggtgattgtattttaattatttaagcgtctctgtttacctgcctaggaaaacattttatggcagtcttatgtgcaaagatcgtaaaaggacaaaaaatttaaactgcttataataatccaggagttgcattatagccagtagtaaaaataataataataataataaaaccatgtctatagctgtagatgggcttcacatctgtaaagcaatcaattgtatatttttgtgatgtgtaccatactgtgtgctccagcaaatgtccatttgtgtaaatgtatttattttatattgtatatattgttaaatgcaaaaaggagatatgattctgtaactccaatcagttcagatgtgtaactcaaattattatgcctttcaggatgatggtagagcaatattaaacaagcttccacttt

SEQ ID NO: 9849 - DNA, 5352 bp, Homo sapiens
  source 1..5352: mol_type = unassigned DNA
gtgtaagatgtgcaatgttcctgcatgggggttttgtagactttcatagccaaagaaaccggcttcggcttctttaaaatccccgacgactcacctgattaacctgctgcagttctgaccctgccaagagctgacaatttactggttcatcaatgaaacaatattaaattatgaagatgtaaggaaaaaatcctacgctaacactgtcgcagtttgaaagctttaaaaagttgaagtctattggaaaccttcttataagaaaccttcctagtcagagaattcaactttcttcttttcttcattcatgaaaatgcagatccactgagaaagggaataaggcttctctgcagaatgtcaaacaaagatcgacacattgattccagctgttcgtccttcatcaagacggaaccttccagcccagcctccctgacggacagcgtcaaccaccacagccctggtggctcttcagacgccagtgggagctacagttcaaccatgaatggccatcagaacggacttgactcgccacctctctacccttctgctcctatcctgggaggtagtgggcctgtcaggaaactgtatgatgactgctccagcaccattgttgaagatccccagaccaagtgtgaatacatgctcaactcgatgcccaagagactgtgtttagtgtgtggtgacatcgcttctgggtaccactatggggtagcatcatgtgaagcctgcaaggcattcttcaagaggacaattcaaggcaatatagaatacagctgccctgccacgaatgaatgtgaaatcacaaagcgcagacgtaaatcctgccaggcttgccgcttcatgaagtgtttaaaagtgggcatgctgaaagaaggggtgcgtcttgacagagtacgtggaggtcggcagaagtacaagcgcaggatagatgcggagaacagcccatacctgaaccctcagctggttcagccagccaaaaagccatataacaagattgtctcacatttgttggtggctgaaccggagaagatctatgccatgcctgaccctactgtccccgacagtgacatcaaagccctcactacactgtgtgacttggccgaccgagagttggtggttatcattggatgggcgaagcatattccaggcttctccacgctgtccctggcggaccagatgagccttctgcagagtgcttggatggaaattttgatccttggtgtcgtataccggtctctttcgtttgaggatgaacttgtctatgcagacgattatataatggacgaagaccagtccaaattagcaggccttcttgatctaaataatgctatcctgcagctggtaaagaaatacaagagcatgaagctggaaaaagaagaatttgtcaccctcaaagctatagctcttgctaattcagactccatgcacatagaagatgttgaagccgttcagaagcttcaggatgtcttacatgaagcgctgcaggattatgaagctggccagcacatggaagaccctcgtcgagctggcaagatgctgatgacactgccactcctgaggcagacctctaccaaggccgtgcagcatttctacaacatcaaactagaaggcaaagtcccaatgcacaaactttttttggaaatgttggaggccaaggtctgactaaaagctccctgggccttcccatccttcatgttgaaaaagggaaaataaacccaagagtgatgtcgaagaaacttagagtttagttaacaacatcaaaaatcaacagactgcactgataatttagcagcaagactatgaagcagctttcagattcctccataggttcctgatgagtttctttctactttctccatcatcttctttcctctttcttcccacatttctctttctctttattttttctccttttcttctttcacctcccttatttctttgcttctttcattcctagttcccattctcctttattttcttcccgtctgcctgccttctttcttttctttacctactctcattcctctcttttctcatccttccccttttttctaaatttgaaatagctttagtttaaaaaaaaatcctcccttccccctttcctttccctttctttcctttttccctttccttttccctttcctttcctttcctcttgaccttctttccatctttctttttcttccttctgctgctgaacttttaaaagaggtctctaactgaagagagatggaagccagccctgccaaaggatggagatccataatatggatgccagtgaacttattgtgaaccatactgtccccaatgactaaggaatcaaagagagagaaccaacgttcctaaaagtacagtgcaacatatacaaattgactgagtgcagtattagatttcatgggagcagcctctaattagacaacttaagcaacgttgcatcggctgcttcttatcattgcttttccatctagatcagttacagccatttgattccttaattgttttttcaagtcttccaggtatttgttagtttagctactatgtaactttttcagggaatagtttaagctttattcattcatgcaatactaaagagaaataagaatactgcaattttgtgctggctttgaacaattacgaacaataatgaaggacaaatgaatcctgaaggaagatttttaaaaatgttttgtttcttcttacaaatggagatttttttgtaccagctttaccacttttcagccatttattaatatgggaatttaacttactcaagcaatagttgaagggaaggtgcatattatcacggatgcaatttatgttgtgtgccagtctggtcccaaacatcaatttcttaacatgagctccagtttacctaaatgttcactgacacaaaggatgagattacacctacagtgactctgagtagtcacatatataagcactgcacatgagatatagatccgtagaattgtcaggagtgcacctctctacttgggaggtacaattgccatatgatttctagctgccatggtggttaggaatgtgatactgcctgtttgcaaagtcacagaccttgcctcagaaggagctgtgagccagtattcatttaagaggcaataaggcaaatgccagaattaaaaaaaaaaatcatcaaagacagaaaatgcctgaccaaattctaaaacctaatccatataagtttattcatttaggaatgttcgtttaaattaatctgcagtttttaccaagagctaagccaatatatgtgcttttcaaccagtattgtcacagcatgaaagtcaagtcaggttccagactgttaagaggtgtaatctaatgaagaaatcaattagatgccccgaaatctacagtcgctgaataaccaataaacagtaacctccatcaaatgctataccaatggaccagtgttagtagctgctccctgtattatgtgaacagtcttattctatgtacacagatgtaattaaaattgtaatcctaacaaacaaaagaaatgtagttcagcttttcaatgtttcatgtttgctgtgcttttctgaattttatgttgcattcaaagactgttgtcttgttcttgtggtgtttggattcttgtggtgtgtgcttttagacacagggtagaattagagacaatattggatgtacaattcctcaggagactacagtagtatattctattccttaccagtaataaggttcttcctaataataattaagagattgaaactccaaacaagtattcattatgaacagatacacatcaaaatcataataatattttcaaaacaaggaataatttctctaatggtttattatagaataccaatgtatagcttagaaataaaactttgaatatttcaagaatatagataagtctaatttttaaatgctgtatatatggctttcactcaatcatctctcagatgttgttattaactcgctctgtgttgttgcaaaactttttggtgcagattcgtttccaaaactattgctactttgtgtgctttaaacaaaataccttgggttgatgaaacatcaacccagtgctaggaatactgtgtatctatcattagctatatgggactatattgtagattgtggtttctcagtagagaagtgactgtagtgtgattctagataaatcatcattagcaattcattcagatggtcaataacttgaaatttatagctgtgataggagttcagaaattggcacatccctttaaaaataacaacagaaaatacaactcctgggaaaaaaggtgctgattctataagattatttatatatgtaagtgtttaaaaagattattttccagaaagtttgtgcagggtttaagttgctactattcaactacactatatataaataaaatatatacaatatatacattgttttcactgtatcacattaaagtacttgggcttcagaagtaagagccaaccaactgaaaacctgagatggagatatgttcaaagaatgagatacaattttttagttttcagtttaagtaactctcagcattacaaaagagtaagtatctcacaaataggaaataaaactaaaacgtggatttaaaaagaactgcacgggctttagggtaaatgctcatcttaaacctcactagagggaagtcttctcaagtttcaagcaagaccatttacttaatgtgaagttttggaaagttataaaggtgtatgttttagccatatgattttaattttaattttgcttcttttaggttcgttcttatttaaagcaatatgattgtgtgactccttgtagttacacttgtgtttcaatcagatcagattgttgtatttattccactattttgcatttaaatgataacataaaagatataaaaaatttaaaactgctatttttcttatagaagagaaaatgggtgttggtgattgtattttaattatttaagcgtctctgtttacctgcctaggaaaacattttatggcagtcttatgtgcaaagatcgtaaaaggacaaaaaatttaaactgcttataataatccaggagttgcattatagccagtagtaaaaataataataataataataaaaccatgtctatagctgtagatgggcttcacatctgtaaagcaatcaattgtatatttttgtgatgtgtaccatactgtgtgctccagcaaatgtccatttgtgtaaatgtatttattttatattgtatatattgttaaatgcaaaaaggagatatgattctgtaactccaatcagttcagatgtgtaactcaaattattatgcctttcaggatgatggtagagcaatattaaacaagcttccacttttgactgct

SEQ ID NO: 9850 - DNA, 5274 bp, Homo sapiens
  source 1..5274: mol_type = unassigned DNA
agctgacaatttactggttcatcaatgaaacaatattaaattatgaagatgtaaggaaaaaatcctacgctaacactgtcgcagtttgaaagacttgaatgagacctgcctcatcagtcatgggatcatagtgtcacagatggaaaagcaactatcagctgaattgtactgaactacacacttggctaattcatcttattgctctacacatctaaaggaaggctcattctgttcttggagtctagacagcatcaggagttgggctcaggcttctctgcagaatgtcaaacaaagatcgacacattgattccagctgttcgtccttcatcaagacggaaccttccagcccagcctccctgacggacagcgtcaaccaccacagccctggtggctcttcagacgccagtgggagctacagttcaaccatgaatggccatcagaacggacttgactcgccacctctctacccttctgctcctatcctgggaggtagtgggcctgtcaggaaactgtatgatgactgctccagcaccattgttgaagatccccagaccaagtgtgaatacatgctcaactcgatgcccaagagactgtgtttagtgtgtggtgacatcgcttctgggtaccactatggggtagcatcatgtgaagcctgcaaggcattcttcaagaggacaattcaaggcaatatagaatacagctgccctgccacgaatgaatgtgaaatcacaaagcgcagacgtaaatcctgccaggcttgccgcttcatgaagtgtttaaaagtgggcatgctgaaagaaggggtgcgtcttgacagagtacgtggaggtcggcagaagtacaagcgcaggatagatgcggagaacagcccatacctgaaccctcagctggttcagccagccaaaaagccatataacaagattgtctcacatttgttggtggctgaaccggagaagatctatgccatgcctgaccctactgtccccgacagtgacatcaaagccctcactacactgtgtgacttggccgaccgagagttggtggttatcattggatgggcgaagcatattccaggcttctccacgctgtccctggcggaccagatgagccttctgcagagtgcttggatggaaattttgatccttggtgtcgtataccggtctctttcgtttgaggatgaacttgtctatgcagacgattatataatggacgaagaccagtccaaattagcaggccttcttgatctaaataatgctatcctgcagctggtaaagaaatacaagagcatgaagctggaaaaagaagaatttgtcaccctcaaagctatagctcttgctaattcagactccatgcacatagaagatgttgaagccgttcagaagcttcaggatgtcttacatgaagcgctgcaggattatgaagctggccagcacatggaagaccctcgtcgagctggcaagatgctgatgacactgccactcctgaggcagacctctaccaaggccgtgcagcatttctacaacatcaaactagaaggcaaagtcccaatgcacaaactttttttggaaatgttggaggccaaggtctgactaaaagctccctgggccttcccatccttcatgttgaaaaagggaaaataaacccaagagtgatgtcgaagaaacttagagtttagttaacaacatcaaaaatcaacagactgcactgataatttagcagcaagactatgaagcagctttcagattcctccataggttcctgatgagtttctttctactttctccatcatcttctttcctctttcttcccacatttctctttctctttattttttctccttttcttctttcacctcccttatttctttgcttctttcattcctagttcccattctcctttattttcttcccgtctgcctgccttctttcttttctttacctactctcattcctctcttttctcatccttccccttttttctaaatttgaaatagctttagtttaaaaaaaaatcctcccttccccctttcctttccctttctttcctttttccctttccttttccctttcctttcctttcctcttgaccttctttccatctttctttttcttccttctgctgctgaacttttaaaagaggtctctaactgaagagagatggaagccagccctgccaaaggatggagatccataatatggatgccagtgaacttattgtgaaccatactgtccccaatgactaaggaatcaaagagagagaaccaacgttcctaaaagtacagtgcaacatatacaaattgactgagtgcagtattagatttcatgggagcagcctctaattagacaacttaagcaacgttgcatcggctgcttcttatcattgcttttccatctagatcagttacagccatttgattccttaattgttttttcaagtcttccaggtatttgttagtttagctactatgtaactttttcagggaatagtttaagctttattcattcatgcaatactaaagagaaataagaatactgcaattttgtgctggctttgaacaattacgaacaataatgaaggacaaatgaatcctgaaggaagatttttaaaaatgttttgtttcttcttacaaatggagatttttttgtaccagctttaccacttttcagccatttattaatatgggaatttaacttactcaagcaatagttgaagggaaggtgcatattatcacggatgcaatttatgttgtgtgccagtctggtcccaaacatcaatttcttaacatgagctccagtttacctaaatgttcactgacacaaaggatgagattacacctacagtgactctgagtagtcacatatataagcactgcacatgagatatagatccgtagaattgtcaggagtgcacctctctacttgggaggtacaattgccatatgatttctagctgccatggtggttaggaatgtgatactgcctgtttgcaaagtcacagaccttgcctcagaaggagctgtgagccagtattcatttaagaggcaataaggcaaatgccagaattaaaaaaaaaaatcatcaaagacagaaaatgcctgaccaaattctaaaacctaatccatataagtttattcatttaggaatgttcgtttaaattaatctgcagtttttaccaagagctaagccaatatatgtgcttttcaaccagtattgtcacagcatgaaagtcaagtcaggttccagactgttaagaggtgtaatctaatgaagaaatcaattagatgccccgaaatctacagtcgctgaataaccaataaacagtaacctccatcaaatgctataccaatggaccagtgttagtagctgctccctgtattatgtgaacagtcttattctatgtacacagatgtaattaaaattgtaatcctaacaaacaaaagaaatgtagttcagcttttcaatgtttcatgtttgctgtgcttttctgaattttatgttgcattcaaagactgttgtcttgttcttgtggtgtttggattcttgtggtgtgtgcttttagacacagggtagaattagagacaatattggatgtacaattcctcaggagactacagtagtatattctattccttaccagtaataaggttcttcctaataataattaagagattgaaactccaaacaagtattcattatgaacagatacacatcaaaatcataataatattttcaaaacaaggaataatttctctaatggtttattatagaataccaatgtatagcttagaaataaaactttgaatatttcaagaatatagataagtctaatttttaaatgctgtatatatggctttcactcaatcatctctcagatgttgttattaactcgctctgtgttgttgcaaaactttttggtgcagattcgtttccaaaactattgctactttgtgtgctttaaacaaaataccttgggttgatgaaacatcaacccagtgctaggaatactgtgtatctatcattagctatatgggactatattgtagattgtggtttctcagtagagaagtgactgtagtgtgattctagataaatcatcattagcaattcattcagatggtcaataacttgaaatttatagctgtgataggagttcagaaattggcacatccctttaaaaataacaacagaaaatacaactcctgggaaaaaaggtgctgattctataagattatttatatatgtaagtgtttaaaaagattattttccagaaagtttgtgcagggtttaagttgctactattcaactacactatatataaataaaatatatacaatatatacattgttttcactgtatcacattaaagtacttgggcttcagaagtaagagccaaccaactgaaaacctgagatggagatatgttcaaagaatgagatacaattttttagttttcagtttaagtaactctcagcattacaaaagagtaagtatctcacaaataggaaataaaactaaaacgtggatttaaaaagaactgcacgggctttagggtaaatgctcatcttaaacctcactagagggaagtcttctcaagtttcaagcaagaccatttacttaatgtgaagttttggaaagttataaaggtgtatgttttagccatatgattttaattttaattttgcttcttttaggttcgttcttatttaaagcaatatgattgtgtgactccttgtagttacacttgtgtttcaatcagatcagattgttgtatttattccactattttgcatttaaatgataacataaaagatataaaaaatttaaaactgctatttttcttatagaagagaaaatgggtgttggtgattgtattttaattatttaagcgtctctgtttacctgcctaggaaaacattttatggcagtcttatgtgcaaagatcgtaaaaggacaaaaaatttaaactgcttataataatccaggagttgcattatagccagtagtaaaaataataataataataataaaaccatgtctatagctgtagatgggcttcacatctgtaaagcaatcaattgtatatttttgtgatgtgtaccatactgtgtgctccagcaaatgtccatttgtgtaaatgtatttattttatattgtatatattgttaaatgcaaaaaggagatatgattctgtaactccaatcagttcagatgtgtaactcaaattattatgcctttcaggatgatggtagagcaatattaaacaagcttccacttt

SEQ ID NO: 9851 - DNA, 5312 bp, Homo sapiens
  source 1..5312: mol_type = unassigned DNA
ggagggcgagggcgggctcctctggaggcggcgggctccaggccgggctccctaaacgggtcagcaattggagcgggaaggccggacagagacagggtcttgctttgtcacccaggctggagtgcagtgccacaatcagagcttactcctgccttgaactcctgggcttcagggatcctgctgcctcggccctccaagcagctgagactacagagctgacaatttactggttcatcaatgaaacaatattaaattatgaagatgtaaggaaaaaatcctacgctaacactgtcgcagtttgaaaggcttctctgcagaatgtcaaacaaagatcgacacattgattccagctgttcgtccttcatcaagacggaaccttccagcccagcctccctgacggacagcgtcaaccaccacagccctggtggctcttcagacgccagtgggagctacagttcaaccatgaatggccatcagaacggacttgactcgccacctctctacccttctgctcctatcctgggaggtagtgggcctgtcaggaaactgtatgatgactgctccagcaccattgttgaagatccccagaccaagtgtgaatacatgctcaactcgatgcccaagagactgtgtttagtgtgtggtgacatcgcttctgggtaccactatggggtagcatcatgtgaagcctgcaaggcattcttcaagaggacaattcaaggcaatatagaatacagctgccctgccacgaatgaatgtgaaatcacaaagcgcagacgtaaatcctgccaggcttgccgcttcatgaagtgtttaaaagtgggcatgctgaaagaaggggtgcgtcttgacagagtacgtggaggtcggcagaagtacaagcgcaggatagatgcggagaacagcccatacctgaaccctcagctggttcagccagccaaaaagccatataacaagattgtctcacatttgttggtggctgaaccggagaagatctatgccatgcctgaccctactgtccccgacagtgacatcaaagccctcactacactgtgtgacttggccgaccgagagttggtggttatcattggatgggcgaagcatattccaggcttctccacgctgtccctggcggaccagatgagccttctgcagagtgcttggatggaaattttgatccttggtgtcgtataccggtctctttcgtttgaggatgaacttgtctatgcagacgattatataatggacgaagaccagtccaaattagcaggccttcttgatctaaataatgctatcctgcagctggtaaagaaatacaagagcatgaagctggaaaaagaagaatttgtcaccctcaaagctatagctcttgctaattcagactccatgcacatagaagatgttgaagccgttcagaagcttcaggatgtcttacatgaagcgctgcaggattatgaagctggccagcacatggaagaccctcgtcgagctggcaagatgctgatgacactgccactcctgaggcagacctctaccaaggccgtgcagcatttctacaacatcaaactagaaggcaaagtcccaatgcacaaactttttttggaaatgttggaggccaaggtctgactaaaagctccctgggccttcccatccttcatgttgaaaaagggaaaataaacccaagagtgatgtcgaagaaacttagagtttagttaacaacatcaaaaatcaacagactgcactgataatttagcagcaagactatgaagcagctttcagattcctccataggttcctgatgagtttctttctactttctccatcatcttctttcctctttcttcccacatttctctttctctttattttttctccttttcttctttcacctcccttatttctttgcttctttcattcctagttcccattctcctttattttcttcccgtctgcctgccttctttcttttctttacctactctcattcctctcttttctcatccttccccttttttctaaatttgaaatagctttagtttaaaaaaaaatcctcccttccccctttcctttccctttctttcctttttccctttccttttccctttcctttcctttcctcttgaccttctttccatctttctttttcttccttctgctgctgaacttttaaaagaggtctctaactgaagagagatggaagccagccctgccaaaggatggagatccataatatggatgccagtgaacttattgtgaaccatactgtccccaatgactaaggaatcaaagagagagaaccaacgttcctaaaagtacagtgcaacatatacaaattgactgagtgcagtattagatttcatgggagcagcctctaattagacaacttaagcaacgttgcatcggctgcttcttatcattgcttttccatctagatcagttacagccatttgattccttaattgttttttcaagtcttccaggtatttgttagtttagctactatgtaactttttcagggaatagtttaagctttattcattcatgcaatactaaagagaaataagaatactgcaattttgtgctggctttgaacaattacgaacaataatgaaggacaaatgaatcctgaaggaagatttttaaaaatgttttgtttcttcttacaaatggagatttttttgtaccagctttaccacttttcagccatttattaatatgggaatttaacttactcaagcaatagttgaagggaaggtgcatattatcacggatgcaatttatgttgtgtgccagtctggtcccaaacatcaatttcttaacatgagctccagtttacctaaatgttcactgacacaaaggatgagattacacctacagtgactctgagtagtcacatatataagcactgcacatgagatatagatccgtagaattgtcaggagtgcacctctctacttgggaggtacaattgccatatgatttctagctgccatggtggttaggaatgtgatactgcctgtttgcaaagtcacagaccttgcctcagaaggagctgtgagccagtattcatttaagaggcaataaggcaaatgccagaattaaaaaaaaaaatcatcaaagacagaaaatgcctgaccaaattctaaaacctaatccatataagtttattcatttaggaatgttcgtttaaattaatctgcagtttttaccaagagctaagccaatatatgtgcttttcaaccagtattgtcacagcatgaaagtcaagtcaggttccagactgttaagaggtgtaatctaatgaagaaatcaattagatgccccgaaatctacagtcgctgaataaccaataaacagtaacctccatcaaatgctataccaatggaccagtgttagtagctgctccctgtattatgtgaacagtcttattctatgtacacagatgtaattaaaattgtaatcctaacaaacaaaagaaatgtagttcagcttttcaatgtttcatgtttgctgtgcttttctgaattttatgttgcattcaaagactgttgtcttgttcttgtggtgtttggattcttgtggtgtgtgcttttagacacagggtagaattagagacaatattggatgtacaattcctcaggagactacagtagtatattctattccttaccagtaataaggttcttcctaataataattaagagattgaaactccaaacaagtattcattatgaacagatacacatcaaaatcataataatattttcaaaacaaggaataatttctctaatggtttattatagaataccaatgtatagcttagaaataaaactttgaatatttcaagaatatagataagtctaatttttaaatgctgtatatatggctttcactcaatcatctctcagatgttgttattaactcgctctgtgttgttgcaaaactttttggtgcagattcgtttccaaaactattgctactttgtgtgctttaaacaaaataccttgggttgatgaaacatcaacccagtgctaggaatactgtgtatctatcattagctatatgggactatattgtagattgtggtttctcagtagagaagtgactgtagtgtgattctagataaatcatcattagcaattcattcagatggtcaataacttgaaatttatagctgtgataggagttcagaaattggcacatccctttaaaaataacaacagaaaatacaactcctgggaaaaaaggtgctgattctataagattatttatatatgtaagtgtttaaaaagattattttccagaaagtttgtgcagggtttaagttgctactattcaactacactatatataaataaaatatatacaatatatacattgttttcactgtatcacattaaagtacttgggcttcagaagtaagagccaaccaactgaaaacctgagatggagatatgttcaaagaatgagatacaattttttagttttcagtttaagtaactctcagcattacaaaagagtaagtatctcacaaataggaaataaaactaaaacgtggatttaaaaagaactgcacgggctttagggtaaatgctcatcttaaacctcactagagggaagtcttctcaagtttcaagcaagaccatttacttaatgtgaagttttggaaagttataaaggtgtatgttttagccatatgattttaattttaattttgcttcttttaggttcgttcttatttaaagcaatatgattgtgtgactccttgtagttacacttgtgtttcaatcagatcagattgttgtatttattccactattttgcatttaaatgataacataaaagatataaaaaatttaaaactgctatttttcttatagaagagaaaatgggtgttggtgattgtattttaattatttaagcgtctctgtttacctgcctaggaaaacattttatggcagtcttatgtgcaaagatcgtaaaaggacaaaaaatttaaactgcttataataatccaggagttgcattatagccagtagtaaaaataataataataataataaaaccatgtctatagctgtagatgggcttcacatctgtaaagcaatcaattgtatatttttgtgatgtgtaccatactgtgtgctccagcaaatgtccatttgtgtaaatgtatttattttatattgtatatattgttaaatgcaaaaaggagatatgattctgtaactccaatcagttcagatgtgtaactcaaattattatgcctttcaggatgatggtagagcaatattaaacaagcttccactttt

SEQ ID NO: 9852 - DNA, 5532 bp, Homo sapiens
  source 1..5532: mol_type = unassigned DNA
aagtccttgattaggagagtgtgagagctttggtcccaactggctgtgcctataggcttgtcactaggagaacatttgtgttaattgcactgtgctctgtcaaggaaactttgatttatagctggggtgcacaaataatggttgccggtcgcacatggattcggtagaactttgccttcctgaatctttttccctgcactacgaggaagaacttgaatgagacctgcctcatcagtcatgggatcatagtgtcacagatggaaaagcaactatcagctgaattgtactgaactacacacttggctaattcatcttattgctctacacatctaaaggaaggctcattctgttcttggagtctagacagcatcaggagttgggctcagtgaacaaaactttaatgtctagagcatttatgagggttttaatgattggaaaatctatcctgagaatgtggtcaccatatgtgacagccttgctttctatcttgtcttcagtttctggggcttctctgcagaatgtcaaacaaagatcgacacattgattccagctgttcgtccttcatcaagacggaaccttccagcccagcctccctgacggacagcgtcaaccaccacagccctggtggctcttcagacgccagtgggagctacagttcaaccatgaatggccatcagaacggacttgactcgccacctctctacccttctgctcctatcctgggaggtagtgggcctgtcaggaaactgtatgatgactgctccagcaccattgttgaagatccccagaccaagtgtgaatacatgctcaactcgatgcccaagagactgtgtttagtgtgtggtgacatcgcttctgggtaccactatggggtagcatcatgtgaagcctgcaaggcattcttcaagaggacaattcaaggcaatatagaatacagctgccctgccacgaatgaatgtgaaatcacaaagcgcagacgtaaatcctgccaggcttgccgcttcatgaagtgtttaaaagtgggcatgctgaaagaaggggtgcgtcttgacagagtacgtggaggtcggcagaagtacaagcgcaggatagatgcggagaacagcccatacctgaaccctcagctggttcagccagccaaaaagccattgctctggtctgatcctgcagataacaagattgtctcacatttgttggtggctgaaccggagaagatctatgccatgcctgaccctactgtccccgacagtgacatcaaagccctcactacactgtgtgacttggccgaccgagagttggtggttatcattggatgggcgaagcatattccaggcttctccacgctgtccctggcggaccagatgagccttctgcagagtgcttggatggaaattttgatccttggtgtcgtataccggtctctttcgtttgaggatgaacttgtctatgcagacgattatataatggacgaagaccagtccaaattagcaggccttcttgatctaaataatgctatcctgcagctggtaaagaaatacaagagcatgaagctggaaaaagaagaatttgtcaccctcaaagctatagctcttgctaattcagactccatgcacatagaagatgttgaagccgttcagaagcttcaggatgtcttacatgaagcgctgcaggattatgaagctggccagcacatggaagaccctcgtcgagctggcaagatgctgatgacactgccactcctgaggcagacctctaccaaggccgtgcagcatttctacaacatcaaactagaaggcaaagtcccaatgcacaaactttttttggaaatgttggaggccaaggtctgactaaaagctccctgggccttcccatccttcatgttgaaaaagggaaaataaacccaagagtgatgtcgaagaaacttagagtttagttaacaacatcaaaaatcaacagactgcactgataatttagcagcaagactatgaagcagctttcagattcctccataggttcctgatgagtttctttctactttctccatcatcttctttcctctttcttcccacatttctctttctctttattttttctccttttcttctttcacctcccttatttctttgcttctttcattcctagttcccattctcctttattttcttcccgtctgcctgccttctttcttttctttacctactctcattcctctcttttctcatccttccccttttttctaaatttgaaatagctttagtttaaaaaaaaatcctcccttccccctttcctttccctttctttcctttttccctttccttttccctttcctttcctttcctcttgaccttctttccatctttctttttcttccttctgctgctgaacttttaaaagaggtctctaactgaagagagatggaagccagccctgccaaaggatggagatccataatatggatgccagtgaacttattgtgaaccatactgtccccaatgactaaggaatcaaagagagagaaccaacgttcctaaaagtacagtgcaacatatacaaattgactgagtgcagtattagatttcatgggagcagcctctaattagacaacttaagcaacgttgcatcggctgcttcttatcattgcttttccatctagatcagttacagccatttgattccttaattgttttttcaagtcttccaggtatttgttagtttagctactatgtaactttttcagggaatagtttaagctttattcattcatgcaatactaaagagaaataagaatactgcaattttgtgctggctttgaacaattacgaacaataatgaaggacaaatgaatcctgaaggaagatttttaaaaatgttttgtttcttcttacaaatggagatttttttgtaccagctttaccacttttcagccatttattaatatgggaatttaacttactcaagcaatagttgaagggaaggtgcatattatcacggatgcaatttatgttgtgtgccagtctggtcccaaacatcaatttcttaacatgagctccagtttacctaaatgttcactgacacaaaggatgagattacacctacagtgactctgagtagtcacatatataagcactgcacatgagatatagatccgtagaattgtcaggagtgcacctctctacttgggaggtacaattgccatatgatttctagctgccatggtggttaggaatgtgatactgcctgtttgcaaagtcacagaccttgcctcagaaggagctgtgagccagtattcatttaagaggcaataaggcaaatgccagaattaaaaaaaaaaatcatcaaagacagaaaatgcctgaccaaattctaaaacctaatccatataagtttattcatttaggaatgttcgtttaaattaatctgcagtttttaccaagagctaagccaatatatgtgcttttcaaccagtattgtcacagcatgaaagtcaagtcaggttccagactgttaagaggtgtaatctaatgaagaaatcaattagatgccccgaaatctacagtcgctgaataaccaataaacagtaacctccatcaaatgctataccaatggaccagtgttagtagctgctccctgtattatgtgaacagtcttattctatgtacacagatgtaattaaaattgtaatcctaacaaacaaaagaaatgtagttcagcttttcaatgtttcatgtttgctgtgcttttctgaattttatgttgcattcaaagactgttgtcttgttcttgtggtgtttggattcttgtggtgtgtgcttttagacacagggtagaattagagacaatattggatgtacaattcctcaggagactacagtagtatattctattccttaccagtaataaggttcttcctaataataattaagagattgaaactccaaacaagtattcattatgaacagatacacatcaaaatcataataatattttcaaaacaaggaataatttctctaatggtttattatagaataccaatgtatagcttagaaataaaactttgaatatttcaagaatatagataagtctaatttttaaatgctgtatatatggctttcactcaatcatctctcagatgttgttattaactcgctctgtgttgttgcaaaactttttggtgcagattcgtttccaaaactattgctactttgtgtgctttaaacaaaataccttgggttgatgaaacatcaacccagtgctaggaatactgtgtatctatcattagctatatgggactatattgtagattgtggtttctcagtagagaagtgactgtagtgtgattctagataaatcatcattagcaattcattcagatggtcaataacttgaaatttatagctgtgataggagttcagaaattggcacatccctttaaaaataacaacagaaaatacaactcctgggaaaaaaggtgctgattctataagattatttatatatgtaagtgtttaaaaagattattttccagaaagtttgtgcagggtttaagttgctactattcaactacactatatataaataaaatatatacaatatatacattgttttcactgtatcacattaaagtacttgggcttcagaagtaagagccaaccaactgaaaacctgagatggagatatgttcaaagaatgagatacaattttttagttttcagtttaagtaactctcagcattacaaaagagtaagtatctcacaaataggaaataaaactaaaacgtggatttaaaaagaactgcacgggctttagggtaaatgctcatcttaaacctcactagagggaagtcttctcaagtttcaagcaagaccatttacttaatgtgaagttttggaaagttataaaggtgtatgttttagccatatgattttaattttaattttgcttcttttaggttcgttcttatttaaagcaatatgattgtgtgactccttgtagttacacttgtgtttcaatcagatcagattgttgtatttattccactattttgcatttaaatgataacataaaagatataaaaaatttaaaactgctatttttcttatagaagagaaaatgggtgttggtgattgtattttaattatttaagcgtctctgtttacctgcctaggaaaacattttatggcagtcttatgtgcaaagatcgtaaaaggacaaaaaatttaaactgcttataataatccaggagttgcattatagccagtagtaaaaataataataataataataaaaccatgtctatagctgtagatgggcttcacatctgtaaagcaatcaattgtatatttttgtgatgtgtaccatactgtgtgctccagcaaatgtccatttgtgtaaatgtatttattttatattgtatatattgttaaatgcaaaaaggagatatgattctgtaactccaatcagttcagatgtgtaactcaaattattatgcctttcaggatgatggtagagcaatattaaacaagcttccacttt

SEQ ID NO: 9853 - DNA, 5216 bp, Homo sapiens
  source 1..5216: mol_type = unassigned DNA
aagtccttgattaggagagtgtgagagctttggtcccaactggctgtgcctataggcttgtcactaggagaacatttgtgttaattgcactgtgctctgtcaaggaaactttgatttatagctggggtgcacaaataatggttgccggtcgcacatggattcggtagaactttgccttcctgaatctttttccctgcactacgaggaagagcttctctgcagaatgtcaaacaaagatcgacacattgattccagctgttcgtccttcatcaagacggaaccttccagcccagcctccctgacggacagcgtcaaccaccacagccctggtggctcttcagacgccagtgggagctacagttcaaccatgaatggccatcagaacggacttgactcgccacctctctacccttctgctcctatcctgggaggtagtgggcctgtcaggaaactgtatgatgactgctccagcaccattgttgaagatccccagaccaagtgtgaatacatgctcaactcgatgcccaagagactgtgtttagtgtgtggtgacatcgcttctgggtaccactatggggtagcatcatgtgaagcctgcaaggcattcttcaagaggacaattcaaggcaatatagaatacagctgccctgccacgaatgaatgtgaaatcacaaagcgcagacgtaaatcctgccaggcttgccgcttcatgaagtgtttaaaagtgggcatgctgaaagaaggggtgcgtcttgacagagtacgtggaggtcggcagaagtacaagcgcaggatagatgcggagaacagcccatacctgaaccctcagctggttcagccagccaaaaagccatataacaagattgtctcacatttgttggtggctgaaccggagaagatctatgccatgcctgaccctactgtccccgacagtgacatcaaagccctcactacactgtgtgacttggccgaccgagagttggtggttatcattggatgggcgaagcatattccaggcttctccacgctgtccctggcggaccagatgagccttctgcagagtgcttggatggaaattttgatccttggtgtcgtataccggtctctttcgtttgaggatgaacttgtctatgcagacgattatataatggacgaagaccagtccaaattagcaggccttcttgatctaaataatgctatcctgcagctggtaaagaaatacaagagcatgaagctggaaaaagaagaatttgtcaccctcaaagctatagctcttgctaattcagactccatgcacatagaagatgttgaagccgttcagaagcttcaggatgtcttacatgaagcgctgcaggattatgaagctggccagcacatggaagaccctcgtcgagctggcaagatgctgatgacactgccactcctgaggcagacctctaccaaggccgtgcagcatttctacaacatcaaactagaaggcaaagtcccaatgcacaaactttttttggaaatgttggaggccaaggtctgactaaaagctccctgggccttcccatccttcatgttgaaaaagggaaaataaacccaagagtgatgtcgaagaaacttagagtttagttaacaacatcaaaaatcaacagactgcactgataatttagcagcaagactatgaagcagctttcagattcctccataggttcctgatgagtttctttctactttctccatcatcttctttcctctttcttcccacatttctctttctctttattttttctccttttcttctttcacctcccttatttctttgcttctttcattcctagttcccattctcctttattttcttcccgtctgcctgccttctttcttttctttacctactctcattcctctcttttctcatccttccccttttttctaaatttgaaatagctttagtttaaaaaaaaatcctcccttccccctttcctttccctttctttcctttttccctttccttttccctttcctttcctttcctcttgaccttctttccatctttctttttcttccttctgctgctgaacttttaaaagaggtctctaactgaagagagatggaagccagccctgccaaaggatggagatccataatatggatgccagtgaacttattgtgaaccatactgtccccaatgactaaggaatcaaagagagagaaccaacgttcctaaaagtacagtgcaacatatacaaattgactgagtgcagtattagatttcatgggagcagcctctaattagacaacttaagcaacgttgcatcggctgcttcttatcattgcttttccatctagatcagttacagccatttgattccttaattgttttttcaagtcttccaggtatttgttagtttagctactatgtaactttttcagggaatagtttaagctttattcattcatgcaatactaaagagaaataagaatactgcaattttgtgctggctttgaacaattacgaacaataatgaaggacaaatgaatcctgaaggaagatttttaaaaatgttttgtttcttcttacaaatggagatttttttgtaccagctttaccacttttcagccatttattaatatgggaatttaacttactcaagcaatagttgaagggaaggtgcatattatcacggatgcaatttatgttgtgtgccagtctggtcccaaacatcaatttcttaacatgagctccagtttacctaaatgttcactgacacaaaggatgagattacacctacagtgactctgagtagtcacatatataagcactgcacatgagatatagatccgtagaattgtcaggagtgcacctctctacttgggaggtacaattgccatatgatttctagctgccatggtggttaggaatgtgatactgcctgtttgcaaagtcacagaccttgcctcagaaggagctgtgagccagtattcatttaagaggcaataaggcaaatgccagaattaaaaaaaaaaatcatcaaagacagaaaatgcctgaccaaattctaaaacctaatccatataagtttattcatttaggaatgttcgtttaaattaatctgcagtttttaccaagagctaagccaatatatgtgcttttcaaccagtattgtcacagcatgaaagtcaagtcaggttccagactgttaagaggtgtaatctaatgaagaaatcaattagatgccccgaaatctacagtcgctgaataaccaataaacagtaacctccatcaaatgctataccaatggaccagtgttagtagctgctccctgtattatgtgaacagtcttattctatgtacacagatgtaattaaaattgtaatcctaacaaacaaaagaaatgtagttcagcttttcaatgtttcatgtttgctgtgcttttctgaattttatgttgcattcaaagactgttgtcttgttcttgtggtgtttggattcttgtggtgtgtgcttttagacacagggtagaattagagacaatattggatgtacaattcctcaggagactacagtagtatattctattccttaccagtaataaggttcttcctaataataattaagagattgaaactccaaacaagtattcattatgaacagatacacatcaaaatcataataatattttcaaaacaaggaataatttctctaatggtttattatagaataccaatgtatagcttagaaataaaactttgaatatttcaagaatatagataagtctaatttttaaatgctgtatatatggctttcactcaatcatctctcagatgttgttattaactcgctctgtgttgttgcaaaactttttggtgcagattcgtttccaaaactattgctactttgtgtgctttaaacaaaataccttgggttgatgaaacatcaacccagtgctaggaatactgtgtatctatcattagctatatgggactatattgtagattgtggtttctcagtagagaagtgactgtagtgtgattctagataaatcatcattagcaattcattcagatggtcaataacttgaaatttatagctgtgataggagttcagaaattggcacatccctttaaaaataacaacagaaaatacaactcctgggaaaaaaggtgctgattctataagattatttatatatgtaagtgtttaaaaagattattttccagaaagtttgtgcagggtttaagttgctactattcaactacactatatataaataaaatatatacaatatatacattgttttcactgtatcacattaaagtacttgggcttcagaagtaagagccaaccaactgaaaacctgagatggagatatgttcaaagaatgagatacaattttttagttttcagtttaagtaactctcagcattacaaaagagtaagtatctcacaaataggaaataaaactaaaacgtggatttaaaaagaactgcacgggctttagggtaaatgctcatcttaaacctcactagagggaagtcttctcaagtttcaagcaagaccatttacttaatgtgaagttttggaaagttataaaggtgtatgttttagccatatgattttaattttaattttgcttcttttaggttcgttcttatttaaagcaatatgattgtgtgactccttgtagttacacttgtgtttcaatcagatcagattgttgtatttattccactattttgcatttaaatgataacataaaagatataaaaaatttaaaactgctatttttcttatagaagagaaaatgggtgttggtgattgtattttaattatttaagcgtctctgtttacctgcctaggaaaacattttatggcagtcttatgtgcaaagatcgtaaaaggacaaaaaatttaaactgcttataataatccaggagttgcattatagccagtagtaaaaataataataataataataaaaccatgtctatagctgtagatgggcttcacatctgtaaagcaatcaattgtatatttttgtgatgtgtaccatactgtgtgctccagcaaatgtccatttgtgtaaatgtatttattttatattgtatatattgttaaatgcaaaaaggagatatgattctgtaactccaatcagttcagatgtgtaactcaaattattatgcctttcaggatgatggtagagcaatattaaacaagcttccacttt

SEQ ID NO: 9854 - DNA, 565 bp, Homo sapiens
  source 1..565: mol_type = unassigned DNA
agtccttgattaggagagtgtgagagctttggtcccaactggctgtgcctataggcttgtcactaggagaacatttgtgttaattgcactgtgctctgtcaaggaaactttgatttatagctggggtgcacaaataatggttgccggtcgcacatggattcggtagaactttgccttcctgaatctttttccctgcactacgaggaagaacttgaatgagacctgcctcatcagtcatgggatcatagtgtcacagatggaaaagcaactatcagctgaattgtactgaactacacacttggctaattcatcttattgctctacacatctaaaggaaggctcattctgttcttggagtctagacagcatcaggagttgggctcaggcttctctgcagaatgtcaaacaaagatcgacacattgattccagctgttcgtccttcatcaagacggaaccttccagcccagcctccctgacggacagcgtcaaccaccacagccctggtggctcttcagacgccagtgggagctacagttcaaccatgaatggccatcagaacggact

SEQ ID NO: 9855 - DNA, 583 bp, Homo sapiens
  source 1..583: mol_type = unassigned DNA
aactggctgtgcctataggcttgtcactaggagaacatttgtgttaattgcactgtgctctgtcaaggaaactttgatttatagctggggtgcacaaataatggttgccggtcgcacatggattcggtagaactttgccttcctgaatctttttccctgcactacgaggaagatgaacaaaactttaatgtctagagcatttatgagggttttaatgattggaaaatctatcctgagaatgtggtcaccatatgtgacagccttgctttctatcttgtcttcagtttctggggcttctctgcagaatgtcaaacaaagatcgacacattgattccagctgttcgtccttcatcaagacggaaccttccagcccagcctccctgacggacagcgtcaaccaccacagccctggtggctcttcagacgccagtgggagctacagttcaaccatgaatggccatcagaacggacttgactcgccacctctctacccttctgctcctatcctgggaggtagtgggcctgtcaggaaactgtatgatgactgctccagcaccattgttgaagatccccagaccaagtg

SEQ ID NO: 9856 - DNA, 1464 bp, Homo sapiens
  source 1..1464: mol_type = unassigned DNA
ctggggtgcacaaataatggttgccggtcgcacatggattcggtagaactttgccttcctgaatctttttccctgcactacgaggaagagtagacttgaatgagacctgcctcatcagtcatgggatcatagtgtcacagatggaaaagcaactatcagctgaattgtactgaactacacacttggctaattcatcttattgctctacacatctaaaggaaggctcattctgttcttggagtctagacagcatcaggagttgggctcagtgaacaaaactttaatgtctagagcatttatgagggttttaatgattggaaaatctatcctgagaatgtggtcaccatatgtgacagccttgctttctatcttgtcttcagtttctggggcttctctgcagaatgtcaaacaaagatcgacacattgattccagctgttcgtccttcatcaagacggaaccttccagcccagcctccctgacggacagcgtcaaccaccacagccctggtggctcttcagacgccagtgggagctacagttcaaccatgaatggccatcagaacggacttgactcgccacctctctacccttctgctcctatcctgggaggtagtgggcctgtcaggaaactgtatgatgactgctccagcaccattgttgaagatccccagaccaagtgtgaatacatgctcaactcgatgcccaagagactgtgtttagtgtgtggtgacatcgcttctgggtaccactatggggtagcatcatgtgaagcctgcaaggcattcttcaagaggacaattcaaggcaatatagaatacagctgccctgccacgaatgaatgtgaaatcacaaagcgcagacgtaaatcctgccaggcttgccgcttcatgaagtgtttaaaagtgggcatgctgaaagaaggggtgcgtcttgacagagtacgtggaggtcggcagaagtacaagcgcaggatagatgcggagaacagcccatacctgaaccctcagctggttcagccagccaaaaagccatataacaagattgtctcacatttgttggtggctgaaccggagaagatctatgccatgcctgaccctactgtccccgacagtgacatcaaagccctcactacactgtgtgacttggccgaccgagagttggtggttatcattggatgggcgaagcatattccaggcttctccacgctgtccctggcggaccagatgagccttctgcagagtgcttggatggaaattttgatccttggtgtcgtataccggtctctttcgtttgaggatgaacttgtctatgcagacgattatataatggacgaagaccagtccaaattagcaggccttcttgatctaaataatgctatcctgcagctggtaaagaaatacaagagcatgaagctggaaaaagaagaatttgtcaccctcaaagctatagctcttgctaattcag

SEQ ID NO: 9857 - DNA, 584 bp, Homo sapiens
  source 1..584: mol_type = unassigned DNA
tttggtcccaactggctgtgcctataggcttgtcactaggagaacatttgtgttaattgcactgtgctctgtcaaggaaactttgatttatagctggggtgcacaaataatggttgccggtcgcacatggattcggtagaactttgccttcctgaatctttttccctgcactacgaggaagactggacaacacctgataccaacaatataatgtcacctctgctatagatcacccaagaccagctgcatttacatccagatgttaactactgcagactaagctattaagagtttaacaaatacaagcactggctgagcttcagaccttccatcgaaatgcagaccactttgaacatcagcacgtgcatgtgggaattcaaactcctgacggttcattcacgatcacacatttacctggatgcttctctgcagaatgtcaaacaaagatcgacacattgattccagctgttcgtccttcatcaagacggaaccttccagcccagcctccctgacggacagcgtcaaccaccacagccctggtggctcttcagacgccagtgggagctacagttcaaccatgaatg

SEQ ID NO: 9858 - DNA, 3015 bp, Homo sapiens
  source 1..3015: mol_type = unassigned DNA
tgacaatttactggttcatcaatgaaacaatattaaattatgaagatgtaaggaaaaaatcctacgctaacactgtcgcagtttgaaaggtccgtgagagaaaagttaattatgatgttatttcaaactttaaaaagttgaagtctattggaaaccttcttataagaaaccttcctagtcagagaattcaactttcttcttttcttcattcatgaaaatgcagatccactgagaaagggaataaggcttctctgcagaatgtcaaacaaagatcgacacattgattccagctgttcgtccttcatcaagacggaaccttccagcccagcctccctgacggacagcgtcaaccaccacagccctggtggctcttcagacgccagtgggagctacagttcaaccatgaatggccatcagaacggacttgactcgccacctctctacccttctgctcctatcctgggaggtagtgggcctgtcaggaaactgtatgatgactgctccagcaccattgttgaagatccccagaccaagtgtgaatacatgctcaactcgatgcccaagagactgtgtttagtgtgtggtgacatcgcttctgggtaccactatggggtagcatcatgtgaagcctgcaaggcattcttcaagaggacaattcaaggcaatatagaatacagctgccctgccacgaatgaatgtgaaatcacaaagcgcagacgtaaatcctgccaggcttgccgcttcatgaagtgtttaaaagtgggcatgctgaaagaaggggtgcgtcttgacagagtacgtggaggtcggcagaagtacaagcgcaggatagatgcggagaacagcccatacctgaaccctcagctggttcagccagccaaaaagccatataacaagattgtctcacatttgttggtggctgaaccggagaagatctatgccatgcctgaccctactgtccccgacagtgacatcaaagccctcactacactgtgtgacttggccgaccgagagttggtggttatcattggatgggcgaagcatattccaggcttctccacgctgtccctggcggaccagatgagccttctgcagagtgcttggatggaaattttgatccttggtgtcgtataccggtctctttcgtttgaggatgaacttgtctatgcagacgattatataatggacgaagaccagtccaaattagcaggccttcttgatctaaataatgctatcctgcagctggtaaagaaatacaagagcatgaagctggaaaaagaagaatttgtcaccctcaaagctatagctcttgctaattcagactccatgcacatagaagatgttgaagccgttcagaagcttcaggatgtcttacatgaagcgctgcaggattatgaagctggccagcacatggaagaccctcgtcgagctggcaagatgctgatgacactgccactcctgaggcagacctctaccaaggccgtgcagcatttctacaacatcaaactagaaggcaaagtcccaatgcacaaactttttttggaaatgttggaggccaaggtctgactaaaagctccctgggccttcccatccttcatgttgaaaaagggaaaataaacccaagagtgatgtcgaagaaacttagagtttagttaacaacatcaaaaatcaacagactgcactgataatttagcagcaagactatgaagcagctttcagattcctccataggttcctgatgagtttctttctactttctccatcatcttctttcctctttcttcccacatttctctttctctttattttttctccttttcttctttcacctcccttatttctttgcttctttcattcctagttcccattctcctttattttcttcccgtctgcctgccttctttcttttctttacctactctcattcctctcttttctcatccttccccttttttctaaatttgaaatagctttagtttaaaaaaaaatcctcccttccccctttcctttccctttctttcctttttccctttccttttccctttcctttcctttcctcttgaccttctttccatctttctttttcttccttctgctgctgaacttttaaaagaggtctctaactgaagagagatggaagccagccctgccaaaggatggagatccataatatggatgccagtgaacttattgtgaaccatactgtccccaatgactaaggaatcaaagagagagaaccaacgttcctaaaagtacagtgcaacatatacaaattgactgagtgcagtattagatttcatgggagcagcctctaattagacaacttaagcaacgttgcatcggctgcttcttatcattgcttttccatctagatcagttacagccatttgattccttaattgttttttcaagtcttccaggtatttgttagtttagctactatgtaactttttcagggaatagtttaagctttattcattcatgcaatactaaagagaaataagaatactgcaattttgtgctggctttgaacaattacgaacaataatgaaggacaaatgaatcctgaaggaagatttttaaaaatgttttgtttcttcttacaaatggagatttttttgtaccagctttaccacttttcagccatttattaatatgggaatttaacttactcaagcaatagttgaagggaaggtgcatattatcacggatgcaatttatgttgtgtgccagtctggtcccaaacatcaatttcttaacatgagctccagtttacctaaatgttcactgacacaaaggatgagattacacctacagtgactctgagtagtcacatatataagcactgcacatgagatatagatccgtagaattgtcaggagtgcacctctctacttgggaggtacaattgccatatgatttctagctgccatggtggttaggaatgtgatactgcctgtttgcaaagtcacagaccttgcctcagaaggagctgtgagccagtattcatttaag

SEQ ID NO: 9859 - DNA, 5304 bp, Homo sapiens
  source 1..5304: mol_type = unassigned DNA
gagggcgagggcgggctcctctggaggcggcgggctccaggccgggctccctaaacgggtcagcaattggagcgggaaggccggacagagctgacaatttactggttcatcaatgaaacaatattaaattatgaagatgtaaggaaaaaatcctacgctaacactgtcgcagtttgaaagctttaaaaagttgaagtctattggaaaccttcttataagaaaccttcctagtcagagaattcaactttcttcttttcttcattcatgaaaatgcagatccactgagaaagggaataaggcttctctgcagaatgtcaaacaaagatcgacacattgattccagctgttcgtccttcatcaagacggaaccttccagcccagcctccctgacggacagcgtcaaccaccacagccctggtggctcttcagacgccagtgggagctacagttcaaccatgaatggccatcagaacggacttgactcgccacctctctacccttctgctcctatcctgggaggtagtgggcctgtcaggaaactgtatgatgactgctccagcaccattgttgaagatccccagaccaagtgtgaatacatgctcaactcgatgcccaagagactgtgtttagtgtgtggtgacatcgcttctgggtaccactatggggtagcatcatgtgaagcctgcaaggcattcttcaagaggacaattcaaggcaatatagaatacagctgccctgccacgaatgaatgtgaaatcacaaagcgcagacgtaaatcctgccaggcttgccgcttcatgaagtgtttaaaagtgggcatgctgaaagaaggggtgcgtcttgacagagtacgtggaggtcggcagaagtacaagcgcaggatagatgcggagaacagcccatacctgaaccctcagctggttcagccagccaaaaagccatataacaagattgtctcacatttgttggtggctgaaccggagaagatctatgccatgcctgaccctactgtccccgacagtgacatcaaagccctcactacactgtgtgacttggccgaccgagagttggtggttatcattggatgggcgaagcatattccaggcttctccacgctgtccctggcggaccagatgagccttctgcagagtgcttggatggaaattttgatccttggtgtcgtataccggtctctttcgtttgaggatgaacttgtctatgcagacgattatataatggacgaagaccagtccaaattagcaggccttcttgatctaaataatgctatcctgcagctggtaaagaaatacaagagcatgaagctggaaaaagaagaatttgtcaccctcaaagctatagctcttgctaattcagactccatgcacatagaagatgttgaagccgttcagaagcttcaggatgtcttacatgaagcgctgcaggattatgaagctggccagcacatggaagaccctcgtcgagctggcaagatgctgatgacactgccactcctgaggcagacctctaccaaggccgtgcagcatttctacaacatcaaactagaaggcaaagtcccaatgcacaaactttttttggaaatgttggaggccaaggtctgactaaaagctccctgggccttcccatccttcatgttgaaaaagggaaaataaacccaagagtgatgtcgaagaaacttagagtttagttaacaacatcaaaaatcaacagactgcactgataatttagcagcaagactatgaagcagctttcagattcctccataggttcctgatgagtttctttctactttctccatcatcttctttcctctttcttcccacatttctctttctctttattttttctccttttcttctttcacctcccttatttctttgcttctttcattcctagttcccattctcctttattttcttcccgtctgcctgccttctttcttttctttacctactctcattcctctcttttctcatccttccccttttttctaaatttgaaatagctttagtttaaaaaaaaatcctcccttccccctttcctttccctttctttcctttttccctttccttttccctttcctttcctttcctcttgaccttctttccatctttctttttcttccttctgctgctgaacttttaaaagaggtctctaactgaagagagatggaagccagccctgccaaaggatggagatccataatatggatgccagtgaacttattgtgaaccatactgtccccaatgactaaggaatcaaagagagagaaccaacgttcctaaaagtacagtgcaacatatacaaattgactgagtgcagtattagatttcatgggagcagcctctaattagacaacttaagcaacgttgcatcggctgcttcttatcattgcttttccatctagatcagttacagccatttgattccttaattgttttttcaagtcttccaggtatttgttagtttagctactatgtaactttttcagggaatagtttaagctttattcattcatgcaatactaaagagaaataagaatactgcaattttgtgctggctttgaacaattacgaacaataatgaaggacaaatgaatcctgaaggaagatttttaaaaatgttttgtttcttcttacaaatggagatttttttgtaccagctttaccacttttcagccatttattaatatgggaatttaacttactcaagcaatagttgaagggaaggtgcatattatcacggatgcaatttatgttgtgtgccagtctggtcccaaacatcaatttcttaacatgagctccagtttacctaaatgttcactgacacaaaggatgagattacacctacagtgactctgagtagtcacatatataagcactgcacatgagatatagatccgtagaattgtcaggagtgcacctctctacttgggaggtacaattgccatatgatttctagctgccatggtggttaggaatgtgatactgcctgtttgcaaagtcacagaccttgcctcagaaggagctgtgagccagtattcatttaagaggcaataaggcaaatgccagaattaaaaaaaaaaatcatcaaagacagaaaatgcctgaccaaattctaaaacctaatccatataagtttattcatttaggaatgttcgtttaaattaatctgcagtttttaccaagagctaagccaatatatgtgcttttcaaccagtattgtcacagcatgaaagtcaagtcaggttccagactgttaagaggtgtaatctaatgaagaaatcaattagatgccccgaaatctacagtcgctgaataaccaataaacagtaacctccatcaaatgctataccaatggaccagtgttagtagctgctccctgtattatgtgaacagtcttattctatgtacacagatgtaattaaaattgtaatcctaacaaacaaaagaaatgtagttcagcttttcaatgtttcatgtttgctgtgcttttctgaattttatgttgcattcaaagactgttgtcttgttcttgtggtgtttggattcttgtggtgtgtgcttttagacacagggtagaattagagacaatattggatgtacaattcctcaggagactacagtagtatattctattccttaccagtaataaggttcttcctaataataattaagagattgaaactccaaacaagtattcattatgaacagatacacatcaaaatcataataatattttcaaaacaaggaataatttctctaatggtttattatagaataccaatgtatagcttagaaataaaactttgaatatttcaagaatatagataagtctaatttttaaatgctgtatatatggctttcactcaatcatctctcagatgttgttattaactcgctctgtgttgttgcaaaactttttggtgcagattcgtttccaaaactattgctactttgtgtgctttaaacaaaataccttgggttgatgaaacatcaacccagtgctaggaatactgtgtatctatcattagctatatgggactatattgtagattgtggtttctcagtagagaagtgactgtagtgtgattctagataaatcatcattagcaattcattcagatggtcaataacttgaaatttatagctgtgataggagttcagaaattggcacatccctttaaaaataacaacagaaaatacaactcctgggaaaaaaggtgctgattctataagattatttatatatgtaagtgtttaaaaagattattttccagaaagtttgtgcagggtttaagttgctactattcaactacactatatataaataaaatatatacaatatatacattgttttcactgtatcacattaaagtacttgggcttcagaagtaagagccaaccaactgaaaacctgagatggagatatgttcaaagaatgagatacaattttttagttttcagtttaagtaactctcagcattacaaaagagtaagtatctcacaaataggaaataaaactaaaacgtggatttaaaaagaactgcacgggctttagggtaaatgctcatcttaaacctcactagagggaagtcttctcaagtttcaagcaagaccatttacttaatgtgaagttttggaaagttataaaggtgtatgttttagccatatgattttaattttaattttgcttcttttaggttcgttcttatttaaagcaatatgattgtgtgactccttgtagttacacttgtgtttcaatcagatcagattgttgtatttattccactattttgcatttaaatgataacataaaagatataaaaaatttaaaactgctatttttcttatagaagagaaaatgggtgttggtgattgtattttaattatttaagcgtctctgtttacctgcctaggaaaacattttatggcagtcttatgtgcaaagatcgtaaaaggacaaaaaatttaaactgcttataataatccaggagttgcattatagccagtagtaaaaataataataataataataaaaccatgtctatagctgtagatgggcttcacatctgtaaagcaatcaattgtatatttttgtgatgtgtaccatactgtgtgctccagcaaatgtccatttgtgtaaatgtatttattttatattgtatatattgttaaatgcaaaaaggagatatgattctgtaactccaatcagttcagatgtgtaactcaaattattatgcctttcaggatgatggtagagcaatattaaacaagcttccacttt

SEQ ID NO: 9860 - DNA, 2074 bp, Homo sapiens
  source 1..2074: mol_type = unassigned DNA
attctgggcaaagtgtggtgacttgtggattttcactgtgacgatgttgctacacggtccttcacttggagttagtgcaacaaggagacatctgagcttaaaatttatgaaacatctaaagaaatcaagctttatataggatcaccgttgtgggttgaattgtgtatccccaaaagatgttgaagtcctgaccacctccctataccttacaatatagccttttacggaagtagggtctttgcagaagatcaagttaagatgaaatcatttgattgggccctagttcaatatatcttatgtccttataaaaggagacaatttggacacagggacaaggggagaatgccacataaagattggaattatgctgccataagccaaggaactccaaagatcgctggcaagctgctaaaagctagcacagattcatggaacagagtctccgtcatagcctacaaaaggaatcaaccctgctgacatcttgatttcagacttctagcctccagaactagctgacaatttactggttcatcaatgaaacaatattaaattatgaagatgtaaggaaaaaatcctacgctaacactgtcgcagtttgaaaggcttctctgcagaatgtcaaacaaagatcgacacattgattccagctgttcgtccttcatcaagacggaaccttccagcccagcctccctgacggacagcgtcaaccaccacagccctggtggctcttcagacgccagtgggagctacagttcaaccatgaatggccatcagaacggacttgactcgccacctctctacccttctgctcctatcctgggaggtagtgggcctgtcaggaaactgtatgatgactgctccagcaccattgttgaagatccccagaccaagtgtgaatacatgctcaactcgatgcccaagagactgtgtttagtgtgtggtgacatcgcttctgggtaccactatggggtagcatcatgtgaagcctgcaaggcattcttcaagaggacaattcaaggcaatatagaatacagctgccctgccacgaatgaatgtgaaatcacaaagcgcagacgtaaatcctgccaggcttgccgcttcatgaagtgtttaaaagtgggcatgctgaaagaaggggtgcgtcttgacagagtacgtggaggtcggcagaagtacaagcgcaggatagatgcggagaacagcccatacctgaaccctcagctggttcagccagccaaaaagccatataacaagattgtctcacatttgttggtggctgaaccggagaagatctatgccatgcctgaccctactgtccccgacagtgacatcaaagccctcactacactgtgtgacttggccgaccgagagttggtggttatcattggatgggcgaagcatattccaggcttctccacgctgtccctggcggaccagatgagccttctgcagagtgcttggatggaaattttgatccttggtgtcgtataccggtctctttcgtttgaggatgaacttgtctatgcagacgattatataatggacgaagaccagtccaaattagcaggccttcttgatctaaataatgctatcctgcagctggtaaagaaatacaagagcatgaagctggaaaaagaagaatttgtcaccctcaaagctatagctcttgctaattcagactccatgcacatagaagatgttgaagccgttcagaagcttcaggatgtcttacatgaagcgctgcaggattatgaagctggccagcacatggaagaccctcgtcgagctggcaagatgctgatgacactgccactcctgaggcagacctctaccaaggccgtgcagcatttctacaacatcaaactagaaggcaaagtcccaatgcacaaactttttttggaaatgttggaggccaaggtctgactaaaagctccctgggccttcccatccttcatgttgaaaaagggaaaataaacccaagagtgatgtcgaagaaacttagagtttagttaacaacatcaaaaatcaacagactgcactgataatttagcagcaagactatgaagcagctttc

SEQ ID NO: 9861 - DNA, 5365 bp, Homo sapiens
  source 1..5365: mol_type = unassigned DNA
aagtccttgattaggagagtgtgagagctttggtcccaactggctgtgcctataggcttgtcactaggagaacatttgtgttaattgcactgtgctctgtcaaggaaactttgatttatagctggggtgcacaaataatggttgccggtcgcacatggattcggtagaactttgccttcctgaatctttttccctgcactacgaggaagaaactgatgtaaagttcccatcatgaatgtaattaggaattgtgcatttagatcctgaatgtggcgagaatgtgattggggtcttggagcagtcaagtctgatctggcctgtgttccttcagctaaaaggcttctctgcagaatgtcaaacaaagatcgacacattgattccagctgttcgtccttcatcaagacggaaccttccagcccagcctccctgacggacagcgtcaaccaccacagccctggtggctcttcagacgccagtgggagctacagttcaaccatgaatggccatcagaacggacttgactcgccacctctctacccttctgctcctatcctgggaggtagtgggcctgtcaggaaactgtatgatgactgctccagcaccattgttgaagatccccagaccaagtgtgaatacatgctcaactcgatgcccaagagactgtgtttagtgtgtggtgacatcgcttctgggtaccactatggggtagcatcatgtgaagcctgcaaggcattcttcaagaggacaattcaaggcaatatagaatacagctgccctgccacgaatgaatgtgaaatcacaaagcgcagacgtaaatcctgccaggcttgccgcttcatgaagtgtttaaaagtgggcatgctgaaagaaggggtgcgtcttgacagagtacgtggaggtcggcagaagtacaagcgcaggatagatgcggagaacagcccatacctgaaccctcagctggttcagccagccaaaaagccattgctctggtctgatcctgcagataacaagattgtctcacatttgttggtggctgaaccggagaagatctatgccatgcctgaccctactgtccccgacagtgacatcaaagccctcactacactgtgtgacttggccgaccgagagttggtggttatcattggatgggcgaagcatattccaggcttctccacgctgtccctggcggaccagatgagccttctgcagagtgcttggatggaaattttgatccttggtgtcgtataccggtctctttcgtttgaggatgaacttgtctatgcagacgattatataatggacgaagaccagtccaaattagcaggccttcttgatctaaataatgctatcctgcagctggtaaagaaatacaagagcatgaagctggaaaaagaagaatttgtcaccctcaaagctatagctcttgctaattcagactccatgcacatagaagatgttgaagccgttcagaagcttcaggatgtcttacatgaagcgctgcaggattatgaagctggccagcacatggaagaccctcgtcgagctggcaagatgctgatgacactgccactcctgaggcagacctctaccaaggccgtgcagcatttctacaacatcaaactagaaggcaaagtcccaatgcacaaactttttttggaaatgttggaggccaaggtctgactaaaagctccctgggccttcccatccttcatgttgaaaaagggaaaataaacccaagagtgatgtcgaagaaacttagagtttagttaacaacatcaaaaatcaacagactgcactgataatttagcagcaagactatgaagcagctttcagattcctccataggttcctgatgagtttctttctactttctccatcatcttctttcctctttcttcccacatttctctttctctttattttttctccttttcttctttcacctcccttatttctttgcttctttcattcctagttcccattctcctttattttcttcccgtctgcctgccttctttcttttctttacctactctcattcctctcttttctcatccttccccttttttctaaatttgaaatagctttagtttaaaaaaaaatcctcccttccccctttcctttccctttctttcctttttccctttccttttccctttcctttcctttcctcttgaccttctttccatctttctttttcttccttctgctgctgaacttttaaaagaggtctctaactgaagagagatggaagccagccctgccaaaggatggagatccataatatggatgccagtgaacttattgtgaaccatactgtccccaatgactaaggaatcaaagagagagaaccaacgttcctaaaagtacagtgcaacatatacaaattgactgagtgcagtattagatttcatgggagcagcctctaattagacaacttaagcaacgttgcatcggctgcttcttatcattgcttttccatctagatcagttacagccatttgattccttaattgttttttcaagtcttccaggtatttgttagtttagctactatgtaactttttcagggaatagtttaagctttattcattcatgcaatactaaagagaaataagaatactgcaattttgtgctggctttgaacaattacgaacaataatgaaggacaaatgaatcctgaaggaagatttttaaaaatgttttgtttcttcttacaaatggagatttttttgtaccagctttaccacttttcagccatttattaatatgggaatttaacttactcaagcaatagttgaagggaaggtgcatattatcacggatgcaatttatgttgtgtgccagtctggtcccaaacatcaatttcttaacatgagctccagtttacctaaatgttcactgacacaaaggatgagattacacctacagtgactctgagtagtcacatatataagcactgcacatgagatatagatccgtagaattgtcaggagtgcacctctctacttgggaggtacaattgccatatgatttctagctgccatggtggttaggaatgtgatactgcctgtttgcaaagtcacagaccttgcctcagaaggagctgtgagccagtattcatttaagaggcaataaggcaaatgccagaattaaaaaaaaaaatcatcaaagacagaaaatgcctgaccaaattctaaaacctaatccatataagtttattcatttaggaatgttcgtttaaattaatctgcagtttttaccaagagctaagccaatatatgtgcttttcaaccagtattgtcacagcatgaaagtcaagtcaggttccagactgttaagaggtgtaatctaatgaagaaatcaattagatgccccgaaatctacagtcgctgaataaccaataaacagtaacctccatcaaatgctataccaatggaccagtgttagtagctgctccctgtattatgtgaacagtcttattctatgtacacagatgtaattaaaattgtaatcctaacaaacaaaagaaatgtagttcagcttttcaatgtttcatgtttgctgtgcttttctgaattttatgttgcattcaaagactgttgtcttgttcttgtggtgtttggattcttgtggtgtgtgcttttagacacagggtagaattagagacaatattggatgtacaattcctcaggagactacagtagtatattctattccttaccagtaataaggttcttcctaataataattaagagattgaaactccaaacaagtattcattatgaacagatacacatcaaaatcataataatattttcaaaacaaggaataatttctctaatggtttattatagaataccaatgtatagcttagaaataaaactttgaatatttcaagaatatagataagtctaatttttaaatgctgtatatatggctttcactcaatcatctctcagatgttgttattaactcgctctgtgttgttgcaaaactttttggtgcagattcgtttccaaaactattgctactttgtgtgctttaaacaaaataccttgggttgatgaaacatcaacccagtgctaggaatactgtgtatctatcattagctatatgggactatattgtagattgtggtttctcagtagagaagtgactgtagtgtgattctagataaatcatcattagcaattcattcagatggtcaataacttgaaatttatagctgtgataggagttcagaaattggcacatccctttaaaaataacaacagaaaatacaactcctgggaaaaaaggtgctgattctataagattatttatatatgtaagtgtttaaaaagattattttccagaaagtttgtgcagggtttaagttgctactattcaactacactatatataaataaaatatatacaatatatacattgttttcactgtatcacattaaagtacttgggcttcagaagtaagagccaaccaactgaaaacctgagatggagatatgttcaaagaatgagatacaattttttagttttcagtttaagtaactctcagcattacaaaagagtaagtatctcacaaataggaaataaaactaaaacgtggatttaaaaagaactgcacgggctttagggtaaatgctcatcttaaacctcactagagggaagtcttctcaagtttcaagcaagaccatttacttaatgtgaagttttggaaagttataaaggtgtatgttttagccatatgattttaattttaattttgcttcttttaggttcgttcttatttaaagcaatatgattgtgtgactccttgtagttacacttgtgtttcaatcagatcagattgttgtatttattccactattttgcatttaaatgataacataaaagatataaaaaatttaaaactgctatttttcttatagaagagaaaatgggtgttggtgattgtattttaattatttaagcgtctctgtttacctgcctaggaaaacattttatggcagtcttatgtgcaaagatcgtaaaaggacaaaaaatttaaactgcttataataatccaggagttgcattatagccagtagtaaaaataataataataataataaaaccatgtctatagctgtagatgggcttcacatctgtaaagcaatcaattgtatatttttgtgatgtgtaccatactgtgtgctccagcaaatgtccatttgtgtaaatgtatttattttatattgtatatattgttaaatgcaaaaaggagatatgattctgtaactccaatcagttcagatgtgtaactcaaattattatgcctttcaggatgatggtagagcaatattaaacaagcttccacttt

SEQ ID NO: 9862 - DNA, 2206 bp, Homo sapiens
  source 1..2206: mol_type = unassigned DNA
gtgaccggaggcgagaaaccccgcctcggcaccctgacgcagcgcaggacccgccccgcgcgtgacgccagcgtcaggccagccccggcatgctctgcggccgcccgcggtccagctccgacaacaggaattttctccgagagcgggccgggctcagttcagctgctgtccagacccggatcggcaacagtgccgcctccagacgttctcctgccgctcgcccgcccgtcccagcgcccccagccctcccgcgagggcgccccgggacggaaggatccaccagtctgtcggcgcccgccgttctcgtggtcgccgtcgccgtcgtcgtggtggtagtctccgccgtcgcctgggccatggccaattacatccacgtccctcccggctccccggaggtgcccaagctgaacgtcaccgttcaggatcaggaggagcatcgctgccgggagggggccctgagcctcctgcaacacctgcggcctcactgggacccccaggaggtgaccctgcagctcttcacagatggaatcacaaataaacttattggctgttacgtgggaaacaccatggaggatgtagtcctggtgagaatttatggcaataagactgagttattagtcgatcgagatgaggaagtaaagagttttcgagtgttgcaggctcatgggtgtgcaccacaactctactgtaccttcaataatggactatgctatgaatttatacaaggagaagcactggatccaaagcatgtctgcaacccagccattttcaggctaatagctcgtcagcttgctaaaatccatgctattcatgcacacaatggctggatccccaaatctaatctttggctaaagatgggaaagtatttctctctcattcccacaggatttgcagatgaagacattaataaaaggttcctaagtgatatcccaagctctcagattctccaggaagagatgacttggatgaaggagattctttccaacctgggctcacctgttgtgctttgccataatgacctattgtgtaagaatataatctacaatgagaaacaaggtgatgtacagttcattgattatgaatattctggatacaactacctggcatatgatattggaaatcatttcaatgaatttgcaggtgtgagtgatgtagactatagtctgtatccagatagagaactacagagtcagtggctgcgtgcttaccttgaagcctacaaagaatttaagggctttgggactgaagttactgaaaaggaggtagaaatactcttcattcaagtcaatcagtttgcattggcttctcatttcttttggggattgtgggctttgattcaagccaaatactccactattgagtttgatttccttgggtatgcaattgttcgttttaaccagtactttaaaatgaagcctgaggttactgcattaaaagtgcctgagtaaagaagagatttaattattctccagtagctgagcaatgcttgtgaatcttttcttaagaaatcccaaaaagccaatattagttaaaattctgttgtttaatttggttatcttgctttataaattatgcctctaaacaatcaaatctatttttgaaatagactgaatgatgtcaagaaatatacctactgctatccgtatgtggtggattagaaatgtgttaaatctgcaaaaggtataaagatgtcagtttaatttctttgataatttaacctatgttgtatgtgaattatttattataaacttagcacgattctgtgactgtttttctctgtttcacgttcgttgagtgtaagcaatgaaaatgtcccaaataagttttttaagttttactttaataagattaatttcagtaaacattctagttgttcagtgtaacctttttatcttgatgcattgtaagtaaaatgaatcatttactcttgaaatgccagtcattgactgatgtagataatttaggattttcatataaaaatagctgtttaggaaggtgaaatacattcactgtctctgttggtggtacatcttgttgaattcaatattagaaagtatttctttttggggtaatataacttagaattaaatccctgtttctctatgtagtctggcagtataaatataaatatttaccatataatcttggaataagtattagttaatgttaccaaaatctgtattaaataatgttttcaaatgctaaa

SEQ ID NO: 9863 - DNA, 1083 bp, Homo sapiens
  source 1..1083: mol_type = unassigned DNA
gccagcgtcaggccagccccggcatgctctgcggccgcccgcggtccagctccgacaacaggaattttctccgagagcgggccgggctcagttcagctgctgtccagacccggatcggcaacagtgccgcctccagacgttctcctgccgctcgcccgcccgtcccagcgcccccagccctcccgcgagggcgccccgggacggaaggatccaccagtctgtcggcgcccgccgttctcgtggtcgccgtcgccgtcgtcgtggtggtagtctccgccgtcgcctgggccatggccaattacatccacgtccctcccggctccccggaggtgcccaagctgaacgtcaccgttcaggatcaggaggagcatcgctgccgggagggggccctgagcctcctgcaacacctgcggcctcactgggacccccaggaggtgaccctgcagctcttcacagatggaatcacaaataaacttattggctgttacgtgggaaacaccatggaggatgtagtcctggtgagaatttatggcaataagactgagttattagtcgatcgagatgaggaagtaaagagttttcgagtgttgcaggctcatgggtgtgcaccacaactctactgtaccttcaataatggactatgctatgaatttatacaaggagaagcactggatccaaagcatgtctgcaacccagccattttcagtttatcatcgttgactctttgcaaaggaaaaactacaagatgttttggattaaccggctgcagagggtcaaggcttctgcttagttttttctagttagtgtttgagttgaagtgttatacatttcttactgccgattgcttattacttaattgttcatgttttcagagttcttgcctattaaaattttattaatttggttaacaattctttgttctttacgttgttcattatttaatttaatatattatgttttctataaagaataatgtcatatatgcttgatcatttttccaaaattgccagctttaaaaattctctttctgctcttgaaaactctagaaaatggtctggatttgaaaacagcattcataggtta

SEQ ID NO: 9864 - DNA, 2262 bp, Homo sapiens
  source 1..2262: mol_type = unassigned DNA
gtgaccggaggcgagaaaccccgcctcggcaccctgacgcagcgcaggacccgccccgcgcgtgacgccagcgtcaggccagccccggcatgctctgcggccgcccgcggtccagctccgacaacaggaattttctccgagagcgggccgggctcagttcagctgctgtccagacccggatcggcaacagtgccgcctccagacgttctcctgccgctcgcccgcccgtcccagcgcccccagccctcccgcgagggcgccccgggacggaaggatccaccagtctgtcggcgcccgccgttctcgtggtcgccgtcgccgtcgtcgtggtggtagtctccgccgtcgcctgggccatggccaattacatccacgtccctcccggctccccggaggtgcccaagctgaacgtcaccgttcaggatcaggaggagcatcgctgccgggagggggccctgagcctcctgcaacacctgcggcctcactgggacccccaggaggtgaccctgcagctcttcacagatggaatcacaaataaacttattggctgttacgtgggaaacaccatggaggatgtagtcctggtgagaatttatggcaataagactgagttattagtcgatcgagatgaggaagtaaagagttttcgagtgttgcaggctcatgggtgtgcaccacaactctactgtaccttcaataatggactatgctatgaatttatacaaggagaagcactggatccaaagcatgtctgcaacccagccattttcaggctaatagctcgtcagcttgctaaaatccatgctattcatgcacacaatggctggatccccaaatctaatctttggctaaagatgggaaagtatttctctctcattcccacaggatttgcagatgaagacattaataaaaggttcctaagtgatatcccaagctctcagattctccaggaagagatgacttggatgaaggagattctttccaacctgggctcacctgttgtgctttgccataatgacctattgtgtaagaatataatctacaatgagaaacaaggtgatgtacagttcattgattatgaatattctggatacaactacctggcatatgatattggaaatcatttcaatgaatttgcaggtgtgagtgatgtagactatagtctgtatccagatagagaactacagagtcagtggctgcgtgcttaccttgaagcctacaaagaatttaagggctttgggactgaagttactgaaaaggaggtagaaatactcttcattcaagtcaatcagtttgcattgggtgaaaacttgaattttatcattggcaacaaatattgtcagttattttcactgaaatggcttctcatttcttttggggattgtgggctttgattcaagccaaatactccactattgagtttgatttccttgggtatgcaattgttcgttttaaccagtactttaaaatgaagcctgaggttactgcattaaaagtgcctgagtaaagaagagatttaattattctccagtagctgagcaatgcttgtgaatcttttcttaagaaatcccaaaaagccaatattagttaaaattctgttgtttaatttggttatcttgctttataaattatgcctctaaacaatcaaatctatttttgaaatagactgaatgatgtcaagaaatatacctactgctatccgtatgtggtggattagaaatgtgttaaatctgcaaaaggtataaagatgtcagtttaatttctttgataatttaacctatgttgtatgtgaattatttattataaacttagcacgattctgtgactgtttttctctgtttcacgttcgttgagtgtaagcaatgaaaatgtcccaaataagttttttaagttttactttaataagattaatttcagtaaacattctagttgttcagtgtaacctttttatcttgatgcattgtaagtaaaatgaatcatttactcttgaaatgccagtcattgactgatgtagataatttaggattttcatataaaaatagctgtttaggaaggtgaaatacattcactgtctctgttggtggtacatcttgttgaattcaatattagaaagtatttctttttggggtaatataacttagaattaaatccctgtttctctatgtagtctggcagtataaatataaatatttaccatataatcttggaataagtattagttaatgttaccaaaatctgtattaaataatgttttcaaatgct

SEQ ID NO: 9865 - DNA, 1431 bp, Homo sapiens
  source 1..1431: mol_type = unassigned DNA
attctcctctcttctgctgagaccttccttctgcaggacctgtgctcctaagggacttgcaatcatcccatccttggccctctggttaatcgccttagaaatggcaaagattcatactatccacgccaacggcagcctgcccaagcccatcctctggcacaagatgcacaattatttcacgcttgtgaagaacgagatcaaccccagcctttctgcagatgtccctaaggtagaggtgttggaacgggagctggcctggctgaaggagcatctgtcccagctggagtcccctgtggtgttttgtcacaatgacctgctctgcaagaatatcatctatgacagcatcaaaggtcacgtgcggttcattgactatgaatatgctggctacaactaccaagcttttgacattggcaaccatttcaatgagtttgcaggcgtgaatgaggtggattactgcctgtacccggcgcgggagacccagctgcagtggctgcactactacctgcaggcacaaaaggggatggccgtgacccccagggaggtgcaaaggctctacgtgcaagtcaacaagtttgccctggcgtctcacttcttctgggctctctgggccctcatccagaaccagtactccaccatcgactttgatttcctcaggtacgcagtgatccgattcaaccagtacttcaaggtgaagcctcaagcgtcagccttggagatgccaaagtgaccagccaccccatccctcccctacccatctgtctggccagacctgttctccagagctcaattctgcactctgggatccacacccttggacagggtgggagaggggacacatgggtgtccagggagaaggctctgtccctgccgccagaccccagtggttgccactgaagacctcattctcctgtctggaggggctgataggacccccttccgggggtccccttcaccccaccaggcttgggaggaagtgcctgcagccaggtcctgaaccataaccacccctgggaaacacatcattcccagcctcaggccctgctggaattggggctgccttatatgtgtgtttaccccttcctggcctggggaaggaggcggggagggctcctttctacctccagtgccctgagcctccagtccgtctccccctgcatgccccatgtgggaggtgctgagctccaaaccagcatcacaccaactctgacacatggatgtacctatcttggtgatgggtgggggccaagaattgagcatgacatcttccccagcagccacctcctctgagatccctcaccttctccaaaccagatccaatcaaacctcagcccgaggaaacatgctccccaacgtgctctcctgtgcttctgttttgtccccctgctggggggacaggagagggagtggtgaggccctgggcctccagagcct

SEQ ID NO: 9866 - DNA, 2486 bp, Homo sapiens
  source 1..2486: mol_type = unassigned DNA
ggcgtcgcccccaccccgcgctccaggtagcggcggcctcagctgccggcggtggctggctgagctccccagcggcccgcgggccggggcgggggcgggccgggggcgttcccgcgggccaccgcccgtgatgtcacaatcgcggcgggccgcggcgctccggggtcggcggtgggcggcgggccgcgagccggcgatcgaagcgggcagctcgcgcctgagtcatggacttcccctggcccctcctctaccactcccactccctcgccggacccccccgccggggctagcgtctgccgcggctccgagggggtggggctgctgggaatggctgtgcccccttcggcccctcagccgcgcgcgtcctttcacctgaggaggcacacgccttgcccgcagtgctcatggggcatggaggagaaggcggcggccagcgccagctgccgggagccgccgggccccccgagggccgccgccgtcgcgtacttcggcatttccgtggacccggacgacatccttcccggggccctgcgcctcatccaggagctgcggccgcattggaaacccgagcaagttcggaccaagcgcttcacggatggcatcaccaacaagctggtggcctgctatgtggaggaggacatgcaggactgcgtgctggtccgggtgtatggggagcggacggagctgctggtggaccgggagaatgaggtcagaaacttccagctgctgcgagcacacagctgtgcccccaaactctactgcaccttccagaatgggctgtgctatgagtacatgcagggtgtggccctggagcctgagcacatccgtgagccccggcttttcagcctttctgcagatgtccctaaggtagaggtgttggaacgggagctggcctggctgaaggagcatctgtcccagctggagtcccctgtggtgttttgtcacaatgacctgctctgcaagaatatcatctatgacagcatcaaaggtcacgtgcggttcattgactatgaatatgctggctacaactaccaagcttttgacattggcaaccatttcaatgagtttgcaggcgtgaatgaggtggattactgcctgtacccggcgcgggagacccagctgcagtggctgcactactacctgcaggcacaaaaggggatggccgtgacccccagggaggtgcaaaggctctacgtgcaagtcaacaagtttgccctggcgtctcacttcttctgggctctctgggccctcatccagaaccagtactccaccatcgactttgatttcctcaggtacgcagtgatccgattcaaccagtacttcaaggtgaagcctcaagcgtcagccttggagatgccaaagtgaccagccaccccatccctcccctacccatctgtctggccagacctgttctccagagctcaattctgcactctgggatccacacccttggacagggtgggagaggggacacatgggtgtccagggagaaggctctgtccctgccgccagaccccagtggttgccactgaagacctcattctcctgtctggaggggctgataggacccccttccgggggtccccttcaccccaccaggcttgggaggaagtgcctgcagccaggtcctgaaccataaccacccctgggaaacacatcattcccagcctcaggccctgctggaattggggctgccttatatgtgtgtttaccccttcctggcctggggaaggaggcggggagggctcctttctacctccagtgccctgagcctccagtccgtctccccctgcatgccccatgtgggaggtgctgagctccaaaccagcatcacaccaactctgacacatggatgtacctatcttggtgatgggtgggggccaagaattgagcatgacatcttccccagcagccacctcctctgagatccctcaccttctccaaaccagatccaatcaaacctcagcccgaggaaacatgctccccaacgtgctctcctgtgcttctgttttgtccccctgctggggggacaggagagggagtggtgaggccctgggcctccagagcctggctctgctttgtgctgtggcttagccggaggggacgtggccaagggtgaggtggccaaaaccagaaccagcagtctcctgccttgttccctccctggccctcaggccctccttccagggatgtctctccagctctactttatgtcctgaagctgacccgaggtcttcctatctggaatgactagagggagccaagaggatggggtgggggccagggccccccagggcctatcgtgggagagcctgggcaggatcccatcagaaaggtgctgactaaactggttgcccggacactcaacagcctccacctccctttctaccctcacagctcctggggccttcctggctctggcccagaaagtgattcatttgtaaattatcatggttttctttctgcattaaaatgctcatttccgg

SEQ ID NO: 9867 - DNA, 2431 bp, Homo sapiens
  source 1..2431: mol_type = unassigned DNA
gctagcgtctgccgcggctccgagggggtggggctgctgggaatggctgtgcccccttcggcccctcagccgcgcgcgtcctttcacctgaggaggcacacgccttgcccgcagtgctcatggggcatggaggagaaggcggcggccagcgccagctgccgggagccgccgggccccccgagggccgccgccgtcgcgtacttcggcatttccgtggacccggacgacatccttcccggggccctgcgcctcatccaggagctgcggccgcattggaaacccgagcaagttcggaccaagcgcttcacggatggcatcaccaacaagctggtggcctgctatgtggaggaggacatgcaggactgcgtgctggtccgggtgtatggggagcggacggagctgctggtggaccgggagaatgaggtcagaaacttccagctgctgcgagcacacagctgtgcccccaaactctactgcaccttccagaatgggctgtgctatgagtacatgcagggtgtggccctggagcctgagcacatccgtgagccccggcttttcaggttaatcgccttagaaatggcaaagattcatactatccacgccaacggcagcctgcccaagcccatcctctggcacaagatgcacaattatttcacgcttgtgaagaacgagatcaaccccagcctttctgcagatgtccctaaggtagaggtgttggaacgggagctggcctggctgaaggagcatctgtcccagctggagtcccctgtggtgttttgtcacaatgacctgctctgcaagaatatcatctatgacagcatcaaaggtcacgtgcggttcattgactatgaatatgctggctacaactaccaagcttttgacattggcaaccatttcaatgagtttgcaggcgtgaatgaggtggattactgcctgtacccggcgcgggagacccagctgcagtggctgcactactacctgcaggcacaaaaggggatggccgtgacccccagggaggtgcaaaggctctacgtgcaagtcaacaagtttgccctgggtcctagctgtgtgtcttccacaatgactgcatccctccagtgctgtagagtcggaaacaggcatggggagattgccaggctgaccctctctggtctgtttccaggcgtctcacttcttctgggctctctgggccctcatccagaaccagtactccaccatcgactttgatttcctcaggtacgcagtgatccgattcaaccagtacttcaaggtgaagcctcaagcgtcagccttggagatgccaaagtgaccagccaccccatccctcccctacccatctgtctggccagacctgttctccagagctcaattctgcactctgggatccacacccttggacagggtgggagaggggacacatgggtgtccagggagaaggctctgtccctgccgccagaccccagtggttgccactgaagacctcattctcctgtctggaggggctgataggacccccttccgggggtccccttcaccccaccaggcttgggaggaagtgcctgcagccaggtcctgaaccataaccacccctgggaaacacatcattcccagcctcaggccctgctggaattggggctgccttatatgtgtgtttaccccttcctggcctggggaaggaggcggggagggctcctttctacctccagtgccctgagcctccagtccgtctccccctgcatgccccatgtgggaggtgctgagctccaaaccagcatcacaccaactctgacacatggatgtacctatcttggtgatgggtgggggccaagaattgagcatgacatcttccccagcagccacctcctctgagatccctcaccttctccaaaccagatccaatcaaacctcagcccgaggaaacatgctccccaacgtgctctcctgtgcttctgttttgtccccctgctggggggacaggagagggagtggtgaggccctgggcctccagagcctggctctgctttgtgctgtggcttagccggaggggacgtggccaagggtgaggtggccaaaaccagaaccagcagtctcctgccttgttccctccctggccctcaggccctccttccagggatgtctctccagctctactttatgtcctgaagctgacccgaggtcttcctatctggaatgactagagggagccaagaggatggggtgggggccagggccccccagggcctatcgtgggagagcctgggcaggatcccatcagaaaggtgctgactaaactggttgcccggacactcaacagcctccacctccctttctaccctcacagctcctggggccttcctggctctggcccagaaagtgattcatttgtaaattatcatggttttctttctgcattaaaatgctcatttccgga

SEQ ID NO: 9868 - DNA, 2434 bp, Homo sapiens
  source 1..2434: mol_type = unassigned DNA
cggcgggccgcgagccggcgatcgaagcgggcagctcgcgcctgagtcatggacttcccctggcccctcctctaccactcccactccctcgccggacccccccgccggggctagcgtctgccgcggctccgagggggtggggctgctgggaatggctgtgcccccttcggcccctcagccgcgcgcgtcctttcacctgaggaggcacacgccttgcccgcagtgctcatggggcatggaggagaaggcggcggccagcgccagctgccgggagccgccgggccccccgagggccgccgccgtcgcgtacttcggcatttccgtggacccggacgacatccttcccggggccctgcgcctcatccaggagctgcggccgcattggaaacccgagcaagttcggaccaagcgcttcacggatggcatcaccaacaagctggtggcctgctatgtggaggaggacatgcaggactgcgtgctggtccgggtgtatggggagcggacggagctgctggtggaccgggagaatgaggtcagaaacttccagctgctgcgagcacacagctgtgcccccaaactctactgcaccttccagaatgggctgtgctatgagtacatgcagggtgtggccctggagcctgagcacatccgtgagccccggcttttcaggttaatcgccttagaaatggcaaagattcatactatccacgccaacggcagcctgcccaagcccatcctctggcacaagatgcacaattatttcacgcttgtgaagaacgagatcaaccccagcctttctgcagatgtccctaaggtagaggtgttggaacgggagctggcctggctgaaggagcatctgtcccagctggagtcccctgtggtgttttgtcacaatgacctgctctgcaagaatatcatctatgacagcatcaaaggtcacgtgcggttcattgactatgaatatgctggctacaactaccaagcttttgacattggcaaccatttcaatgagtttgcaggcgtgaatgaggtggattactgcctgtacccggcgcgggagacccagctgcagtggctgcactactacctgcaggcacaaaaggggatggccgtgacccccagggaggtgcaaaggctctacgtgcaagtcaacaagtttgccctggcgtctcacttcttctgggctctctgggccctcatccagaaccagtactccaccatcgactttgatttcctcaggtacgcagtgatccgattcaaccagtacttcaaggtgaagcctcaagcgtcagccttggagatgccaaagtgaccagccaccccatccctcccctacccatctgtctggccagacctgttctccagagctcaattctgcactctgggatccacacccttggacagggtgggagaggggacacatgggtgtccagggagaaggctctgtccctgccgccagaccccagtggttgccactgaagacctcattctcctgtctggaggggctgataggacccccttccgggggtccccttcaccccaccaggcttgggaggaagtgcctgcagccaggtcctgaaccataaccacccctgggaaacacatcattcccagcctcaggccctgctggaattggggctgccttatatgtgtgtttaccccttcctggcctggggaaggaggcggggagggctcctttctacctccagtgccctgagcctccagtccgtctccccctgcatgccccatgtgggaggtgctgagctccaaaccagcatcacaccaactctgacacatggatgtacctatcttggtgatgggtgggggccaagaattgagcatgacatcttccccagcagccacctcctctgagatccctcaccttctccaaaccagatccaatcaaacctcagcccgaggaaacatgctccccaacgtgctctcctgtgcttctgttttgtccccctgctggggggacaggagagggagtggtgaggccctgggcctccagagcctggctctgctttgtgctgtggcttagccggaggggacgtggccaagggtgaggtggccaaaaccagaaccagcagtctcctgccttgttccctccctggccctcaggccctccttccagggatgtctctccagctctactttatgtcctgaagctgacccgaggtcttcctatctggaatgactagagggagccaagaggatggggtgggggccagggccccccagggcctatcgtgggagagcctgggcaggatcccatcagaaaggtgctgactaaactggttgcccggacactcaacagcctccacctccctttctaccctcacagctcctggggccttcctggctctggcccagaaagtgattcatttgtaaattatcatggttttctttctgcattaaaatgctcatttccgga

SEQ ID NO: 9869 - DNA, 1880 bp, Homo sapiens
  source 1..1880: mol_type = unassigned DNA
agacggttggggggtgggacagcggaagggaagactggaagaggactgggagggcccagctgggacacagggcctcgggcgatggggtctttatcaaggccctccttctctgaccggttaatcgccttagaaatggcaaagattcatactatccacgccaacggcagcctgcccaagcccatcctctggcacaagatgcacaattatttcacgcttgtgaagaacgagatcaaccccagcctttctgcagatgtccctaaggtagaggtgttggaacgggagctggcctggctgaaggagcatctgtcccagctggagtcccctgtggtgttttgtcacaatgacctgctctgcaagaatatcatctatgacagcatcaaaggtcacgtgcggttcattgactatgaatatgctggctacaactaccaagcttttgacattggcaaccatttcaatgagtttgcaggcgtgaatgaggtggattactgcctgtacccggcgcgggagacccagctgcagtggctgcactactacctgcaggcacaaaaggggatggccgtgacccccagggaggtgcaaaggctctacgtgcaagtcaacaagtttgccctggcgtctcacttcttctgggctctctgggccctcatccagaaccagtactccaccatcgactttgatttcctcaggtacgcagtgatccgattcaaccagtacttcaaggtgaagcctcaagcgtcagccttggagatgccaaagtgaccagccaccccatccctcccctacccatctgtctggccagacctgttctccagagctcaattctgcactctgggatccacacccttggacagggtgggagaggggacacatgggtgtccagggagaaggctctgtccctgccgccagaccccagtggttgccactgaagacctcattctcctgtctggaggggctgataggacccccttccgggggtccccttcaccccaccaggcttgggaggaagtgcctgcagccaggtcctgaaccataaccacccctgggaaacacatcattcccagcctcaggccctgctggaattggggctgccttatatgtgtgtttaccccttcctggcctggggaaggaggcggggagggctcctttctacctccagtgccctgagcctccagtccgtctccccctgcatgccccatgtgggaggtgctgagctccaaaccagcatcacaccaactctgacacatggatgtacctatcttggtgatgggtgggggccaagaattgagcatgacatcttccccagcagccacctcctctgagatccctcaccttctccaaaccagatccaatcaaacctcagcccgaggaaacatgctccccaacgtgctctcctgtgcttctgttttgtccccctgctggggggacaggagagggagtggtgaggccctgggcctccagagcctggctctgctttgtgctgtggcttagccggaggggacgtggccaagggtgaggtggccaaaaccagaaccagcagtctcctgccttgttccctccctggccctcaggccctccttccagggatgtctctccagctctactttatgtcctgaagctgacccgaggtcttcctatctggaatgactagagggagccaagaggatggggtgggggccagggccccccagggcctatcgtgggagagcctgggcaggatcccatcagaaaggtgctgactaaactggttgcccggacactcaacagcctccacctccctttctaccctcacagctcctggggccttcctggctctggcccagaaagtgattcatttgtaaattatcatggttttctttctgcattaaaatgctcatttccgg

SEQ ID NO: 9870 - DNA, 962 bp, Homo sapiens
  source 1..962: mol_type = unassigned DNA
agtgccgtagcgcccggctcctgcaggcgctcggcctccgctcattcctgaccccgcagtgggcgcgatggcggaggctgtactgagggtcgcccggcggcagctgagccagcgcggcgggtctggagcccccatcctcctgcggcagatgttcgagcctgtgagctgcaccttcacgtacctgctgggtgacagagagtcccgggaggccgttctgatcgacccagtcctggaaacagcgcctcgggatgcccagctgatcaaggagctggggctgcggctgctctatgctgtgaatacccactgccacgcggaccacattacaggctcggggctgctccgttccctcctccctggctgccagtctgtcatctcccgccttagtggggcccaggctgacttacacattgaggatggagactccatccgcttcgggcgcttcgcgttggagaccagggccagccctggccacaccccaggctgtgtcaccttcgtcctgaatgaccacagcatggccttcactggagatgccctgttgatccgtgggtgtgggcggacagacttccagcaaggctgtgccaagaccttgtaccactcggtccatgaaaagatcttcacacttccaggagactgtctgatctaccctgctcacgattaccatgggttcacagtgtccaccgtggaggaggagaggactctgaaccctcggctcaccctcagctgtgaggagtttgtcaaaatcatgggcaacctgaacttgcctaaacctcagcagatagactttgctgttccagccaacatgcgctgtggggtgcagacacccactgcctgatctcacttctgtcagatgctcccatccactattaatgcactaggtgggaggagagggcggcaatgacactgcacctctcctttcccaccgcattccctggagctccctaaataaaactttttttaacgtg

SEQ ID NO: 9871 - DNA, 2258 bp, Homo sapiens
  source 1..2258: mol_type = unassigned DNA
ccccgcctcgtggtgccggctggttcttcgcgctcgcccgacttcccagcggccccgtgcggcccgggcatgcccagtgcgggcgcagcggccccggccctggaagcgccccggcggagctggcctgcggtgggctaggggcagggccggagccgcggcggcggagctgtggatccttcatgatgagagatttggggacacttctctctcctgtgtgtagttgatagtttggtggtgaagagatggctgacagtgtcaaaacctttctccaggaccttgccagaggaatcaaagactccatctggggtatttgtaccatctcaaagctagatgctcgaatccagcaaaagagagaggagcagcgtcgaagaagggcaagtagtgtcttggcacagagaagagcccagagtatagagcggaagcaagagagtgagccacgtattgttagtagaattttccagtgttgtgcttggaatggtggagtgttctggttcagtctcctcttgttttatcgagtatttattcctgtgcttcagtcggtaacagcccgaattatcggtgacccatcactacatggagatgtttggtcgtggctggaattcttcctcacgtcaattttcagtgctctttgggtgctccccttgtttgtgcttagcaaagtggtgaatgccatttggtttcaggatatagctgacctggcatttgaggtatcagggaggaagcctcacccattccctagtgtcagcaaaataattgctgacatgctcttcaaccttttgctgcaggctcttttcctcattcagggaatgtttgtgagtctctttcccatccatcttgtcggtcagctggttagtctcctgcatatgtcccttctctactcactgtactgctttgaatatcgttggttcaataaaggaattgaaatgcaccagcggttgtctaacatagaaaggaattggccttactactttgggtttggtttgcccttggcttttctcacagcaatgcagtcctcatatattatcagtggctgccttttctctatcctctttcctttattcattatcagcgccaatgaagcaaagcctggcaaagcatatctcttccagttgcgcctcttctccttggtggtcttcttaagcaacagactcttccacaagacagtctacctgcagtcggccctgagcagctctacttctgcagagaagttcccttcaccgcatccgtcgcctgccaaactgaaggctactgcaggtcactgagttgcctgccatccaaaggggatgggcgggattggaagaagctgtggcagctcttttccctgttcacctcccgcctgccagggaaggcaggacccgctctgccaagggccctctgcgtattcccttctctctgaggaattgaaatttttgtctctggtgcacgtaaggcagaatgttccctgacaccagtgtgtggatttttaacatcaccgtgagtctgaaaggaccacaggtttttctgcagctattttctagcatttgccagtccctgtgcctggactgattggaacactttgtttttctccctgtgccatttacccttccacctttccatcctgccttctaccacccttggatgaatggattttgtaattctagctgttgtattttgtgaatttgttaattttgttgtttttctgtgaaacacatacattggatatgggaggtaaaggagtgtcccagttgctcctggtcactccctttatagccattactgtcttgtttcttgtaactcaggttaggttttggtctctcttgctccactgcaaaaaaaaaaaaaaaaaaaaaaaaaaaaaaaaagcctgaagagatgagataggaggaaagacctcacagccagatctgctgggttttgaggagtgattttctttcttccccttgaaggggaaaaagctattttcattggtacatttaaagtcccccaactatggggaggtaccaattctggacaagtgccactacaacaacactaaacctgaacttttcaactccgttggtggtgggaggcagcgggcagaaatttactgttggccactgccaggtctatttcatatttcaaaggaatattgggtgctgcatataggaactgaaggggtcaatgtattaaacctgtgattggttgttttcctgtcattttgagagactaaatgtggggggcagatgtcaaaatacctgtacaattttaaaatgtcacaattaaacatgagctggtttccc

SEQ ID NO: 9872 - DNA, 2146 bp, Homo sapiens
  source 1..2146: mol_type = unassigned DNA
ccccgcctcgtggtgccggctggttcttcgcgctcgcccgacttcccagcggccccgtgcggcccgggcatgcccagtgcgggcgcagcggccccggccctggaagcgccccggcggagctggcctgcggtgggctaggggcagggccggagccgcggcggcggagctgtggatccttcatgatgagagatttggggacacttctctctcctgtgtgtagttgatagtttggtggtgaagagatggctgacagtgtcaaaacctttctccaggaccttgccagaggaatcaaagactccatctggggtatttgtaccatctcaaagctagatgctcgaatccagcaaaagagagaggagcagcgtcgaagaagggcaagtagtgtcttggcacagagaagagcccagagtatagagcggaagcaagagagtgagccacgtattgttagtagaattttccagtgttgtgcttggaatggtggagtgttctggttcagtctcctcttgttttatcgagtatttattcctgtgcttcagtcggtaacagcccgaattatcggtgacccatcactacatggagatgtttggtcgtggctggaattcttcctcacgtcaattttcagtgctctttgggtgctccccttgtttgtgcttagcaaagtggtgaatgccatttggtttcaggatatagctgacctggcatttgaggtatcagggaggaagcctcacccattccctagtgtcagcaaaataattgctgacatgctcttcaaccttttgctgcaggctcttttcctcattcagggaatgtttgtgagtctctttcccatccatcttgtcggtcagctggttagtctcctgcatatgtcccttctctactcactgtactgctttgaatatcgttggttcaataaagtggctgccttttctctatcctctttcctttattcattatcagcgccaatgaagcaaagacccgcaaagcatatctcttccagttgcgcctcttctccttggtggtcttcttaagcaacagactcttccacaagacagtctacctgcagtcggccctgagcagctctacttctgcagagaagttcccttcaccgcatccgtcgcctgccaaactgaaggctactgcaggtcactgagttgcctgccatccaaaggggatgggcgggattggaagaagctgtggcagctcttttccctgttcacctcccgcctgccagggaaggcaggacccgctctgccaagggccctctgcgtattcccttctctctgaggaattgaaatttttgtctctggtgcacgtaaggcagaatgttccctgacaccagtgtgtggatttttaacatcaccgtgagtctgaaaggaccacaggtttttctgcagctattttctagcatttgccagtccctgtgcctggactgattggaacactttgtttttctccctgtgccatttacccttccacctttccatcctgccttctaccacccttggatgaatggattttgtaattctagctgttgtattttgtgaatttgttaattttgttgtttttctgtgaaacacatacattggatatgggaggtaaaggagtgtcccagttgctcctggtcactccctttatagccattactgtcttgtttcttgtaactcaggttaggttttggtctctcttgctccactgcaaaaaaaaaaaaaaaaaaaaaaaaaaaaaaaaagcctgaagagatgagataggaggaaagacctcacagccagatctgctgggttttgaggagtgattttctttcttccccttgaaggggaaaaagctattttcattggtacatttaaagtcccccaactatggggaggtaccaattctggacaagtgccactacaacaacactaaacctgaacttttcaactccgttggtggtgggaggcagcgggcagaaatttactgttggccactgccaggtctatttcatatttcaaaggaatattgggtgctgcatataggaactgaaggggtcaatgtattaaacctgtgattggttgttttcctgtcattttgagagactaaatgtggggggcagatgtcaaaatacctgtacaattttaaaatgtcacaattaaacatgagctggtttccc

SEQ ID NO: 9873 - DNA, 3150 bp, Homo sapiens
  source 1..3150: mol_type = unassigned DNA
acttgataacacccgtggtgccccatccctataggagctggtgagattgcagcctgctgcctcccctccaacagccacagctattggatttcccacccagaatctttaggtaaatgagatcatgattctggaaggaggtggtgtaatgaatctcaaccccggcaacaacctccttcaccagccgccagcctggacagacagctactccacgtgcaatgtttccagtgggttttttggaggccagtggcatgaaattcatcctcagtactggaccaagtaccaggtgtgggagtggctccagcacctcctggacaccaaccagctggatgccaattgtatccctttccaagagttcgacatcaacggcgagcacctctgcagcatgagtttgcaggagttcacccgggcggcagggacggcggggcagctcctctacagcaacttgcagcatctgaagtggaacggccagtgcagtagtgacctgttccagtccacacacaatgtcattgtcaagactgaacaaactgagccttccatcatgaacacctggaaagacgagaactatttatatgacaccaactatggtagcacagtagatttgttggacagcaaaactttctgccgggctcagatctccatgacaaccaccagtcaccttcctgttgcagagtcacctgatatgaaaaaggagcaagacccccctgccaagtgccacaccaaaaagcacaacccgagagggactcacttatgggaattcatccgcgacatcctcttgaacccagacaagaacccaggattaataaaatgggaagaccgatctgagggcgtcttcaggttcttgaaatcagaggcagtggctcagctatggggtaaaaagaagaacaacagcagcatgacctatgaaaagctcagccgagctatgagatattactacaaaagagaaattctggagcgtgtggatggacgaagactggtatataaatttgggaagaatgcccgaggatggagagaaaatgaaaactgaagctgccaatactttggacacaaaccaaaacacacaccaaataatcagaaacaaagaactcctggacgtaaatatttcaaagactacttttctctgatatttatgtaccatgaggggaacaagaaactacttctaacgggaagaagaaacactacggtcgattaaaaaaattattttgttacttcgaagtatgtcctatatggggaaaaaacgtacacagttttctgtgaaatatgatgctgtatgtggttgtgattttttttcacctctattgtgaattctttttcactgcaagagtaacaggatttgtagccttgtgcttcttgctaagagaaagaaaaacaaaatcagagggcattaaatgttttgtatgtgacatgatttagaaaaaggtgatgcatcctcctcacataagcatccatatggcttcgtcaagggaggtgaacattgttgctgagttaaattccagggtctcagatggttaggacaaagtggatggatgccgggaagtttaacctgagccttaggatccaatgagtggagaatggggacttccaaaacccaaggttggctataatctctgcataaccacatgacttggaatgcttaaatcagcaagaagaataatggtggggtctttatactcattcaggaatggtttatctgatgccagggctgtcttcctttctcccctttggatggttggtgaaatactttaattgccctgtctgctcacttctagctatttaagagagaacccagcttggttcttttttgctccaagtgcttaaaaataagttggaaaaaggagacggtggtgtggaaatggctgaagagtttgctcttgtatccctatagtccaaggtttctcaatctgcacaattgacatttttggccggagtgttctttgtggtgagggctttcctgtgcattgtaagatgttcagcagtatccactcatggtctctaaccacttgacaccagaaaccccccagctgtgataacgcaaaatgtctctagacatcaccaaatgttccctgggggtggcaaatttgcccttgattgagaaccaccagtttagctagtcaatatgaggatggtggtttattctcagaagaaaaagatatgtaaggtcttttagctccttagagtgaagcaaaagcaagacttcaacctcaacctatctttatgttttaaatgttagggacaataagttgaaatagctagaggagcttcttttcagaaccccagatgagagccaatgtcagataaagtaagcatagtaatgtagcaggaactacaatagaagacattttcactggaattacaaagcagaattaaaattatattgtagaaggaaacaccaagaaaagaatttccagggaaaatcctctttgcaggtattaattcttataattttttgtcttttggattatctgtttactgtctcatctgaactgatcccaggtgaacggtttattgcctagatttgtactcagaggaattttttttgttttgttttgtcttttaagaaaggaaagaaaggatgaaaaaaataaacagaaaactcagctcaggcacaattgtcaccaaggagttaaaagcttcttcttcaatagaggaattgttctgggggtcctggagacttaccattgagccatgcaatctgggaagcacaggaataagtagacactttgaaaatggatttgaatgttctcatcccttttgcagcttttctttttggctctctcatgtccttggcttgctcctctattctacctctctttctccagcaataatatgcaaatgaagacatgtatccataagaaggagtgctcttcatcaactaatagagcacctaccacagtgtcatacctggtagaggtgagcaattcatattcaaaggttgcaaagtgtttgtaatatattcatgaggctggaagtaagaagaattaaaaatttgtcctaattacaatgagaaccattctaggtagtgatcttggagcacacatgaataactttctgaaggtgcaaccaaatccatttttatttctgcctggcttggtcacttctgtaaaggtttaacttagtgttgtcaagtaacagttactgaaagagctgagaaaa

SEQ ID NO: 9874 - DNA, 1280 bp, Homo sapiens
  source 1..1280: mol_type = unassigned DNA
ctcagcagcaacaaatgccttctgagacagggattcttttgattttgcttggacattgtggagaagtgttagccccaatgtggactgatctgggaacagtgggaaattaacttcttgttggtaaatatcaggctgagatcatgattctggaaggaggtggtgtaatgaatctcaaccccggcaacaacctccttcaccagccgccagcctggacagacagctactccacgtgcaatgtttccagtgggttttttggaggccagtggcatgaaattcatcctcagtactggaccaagtaccaggtgtgggagtggctccagcacctcctggacaccaaccagctggatgccaattgtatccctttccaagagttcgacatcaacggcgagcacctctgcagcatgagtttgcaggagttcacccgggcggcagggacggcggggcagctcctctacagcaacttgcagcatctgaagtggaacggccagtgcagtagtgacctgttccagtccacacacaatgtcattgtcaagactgaacaaactgagccttccatcatgaacacctggaaagacgagaactatttatatgacaccaactatggtagcacagtagatttgttggacagcaaaactttctgccgggctcagatctccatgacaaccaccagtcaccttcctgttgcagagtcacctgatatgaaaaaggagcaagacccccctgccaagtgccacaccaaaaagcacaacccgagagggactcacttatgggaattcatccgcgacatcctcttgaacccagacaagaacccaggattaataaaatgggaagaccgatctgagggcgtcttcaggttcttgaaatcagaggcagtggctcagctatggggtaaaaagaagaacaacagcagcatgacctatgaaaagctcagccgagctatgagatattactacaaaagagaaattctggagcgtgtggatggacgaagactggtatataaatttgggaagaatgcccgaggatggagagaaaatgaaaactgaagctgccaatactttggacacaaaccaaaacacacaccaaataatcagaaacaaagaactcctggacgtaaatatttcaaagactacttttctctgatatttatgtaccatgaggggaacaagaaactacttctaacgggaagaagaaacactacggtcgattaaaaaaattattttgttacttcgaagtatgtcctatatggggaaaaaacgtacacagttttctgtgaaatatga

SEQ ID NO: 9875 - DNA, 1481 bp, Homo sapiens
  source 1..1481: mol_type = unassigned DNA
aacccactgctttattctgccctgagtggagattggttttggctcaggctgctttgtgaaactcagaagcattatcctctctgccaactccacgtcctagtcagagttttctgtgaaggcaagggcatggggttgccggagagaagaggattggtcctgcttttaagcctagctgaaattcttttcaagatcatgattctggaaggaggtggtgtaatgaatctcaaccccggcaacaacctccttcaccagccgccagcctggacagacagctactccacgtgcaatgtttccagtgggttttttggaggccagtggcatgaaattcatcctcagtactggaccaagtaccaggtgtgggagtggctccagcacctcctggacaccaaccagctggatgccaattgtatccctttccaagagttcgacatcaacggcgagcacctctgcagcatgagtttgcaggagttcacccgggcggcagggacggcggggcagctcctctacagcaacttgcagcatctgaagtggaacggccagtgcagtagtgacctgttccagtccacacacaatgtcattgtcaagactgaacaaactgagccttccatcatgaacacctggaaagacgagaactatttatatgacaccaactatggtagcacagtagatttgttggacagcaaaactttctgccgggctcagatctccatgacaaccaccagtcaccttcctgttgcagagtcacctgatatgaaaaaggagcaagacccccctgccaagtgccacaccaaaaagcacaacccgagagggactcacttatgggaattcatccgcgacatcctcttgaacccagacaagaacccaggattaataaaatgggaagaccgatctgagggcgtcttcaggttcttgaaatcagaggcagtggctcagctatggggtaaaaagaagaacaacagcagcatgacctatgaaaagctcagccgagctatgagatattactacaaaagagaaattctggagcgtgtggatggacgaagactggtatataaatttgggaagaatgcccgaggatggagagaaaatgaaaactgaagctgccaatactttggacacaaaccaaaacacacaccaaataatcagaaacaaagaactcctggacgtaaatatttcaaagactacttttctctgatatttatgtaccatgaggggaacaagaaactacttctaacgggaagaagaaacactacggtcgattaaaaaaattattttgttacttcgaagtatgtcctatatggggaaaaaacgtacacagttttctgtgaaatatgatgctgtatgtggttgtgattttttttcacctctattgtgaattctttttcactgcaagagtaacaggatttgtagccttgtgcttcttgctaagagaaagaaaaacaaaatcagagggcattaaatgttttgtatgtgacatgatttag

SEQ ID NO: 9876 - DNA, 1501 bp, Homo sapiens
  source 1..1501: mol_type = unassigned DNA
attttcaccgtccatctttgctgatttaccatgctcccaggatggtgggagtgtgtgtttttaagatggagagtgtatgcttctgggttcaagttcacaggtgtctctgctggttatctgcactcaccttggtaacagggagaaagtgagtgaatggattccaagaacttactgatggaagtctaattcaggagttggttctgcagccatggagatcatgattctggaaggaggtggtgtaatgaatctcaaccccggcaacaacctccttcaccagccgccagcctggacagacagctactccacgtgcaatgtttccagtgggttttttggaggccagtggcatgaaattcatcctcagtactggaccaagtaccaggtgtgggagtggctccagcacctcctggacaccaaccagctggatgccaattgtatccctttccaagagttcgacatcaacggcgagcacctctgcagcatgagtttgcaggagttcacccgggcggcagggacggcggggcagctcctctacagcaacttgcagcatctgaagtggaacggccagtgcagtagtgacctgttccagtccacacacaatgtcattgtcaagactgaacaaactgagccttccatcatgaacacctggaaagacgagaactatttatatgacaccaactatggtagcacagtagatttgttggacagcaaaactttctgccgggctcagatctccatgacaaccaccagtcaccttcctgttgcagagtcacctgatatgaaaaaggagcaagacccccctgccaagtgccacaccaaaaagcacaacccgagagggactcacttatgggaattcatccgcgacatcctcttgaacccagacaagaacccaggattaataaaatgggaagaccgatctgagggcgtcttcaggttcttgaaatcagaggcagtggctcagctatggggtaaaaagaagaacaacagcagcatgacctatgaaaagctcagccgagctatgagatattactacaaaagagaaattctggagcgtgtggatggacgaagactggtatataaatttgggaagaatgcccgaggatggagagaaaatgaaaactgaagctgccaatactttggacacaaaccaaaacacacaccaaataatcagaaacaaagaactcctggacgtaaatatttcaaagactacttttctctgatatttatgtaccatgaggggaacaagaaactacttctaacgggaagaagaaacactacggtcgattaaaaaaattattttgttacttcgaagtatgtcctatatggggaaaaaacgtacacagttttctgtgaaatatgatgctgtatgtggttgtgattttttttcacctctattgtgaattctttttcactgcaagagtaacaggatttgtagccttgtgcttcttgctaagagaaagaaaaacaaaatcagagggcattaaatgttttgtatgtgacatga

SEQ ID NO: 9877 - DNA, 2519 bp, Homo sapiens
  source 1..2519: mol_type = unassigned DNA
atccctataggagctggtgagattgcagcctgctgcctcccctccaacagccacagctattggatttcccacccagaatctttaggtaaatgagatcatgattctggaaggaggtggtgtaatgaatctcaaccccggcaacaacctccttcaccagccgccagcctggacagacagctactccacgtgcaatgtttccagtgggttttttggaggccagtggcatgaaattcatcctcagtactggaccaagtaccaggtgtgggagtggctccagcacctcctggacaccaaccagctggatgccaattgtatccctttccaagagttcgacatcaacggcgagcacctctgcagcatgagtttgcaggagttcacccgggcggcagggacggcggggcagctcctctacagcaacttgcagcatctgaagtggaacggccagtgcagtagtgacctgttccagtccacacacaatgtcattgtcaagactgaacaaactgagccttccatcatgaacacctggaaagacgagaactatttatatgacaccaactatggtagcacagtagcagagtcacctgatatgaaaaaggagcaagacccccctgccaagtgccacaccaaaaagcacaacccgagagggactcacttatgggaattcatccgcgacatcctcttgaacccagacaagaacccaggattaataaaatgggaagaccgatctgagggcgtcttcaggttcttgaaatcagaggcagtggctcagctatggggtaaaaagaagaacaacagcagcatgacctatgaaaagctcagccgagctatgagatattactacaaaagagaaattctggagcgtgtggatggacgaagactggtatataaatttgggaagaatgcccgaggatggagagaaaatgaaaactgaagctgccaatactttggacacaaaccaaaacacacaccaaataatcagaaacaaagaactcctggacgtaaatatttcaaagactacttttctctgatatttatgtaccatgaggggaacaagaaactacttctaacgggaagaagaaacactacggtcgattaaaaaaattattttgttacttcgaagtatgtcctatatggggaaaaaacgtacacagttttctgtgaaatatgatgctgtatgtggttgtgattttttttcacctctattgtgaattctttttcactgcaagagtaacaggatttgtagccttgtgcttcttgctaagagaaagaaaaacaaaatcagagggcattaaatgttttgtatgtgacatgatttagaaaaaggtgatgcatcctcctcacataagcatccatatggcttcgtcaagggaggtgaacattgttgctgagttaaattccagggtctcagatggttaggacaaagtggatggatgccgggaagtttaacctgagccttaggatccaatgagtggagaatggggacttccaaaacccaaggttggctataatctctgcataaccacatgacttggaatgcttaaatcagcaagaagaataatggtggggtctttatactcattcaggaatggtttatctgatgccagggctgtcttcctttctcccctttggatggttggtgaaatactttaattgccctgtctgctcacttctagctatttaagagagaacccagcttggttcttttttgctccaagtgcttaaaaataagttggaaaaaggagacggtggtgtggaaatggctgaagagtttgctcttgtatccctatagtccaaggtttctcaatctgcacaattgacatttttggccggagtgttctttgtggtgagggctttcctgtgcattgtaagatgttcagcagtatccactcatggtctctaaccacttgacaccagaaaccccccagctgtgataacgcaaaatgtctctagacatcaccaaatgttccctgggggtggcaaatttgcccttgattgagaaccaccagtttagctagtcaatatgaggatggtggtttattctcagaagaaaaagatatgtaaggtcttttagctccttagagtgaagcaaaagcaagacttcaacctcaacctatctttatgttttaaatgttagggacaataagttgaaatagctagaggagcttcttttcagaaccccagatgagagccaatgtcagataaagtaagcatagtaatgtagcaggaactacaatagaagacattttcactggaattacaaagcagaattaaaattatattgtagaaggaaacaccaagaaaagaatttccagggaaaatcctctttgcaggtattaattcttataattttttgtcttttggattatctgtttactgtctcatctgaactgatcccaggtgaacggtttattgcctagatttgtactcagaggaattttttttgttttgttttgtcttttaagaaaggaaagaaaggatgaaaaaaataaacagaaaactcagctcaggcacaattgtca

SEQ ID NO: 9878 - DNA, 941 bp, Homo sapiens
  source 1..941: mol_type = unassigned DNA
cagaggaacccgccagagaacattcagaaggccttcatcgcatccatggacctgtggaactgggatgaggcatccccacaggaagtgcctccagggaacaagctggcagggcttgaaggagccaaattaggcttctgtttccctgatctggcactccaaggggacacgccgacagcgacagcagagacatgctggaaaggtacaagctcatccctggcaagcttcccacagctggactggggctccgcgttactgcacccagaagttccatggggggcggagcccgactctcaggctcttccgtggtccggggactggacagacatggcgtgcacagcctgggactcttggagcggcgcctcgcagaccctgggccccgcccctctcggcccgggccccatccccgccgccggctccgaaggcgccgcgggccagaactgctccccgcccgcgcccggactgtaccacctcctggaacccggggctgcatgcgggtggcaccacctctttgaagcggtaccagagctcagctctcaccgtttgctccgaaccgagcccgcagtcggaccgtgccagtttggctcgatgccccaaaactaaccaccgaggtcccattcagctgtggcagttcctcctggagctgctccacgacggggcgcgtagcagctgcatccgttggactggcaacagccgcgagttccagctgtgcgaccccaaagaggtggctcggctgtggggcgagcgcaagagaaagccgggcatgaattacgagaagctgagccggggccttcgctactactatcgccgcgacatcgtgcgcaagagcggggggcgaaagtacacgtaccgcttcgggggccgcgtgcccagcctagcctatccggactgtgcgggaggcggacggggagcagagacacaataaaaattcccggtcaaacctc

SEQ ID NO: 9879 - DNA, 532 bp, Homo sapiens
  source 1..532: mol_type = unassigned DNA
cagaggaacccgccagagaacattcagaaggccttcatcgcatccatggacctgtggaactgggatgaggcatccccacaggaagtgcctccagggaacaagctggcagggcttgaaggagccaaattaggcttctgtttccctgatctggcactccaaggggacacgccgacagcgacagcagagacatgctggaaaggtcccattcagctgtggcagttcctcctggagctgctccacgacggggcgcgtagcagctgcatccgttggactggcaacagccgcgagttccagctgtgcgaccccaaagaggtggctcggctgtggggcgagcgcaagagaaagccgggcatgaattacgagaagctgagccggggccttcgctactactatcgccgcgacatcgtgcgcaagagcggggggcgaaagtacacgtaccgcttcgggggccgcgtgcccagcctagcctatccggactgtgcgggaggcggacggggagcagagacacaataaaaattcccggtcaaacctc

SEQ ID NO: 9880 - DNA, 1487 bp, Homo sapiens
  source 1..1487: mol_type = unassigned DNA
gcagataagcccagcttagcccagctgaccccagaccctctcccctcactccccccatgtcgcaggatcgagaccctgaggcagacagcccgttcaccaagccccccgccccgcccccatcaccccgtaaacttctcccagcctccgccctgccctcacccagcccgctgttccccaagcctcgctccaagcccacgccacccctgcagcagggcagccccagaggccagcacctatccccgaggctggggtcgaggctcggccccgcccctgcctctgcaacttgagcctggctgcgacccctgctctgacgtctcggaaaattcccccttgcccaggcccttgggggagggggtgcatggtatgaaatggggctgagacccccggctgggggcagaggaacccgccagagaacattcagaaggccttcatcgcatccatggacctgtggaactgggatgaggcatccccacaggaagtgcctccagggaacaagctggcagggcttgaaggagccaaattaggcttctgtttccctgatctggcactccaaggggacacgccgacagcgacagcagagacatgctggaaaggtacaagctcatccctggcaagcttcccacagctggactggggctccgcgttactgcacccagaagttccatggggggcggagcccgactctcaggctcttccgtggtccggggactggacagacatggcgtgcacagcctgggactcttggagcggcgcctcgcagaccctgggccccgcccctctcggcccgggccccatccccgccgccggctccgaaggcgccgcgggccagaactgcgtccccgtggcgggagaggccacctcgtggtcgcgcgcccaggccgccgggagcaacaccagctgggactgttctgtggggcccgacggcgatacctactggggcagtggcctgggcggggagccgcgcacggactgtaccatttcgtggggcgggcccgcgggcccggactgtaccacctcctggaacccggggctgcatgcgggtggcaccacctctttgaagcggtaccagagctcagctctcaccgtttgctccgaaccgagcccgcagtcggaccgtgccagtttggctcgatgccccaaaactaaccaccgaggtcccattcagctgtggcagttcctcctggagctgctccacgacggggcgcgtagcagctgcatccgttggactggcaacagccgcgagttccagctgtgcgaccccaaagaggtggctcggctgtggggcgagcgcaagagaaagccgggcatgaattacgagaagctgagccggggccttcgctactactatcgccgcgacatcgtgcgcaagagcggggggcgaaagtacacgtaccgcttcgggggccgcgtgcccagcctagcctatccggactgtgcgggaggcggacggggagcagagacacaataaaaattcccggtcaaacctc

SEQ ID NO: 9881 - DNA, 1335 bp, Homo sapiens
  source 1..1335: mol_type = unassigned DNA
aggtgagcgatgaactgaggactagatgcctgggtgtctgggttaggaaggacctgggggactagactcccaagaagccgggggcctggactcctgggtctaacagaggaagagagctggggtccctcactcccaggaccaagattttaggctcctggggaaggagggagcggaggcctggactcctggctctgagggaagctagggctggggcccagactccagggcctccaagtgtcaccagctcacccattgccatctggacttttcccgacccagaacattcagaaggccttcatcgcatccatggacctgtggaactgggatgaggcatccccacaggaagtgcctccagggaacaagctggcagggcttgaaggagccaaattaggcttctgtttccctgatctggcactccaaggggacacgccgacagcgacagcagagacatgctggaaaggtacaagctcatccctggcaagcttcccacagctggactggggctccgcgttactgcacccagaagttccatggggggcggagcccgactctcaggctcttccgtggtccggggactggacagacatggcgtgcacagcctgggactcttggagcggcgcctcgcagaccctgggccccgcccctctcggcccgggccccatccccgccgccggctccgaaggcgccgcgggccagaactgcgtccccgtggcgggagaggccacctcgtggtcgcgcgcccaggccgccgggagcaacaccagctgggactgttctgtggggcccgacggcgatacctactggggcagtggcctgggcggggagccgcgcacggactgtaccatttcgtggggcgggcccgcgggcccggactgtaccacctcctggaacccggggctgcatgcgggtggcaccacctctttgaagcggtaccagagctcagctctcaccgtttgctccgaaccgagcccgcagtcggaccgtgccagtttggctcgatgccccaaaactaaccaccgaggtcccattcagctgtggcagttcctcctggagctgctccacgacggggcgcgtagcagctgcatccgttggactggcaacagccgcgagttccagctgtgcgaccccaaagaggtggctcggctgtggggcgagcgcaagagaaagccgggcatgaattacgagaagctgagccggggccttcgctactactatcgccgcgacatcgtgcgcaagagcggggggcgaaagtacacgtaccgcttcgggggccgcgtgcccagcctagcctatccggactgtgcgggaggcggacggggagcagagacacaataa

SEQ ID NO: 9882 - DNA, 1539 bp, Homo sapiens
  source 1..1539: mol_type = unassigned DNA
gggaaccggcgggagggcgcctcctcctcccccgccctctctgctgaggatggaagtgacgaaagcagccgaggaggtcacttcctgctggggtggatgaggaggagccggagacgccgcggaggagaccggaccgaagacggaccgtgccgggaagagcaggcgggtgaaaatgaaagccggctgtagcatcgtggaaaagccagaaggaggtggagggtatcagtttcctgactgggcctacaaaacagagtcatccccaggctcccggcagatccagctgtggcacttcatcctggagctgctgcagaaggaagagttccgccatgtcatcgcctggcagcagggagagtacggggaatttgtcatcaaggatccagatgaggtggcccgcctctggggccgcaggaaatgcaaaccacagatgaattatgacaagctgagccgggccctcagatactattacaacaagaggatccttcataaaacaaaagggaaaagatttacctataaatttaacttcaacaagctggtgatgcccaactacccattcatcaacattcggtcaagtggtaagatacaaactcttttggtagggaattaattttgaattgaaaagaatttttaaaaatccaaatctaagacatggcatgtttaggaagattttagaaacactaaaataatgtgatcctttggattgcctcaatgttcttactcaagtcatctcacttataaggagagttataggctattcagtatcaagatagatttctttggtttatttggttggttcccttttctgcatattgtttgtaatctcctagatactattacgctatcttgtttgggaatgatgtttcataggtttgtgatgatctttacgttcaggactcagttttaacacccagcccagtggttctttcatagatgggaacctgtttctacaaacacttccgattttctgtgaaactaccaagctctcccttatcaagtgaatatcatcaaaaccacagcatccttgatcagagaagggggaggttcacatgtttgcagtgaaaagcagtgtctttgatctgcaacagcaaatcctcagagaaaaagattctggggttacttgaccttctctcctgttaagtgcagtagggcttcccctcttgactttcctggttatagctttccatcacagctccccacattctctcttgatgttgaaagcagtctctcaaaagactttgttgttgtgtggttttttgtttgtgatttttttccttatgcaaatcatactcctgcccaagaaaatacagtagttccccttatctgagcagtatatgttctaagacccctagtagattcgcaaaccacagatagtaccaaactccattcatatatatgatgttttttcttcccttaaccccactcatatgtatctgtgataacgtttaatttataaattaggcacagtaagagattaatgacaataataaaatagaaaaattataacaatatgctgtaataaacttaatgtggtctttctcaaaa

SEQ ID NO: 9883 - DNA, 5254 bp, Homo sapiens
  source 1..5254: mol_type = unassigned DNA
ccggagacgccgcggaggagaccggaccgaagacggaccgtgccgggaagagcaggcgggtgaaaatgaaagccggctgtagcatcgtggaaaagccagaaggaggtggagggtatcagtttcctgactgggcctacaaaacagagtcatccccaggctcccggcagatccagctgtggcacttcatcctggagctgctgcagaaggaagagttccgccatgtcatcgcctggcagcagggagagtacggggaatttgtcatcaaggatccagatgaggtggcccgcctctggggccgcaggaaatgcaaaccacagatgaattatgacaagctgagccgggccctcagatactattacaacaagaggatccttcataaaacaaaagggaaaagatttacctataaatttaacttcaacaagctggtgatgcccaactacccattcatcaacattcggtcaagtggtgtggttcctcagagtgcaccaccagtgccaacagcctcttcccggttccatttcccacctctggacacccattctccaaccaatgatgtgcagccgggacggttctctgctagctccctaactgcttctggccaggagtccagtaatggtactgatagaaagactgagctttcagagctggaggatggctcagctgctgactggcgccggggtgtggatcccgtgtcctccaggaatgccattggtggaggagggattggccatcagaaacgcaagcctgacataatgcttcctctgtttgctaggccagggatgtaccctgacccccacagtcccttcgctgtctctccaatccctggccgcggaggtgtccttaatgtccccatttcaccagccctctccctgactcccaccatcttctcctatagcccatcaccaggcctgagccctttcaccagcagcagctgcttctccttcaaccctgaggaaatgaaacactaccttcattctcaagcttgttctgtgttcaactaccatctgagtcctcggacttttccccgttacccagggctcatggttccaccactgcagtgccaaatgcatcctgaggagtcaactcagttctccatcaagctgcagcccccaccagttgggcggaagaaccgggagagggttgagagcagcgaggagtcagcaccagtcaccacgcccaccatggcttctattcccccaagaatcaaggtggaacctgcctctgaaaaggatcctgagagcctcaggcagtcggcacgagagaaggaggagcacactcaagaagagggcactgtgccaagcaggaccattgaagaggaaaaaggcaccatctttgcccgtcctgctgcaccacccatctggccctctgtgcccattagcaccccaagtggagaacctctggaggtgactgaagacagtgaggataggcctggcaaagagcccagtgcacctgagaagaaagaagatgcactgatgccccccaagcttcggttgaagcggcgctggaatgatgaccctgaagcccgagagctgagcaagagtggcaagtttctctggaatgggtcaggaccccagggcttggcaacagcagctgctgatgcttagaactggaagtggattaggagctgtttatactataatcaaatacatacatgtatttatgtagcaagatttcagggtgggggggagggagttaaactggtttgatcattctaggggcatagacttgtatttttatgttttggggatgggatggggttatcttctgttgtaaattaggtgggatatgaacacacttattttcctggtgagtaggacacagggagggtattgaactcaaaggagaaggagcctctatttcctgttgaggcttatactttctgacaaggaaactcccaaagggccaagatactttttggtcccatgatagtcaggttccagacttctttcttttctattgtatttgtatgtggaaagccattaatgaatttattttactccaagagatacacataaaagggaaaagggcatggttgggaggttgagcagtaagagaccattaatactaagtattttgcctgaaatgcttctttataattatttcagggaaggaataagataatctcagacttactggggtggggcttggggaatgtttggatgttgctctttttcttcttccttcttttttttttttttttttttttggttggtgttgtttggcatttttttcttttcctttttaaagaaaatgttttcaggaaacatgaacaaacatactgccaattatagtggggctgggaaggcacaggagctggcgacctctcagctgcatagttgggacggcaaaccctgctgtgagcttctcagacttttcacctacttcacctattaagaagccatgaggagttgtaaactcttgttcagggaagaaaagagggcaggaggaagtaacccaatgcctttaaatacaaaacagatgaaaaacaaaatactcatttttccttttctattgtgggtttggggagccaaaccaagtgtgactgtgagcacgttcactgagaggcatgacaacattattgaagaggtctttccattatgtctggttctcttattttcttaagtcaagccttaactatgaacatactttaagatgatacgggtctgtcaccataaacctgtaaaagggcatcgacagcttttcagataatccaggaatgttgagacatggctaagtttctagctgatacttagtcattccctcttgatattgttgggatgggtagccaaaaggcaggcttgtgggagttaagagccaatgatacctggaaacatgggaggtagctgggggtacaagtggatgttgagactgaaggaagaggtggaaagaagacacagaaggcacccagatgccaaaaggcctggcatgaatgagagttggcatctgtcctgttgtggtgttcccattcttgccatacccatttgcccagattgttctgattctcatgttcaattgactatcccacatgagactacagtttataggcagtgaggaattgtttcttcctgggaaatgtccttccagcaacttcagaggaatgggaaagtgttaatcttacgtgaagcaaaggagcctggactaggggcagagagaaagaagcagcagcccaccttctttgtgtttgcacatgtgcctatgtcgtgtacattggtacctgactgtggctcagatctgcgtcgcagcagcgagagaagaaatcactccatatccgatgagaggaagggtggcacagagatggtgtctacaattagagacatttctgactccaccttagcctaagcaaactttatatactgagtaacatttgaaggttgtcttttaatggtggggggtgttttttcctttttaaactacagtgcttgcacaagagagggagggactcagaaaaggttagggcaggtgagggagacagtagatggcctgggatgacttgagtccatcatactattgcttggcaggtgtcctcccccatgtttgattcaaattccatgagtgacctacctttccccaggaatgggactgagagggtagtctccagcaactcagtctgcacagggctccccgttcaggctgcctttggtggttgtgcttttgtaagtttctttctctgcacttcgacttacctctgaatcagaaagcaagcccagcaggtgaatgagggatgtctgcttggcattgcccaatctaaccagggaggctggctggccacccactgtccgctagaggggagagctagcaggtgttggtatgaactcaggaatagaaacacgaggcctttttaaatacgagggagaagaatccatgatgcatacctgtaaccccctagaacccaagtgccagaattcctagatgctgcttctgtttgaacaaaatgtcactgcttttacacttgaaaaaaacacactcgaaaaatgttcaactccatgaaaaatattttttggctttaagaaattgtttggtgtttaactgtttcctttgattgccattccaccagtaaattgttggttgatttgcactgcactctggggttggggttgggaggggagggtccttatacagagccgaacctggggttgctcaggaagtgggccagggaatgtggaagtcgttgacattgcctgggccaaaagagtgggagatagtttttctcccctcagcccactcctggtagcacctgtcgccagcctggtacaaagccaggcctttttcttctgtgagcatctcatcactgtccagcagcaggtggaaaaagggggacaacaaccagacctattttttctcccccattttttccaaattttgctgtgccaaatgtttaaaattttataaatatgaatctattgaaatttccttaatcaagagcttcttcgtgtaaagtttgcttttttagctatagaaaaagaaaacagtaaatatctcttaatggcatccagccttgctgagctcaccttttttcctgaagaatgggtaggagtgaaatatttaatgtaaacatttcaccaagtccctttaccctaattttgaagctgcattaaacccaactcactaacacagggaatgattgcaccctagtcctctgtgggccaagaaactttcagaagcattaaaaaaatagttgaagtatatcacttctcaccaagtgggtagagtcagttggctgtttgtcccttgttttttatttattccataattatgtttgtgctttttgttttgtaaacagtaatggaacgtacatttttattttgtttagaagacaactttgattcaatctttcaagaactgttccattcttggtttcttcttagggggataaaaagttaccagttaatttgttttgagatatttaagcattctttgagttatagaattgtgatgcagggatttgtgaatgagacatttacatgtgaaaggtgacttcactagttacctgcttgagcagagtaaagtgtgtatatgtacataaaatgtaagtaatcttaactccattgtgcagtgccttttagatgttccgctttctataaagtcttcaaatttttgcatatatattatatatatatgatgtaatgttatagaaatatatgtataatatacatattttttccaggggtatctgatagctctgtattttgttatggaagttgaaagaaaaaagtattttacctcagaaattaaataaaaaaatacttttaagtaa

SEQ ID NO: 9884 - DNA, 4111 bp, Homo sapiens
  source 1..4111: mol_type = unassigned DNA
agcctggttggcagctgcggcgcagagtccagccgctggtgcgcggagcggttcaccgtcttcggagcggttcggcccagcctttcgcccaggcgcccaggcccgctgcgcgcgtgcgtgagcgcgcctgcgccgccggggccgctgcaaggggaggagagaggccgcctcaggaggatcccttttcccccagaaattactcaatgctgaaacctctcaaagtggtattagagacgctgaaagcaccatggacgggttttatgatcagcaagtcccttttatggtcccagggaaatctcgatctgaggaatgcagagggcggcctgtgattgacagaaagaggaagtttttggacacagatctggctcacgattctgaagagctatttcaggatctcagtcaacttcaagaggcttggttagctgaagcacaagttcctgatgatgaacagtttgtcccagattttcagtctgataacctggtgcttcatgccccacctccaaccaagatcaaacgggagctgcacagcccctcctctgagctgtcgtcttgtagccatgagcaggctcttggtgctaactatggagaaaagtgcctctacaactattgtgcctatgataggaagcctccctctgggttcaagccattaacccctcctacaacccccctctcacccacccatcagaatcccctatttcccccacctcaggcaactctgcccacctcagggcatgcccctgcagctggcccagttcaaggtgtgggccccgcccccgccccccattcgcttccagagcctggaccacagcagcaaacatttgcggtcccccgaccaccacatcagcccctgcagatgccaaagatgatgcctgaaaaccagtatccatcagaacagagatttcagagacaactgtctgaaccctgccaccccttccctcctcagccaggagttcctggagataatcgccccagttaccatcggcaaatgtcagaacctattgtccctgcagctcccccgccccctcagggattcaaacaagaataccatgacccactctatgaacatggggtcccgggcatgccagggcccccagcacacgggttccagtcaccaatgggaatcaagcaggagcctcgggattactgcgtcgattcagaagtgcctaactgccagtcatcctacatgagagggggttatttctccagcagccatgaaggtttttcatatgaaaaagatccccgattatactttgacgacacttgtgttgtgcctgagagactggaaggcaaagtcaaacaggagcctaccatgtatcgagaggggcccccttaccagaggcgaggttcccttcagctgtggcagttcctggtcacccttcttgatgacccagccaatgcccacttcattgcctggacaggtcgaggcatggagttcaagctgatagaaccggaagaggttgctcggcgctggggcatccagaagaaccggccagccatgaactatgacaagctgagccgctctctccgctattactatgaaaagggcatcatgcagaaggtggctggagagcgatacgtctacaaatttgtctgtgacccagatgccctcttctccatggctttcccggataaccagcgtccgttcctgaaggcagagtccgagtgccacctcagcgaggaggacaccctgccgctgacccactttgaagacagccccgcttacctcctggacatggaccgctgcagcagcctcccctatgccgaaggctttgcttactaagtttctgagtggcggagtggccaaaccctagagctagcagttcccattcaggcaaacaagggcagtggttttgtttgtgtttttggttgttcctaaagcttgccctttgagtattatctggagaacccaagctgtctctggattggcacccttaaagacagatacattggctggggagtgggaacagggaggggcagaaaaccaccaaaaggccagtgcctcaactcttgattctgatgaggtttctgggaagagatcaaaatggagtctccttaccatggacaatacatgcaaagcaatatcttgttcaggttagtacccgcaaaacgggacatagtatgtgacaatctgcatcgatcatggactactaaatgcctttacatagaagggctctgatttgcacaatttgttgaaaaatcacaaacccatagaaaagtaagtaggctaagttggggaggctcaaaccattaagggttaaaaatacatcttaaacattggaaagctcttctagctgaatctgaaatattaccccttgtctagaaaaaggggggcagtcagaacagctgttccccactccgtggttctcaaaatcataaaccatggctactcttgggaaccacccggccatgtggtcgccaagtagagcaagccccctttctcttcccaatcacgtggctgagtgtggatgacttttattttaggagaagggcgattaacacttttgacagtattttgttttgccctgatttgggggattgttttgttttggtggttgttttggaaaaacagtttataaactgatttttgtagttttggtatttaaagcaaaaaaacgaaaaacaaaaaacaaaaacaaaccttttggtaactgtgcactgtgtcctttagccagggccgtgccaacttatgaagacactgcagcttgagaggggctttgctgaggcttccccttggccatgtgaaagcccgccttgttgcctgctttgtgctttctgcaccagacaacctgatggaacatttgcacctgagttgtacatttttgaagtgtgcagggcagcctggacacaagcttagattctctatgtatagttccccgtgttcactaacatgccctctctggaaagcatatgtatataacatgtgtcatgtcctttggaaacctggtcacctggtgaaaacccttgggattcttccctgggcatgactgatgacaatttccatttcatcagtttgttttgttttcctttttctttaaatcttggactttaaaccctacctgtgtgattcagtagggtttgagacttacgtgtgatactgacaggtaagcaacagtgctagcattctagattcctgcctttttttaaaaagaaattattctcattgctgtattatattggaaaagttttaaacaaccaagctaaagctatgtgaaagttgagctcaaagtagaggaaaagttactggtggtaccttgctgcctgctctgctggtagaattctgtgctccccgtgacacttagtacattaagaatgactacactgttcctcgtatgtgaaggaggcagtgctgactccgtgagtgtgagacacgtgctttgaactgcttttctattcatggagcactccatagtctcaaactgtcccccttatgaccaacagcacatttgtgaagaggttcgcagggataaggggtgcactttatagctatggaaacatgagattctcctctattggaagctaattagcccacaaaggtggtaaacctgtagattgggccttaattagcattgtactctaatcaaaggactctttctaaaccatatttatagctttcttaacctacacatagtctatacatagatgcatattttacccccagctggctagagatttatttgttgtaaatgctgtatagatttggttttcctttctttacttaccctggtttggattttttttttttttcttttgaatggatttatgctgtcttagcaatatgacaataatcctctgtagcttgagctacccctcccctgctgtaacttacgtgacctgtgctgtcactgggcataggacagcggcatcacggttgcattcccattggactcatgcacctcccggatggtttttgtttttttcgggggttctttggggtttgtttgtttgcttcttttccagagtgtggaaagtctacagtgcagaaaggcttgaacctgccagctgatttgaaatactttcccctgcgcagggccgtatgcatcctgccaagctgcgttatattctgtactgtgtacaataaagaagtttgcttttcgtttaccaagcacccgaa

SEQ ID NO: 9885 - DNA, 573 bp, Homo sapiens
  source 1..573: mol_type = unassigned DNA
tttgcgggggcaggggggagatcggaaggggcgtccggccactggtccgacaggcccagccggctagagttcacgggctgattcagaatcttcaaagtcggggaggatcccttttcccccagaaattactcaatgctgaaacctctcaaagtggtattagagacgctgaaagcaccatggacgggttttatgatcagcaagtcccttttatggtcccagggaaatctcgatctgaggaatgcagagggcggcctgtgattgacagaaagaggaagtttttggacacagatctggctcacgattctgaagagctatttcaggatctcagtcaacttcaagaggcttggttagctgaagcacaagttcctgatgatgaacagtttgtcccagattttcagtctgataacctggtgcttcatgccccacctccaaccaagatcaaacgggagctgcacagcccctcctctgagctgtcgtcttgtagccatgagcaggctcttggtgctaactatggagaaaagtgcctctacaactattgtgcctatgataggaagcctccctctgggttcaagc

SEQ ID NO: 9886 - DNA, 554 bp, Homo sapiens
  source 1..554: mol_type = unassigned DNA
gtgcgtgagcgcgcctgcgccgccggggccgctgcaaggggaggagagaggccgcctcaggaggatcccttttcccccagaaattactcaatgctgaaacctctcaaagtggtattagagacgctgaaagcaccatggacgggttttatgatcagcaagtcccttttatggtcccagggaaatctcgatctgaggaatgcagagggcggcctgtgattgacagaaagaggaagtttttggacacagatctggctcacgattctgaagagctatttcaggatctcagtcaacttcaagaggcttggttagctgaagcacaagttcctgatgatgaacagtttgtcccagattttcagtctgataacctggtgcttcatgccccacctccaaccaagatcaaacgggagctgcacagcccctcctctgagctgtcgtcttgtagccatgagcaggctcttggtgctaactatggagaaaagtgcctctacaactattgtgcctatgataggaagcctccctctgggttcaagccattaacccctcctacaaccccc

SEQ ID NO: 9887 - DNA, 2213 bp, Homo sapiens
  source 1..2213: mol_type = unassigned DNA
ggagcgcgagtgcgggggctcccgagtggatgggggatcgcggagttgcgaggctttcacagtctctggagattcgagagccccgaggggacttggaggctcgcgagaagagacgcttggcggagctccgcagttgggaggagggggcgggaagcagtttgaggggaatgtctgagaggcgctgccccccagagcaccgggagggggtaaatgacacaggaggatcccttttcccccagaaattactcaatgctgaaacctctcaaagtggtattagagacgctgaaagcaccatggacgggttttatgatcagcaagtcccttttatggtcccagggaaatctcgatctgaggaatgcagagggcggcctgtgattgacagaaagaggaagtttttggacacagatctggctcacgattctgaagagctatttcaggatctcagtcaacttcaagaggcttggttagctgaagcacaagttcctgatgatgaacagtttgtcccagattttcagtctgataacctggtgcttcatgccccacctccaaccaagatcaaacgggagctgcacagcccctcctctgagctgtcgtcttgtagccatgagcaggctcttggtgctaactatggagaaaagtgcctctacaactattgtgcctatgataggaagcctccctctgggttcaagccattaacccctcctacaacccccctctcacccacccatcagaatcccctatttcccccacctcaggcaactctgcccacctcagggcatgcccctgcagctggcccagttcaaggtgtgggccccgcccccgccccccattcgcttccagagcctggaccacagcagcaaacatttgcggtcccccgaccaccacatcagcccctgcagatgccaaagatgatgcctgaaaaccagtatccatcagaacagagatttcagagacaactgtctgaaccctgccaccccttccctcctcagccaggagttcctggagataatcgccccagttaccatcggcaaatgtcagaacctattgtccctgcagctcccccgccccctcagggattcaaacaagaataccatgacccactctatgaacatggggtcccgggcatgccagggcccccagcacacgggttccagtcaccaatgggaatcaagcaggagcctcgggattactgcgtcgattcagaagtgcctaactgccagtcatcctacatgagagggggttatttctccagcagccatgaaggtttttcatatgaaaaagatccccgattatactttgacgacacttgtgttgtgcctgagagactggaaggcaaagtcaaacaggagcctaccatgtatcgagaggggcccccttaccagaggcgaggttcccttcagctgtggcagttcctggtcacccttcttgatgacccagccaatgcccacttcattgcctggacaggtcgaggcatggagttcaagctgatagaaccggaagaggttgctcggcgctggggcatccagaagaaccggccagccatgaactatgacaagctgagccgctctctccgctattactatgaaaagggcatcatgcagaaggtggctggagagcgatacgtctacaaatttgtctgtgacccagatgccctcttctccatggctttcccggataaccagcgtccgttcctgaaggcagagtccgagtgccacctcagcgaggaggacaccctgccgctgacccactttgaagacagccccgcttacctcctggacatggaccgctgcagcagcctcccctatgccgaaggctttgcttactaagtttctgagtggcggagtggccaaaccctagagctagcagttcccattcaggcaaacaagggcagtggttttgtttgtgtttttggttgttcctaaagcttgccctttgagtattatctggagaacccaagctgtctctggattggcacccttaaagacagatacattggctggggagtgggaacagggaggggcagaaaaccaccaaaaggccagtgcctcaactcttgattctgatgaggtttctgggaagagatcaaaatggagtctccttaccatggacaatacatgcaaagcaatatcttgttcaggttagtacccgcaaaacgggacatagtatgtgacaatctgcatcgatcatggactactaaatgcctttacatagaa

SEQ ID NO: 9888 - DNA, 574 bp, Homo sapiens
  source 1..574: mol_type = unassigned DNA
agcatccccggagagaagatagagccgccccacggccttcacaggagggggaggatcccttttcccccagaaattactcaatgctgaaacctctcaaagtggtattagagacgctgaaagcaccatggacgggttttatgatcagcaagtcccttttatggtcccagggaaatctcgatctgaggaatgcagagggcggcctgtgattgacagaaagaggaagtttttggacacagatctggctcacgattctgaagagctatttcaggatctcagtcaacttcaagaggcttggttagctgaagcacaagttcctgatgatgaacagtttgtcccagattttcagtctgataacctggtgcttcatgccccacctccaaccaagatcaaacgggagctgcacagcccctcctctgagctgtcgtcttgtagccatgagcaggctcttggtgctaactatggagaaaagtgcctctacaactattgtgcctatgataggaagcctccctctgggttcaagccattaacccctcctacaacccccctctcacccacccatcagaatcccctattt

SEQ ID NO: 9889 - DNA, 1859 bp, Homo sapiens
  source 1..1859: mol_type = unassigned DNA
agttgggaggagggggcgggaagcagtttgaggggaatgtctgagaggcgctgccccccagagcaccgggagggggtaaatgacacaggaggatcccttttcccccagaaattactcaatgctgaaacctctcaaagtggtattagagacgctgaaagcaccatggacgggttttatgatcagcaagtcccttttatggtcccagggaaatctcgatctgaggaatgcagagggcggcctgtgattgacagaaagaggaagtttttggacacagatctggctcacgattctgaagagctatttcaggatctcagtcaacttcaagaggcttggttagctgaagcacaagttcctgatgatgaacagtttgtcccagattttcagtctgataacctggtgcttcatgccccacctccaaccaagatcaaacgggagctgcacagcccctcctctgagctgtcgtcttgtagccatgagcaggctcttggtgctaactatggagaaaagtgcctctacaactattgtgcctatgataggaagcctccctctgggttcaagccattaacccctcctacaacccccctctcacccacccatcagaatcccctatttcccccacctcaggcaactctgcccacctcagggcatgcccctgcagctggcccagttcaaggtgtgggccccgcccccgccccccattcgcttccagagcctggaccacagcagcaaacatttgcggtcccccgaccaccacatcagcccctgcagatgccaaagatgatgcctgaaaaccagtatccatcagaacagagatttcagagacaactgtctgaaccctgccaccccttccctcctcagccaggagttcctggagataatcgccccagttaccatcggcaaatgtcagaacctattgtccctgcagctcccccgccccctcagggattcaaacaagaataccatgacccactctatgaacatggggtcccgggcatgccagggcccccagcacacgggttccagtcaccaatgggaatcaagcaggagcctcgggattactgcgtcgattcagaagtgcctaactgccagtcatcctacatgagagggggttatttctccagcagccatgaaggtttttcatatgaaaaagatccccgattatactttgacgacacttgtgttgtgcctgagagactggaaggcaaagtcaaacaggagcctaccatgtatcgagaggggcccccttaccagaggcgaggttcccttcagctgtggcagttcctggtcacccttcttgatgacccagccaatgcccacttcattgcctggacaggtcgaggcatggagttcaagctgatagaaccggaagaggttgctcggcgctggggcatccagaagaaccggccagccatgaactatgacaagctgagccgctctctccgctattactatgaaaagggcatcatgcagaaggtggctggagagcgatacgtctacaaatttgtctgtgacccagatgccctcttctccatggctttcccggataaccagcgtccgttcctgaaggcagagtccgagtgccacctcagcgaggaggacaccctgccgctgacccactttgaagacagccccgcttacctcctggacatggaccgctgcagcagcctcccctatgccgaaggctttgcttactaagtttctgagtggcggagtggccaaaccctagagctagcagttcccattcaggcaaacaagggcagtggttttgtttgtgtttttggttgttcctaaagcttgccctttgagtattatctggagaacccaagctgtctctggattggcacccttaaagacagata

SEQ ID NO: 9890 - DNA, 2211 bp, Homo sapiens
  source 1..2211: mol_type = unassigned DNA
gcgtcccgggtccccgcgccgcgccgcgacctgcagaccccgccgccgcgctcgggcccgtctcccacgcccccgccgccccgcgcgcccaactccgccggccgccccgccccgccccgcgcgctccagacccccggggcggctgccgggagagatgctggaagaaacttcttaaatgaccgcgtctggctggccgtggagcctttctgggttggggagaggaaaggaaagtggaaaaaacctgagaacttcctgatctctctcgctgtgagacatgtctgagactcctgctcagtgtagcattaagcaggaacgaatttcatatacacctccagagagcccagtgccgagttacgcttcctcgacgccacttcatgttccagtgcctcgagcgctcaggatggaggaagactcgatccgcctgcctgcgcacctgcgcttgcagccaatttactggagcagggatgacgtagcccagtggctcaagtgggctgaaaatgagttttctttaaggccaattgacagcaacacgtttgaaatgaatggcaaagctctcctgctgctgaccaaagaggactttcgctatcgatctcctcattcaggtgatgtgctctatgaactccttcagcatattctgaagcagaggaaacctcggattcttttttcaccattcttccaccctggaaactctatacacacacagccggaggtcatactgcatcagaaccatgaagaagataactgtgtccagaggacccccaggccatccgtggataatgtgcaccataaccctcccaccattgaactgttgcaccgctccaggtcacctatcacgacaaatcaccggccttctcctgaccccgagcagcggcccctccggtcccccctggacaacatgatccgccgcctctccccggctgagagagctcagggacccaggccgcaccaggagaacaaccaccaggagtcctaccctctgtcagtgtctcccatggagaataatcactgcccagcgtcctccgagtcccacccgaagccatccagcccccggcaggagagcacacgcgtgatccagctgatgcccagccccatcatgcaccctctgatcctgaacccccggcactccgtggatttcaaacagtccaggctctccgaggacgggctgcatagggaagggaagcccatcaacctctctcatcgggaagacctggcttacatgaaccacatcatggtctctgtctccccgcctgaagagcacgccatgcccattgggagaatagcagactgtagactgctttgggattacgtctatcagttgctttctgacagccggtacgaaaacttcatccgatgggaggacaaagaatccaaaatattccggatagtggatcccaacggactggctcgactgtggggaaaccataagaacagaacaaacatgacctatgagaaaatgtccagagccctgcgccactactacaaactaaacattatcaggaaggagccaggacaaaggcttttgttcaggtttatgaaaaccccagatgaaatcatgagtggccgaacagaccgtctggagcacctagagtcccaggagctggatgaacaaatataccaagaagatgaatgctgaaggaaccaacagtccacctcagcgggccagcagcccagggaacccctgcccaccaggattgctggaagtgtgacggagcaggcgggctgaggagagtggaaaaggaagcgacccagaaatggcagggacacttctcttgcagaccaagagggaccctggagcaccttagacaaactacccagcacaggcggggctggaattctggcggagggcatgagcctgggactccatgtcacgtttccttctgatttggaatctctccatctgtaattcctcaccctcacccttccaccgttgttagtatcatggtgtttttgtttttgtttttgttttaagaacctgcagtttgactcttcatcgttcatctaggggaagacatctgatgttgttttcctatggaaatatatatctattatatatatattttttgcaaatctcacaaagtgcggcaagcccagctggtcaggaaagagaatacttgcagaggggttcaggttcctctttttcctgccacgtggatcaggtctgttcctgttactgttgggtcttggctgaaaaaaaaaaatgcttttaaaaaa

SEQ ID NO: 9891 - DNA, 1800 bp, Homo sapiens
  source 1..1800: mol_type = unassigned DNA
gcgcacaacctctcttgagacagggggagctgagacagatggaaagggtgatgggtgggcaggcaccaaccccggagcacccagaggcccaggaaaaggtgtcagtcgggatctccgagtagtctggccctgctcaggagagcacagccgctctgatggtggtgcgacggttccggacctgtggggcctcagcggggccaaacggcaggccgagacagtatcggggccgggaaggtcactcacccctaaagggagaggcaccatgcgaggccccttcctatcctatgtgcggagactcacagggtccttcctggtcctgggctcgggaccgtgagagacgcagttggttccgagttcaggactaggggtccccttagatcctcagatcctgcagaatcccggctctgccccagtgggagccaaggccaggtcgccagagggactgtccgccggctggaggctgtgtgcaggacccacgcctcccaggctagcgagcgggcagcgccccggtgctgcgctcccacggggccggcccctgccctgccctgccctgctcctagcccgcagcggcgcaagtggaaccgcatcccgctctttcgttttcgtttcccggaaggatagcgattaccggagcgcctcgcgcgcctgcccgcctgcggaggacccgggcgcacacgccttggcgcttctcgaaagagatttcctcccacgcgaccttccagttctcggagccaggttaggggtttggcggaggaggactgcggggcgcgggcctagggccccagcagccacagccaggggagcgctcaagacagaaagccggtggcttcctcacctccacctgtaatgcaggagggagaattggctatttctcctataagccctgtggcagccatgcctcccctaggcacccacgtgcaagccagatgtgaagctcaaattaacctgctgggtgaaggggggatctgcaagctgccaggaagactccgcatccagcccgcactgtggagcagggaggacgtgctgcactggctgcgctgggcagagcaggagtactctctgccatgcaccgcggagcacgggttcgagatgaacggacgcgccctctgcatcctcaccaaggacgacttccggcaccgtgcgcccagctcaggtgacgtcctgtatgagctgctccagtacatcaagacccagcggcgagccctggtgtgtgggcccttttttggagggatcttcaggctgaagacgcccacccagcactctccagtccccccggaagaggtgactggcccctctcagatggacacccgaaggggccacctgctgcagccaccagacccagggcttaccagcaacttcggccacctggatgaccctggcctggcaaggtggacccctggcaaggaggagtccctcaacttatgtcactgtgcagagctcggctgcaggacccagggggtctgttccttccccgcgatgccgcaggcccccattgacggcaggatcgctgactgccgcctgctgtgggattacgtgtatcagctgctccttgatacccgatatgagccctacatcaagtgggaagacaaggacgccaagatcttccgagttgtggatccaaatgggctcgccagactctggggaaatcacaagaaccgggtgaacatgacctacgagaagatgtctcgtgccctgcgccactattataagcttaatatcattaagaaggaaccggggcagaaactcctgttcagaaatggacttcagctgatcttcatattcatatggagtttccagtga

SEQ ID NO: 9892 - DNA, 1719 bp, Homo sapiens
  source 1..1719: mol_type = unassigned DNA
gtttcccggaaggatagcgattaccggagcgcctcgcgcgcctgcccgcctgcggaggacccgggcgcacacgccttggcgcttctcgaaagagatttcctcccacgcgaccttccagttctcggagccaggttaggggtttggcggaggaggactgcggggcgcgggcctagggccccagcagccacagccaggggagcgctcaagacagaaagccggtggcttcctcacctccacctgtaatgcaggagggagaattggctatttctcctataagccctgtggcagccatgcctcccctaggcacccacgtgcaagccagatgtgaagctcaaattaacctgctgggtgaaggggggatctgcaagctgccaggaagactccgcatccagcccgcactgtggagcagggaggacgtgctgcactggctgcgctgggcagagcaggagtactctctgccatgcaccgcggagcacgggttcgagatgaacggacgcgccctctgcatcctcaccaaggacgacttccggcaccgtgcgcccagctcaggtgacgtcctgtatgagctgctccagtacatcaagacccagcggcgagccctggtgtgtgggcccttttttggagggatcttcaggctgaagacgcccacccagcactctccagtccccccggaagaggtgactggcccctctcagatggacacccgaaggggccacctgctgcagccaccagacccagggcttaccagcaacttcggccacctggatgaccctggcctggcaaggtggacccctggcaaggaggagtccctcaacttatgtcactgtgcagagctcggctgcaggacccagggggtctgttccttccccgcgatgccgcaggcccccattgacggcaggatcgctgactgccgcctgctgtgggattacgtgtatcagctgctccttgatacccgatatgagccctacatcaagtgggaagacaaggacgccaagatcttccgagttgtggatccaaatgggctcgccagactctggggaaatcacaagaaccgggtgaacatgacctacgagaagatgtctcgtgccctgcgccactattataagcttaatatcattaagaaggaaccggggcagaaactcctgttcagatttctaaagactccgggaaagatggtccaggacaagcacagccacctggagccgctggagagccaggagcaggacagaatagagttcaaggacaagaggccagaaatctctccgtgaggggcaggtggactccaggcacccggtaccgatggggcagggaccgagtctcccatgaaggcagactcctcctcccagcagagcagcaggatccccagccagactctgtacccacaggattacagccattgcttgggaaggctgggaggcctcccatccaggacactgggggcaggagtgtcatcttttgggcagggcaatcctggggctaaatgaggtacaggggaatggactctcccctactgcacccctgggagaggaagccaggcaccgatagagcacccagccccacccctgtaaatggaatttaccagatgaagggaatgaagtccctcactgagcctcagatttcctcacctgtgaaatgggctgaggcaggaaatgggaaaaagtgttagtgcttccaggcggcactgacagcctcagtaacaataaaaacaatggtagctga

SEQ ID NO: 9893 - DNA, 1488 bp, Homo sapiens
  source 1..1488: mol_type = unassigned DNA
gtttcccggaaggatagcgattaccggagcgcctcgcgcgcctgcccgcctgcggaggacccgggcgcacacgccttggcgcttctcgaaagagatttcctcccacgcgaccttccagttctcggagccaggttaggggtttggcggaggaggactgcggggcgcgggcctagggccccagcagccacagccaggggagcgctcaagacagaaagccggtggcttcctcacctccacctgtaatgcaggagggagaattggctatttctcctataagccctgtggcagccatgcctcccctaggcacccacgtgcaagccagatgtgaagctcaaattaacctgctgggtgaaggggggatctgcaagctgccaggaagactccgcatccagcccgcactgtggagcagggaggacgtgctgcactggctgcgctgggcagagcaggagtactctctgccatgcaccgcggagcacgggttcgagatgaacggacgcgccctctgcatcctcaccaaggacgacttccggcaccgtgcgcccagctcaggtgacgtcctgtatgagctgctccagtacatcaagacccagcggcgagccctggtgtgtgggcccttttttggagggatcttcaggctgaagacgcccacccagcactctccagtccccccggaagactgccgcctgctgtgggattacgtgtatcagctgctccttgatacccgatatgagccctacatcaagtgggaagacaaggacgccaagatcttccgagttgtggatccaaatgggctcgccagactctggggaaatcacaagaaccgggtgaacatgacctacgagaagatgtctcgtgccctgcgccactattataagcttaatatcattaagaaggaaccggggcagaaactcctgttcagatttctaaagactccgggaaagatggtccaggacaagcacagccacctggagccgctggagagccaggagcaggacagaatagagttcaaggacaagaggccagaaatctctccgtgaggggcaggtggactccaggcacccggtaccgatggggcagggaccgagtctcccatgaaggcagactcctcctcccagcagagcagcaggatccccagccagactctgtacccacaggattacagccattgcttgggaaggctgggaggcctcccatccaggacactgggggcaggagtgtcatcttttgggcagggcaatcctggggctaaatgaggtacaggggaatggactctcccctactgcacccctgggagaggaagccaggcaccgatagagcacccagccccacccctgtaaatggaatttaccagatgaagggaatgaagtccctcactgagcctcagatttcctcacctgtgaaatgggctgaggcaggaaatgggaaaaagtgttagtgcttccaggcggcactgacagcctcagtaacaataaaaacaatggtagctga

SEQ ID NO: 9894 - DNA, 2157 bp, Homo sapiens
  source 1..2157: mol_type = unassigned DNA
gcgcacaacctctcttgagacagggggagctgagacagatggaaagggtgatgggtgggcaggcaccaaccccggagcacccagaggcccaggaaaaggtgtcagtcgggatctccgagtagtctggccctgctcaggagagcacagccgctctgatggtggtgcgacggttccggacctgtggggcctcagcggggccaaacggcaggccgagacagtatcggggccgggaaggtcactcacccctaaagggagaggcaccatgcgaggccccttcctatcctatgtgcggagactcacagggtccttcctggtcctgggctcgggaccgtgagagacgcagttggttccgagttcaggactaggggtccccttagatcctcagatcctgcagaatcccggctctgccccagtgggagccaaggccaggtcgccagagggactgtccgccggctggaggctgtgtgcaggacccacgcctcccaggctagcgagcgggcagcgccccggtgctgcgctcccacggggccggcccctgccctgccctgccctgctcctagcccgcagcggcgcaagtggaaccgcatcccgctctttcgttttcgtttcccggaaggatagcgattaccggagcgcctcgcgcgcctgcccgcctgcggaggacccgggcgcacacgccttggcgcttctcgaaagagatttcctcccacgcgaccttccagttctcggagccaggttaggggtttggcggaggaggactgcggggcgcgggcctagggccccagcagccacagccaggggagcgctcaagacagaaagccggtggcttcctcacctccacctgtaatgcaggagggagaattggctatttctcctataagccctgtggcagccatgcctcccctaggcacccacgtgcaagccagatgtgaagctcaaattaacctgctgggtgaaggggggatctgcaagctgccaggaagactccgtgacgtcctgtatgagctgctccagtacatcaagacccagcggcgagccctggtgtgtgggcccttttttggagggatcttcaggctgaagacgcccacccagcactctccagtccccccggaagaggtgactggcccctctcagatggacacccgaaggggccacctgctgcagccaccagacccagggcttaccagcaacttcggccacctggatgaccctggcctggcaaggtggacccctggcaaggaggagtccctcaacttatgtcactgtgcagagctcggctgcaggacccagggggtctgttccttccccgcgatgccgcaggcccccattgacggcaggatcgctgactgccgcctgctgtgggattacgtgtatcagctgctccttgatacccgatatgagccctacatcaagtgggaagacaaggacgccaagatcttccgagttgtggatccaaatgggctcgccagactctggggaaatcacaagaaccgggtgaacatgacctacgagaagatgtctcgtgccctgcgccactattataagcttaatatcattaagaaggaaccggggcagaaactcctgttcagatttctaaagactccgggaaagatggtccaggacaagcacagccacctggagccgctggagagccaggagcaggacagaatagagttcaaggacaagaggccagaaatctctccgtgaggggcaggtggactccaggcacccggtaccgatggggcagggaccgagtctcccatgaaggcagactcctcctcccagcagagcagcaggatccccagccagactctgtacccacaggattacagccattgcttgggaaggctgggaggcctcccatccaggacactgggggcaggagtgtcatcttttgggcagggcaatcctggggctaaatgaggtacaggggaatggactctcccctactgcacccctgggagaggaagccaggcaccgatagagcacccagccccacccctgtaaatggaatttaccagatgaagggaatgaagtccctcactgagcctcagatttcctcacctgtgaaatgggctgaggcaggaaatgggaaaaagtgttagtgcttccaggcggcactgacagcctcagtaacaataaaaacaatggtagctg

SEQ ID NO: 9895 - DNA, 1186 bp, Homo sapiens
  source 1..1186: mol_type = unassigned DNA
cacacgccttggcgcttctcgaaagagatttcctcccacgcgaccttccagttctcggagccaggttaggggtttggcggaggaggactgcggggcgcgggcctagggccccagcagccacagccaggggagcgctcaagacagaaagccggtggcttcctcacctccacctgtaatgcaggtgacgtcctgtatgagctgctccagtacatcaagacccagcggcgagccctggtgtgtgggcccttttttggagggatcttcaggctgaagacgcccacccagcactctccagtccccccggaagaggtgactggcccctctcagatggacacccgaaggggccacctgctgcagccaccagacccagggcttaccagcaacttcggccacctggatgaccctggcctggcaaggtggacccctggcaaggaggagtccctcaacttatgtcactgtgcagagctcggctgcaggacccagggggtctgttccttccccgcgatgccgcaggcccccattgacggcaggatcgctgactgccgcctgctgtgggattacgtgtatcagctgctccttgatacccgatatgagccctacatcaagtgggaagacaaggacgccaagatcttccgagttgtggatccaaatgggctcgccagactctggggaaatcacaagaaccgggtgaacatgacctacgagaagatgtctcgtgccctgcgccactattataagcttaatatcattaagaaggaaccggggcagaaactcctgttcagatttctaaagactccgggaaagatggtccaggacaagcacagccacctggagccgctggagagccaggagcaggacagaatagagttcaaggacaagaggccagaaatctctccgtgaggggcaggtggactccaggcacccggtaccgatggggcagggaccgagtctcccatgaaggcagactcctcctcccagcagagcagcaggatccccagccagactctgtacccacaggattacagccattgcttgggaaggctgggaggcctcccatccaggacactgggggcaggagtgtcatcttttgggcagggcaatcctggggctaaatgaggtacaggggaatggactctcccctactgcacccctgggagaggaagccaggcaccgatagagcacccag

SEQ ID NO: 9896 - DNA, 2705 bp, Homo sapiens
  source 1..2705: mol_type = unassigned DNA
attaacccgggaggcggcggcggggaggggagaggctctgagaggcgaggccgggtgaggcggcgagggcggcccgacgggcgcgggacgggacggggcagcgagggcgccgggagccgcggcccggaatcggggcgcttcgccccgggccccccagcatgaagaccccggcggacacagggtttgccttcccggattgggcctacaagccagagtcgtcccctggctcaaggcagatccagctgtggcactttatcctggagctgctgcggaaggaggagtaccagggcgtcattgcctggcagggggactacggggaattcgtcatcaaagaccctgatgaggtggcccggctgtggggcgttcgcaagtgcaagccccagatgaattacgacaagctgagccgggccctgcgctattactataacaagcgcattctgcacaagaccaaggggaaacggttcacctacaagttcaatttcaacaaactggtgctggtcaattacccattcattgatgtggggttggctgggggtgcagtgccccagagtgccccgccagtgccgtcgggtggtagccacttccgcttccctccctcaacgccctccgaggtgctgtcccccaccgaggacccccgctcaccaccagcctgctcttcatcttcatcttccctcttctcggctgtggtggcccgccgcctgggccgaggctcagtcagtgactgtagtgatggcacgtcagagctggaggaaccgctgggagaggatccccgcgcccgaccacccggccctccggatctgggtgccttccgagggcccccgctggcccgcctgccccatgaccctggtgtcttccgagtctatccccggcctcggggtggccctgaacccctcagccccttccctgtgtcgcctctggccggtcctggatccctgctgccccctcagctctccccggctctgcccatgacgcccacccacctggcctacactccctcgcccacgctgagcccgatgtaccccagtggtggcggggggcccagcggctcagggggaggctcccacttctccttcagccctgaggacatgaaacggtacctgcaggcccacacccaaagcgtctacaactaccacctcagcccccgcgccttcctgcactaccctgggctggtggtgccccagccccagcgccctgacaagtgcccgctgccgcccatggcacccgagaccccaccggtcccctcctcggcctcgtcatcctcttcttcttcttcctccccattcaagtttaagctccagccgcccccactcggacgccggcagcgggcagctggggagaaggccgtagccggtgctgacaagagcggtggcagtgcaggcgggctggctgagggggcaggggcgctagccccaccgcccccgccaccacagatcaaggtggagcccatctcggaaggcgagtcggaggaggtagaggtgactgacatcagtgatgaggatgaggaagacggggaggtgttcaagacgccccgtgccccacctgcaccccctaagcctgagcccggcgaggcacccggggcatcccagtgcatgcccctcaagctacgctttaagcggcgctggagtgaagactgtcgcctcgaagggggtgggggccccgctgggggctttgaggatgagggtgaggacaagaaggtgcgtggggaggggcctggggaggctggggggcccctcaccccaaggcgggtgagctctgacctccagcatgccacggcccagctctccctggagcaccgagactcctgagggctgtgggcaggggacctgtgtgccccgcaccccccatgcttcttttgctgccttaagccccctatgccctggaggtgagggcagctctcttgtctcttccctgcctcctcccttttccctccccacattttgtataaaactttaatttcttttttttaaaaatggtgggggtgggtgggtgcccagggctaggggctattccctgtctctgtgggtttctaagctctgggcaaagtggtggtagggggagggagggggaagttaagggggtcacctccattctggggaatttatatttgaattgaggctttggccttaacacccaggaacttttctattacaatcgcttaggaagtaaagccttgtctccctccctgttctctgcctcttgtacccctctgacccacccgctctgccccactcccagccctcctcagccccagccctgcctgccctgcccctccagggggccatgagtgcctaggtttctcataccccacaaggtcacagcaggggagggagggacaattttataatgaaccaaaaattccatgtgttggggggtggggggcggaggagggtgaggggtgccgcccatgggccacaaatctctacaagtgcctgctatccctctcccactccccaccccagcaccggtccaaccccttcatccccagctgctcctaggactggcccatgggcaggcgggtggggggatgggaagggggtgccctgaaaccaaactggaagccccctctgcctcccagctggggcctctggggtggggtggggggctgtggtcaagccttattctgtattggggactgagggtggggggagtagaggggccgctggagaatgtattcaaaacaataaaactttggacctttggatgca

SEQ ID NO: 9897 - DNA, 2032 bp, Homo sapiens
  source 1..2032: mol_type = unassigned DNA
gtgcggggcgggggggctcgtccaccgggcccgctatccctggttctgcgctgcgcggtcctgctggtgaccttcacggcggcgcgtgccctgcaccagggtttgccttcccggattgggcctacaagccagagtcgtcccctggctcaaggcagatccagctgtggcactttatcctggagctgctgcggaaggaggagtaccagggcgtcattgcctggcagggggactacggggaattcgtcatcaaagaccctgatgaggtggcccggctgtggggcgttcgcaagtgcaagccccagatgaattacgacaagctgagccgggccctgcgctattactataacaagcgcattctgcacaagaccaaggggaaacggttcacctacaagttcaatttcaacaaactggtgctggtcaattacccattcattgatgtggggttggctgggggtgcagtgccccagagtgccccgccagtgccgtcgggtggtagccacttccgcttccctccctcaacgccctccgaggtgctgtcccccaccgaggacccccgctcaccaccagcctgctcttcatcttcatcttccctcttctcggctgtggtggcccgccgcctgggccgaggctcagtcagtgactgtagtgatggcacgtcagagctggaggaaccgctgggagaggatccccgcgcccgaccacccggccctccggatctgggtgccttccgagggcccccgctggcccgcctgccccatgaccctggtgtcttccgagtctatccccggcctcggggtggccctgaacccctcagccccttccctgtgtcgcctctggccggtcctggatccctgctgccccctcagctctccccggctctgcccatgacgcccacccacctggcctacactccctcgcccacgctgagcccgatgtaccccagtggtggcggggggcccagcggctcagggggaggctcccacttctccttcagccctgaggacatgaaacggtacctgcaggcccacacccaaagcgtctacaactaccacctcagcccccgcgccttcctgcactaccctgggctggtggtgccccagccccagcgccctgacaagtgcccgctgccgcccatggcacccgagaccccaccggtcccctcctcggcctcgtcatcctcttcttcttcttcctccccattcaagtttaagctccagccgcccccactcggacgccggcagcgggcagctggggagaaggccgtagccggtgctgacaagagcggtggcagtgcaggcgggctggctgagggggcaggggcgctagccccaccgcccccgccaccacagatcaaggtggagcccatctcggaaggcgagtcggaggaggtagaggtgactgacatcagtgatgaggatgaggaagacggggaggtgttcaagacgccccgtgccccacctgcaccccctaagcctgagcccggcgaggcacccggggcatcccagtgcatgcccctcaagctacgctttaagcggcgctggagtgaagactgtcgcctcgaagggggtgggggccccgctgggggctttgaggatgagggtgaggacaagaaggtgcgtggggaggggcctggggaggctggggggcccctcaccccaaggcgggtgagctctgacctccagcatgccacggcccagctctccctggagcaccgagactcctgagggctgtgggcaggggacctgtgtgccccgcaccccccatgcttcttttgctgccttaagccccctatgccctggaggtgagggcagctctcttgtctcttccctgcctcctcccttttccctccccacattttgtataaaactttaatttcttttttttaaaaatggtgggggtgggtgggtgcccagggctaggggctattccctgtctctgtgggtttctaagctctgggcaaagtggtggtagggggagggagggggaagttaagggggtcacctccattctggggaatttatatttgaattga

SEQ ID NO: 9898 - DNA, 2608 bp, Homo sapiens
  source 1..2608: mol_type = unassigned DNA
gcgcgggaggggcggggccacgctgcgggcccgggccatggccgccgccgatgccgaggcagttccggcgaggggggagcctcagcaggattgctgtgtgaaaaccgagctgctgggagaagagacacctatggctgccgatgaaggctcagcagagaaacaggcaggagaggcccacatggctgcggacggtgagaccaatgggtcttgtgaaaacagcgatgccagcagtcatgcaaatgctgcaaagcacactcaggacagcgcaagggtcaacccccaggatggcaccaacacactaactcggatagcggaaaatggggtttcagaaagagactcagaagcggcgaagcaaaaccacgtcactgccgacgactttgtgcagacttctgtcatcggcagcaacggatacatcttaaataagccggccctacaggcacagcccttgaggactaccagcactctggcctcttcgctgcctggccatgctgcaaaaacccttcctggaggggctggcaaaggcaggactccaagcgcttttccccagacgccagccgccccaccagccacccttggggaggggagtgctgacacagaggacaggaagctcccggcccctggcgccgacgtcaaggtccacagggcacgcaagaccatgccgaagtccgtcgtgggcctgcatgcagccagtaaagatcccagagaagttcgagaagctagagatcataaggaaccaaaagaggagatcaacaaaaacatttctgactttggacgacagcagcttttaccccccttcccatcccttcatcagtcgctacctcagaaccagtgctacatggccaccacaaaatcacagacagcttgcttgccttttgttttagcagctgcagtatctcggaagaaaaaacgaagaatgggaacctatagcctggttcctaagaaaaagaccaaagtattaaaacagaggacggtgattgagatgtttaagagcataactcattccactgtgggttccaagggggagaaggacctgggcgccagcagcctgcacgtgaatggggagagcctggagatggactcggatgaggacgactcagaggagctcgaggaggacgacggccatggtgcagagcaggcggccgcgttccccacagaggacagcaggacttccaaggagagcatgtcggaggctgatcgcgcccagaagatggacggggagtccgaggaggagcaggagtccgtggacaccggggaggaggaggaaggcggtgacgagtctgacctgagttcggaatccagcattaagaagaaatttctcaagaggaaaggaaagaccgacagtccctggatcaagccagccaggaaaaggaggcggagaagtagaaagaagcccagcggtgccctcggttctgagtcgtataagtcatctgcaggaagcgctgagcagacggcaccaggagacagcacagggtacatggaagtttctctggactccctggatctccgagtcaaaggaattctgtcttcacaagcagaagggttggccaacggtccagatgtgctggagacagacggcctccaggaagtgcctctctgcagctgccggatggaaacaccgaagagtcgagagatcaccacactggccaacaaccagtgcatggctacagagagcgtggaccatgaattgggccggtgcacaaacagcgtggtcaagtatgagctgatgcgcccctccaacaaggccccgctcctcgtgctgtgtgaagaccaccggggccgcatggtgaagcaccagtgctgtcctggctgtggctacttctgcacagcgggtaattttatggagtgtcagcccgagagcagcatctctcaccgtttccacaaagactgtgcctctcgagtcaataacgccagctattgtccccactgtggggaggagagctccaaggccaaagaggtgacgatagctaaagcagacaccacctcgaccgtgacaccagtccccgggcaggagaagggctcggccctggagggcagggccgacaccacaacgggcagtgctgccgggccaccactctcggaggacgacaagctgcagggtgcagcctcccacgtgcccgagggctttgatccaacgggacctgctgggcttgggaggccaactcccggcctttcccagggaccagggaaggaaaccttggagagcgctctcatcgccctcgactcggaaaaacccaagaagcttcgcttccacccaaagcagctgtacttctccgccaggcaaggggagcttcagaaggtgctcctcatgctggtggacggaattgaccccaacttcaaaatggagcaccagaataagcgctctccactgcacgccgcggcagaggctggacacgtggacatctgccacatgctggttcaggcgggcgctaatattgacacctgctcagaagaccagaggaccccgttgatggaagcagccgaaaacaaccatctggaagcagtgaagtacctcatcaaggctggggccctggtggatcccaagatacagaaaacttctaaagtttatacggagtctcaagagacccagagaagccaaacaattttgtga

SEQ ID NO: 9899 - DNA, 3589 bp, Homo sapiens
  source 1..3589: mol_type = unassigned DNA
gcgcgggaggggcggggccacgctgcgggcccgggccatggccgccgccgatgccgaggcagttccggcgaggggggagcctcagcaggattgctgtgtgaaaaccgagctgctgggagaagagacacctatggctgccgatgaaggctcagcagagaaacaggcaggagaggcccacatggctgcggacggtgagaccaatgggtcttgtgaaaacagcgatgccagcagtcatgcaaatgctgcaaagcacactcaggacagcgcaagggtcaacccccaggatggcaccaacacactaactcggatagcggaaaatggggtttcagaaagagactcagaagcggcgaagcaaaaccacgtcactgccgacgactttgtgcagacttctgtcatcggcagcaacggatacatcttaaataagccggccctacaggcacagcccttgaggactaccagcactctggcctcttcgctgcctggccatgctgcaaaaacccttcctggaggggctggcaaaggcaggactccaagcgcttttccccagacgccagccgccccaccagccacccttggggaggggagtgctgacacagaggacaggaagctcccggcccctggcgccgacgtcaaggtccacagggcacgcaagaccatgccgaagtccgtcgtgggcctgcatgcagccagtaaagatcccagagaagttcgagaagctagagatcataaggaaccaaaagaggagatcaacaaaaacatttctgactttggacgacagcagcttttaccccccttcccatcccttcatcagtcgctacctcagaaccagtgctacatggccaccacaaaatcacagacagcttgcttgccttttgttttagcagctgcagtatctcggaagaaaaaacgaagaatgggaacctatagcctggttcctaagaaaaagaccaaagtattaaaacagaggacggtgattgagatgtttaagagcataactcattccactgtgggttccaagggggagaaggacctgggcgccagcagcctgcacgtgaatggggagagcctggagatggactcggatgaggacgactcagaggagctcgaggaggacgacggccatggtgcagagcaggcggccgcgttccccacagaggacagcaggacttccaaggagagcatgtcggaggctgatcgcgcccagaagatggacggggagtccgaggaggagcaggagtccgtggacaccggggaggaggaggaaggcggtgacgagtctgacctgagttcggaatccagcattaagaagaaatttctcaagaggaaaggaaagaccgacagtccctggatcaagccagccaggaaaaggaggcggagaagtagaaagaagcccagcggtgccctcggttctgagtcgtataagtcatctgcaggaagcgctgagcagacggcaccaggagacagcacagggtacatggaagtttctctggactccctggatctccgagtcaaaggaattctgtcttcacaagcagaagggttggccaacggtccagatgtgctggagacagacggcctccaggaagtgcctctctgcagctgccggatggaaacaccgaagagtcgagagatcaccacactggccaacaaccagtgcatggctacagagagcgtggaccatgaattgggccggtgcacaaacagcgtggtcaagtatgagctgatgcgcccctccaacaaggccccgctcctcgtgctgtgtgaagaccaccggggccgcatggtgaagcaccagtgctgtcctggctgtggctacttctgcacagcgggtaattttatggagtgtcagcccgagagcagcatctctcaccgtttccacaaagactgtgcctctcgagtcaataacgccagctattgtccccactgtggggaggagagctccaaggccaaagaggtgacgatagctaaagcagacaccacctcgaccgtgacaccagtccccgggcaggagaagggctcggccctggagggcagggccgacaccacaacgggcagtgctgccgggccaccactctcggaggacgacaagctgcagggtgcagcctcccacgtgcccgagggctttgatccaacgggacctgctgggcttgggaggccaactcccggcctttcccagggaccagggaaggaaaccttggagagcgctctcatcgccctcgactcggaaaaacccaagaagcttcgcttccacccaaagcagctgtacttctccgccaggcaaggggagcttcagaaggtgctcctcatgctggtggacggaattgaccccaacttcaaaatggagcaccagaataagcgctctccactgcacgccgcggcagaggctggacacgtggacatctgccacatgctggttcaggcgggcgctaatattgacacctgctcagaagaccagaggaccccgttgatggaagcagccgaaaacaaccatctggaagcagtgaagtacctcatcaaggctggggccctggtggatcccaaggacgcagagggctctacgtgtttgcacctggctgccaagaaaggccactacgaagtggtccagtacctgctttcaaatggacagatggacgtcaactgtcaggatgacggaggctggacacccatgatctgggccacagagtacaagcacgtggacctcgtgaagctgctgctgtccaagggctctgacatcaacatccgagacaacgaggagaacatttgcctgcactgggcggcgttctccggctgcgtggacatagccgagatcctgctggctgccaagtgcgacctccacgccgtgaacatccacggagactcgccactgcacattgccgcccgggagaaccgctacgactgtgtcgtcctctttctttctcgggattcagatgtcaccttaaagaacaaggaaggagagacgcccctgcagtgtgcgagcctcaactctcaggtgtggagcgctctgcagatgagcaaggctctgcaggactcggcccccgacaggcccagccccgtggagaggatagtgagcagggacatcgctcgaggctacgagcgcatccccatcccctgtgtcaacgccgtggacagcgagccatgccccagcaactacaagtacgtctctcagaactgcgtgacgtcccccatgaacatcgacagaaatatcactcatctgcagtactgcgtgtgcatcgacgactgctcctccagcaactgcatgtgcggccagctcagcatgcgctgctggtacgacaaggatggccggctcctgccagagttcaacatggcggagcctcccttgatcttcgaatgcaaccacgcgtgctcctgctggaggaactgccgaaatcgcgtcgtacagaatggtctcagggcaaggctgcagctctaccggacgcgggacatgggctggggcgtgcggtccctgcaggacatcccaccaggcacctttgtctgcgagtatgttggggagctgatttcagactcagaagccgacgttcgagaggaagattcttacctctttgatctcgacaataaggtaatctccgcc

SEQ ID NO: 9900 - DNA, 5095 bp, Homo sapiens
  source 1..5095: mol_type = unassigned DNA
ggcggggccacgctgcgggcccgggccatggccgccgccgatgccgaggcagttccggcgaggggggagcctcagcaggattgctgtgtgaaaaccgagctgctgggagaagagacacctatggctgccgatgaaggctcagcagagaaacaggcaggagaggcccacatggctgcggacggtgagaccaatgggtcttgtgaaaacagcgatgccagcagtcatgcaaatgctgcaaagcacactcaggacagcgcaagggtcaacccccaggatggcaccaacacactaactcggatagcggaaaatggggtttcagaaagagactcagaagcggcgaagcaaaaccacgtcactgccgacgactttgtgcagacttctgtcatcggcagcaacggatacatcttaaataagccggccctacaggcacagcccttgaggactaccagcactctggcctcttcgctgcctggccatgctgcaaaaacccttcctggaggggctggcaaaggcaggactccaagcgcttttccccagacgccagccgccccaccagccacccttggggaggggagtgctgacacagaggacaggaagctcccggcccctggcgccgacgtcaaggtccacagggcacgcaagaccatgccgaagtccgtcgtgggcctgcatgcagccagtaaagatcccagagaagttcgagaagctagagatcataaggaaccaaaagaggagatcaacaaaaacatttctgactttggacgacagcagcttttaccccccttcccatcccttcatcagtcgctacctcagaaccagtgctacatggccaccacaaaatcacagacagcttgcttgccttttgttttagcagctgcagtatctcggaagaaaaaacgaagaatgggaacctatagcctggttcctaagaaaaagaccaaagtattaaaacagaggacggtgattgagatgtttaagagcataactcattccactgtgggttccaagggggagaaggacctgggcgccagcagcctgcacgtgaatggggagagcctggagatggactcggatgaggacgactcagaggagctcgaggaggacgacggccatggtgcagagcaggcggccgcgttccccacagaggacagcaggacttccaaggagagcatgtcggaggctgatcgcgcccagaagatggacggggagtccgaggaggagcaggagtccgtggacaccggggaggaggaggaaggcggtgacgagtctgacctgagttcggaatccagcattaagaagaaatttctcaagaggaaaggaaagaccgacagtccctggatcaagccagccaggaaaaggaggcggagaagtagaaagaagcccagcggtgccctcggttctgagtcgtataagtcatctgcaggaagcgctgagcagacggcaccaggagacagcacagggtacatggaagtttctctggactccctggatctccgagtcaaaggaattctgtcttcacaagcagaagggttggccaacggtccagatgtgctggagacagacggcctccaggaagtgcctctctgcagctgccggatggaaacaccgaagagtcgagagatcaccacactggccaacaaccagtgcatggctacagagagcgtggaccatgaattgggccggtgcacaaacagcgtggtcaagtatgagctgatgcgcccctccaacaaggccccgctcctcgtgctgtgtgaagaccaccggggccgcatggtgaagcaccagtgctgtcctggctgtggctacttctgcacagcgggtaattttatggagtgtcagcccgagagcagcatctctcaccgtttccacaaagactgtgcctctcgagtcaataacgccagctattgtccccactgtggggaggagagctccaaggccaaagaggtgacgatagctaaagcagacaccacctcgaccgtgacaccagtccccgggcaggagaagggctcggccctggagggcagggccgacaccacaacgggcagtgctgccgggccaccactctcggaggacgacaagctgcagggtgcagcctcccacgtgcccgagggctttgatccaacgggacctgctgggcttgggaggccaactcccggcctttcccagggaccagggaaggaaaccttggagagcgctctcatcgccctcgactcggaaaaacccaagaagcttcgcttccacccaaagcagctgtacttctccgccaggcaaggggagcttcagaaggtgctcctcatgctggtggacggaattgaccccaacttcaaaatggagcaccagaataagcgctctccactgcacgccgcggcagaggctggacacgtggacatctgccacatgctggttcaggcgggcgctaatattgacacctgctcagaagaccagaggaccccgttgatggaagcagccgaaaacaaccatctggaagcagtgaagtacctcatcaaggctggggccctggtggatcccaaggacgcagagggctctacgtgtttgcacctggctgccaagaaaggccactacgaagtggtccagtacctgctttcaaatggacagatggacgtcaactgtcaggatgacggaggctggacacccatgatctgggccacagagtacaagcacgtggacctcgtgaagctgctgctgtccaagggctctgacatcaacatccgagacaacgaggagaacatttgcctgcactgggcggcgttctccggctgcgtggacatagccgagatcctgctggctgccaagtgcgacctccacgccgtgaacatccacggagactcgccactgcacattgccgcccgggagaaccgctacgactgtgtcgtcctctttctttctcgggattcagatgtcaccttaaagaacaaggaaggagagacgcccctgcagtgtgcgagcctcaactctcaggtgtggagcgctctgcagatgagcaaggctctgcaggactcggcccccgacaggcccagccccgtggagaggatagtgagcagggacatcgctcgaggctacgagcgcatccccatcccctgtgtcaacgccgtggacagcgagccatgccccagcaactacaagtacgtctctcagaactgcgtgacgtcccccatgaacatcgacagaaatatcactcatctgcagtactgcgtgtgcatcgacgactgctcctccagcaactgcatgtgcggccagctcagcatgcgctgctggtacgacaaggatggccggctcctgccagagttcaacatggcggagcctcccttgatcttcgaatgcaaccacgcgtgctcctgctggaggaactgccgaaatcgcgtcgtacagaatggtctcagggcaaggctgcagctctaccggacgcgggacatgggctggggcgtgcggtccctgcaggacatcccaccaggcacctttgtctgcgagtatgttggggagctgatttcagactcagaagccgacgttcgagaggaagattcttacctctttgatctcgacaataaggacggggaggtttactgcatcgacgcgcggttctacgggaacgtcagccggttcatcaaccaccactgcgagcccaacctggtgcccgtgcgcgtgttcatggcccaccaggacctgcggttcccccggatcgccttcttcagcacccgcctgatcgaggccggcgagcagctcgggtttgactatggagagcgcttctgggacatcaaaggcaagctcttcagctgccgctgcggctcccccaagtgccggcactcgagcgcggccctggcccagcgtcaggccagcgcggcccaggaggcccaggaggacggcttgcccgacaccagctccgcggctgccgccgaccccctatgagacgccgccggccagcggggcgctcgggagccagggaccgccgcgtcgccgattagaggacgaggaggagagattccgcacgcaaccgaaagggtccttcggggctgcgccgccggcttcctggaggggtcggaggtgaggctgcagcccctgcgggcgggtgtggatgcctcccagccaccttcccagacctgcggcctcaccgcgggcccagtgcccaggctggagcgcacactttggtccgcgcgccagagacgctgggagtccgcactggcatcaccttctgagtttctgatgctgatttgtcgttgcgaagtttctcgtttcttcctctgacctccgaggtccccgctgcaccacggggttgctctgttctcctgtccggcccagactcttctgtgtggcgccgccgaagccaccgttagcgcgagctgctccgttcgccctgcccacggcctgcgtggctggggccgagtcccaggggccgcacggagggcacagtctcctgtcaggctcggagaggtcaggagaccgaccccaccactaactttggagaaaatgtgggtttgctttttaaaggaatcctatatctagtcctatatatcaaacctctaactgacgtttcttttcgaggaagtggcttggtgggtgcagcccccgccggttccgttgacgctggcaccttctgttgattttttaagccacatgctatgatgaataaactgatttattttctaccattactgaacattaggacaaacacaaaataaaaaacaaaacacagacaacggtgctgattctggtgtggtttctactcaccacgtgaaataaactatcaactgtataaagagaacaaagtgattttagaataaaatgcaggaaaaacttttttaaagatgttagtcttgtagcgtgaataaatttgccatcaccttttgtgtggtggcctggcaggtcatatacttttttttggcatatacctttttaaagactgtaattagtgcagtaacagtggggttttttttgtgcaactcttctaaaaacattcataatgcagtcatgtttatttttttctgttaaaatgtttttgacagttttaagagcagtcttttggctctgaccatttcttgttctgtttccaatgaaatcaataaaaaaaaagaagtacttt

SEQ ID NO: 9901 - DNA, 2707 bp, Homo sapiens
  source 1..2707: mol_type = unassigned DNA
gcgcgggaggggcggggccacgctgcgggcccgggccatggccgccgccgatgccgaggcagttccggcgaggggggagcctcagcaggattgctgtgtgaaaaccgagctgctgggagaagagacacctatggctgccgatgaaggctcagcagagaaacaggcaggagaggcccacatggctgcggacggtgagaccaatgggtcttgtgaaaacagcgatgccagcagtcatgcaaatgctgcaaagcacactcaggacagcgcaagggtcaacccccaggatggcaccaacacactaactcggatagcggaaaatggggtttcagaaagagactcagaagcggcgaagcaaaaccacgtcactgccgacgactttgtgcagacttctgtcatcggcagcaacggatacatcttaaataagccggccctacaggcacagcccttgaggactaccagcactctggcctcttcgctgcctggccatgctgcaaaaacccttcctggaggggctggcaaaggcaggactccaagcgcttttccccagacgccagccgccccaccagccacccttggggaggggagtgctgacacagaggacaggaagctcccggcccctggcgccgacgtcaaggtccacagggcacgcaagaccatgccgaagtccgtcgtgggcctgcatgcagccagtaaagatcccagagaagttcgagaagctagagatcataaggaaccaaaagaggagatcaacaaaaacatttctgactttggacgacagcagcttttaccccccttcccatcccttcatcagtcgctacctcagaaccagtgctacatggccaccacaaaatcacagacagcttgcttgccttttgttttagcagctgcagtatctcggaagaaaaaacgaagaatgggaacctatagcctggttcctaagaaaaagaccaaagtattaaaacagaggacggtgattgagatgtttaagagcataactcattccactgtgggttccaagggggagaaggacctgggcgccagcagcctgcacgtgaatggggagagcctggagatggactcggatgaggacgactcagaggagctcgaggaggacgacggccatggtgcagagcaggcggccgcgttccccacagaggacagcaggacttccaaggagagcatgtcggaggctgatcgcgcccagaagatggacggggagtccgaggaggagcaggagtccgtggacaccggggaggaggaggaaggcggtgacgagtctgacctgagttcggaatccagcattaagaagaaatttctcaagaggaaaggaaagaccgacagtccctggatcaagccagccaggaaaaggaggcggagaagtagaaagaagcccagcggtgccctcggttctgagtcgtataagtcatctgcaggaagcgctgagcagacggcaccaggagacagcacagggtacatggaagtttctctggactccctggatctccgagtcaaaggaattctgtcttcacaagcagaagggttggccaacggtccagatgtgctggagacagacggcctccaggaagtgcctctctgcagctgccggatggaaacaccgaagagtcgagagatcaccacactggccaacaaccagtgcatggctacagagagcgtggaccatgaattgggccggtgcacaaacagcgtggtcaagtatgagctgatgcgcccctccaacaaggccccgctcctcgtgctgtgtgaagaccaccggggccgcatggtgaagcaccagtgctgtcctggctgtggctacttctgcacagcgggtaattttatggagtgtcagcccgagagcagcatctctcaccgtttccacaaagactgtgcctctcgagtcaataacgccagctattgtccccactgtggggaggagagctccaaggccaaagaggtgacgatagctaaagcagacaccacctcgaccgtgacaccagtccccgggcaggagaagggctcggccctggagggcagggccgacaccacaacgggcagtgctgccgggccaccactctcggaggacgacaagctgcagggtgcagcctcccacgtgcccgagggctttgatccaacgggacctgctgggcttgggaggccaactcccggcctttcccagggaccagggaaggaaaccttggagagcgctctcatcgccctcgactcggaaaaacccaagaagcttcgcttccacccaaagcagctgtacttctccgccaggcaaggggagcttcagaaggtgctcctcatgctggtggacggaattgaccccaacttcaaaatggagcaccagaataagcgctctccactgcacgccgcggcagaggctggacacgtggacatctgccacatgctggttcagttctgcaggctgggaagcccaaggtcgaggggctgcctttggtgacttatggtgaggacctcgtgctgttcccgaacacagccaggaaccacgccaagaggaagatgctccagcacagccttgctgtggaccaggccgcccacagggagcaggtccattcctgggggctgactccgcctttcagagaggcgtggctccatcttcacagcctcgtagcctcttaaaggcccagcctcaaaacctcattggggcccccagccccggtaaataaattgcattcagaccata

SEQ ID NO: 9902 - DNA, 4047 bp, Homo sapiens
  source 1..4047: mol_type = unassigned DNA
ctcttctctcggccccagagatgcggggtctaccgagagggagggggttgatgcgggcccgggggaggggtcgtgcggcccctccgggcagccgaggccgcggaaggggggggccccacagaggaagaggtaggccccggagcctactctctcttcccagggcccaggcatcctggaccccccaactctctactgggctgaccagccctcctgtcccttgtctcccctcccagggggaggcccccgctgagatgggggcgctgctgctggagaaggaaaccagaggagccaccgagagagttcatggctctttgggggacacccctcgtagtgaagaaaccctgcccaaggccacccccgactccctggagcctgctggcccctcatctccagcctctgtcactgtcactgttggtgatgagggggctgacacccctgtaggggctacaccactcattggggatgaatctgagaatcttgagggagatggggacctccgtgggggccggatcctgctgggccatgccacaaagtcattcccctcttcccccagcaaggggggttcctgtcctagccgggccaagatgtcaatgacaggggcgggaaaatcacctccatctgtccagagtttggctatgaggctactgagtatgccaggagcccagggagctgcagcagcagggtctgaaccccctccagccaccacgagcccagagggacagcccaaggtccaccgagcccgcaaaaccatgtccaaaccaggaaatggacagcccccggtccctgagaagcggccccctgaaatacagcatttccgcatgagtgatgatgtccactcactgggaaaggtgacctcagatctggccaaaaggaggaagctgaactcaggaggtggcctgtcagaggagttaggttctgcccggcgttcaggagaagtgaccctgacgaaaggggaccccgggtccctggaggagtgggagacggtggtgggtgatgacttcagtctctactatgattcctactctgtggatgagcgcgtggactccgacagcaagtctgaagttgaagctctaactgaacaactaagtgaagaggaggaggaggaagaggaggaagaagaagaagaggaagaggaggaggaagaggaagaagaagaggaagatgaggagtcagggaatcagtcagataggagtggttccagtggccggcgcaaggccaagaagaaatggcgaaaagacagcccatgggtgaagccgtctcggaaacggcgcaagcgggagcctccgcgggccaaggagccacgaggggtgtccaatgacacatcttcgctggagacagagcgagggtttgaggagttgcccctgtgcagctgccgcatggaggcacccaagattgaccgcatcagcgagagggcggggcacaagtgcatggccactgagagtgtggacggagagctgtcaggctgcaatgccgccatcctcaagcgggagaccatgaggccatccagccgtgtggccctgatggtgctctgtgagacccaccgcgcccgcatggtcaaacaccactgctgcccgggctgcggctacttctgcacggcgggcaccttcctggagtgccaccctgacttccgtgtggcccaccgcttccacaaggcctgtgtgtctcagctgaatgggatggtcttctgtccccactgtggggaggatgcttctgaagctcaagaggtgaccatcccccggggtgacggggtgaccccaccggccggcactgcagctcctgcacccccacccctgtcccaggatgtccccgggagagcagacacttctcagcccagtgcccggatgcgagggcatggggaaccccggcgcccgccctgcgatcccctggctgacaccattgacagctcagggccctccctgaccctgcccaatgggggctgcctttcagccgtggggctgccactggggccaggccgggaggccctggaaaaggccctggtcatccaggagtcagagaggcggaagaagctccgtttccaccctcggcagttgtacctgtccgtgaagcagggcgagctgcagaaggtgatcctgatgctgttggacaacctggaccccaacttccagagcgaccagcagagcaagcgcacgcccctgcatgcagccgcccagaagggctccgtggagatctgccatgtgctgctgcaggctggagccaacataaatgcagtggacaaacagcagcggacgccactgatggaggccgtggtgaacaaccacctggaggtagcccgttacatggtgcagcgtggtggctgtgtctatagcaaggaggaggacggttccacctgcctccaccacgcagccaaaatcgggaacttggagatggtcagcctgctgctgagcacaggacaggtggacgtcaacgcccaggacagtggggggtggacgcccatcatctgggctgcagagcacaagcacatcgaggtgatccgcatgctactgacgcggggcgccgacgtcaccctcactgacaacgaggagaacatctgcctgcactgggcctccttcacgggcagcgccgccatcgccgaagtccttctgaatgcgcgctgtgacctccatgctgtcaactaccatggggacacccccctgcacatcgcagctcgggagagctaccatgactgcgtgctgttattcctgtcacgtggggccaaccctgagctgcggaacaaagagggggacacagcatgggacctgactcccgagcgctccgacgtgtggtttgcgcttcaactcaaccgcaagctccgacttggggtgggaaatcgggccatccgcacagagaagatcatctgccgggacgtggctcggggctatgagaacgtgcccattccctgtgtcaacggtgtggatggggagccctgccctgaggattacaagtacatctcagagaactgcgagacgtccaccatgaacatcgatcgcaacatcacccacctgcagcactgcacgtgtgtggacgactgctctagctccaactgcctgtgcggccagctcagcatccggtgctggtatgacaaggatgggcgattgctccaggaatttaacaagattgagcctccgctgattttcgagtgtaaccaggcgtgctcatgctggagaaactgcaagaaccgggtcgtacagagtggcatcaaggtgcggctacagctctaccgaacagccaagatgggctggggggtccgcgccctgcagaccatcccacaggggaccttcatctgcgagtatgtcggggagctgatctctgatgctgaggctgatgtgagagaggatgattcttacctcttcgacttagacaacaaggatggagaggtgtactgcatagatgcccgttactatggcaacatcagccgcttcatcaaccacctgtgtgaccccaacatcattcccgtccgggtcttcatgctgcaccaagacctgcgatttccacgcatcgccttcttcagttcccgagacatccggactggggaggagctagggtttgactatggcgaccgcttctgggacatcaaaagcaaatatttcacctgccaatgtggctctgagaagtgcaagcactcagccgaagccattgccctggagcagagccgtctggcccgcctggacccacaccctgagctgctgcccgagctcggctccctgccccctgtcaacacatgagaacggaccacaccctctctccccagcatggatggccacagctcagccgcctcctctgccaccagctgctcgcagcccatgcctgggggtgctgccatcttctctccccaccaccctttcacacattcctgaccagagatcccagccaggccctggaggtctgacagcccctccctcccagagctggttcctccctgggagggcaacttcagggctggccaccccccgtgttccccatcctcagttgaagtttgatgaattgaagtcgggcctctatgccaactggttccttttgttctcaataaatgttgggtttggtaataaa

SEQ ID NO: 9903 - DNA, 3856 bp, Homo sapiens
  source 1..3856: mol_type = unassigned DNA
atggcggcggcggcgggagctgcagcggcggcggccgccgagggggaggcccccgctgagatgggggcgctgctgctggagaaggaaaccagaggagccaccgagagagttcatggctctttgggggacacccctcgtagtgaagaaaccctgcccaaggccacccccgactccctggagcctgctggcccctcatctccagcctctgtcactgtcactgttggtgatgagggggctgacacccctgtaggggctacaccactcattggggatgaatctgagaatcttgagggagatggggacctccgtgggggccggatcctgctgggccatgccacaaagtcattcccctcttcccccagcaaggggggttcctgtcctagccgggccaagatgtcaatgacaggggcgggaaaatcacctccatctgtccagagtttggctatgaggctactgagtatgccaggagcccagggagctgcagcagcagggtctgaaccccctccagccaccacgagcccagagggacagcccaaggtccaccgagcccgcaaaaccatgtccaaaccaggaaatggacagcccccggtccctgagaagcggccccctgaaatacagcatttccgcatgagtgatgatgtccactcactgggaaaggtgacctcagatctggccaaaaggaggaagctgaactcaggaggtggcctgtcagaggagttaggttctgcccggcgttcaggagaagtgaccctgacgaaaggggaccccgggtccctggaggagtgggagacggtggtgggtgatgacttcagtctctactatgattcctactctgtggatgagcgcgtggactccgacagcaagtctgaagttgaagctctaactgaacaactaagtgaagaggaggaggaggaagaggaggaagaagaagaagaggaagaggaggaggaagaggaagaagaagaggaagatgaggagtcagggaatcagtcagataggagtggttccagtggccggcgcaaggccaagaagaaatggcgaaaagacagcccatgggtgaagccgtctcggaaacggcgcaagcgggagcctccgcgggccaaggagccacgaggggtgtccaatgacacatcttcgctggagacagagcgagggtttgaggagttgcccctgtgcagctgccgcatggaggcacccaagattgaccgcatcagcgagagggcggggcacaagtgcatggccactgagagtgtggacggagagctgtcaggctgcaatgccgccatcctcaagcgggagaccatgaggccatccagccgtgtggccctgatggtgctctgtgagacccaccgcgcccgcatggtcaaacaccactgctgcccgggctgcggctacttctgcacggcgggcaccttcctggagtgccaccctgacttccgtgtggcccaccgcttccacaaggcctgtgtgtctcagctgaatgggatggtcttctgtccccactgtggggaggatgcttctgaagctcaagaggtgaccatcccccggggtgacggggtgaccccaccggccggcactgcagctcctgcacccccacccctgtcccaggatgtccccgggagagcagacacttctcagcccagtgcccggatgcgagggcatggggaaccccggcgcccgccctgcgatcccctggctgacaccattgacagctcagggccctccctgaccctgcccaatgggggctgcctttcagccgtggggctgccactggggccaggccgggaggccctggaaaaggccctggtcatccaggagtcagagaggcggaagaagctccgtttccaccctcggcagttgtacctgtccgtgaagcagggcgagctgcagaaggtgatcctgatgctgttggacaacctggaccccaacttccagagcgaccagcagagcaagcgcacgcccctgcatgcagccgcccagaagggctccgtggagatctgccatgtgctgctgcaggctggagccaacataaatgcagtggacaaacagcagcggacgccactgatggaggccgtggtgaacaaccacctggaggtagcccgttacatggtgcagcgtggtggctgtgtctatagcaaggaggaggacggttccacctgcctccaccacgcagccaaaatcgggaacttggagatggtcagcctgctgctgagcacaggacaggtggacgtcaacgcccaggacagtggggggtggacgcccatcatctgggctgcagagcacaagcacatcgaggtgatccgcatgctactgacgcggggcgccgacgtcaccctcactgacaacgaggagaacatctgcctgcactgggcctccttcacgggcagcgccgccatcgccgaagtccttctgaatgcgcgctgtgacctccatgctgtcaactaccatggggacacccccctgcacatcgcagctcgggagagctaccatgactgcgtgctgttattcctgtcacgtggggccaaccctgagctgcggaacaaagagggggacacagcatgggacctgactcccgagcgctccgacgtgtggtttgcgcttcaactcaaccgcaagctccgacttggggtgggaaatcgggccatccgcacagagaagatcatctgccgggacgtggctcggggctatgagaacgtgcccattccctgtgtcaacggtgtggatggggagccctgccctgaggattacaagtacatctcagagaactgcgagacgtccaccatgaacatcgatcgcaacatcacccacctgcagcactgcacgtgtgtggacgactgctctagctccaactgcctgtgcggccagctcagcatccggtgctggtatgacaaggatgggcgattgctccaggaatttaacaagattgagcctccgctgattttcgagtgtaaccaggcgtgctcatgctggagaaactgcaagaaccgggtcgtacagagtggcatcaaggtgcggctacagctctaccgaacagccaagatgggctggggggtccgcgccctgcagaccatcccacaggggaccttcatctgcgagtatgtcggggagctgatctctgatgctgaggctgatgtgagagaggatgattcttacctcttcgacttagacaacaaggatggagaggtgtactgcatagatgcccgttactatggcaacatcagccgcttcatcaaccacctgtgtgaccccaacatcattcccgtccgggtcttcatgctgcaccaagacctgcgatttccacgcatcgccttcttcagttcccgagacatccggactggggaggagctagggtttgactatggcgaccgcttctgggacatcaaaagcaaatatttcacctgccaatgtggctctgagaagtgcaagcactcagccgaagccattgccctggagcagagccgtctggcccgcctggacccacaccctgagctgctgcccgagctcggctccctgccccctgtcaacacatgagaacggaccacaccctctctccccagcatggatggccacagctcagccgcctcctctgccaccagctgctcgcagcccatgcctgggggtgctgccatcttctctccccaccaccctttcacacattcctgaccagagatcccagccaggccctggaggtctgacagcccctccctcccagagctggttcctccctgggagggcaacttcagggctggccaccccccgtgttccccatcctcagttgaagtttgatgaattgaagtcgggcctctatgccaactggttccttttgttctcaataaatgttgggtttggtaataaa

SEQ ID NO: 9904 - DNA, 3965 bp, Homo sapiens
  source 1..3965: mol_type = unassigned DNA
agcggcgatggcggcggcggcgggagctgcagcggcggcggccgccgagggggaggcccccgctgagatgggggcgctgctgctggagaaggaaaccagaggagccaccgagagagttcatggctctttgggggacacccctcgtagtgaagaaaccctgcccaaggccacccccgactccctggagcctgctggcccctcatctccagcctctgtcactgtcactgttggtgatgagggggctgacacccctgtaggggctacaccactcattggggatgaatctgagaatcttgagggagatggggacctccgtgggggccggatcctgctgggccatgccacaaagtcattcccctcttcccccagcaaggggggttcctgtcctagccgggccaagatgtcaatgacaggggcgggaaaatcacctccatctgtccagagtttggctatgaggctactgagtatgccaggagcccagggagctgcagcagcagggtctgaaccccctccagccaccacgagcccagagggacagcccaaggtccaccgagcccgcaaaaccatgtccaaaccaggaaatggacagcccccggtccctgagaagcggccccctgaaatacagcatttccgcatgagtgatgatgtccactcactgggaaaggtgacctcagatctggccaaaaggaggaagctgaactcaggaggtggcctgtcagaggagttaggttctgcccggcgttcaggagaagtgaccctgacgaaaggggaccccgggtccctggaggagtgggagacggtggtgggtgatgacttcagtctctactatgattcctactctgtggatgagcgcgtggactccgacagcaagtctgaagttgaagctctaactgaacaactaagtgaagaggaggaggaggaagaggaggaagaagaagaagaggaagaggaggaggaagaggaagaagaagaggaagatgaggagtcagggaatcagtcagataggagtggttccagtggccggcgcaaggccaagaagaaatggcgaaaagacagcccatgggtgaagccgtctcggaaacggcgcaagcgggagcctccgcgggccaaggagccacgaggagtgaatggtgtgggctcctcaggccccagtgagtacatggaggtccctctggggtccctggagctgcccagcgaggggaccctctcccccaaccacgctggggtgtccaatgacacatcttcgctggagacagagcgagggtttgaggagttgcccctgtgcagctgccgcatggaggcacccaagattgaccgcatcagcgagagggcggggcacaagtgcatggccactgagagtgtggacggagagctgtcaggctgcaatgccgccatcctcaagcgggagaccatgaggccatccagccgtgtggccctgatggtgctctgtgagacccaccgcgcccgcatggtcaaacaccactgctgcccgggctgcggctacttctgcacggcgggcaccttcctggagtgccaccctgacttccgtgtggcccaccgcttccacaaggcctgtgtgtctcagctgaatgggatggtcttctgtccccactgtggggaggatgcttctgaagctcaagaggtgaccatcccccggggtgacggggtgaccccaccggccggcactgcagctcctgcacccccacccctgtcccaggatgtccccgggagagcagacacttctcagcccagtgcccggatgcgagggcatggggaaccccggcgcccgccctgcgatcccctggctgacaccattgacagctcagggccctccctgaccctgcccaatgggggctgcctttcagccgtggggctgccactggggccaggccgggaggccctggaaaaggccctggtcatccaggagtcagagaggcggaagaagctccgtttccaccctcggcagttgtacctgtccgtgaagcagggcgagctgcagaaggtgatcctgatgctgttggacaacctggaccccaacttccagagcgaccagcagagcaagcgcacgcccctgcatgcagccgcccagaagggctccgtggagatctgccatgtgctgctgcaggctggagccaacataaatgcagtggacaaacagcagcggacgccactgatggaggccgtggtgaacaaccacctggaggtagcccgttacatggtgcagcgtggtggctgtgtctatagcaaggaggaggacggttccacctgcctccaccacgcagccaaaatcgggaacttggagatggtcagcctgctgctgagcacaggacaggtggacgtcaacgcccaggacagtggggggtggacgcccatcatctgggctgcagagcacaagcacatcgaggtgatccgcatgctactgacgcggggcgccgacgtcaccctcactgacaacgaggagaacatctgcctgcactgggcctccttcacgggcagcgccgccatcgccgaagtccttctgaatgcgcgctgtgacctccatgctgtcaactaccatggggacacccccctgcacatcgcagctcgggagagctaccatgactgcgtgctgttattcctgtcacgtggggccaaccctgagctgcggaacaaagagggggacacagcatgggacctgactcccgagcgctccgacgtgtggtttgcgcttcaactcaaccgcaagctccgacttggggtgggaaatcgggccatccgcacagagaagatcatctgccgggacgtggctcggggctatgagaacgtgcccattccctgtgtcaacggtgtggatggggagccctgccctgaggattacaagtacatctcagagaactgcgagacgtccaccatgaacatcgatcgcaacatcacccacctgcagcactgcacgtgtgtggacgactgctctagctccaactgcctgtgcggccagctcagcatccggtgctggtatgacaaggatgggcgattgctccaggaatttaacaagattgagcctccgctgattttcgagtgtaaccaggcgtgctcatgctggagaaactgcaagaaccgggtcgtacagagtggcatcaaggtgcggctacagctctaccgaacagccaagatgggctggggggtccgcgccctgcagaccatcccacaggggaccttcatctgcgagtatgtcggggagctgatctctgatgctgaggctgatgtgagagaggatgattcttacctcttcgacttagacaacaaggatggagaggtgtactgcatagatgcccgttactatggcaacatcagccgcttcatcaaccacctgtgtgaccccaacatcattcccgtccgggtcttcatgctgcaccaagacctgcgatttccacgcatcgccttcttcagttcccgagacatccggactggggaggagctagggtttgactatggcgaccgcttctgggacatcaaaagcaaatatttcacctgccaatgtggctctgagaagtgcaagcactcagccgaagccattgccctggagcagagccgtctggcccgcctggacccacaccctgagctgctgcccgagctcggctccctgccccctgtcaacacatgagaacggaccacaccctctctccccagcatggatggccacagctcagccgcctcctctgccaccagctgctcgcagcccatgcctgggggtgctgccatcttctctccccaccaccctttcacacattcctgaccagagatcccagccaggccctggaggtctgacagcccctccctcccagagctggttcctccctgggagggcaacttcagggctggccaccccccgtgttccccatcctcagttgaagtttgatgaattgaagtcgggcctctatgccaactggttccttttgttctcaataaatgttgggtttggtaataaa

SEQ ID NO: 9905 - DNA, 3856 bp, Homo sapiens
  source 1..3856: mol_type = unassigned DNA
atggcggcggcggcgggagctgcagcggcggcggccgccgagggggaggcccccgctgagatgggggcgctgctgctggagaaggaaaccagaggagccaccgagagagttcatggctctttgggggacacccctcgtagtgaagaaaccctgcccaaggccacccccgactccctggagcctgctggcccctcatctccagcctctgtcactgtcactgttggtgatgagggggctgacacccctgtaggggctacaccactcattggggatgaatctgagaatcttgagggagatggggacctccgtgggggccggatcctgctgggccatgccacaaagtcattcccctcttcccccagcaaggggggttcctgtcctagccgggccaagatgtcaatgacaggggcgggaaaatcacctccatctgtccagagtttggctatgaggctactgagtatgccaggagcccagggagctgcagcagcagggtctgaaccccctccagccaccacgagcccagagggacagcccaaggtccaccgagcccgcaaaaccatgtccaaaccaggaaatggacagcccccggtccctgagaagcggccccctgaaatacagcatttccgcatgagtgatgatgtccactcactgggaaaggtgacctcagatctggccaaaaggaggaagctgaactcaggaggtggcctgtcggaggagttaggttctgcccggcgttcaggagaagtgaccctgacgaaaggggaccccgggtccctggaggagtgggagacggtggtgggtgatgacttcagtctctactatgattcctactctgtggatgagcgcgtggactccgacagcaagtctgaagttgaagctctaactgaacaactaagtgaagaggaggaggaggaagaggaggaagaagaagaagaggaagaggaggaggaagaggaagaagaagaggaagatgaggagtcagggaatcagtcagataggagtggttccagtggccggcgcaaggccaagaagaaatggcgaaaagacagcccatgggtgaagccgtctcggaaacggcgcaagcgggagcctccgcgggccaaggagccacgaggggtgtccaatgacacatcttcgctggagacagagcgagggtttgaggagttgcccctgtgcagctgccgcatggaggcacccaagattgaccgcatcagcgagagggcggggcacaagtgcatggccactgagagtgtggacggagagctgtcaggctgcaatgccgccatcctcaagcgggagaccatgaggccatccagccgtgtggccctgatggtgctctgtgagacccaccgcgcccgcatggtcaaacaccactgctgcccgggctgcggctacttctgcacggcgggcaccttcctggagtgccaccctgacttccgtgtggcccaccgcttccacaaggcctgtgtgtctcagctgaatgggatggtcttctgtccccactgtggggaggatgcttctgaagctcaagaggtgaccatcccccggggtgacggggtgaccccaccggccggcactgcagctcctgcacccccacccctgtcccaggatgtccccgggagagcagacacttctcagcccagtgcccggatgcgagggcatggggaaccccggcgcccgccctgcgatcccctggctgacaccattgacagctcagggccctccctgaccctgcccaatgggggctgcctttcagccgtggggctgccactggggccaggccgggaggccctggaaaaggccctggtcatccaggagtcagagaggcggaagaagctccgtttccaccctcggcagttgtacctgtccgtgaagcagggcgagctgcagaaggtgatcctgatgctgttggacaacctggaccccaacttccagagcgaccagcagagcaagcgcacgcccctgcatgcagccgcccagaagggctccgtggagatctgccatgtgctgctgcaggctggagccaacataaatgcagtggacaaacagcagcggacgccactgatggaggccgtggtgaacaaccacctggaggtagcccgttacatggtgcagcgtggtggctgtgtctatagcaaggaggaggacggttccacctgcctccaccacgcagccaaaatcgggaacttggagatggtcagcctgctgctgagcacaggacaggtggacgtcaacgcccaggacagtggggggtggacgcccatcatctgggctgcagagcacaagcacatcgaggtgatccgcatgctactgacgcggggcgccgacgtcaccctcactgacaacgaggagaacatctgcctgcactgggcctccttcacgggcagcgccgccatcgccgaagtccttctgaatgcgcgctgtgacctccatgctgtcaactaccatggggacacccccctgcacatcgcagctcgggagagctaccatgactgcgtgctgttattcctgtcacgtggggccaaccctgagctgcggaacaaagagggggacacagcatgggacctgactcccgagcgctccgacgtgtggtttgcgcttcaactcaaccgcaagctccgacttggggtgggaaatcgggccatccgcacagagaagatcatctgccgggacgtggctcggggctatgagaacgtgcccattccctgtgtcaacggtgtggatggggagccctgccctgaggattacaagtacatctcagagaactgcgagacgtccaccatgaacatcgatcgcaacatcacccacctgcagcactgcacgtgtgtggacgactgctctagctccaactgcctgtgcggccagctcagcatccggtgctggtatgacaaggatgggcgattgctccaggaatttaacaagattgagcctccgctgattttcgagtgtaaccaggcgtgctcatgctggagaaactgcaagaaccgggtcgtacagagtggcatcaaggtgcggctacagctctaccgaacagccaagatgggctggggggtccgcgccctgcagaccatcccacaggggaccttcatctgcgagtatgtcggggagctgatctctgatgctgaggctgatgtgagagaggatgattcttacctcttcgacttagacaacaaggatggagaggtgtactgcatagatgcccgttactatggcaacatcagccgcttcatcaaccacctgtgtgaccccaacatcattcccgtccgggtcttcatgctgcaccaagacctgcgatttccacgcatcgccttcttcagttcccgagacatccggactggggaggagctagggtttgactatggcgaccgcttctgggacatcaaaagcaaatatttcacctgccaatgtggctctgagaagtgcaagcactcagccgaagccattgccctggagcagagccgtctggcccgcctggacccacaccctgagctgctgcccgagctcggctccctgccccctgtcaacacatgagaacggaccacaccctctctccccagcatggatggccacagctcagccgcctcctctgccaccagctgctcgcagcccatgcctgggggtgctgccatcttctctccccaccaccctttcacacattcctgaccagagatcccagccaggccctggaggtctgacagcccctccctcccagagctggttcctccctgggagggcaacttcagggctggccaccccccgtgttccccatcctcagttgaagtttgatgaattgaagtcgggcctctatgccaactggttccttttgttctcaataaatgttgggtttggtaataaa

SEQ ID NO: 9906 - DNA, 3980 bp, Homo sapiens
  source 1..3980: mol_type = unassigned DNA
tcggcccccagcgcaagcggcgatggcggcggcggcgggagctgcagcggcggcggccgccgagggggaggcccccgctgagatgggggcgctgctgctggagaaggaaaccagaggagccaccgagagagttcatggctctttgggggacacccctcgtagtgaagaaaccctgcccaaggccacccccgactccctggagcctgctggcccctcatctccagcctctgtcactgtcactgttggtgatgagggggctgacacccctgtaggggctacaccactcattggggatgaatctgagaatcttgagggagatggggacctccgtgggggccggatcctgctgggccatgccacaaagtcattcccctcttcccccagcaaggggggttcctgtcctagccgggccaagatgtcaatgacaggggcgggaaaatcacctccatctgtccagagtttggctatgaggctactgagtatgccaggagcccagggagctgcagcagcagggtctgaaccccctccagccaccacgagcccagagggacagcccaaggtccaccgagcccgcaaaaccatgtccaaaccaggaaatggacagcccccggtccctgagaagcggccccctgaaatacagcatttccgcatgagtgatgatgtccactcactgggaaaggtgacctcagatctggccaaaaggaggaagctgaactcaggaggtggcctgtcggaggagttaggttctgcccggcgttcaggagaagtgaccctgacgaaaggggaccccgggtccctggaggagtgggagacggtggtgggtgatgacttcagtctctactatgattcctactctgtggatgagcgcgtggactccgacagcaagtctgaagttgaagctctaactgaacaactaagtgaagaggaggaggaggaagaggaggaagaagaagaagaggaagaggaggaggaagaggaagaagaagaggaagatgaggagtcagggaatcagtcagataggagtggttccagtggccggcgcaaggccaagaagaaatggcgaaaagacagcccatgggtgaagccgtctcggaaacggcgcaagcgggagcctccgcgggccaaggagccacgaggagtgaatggtgtgggctcctcaggccccagtgagtacatggaggtccctctggggtccctggagctgcccagcgaggggaccctctcccccaaccacgctggggtgtccaatgacacatcttcgctggagacagagcgagggtttgaggagttgcccctgtgcagctgccgcatggaggcacccaagattgaccgcatcagcgagagggcggggcacaagtgcatggccactgagagtgtggacggagagctgtcaggctgcaatgccgccatcctcaagcgggagaccatgaggccatccagccgtgtggccctgatggtgctctgtgagacccaccgcgcccgcatggtcaaacaccactgctgcccgggctgcggctacttctgcacggcgggcaccttcctggagtgccaccctgacttccgtgtggcccaccgcttccacaaggcctgtgtgtctcagctgaatgggatggtcttctgtccccactgtggggaggatgcttctgaagctcaagaggtgaccatcccccggggtgacggggtgaccccaccggccggcactgcagctcctgcacccccacccctgtcccaggatgtccccgggagagcagacacttctcagcccagtgcccggatgcgagggcatggggaaccccggcgcccgccctgcgatcccctggctgacaccattgacagctcagggccctccctgaccctgcccaatgggggctgcctttcagccgtggggctgccactggggccaggccgggaggccctggaaaaggccctggtcatccaggagtcagagaggcggaagaagctccgtttccaccctcggcagttgtacctgtccgtgaagcagggcgagctgcagaaggtgatcctgatgctgttggacaacctggaccccaacttccagagcgaccagcagagcaagcgcacgcccctgcatgcagccgcccagaagggctccgtggagatctgccatgtgctgctgcaggctggagccaacataaatgcagtggacaaacagcagcggacgccactgatggaggccgtggtgaacaaccacctggaggtagcccgttacatggtgcagcgtggtggctgtgtctatagcaaggaggaggacggttccacctgcctccaccacgcagccaaaatcgggaacttggagatggtcagcctgctgctgagcacaggacaggtggacgtcaacgcccaggacagtggggggtggacgcccatcatctgggctgcagagcacaagcacatcgaggtgatccgcatgctactgacgcggggcgccgacgtcaccctcactgacaacgaggagaacatctgcctgcactgggcctccttcacgggcagcgccgccatcgccgaagtccttctgaatgcgcgctgtgacctccatgctgtcaactaccatggggacacccccctgcacatcgcagctcgggagagctaccatgactgcgtgctgttattcctgtcacgtggggccaaccctgagctgcggaacaaagagggggacacagcatgggacctgactcccgagcgctccgacgtgtggtttgcgcttcaactcaaccgcaagctccgacttggggtgggaaatcgggccatccgcacagagaagatcatctgccgggacgtggctcggggctatgagaacgtgcccattccctgtgtcaacggtgtggatggggagccctgccctgaggattacaagtacatctcagagaactgcgagacgtccaccatgaacatcgatcgcaacatcacccacctgcagcactgcacgtgtgtggacgactgctctagctccaactgcctgtgcggccagctcagcatccggtgctggtatgacaaggatgggcgattgctccaggaatttaacaagattgagcctccgctgattttcgagtgtaaccaggcgtgctcatgctggagaaactgcaagaaccgggtcgtacagagtggcatcaaggtgcggctacagctctaccgaacagccaagatgggctggggggtccgcgccctgcagaccatcccacaggggaccttcatctgcgagtatgtcggggagctgatctctgatgctgaggctgatgtgagagaggatgattcttacctcttcgacttagacaacaaggatggagaggtgtactgcatagatgcccgttactatggcaacatcagccgcttcatcaaccacctgtgtgaccccaacatcattcccgtccgggtcttcatgctgcaccaagacctgcgatttccacgcatcgccttcttcagttcccgagacatccggactggggaggagctagggtttgactatggcgaccgcttctgggacatcaaaagcaaatatttcacctgccaatgtggctctgagaagtgcaagcactcagccgaagccattgccctggagcagagccgtctggcccgcctggacccacaccctgagctgctgcccgagctcggctccctgccccctgtcaacacatgagaacggaccacaccctctctccccagcatggatggccacagctcagccgcctcctctgccaccagctgctcgcagcccatgcctgggggtgctgccatcttctctccccaccaccctttcacacattcctgaccagagatcccagccaggccctggaggtctgacagcccctccctcccagagctggttcctccctgggagggcaacttcagggctggccaccccccgtgttccccatcctcagttgaagtttgatgaattgaagtcgggcctctatgccaactggttccttttgttctcaataaatgttgggtttggtaataaa

SEQ ID NO: 9907 - DNA, 4129 bp, Homo sapiens
  source 1..4129: mol_type = unassigned DNA
atgcggggtctaccgagagggagggggttgatgcgggcccgggggaggggtcgtgcggcccctccgggcagccgaggccgcggaaggggggggccccacagaggaagaggtaggccccggagcctactctctcttcccagggcccaggcatcctggaccccccaactctctactgggctgaccagccctcctgtcccttgtctcccctcccagggggaggcccccgctgagatgggggcgctgctgctggagaaggaaaccagaggagccaccgagagagttcatggctctttgggggacacccctcgtagtgaagaaaccctgcccaaggccacccccgactccctggagcctgctggcccctcatctccagcctctgtcactgtcactgttggtgatgagggggctgacacccctgtaggggctacaccactcattggggatgaatctgagaatcttgagggagatggggacctccgtgggggccggatcctgctgggccatgccacaaagtcattcccctcttcccccagcaaggggggttcctgtcctagccgggccaagatgtcaatgacaggggcgggaaaatcacctccatctgtccagagtttggctatgaggctactgagtatgccaggagcccagggagctgcagcagcagggtctgaaccccctccagccaccacgagcccagagggacagcccaaggtccaccgagcccgcaaaaccatgtccaaaccaggaaatggacagcccccggtccctgagaagcggccccctgaaatacagcatttccgcatgagtgatgatgtccactcactgggaaaggtgacctcagatctggccaaaaggaggaagctgaactcaggaggtggcctgtcagaggagttaggttctgcccggcgttcaggagaagtgaccctgacgaaaggggaccccgggtccctggaggagtgggagacggtggtgggtgatgacttcagtctctactatgattcctactctgtggatgagcgcgtggactccgacagcaagtctgaagttgaagctctaactgaacaactaagtgaagaggaggaggaggaagaggaggaagaagaagaagaggaagaggaggaggaagaggaagaagaagaggaagatgaggagtcagggaatcagtcagataggagtggttccagtggccggcgcaaggccaagaagaaatggcgaaaagacagcccatgggtgaagccgtctcggaaacggcgcaagcgggagcctccgcgggccaaggagccacgaggagtgaatggtgtgggctcctcaggccccagtgagtacatggaggtccctctggggtccctggagctgcccagcgaggggaccctctcccccaaccacgctggggtgtccaatgacacatcttcgctggagacagagcgagggtttgaggagttgcccctgtgcagctgccgcatggaggcacccaagattgaccgcatcagcgagagggcggggcacaagtgcatggccactgagagtgtggacggagagctgtcaggctgcaatgccgccatcctcaagcgggagaccatgaggccatccagccgtgtggccctgatggtgctctgtgagacccaccgcgcccgcatggtcaaacaccactgctgcccgggctgcggctacttctgcacggcgggcaccttcctggagtgccaccctgacttccgtgtggcccaccgcttccacaaggcctgtgtgtctcagctgaatgggatggtcttctgtccccactgtggggaggatgcttctgaagctcaagaggtgaccatcccccggggtgacggggtgaccccaccggccggcactgcagctcctgcacccccacccctgtcccaggatgtccccgggagagcagacacttctcagcccagtgcccggatgcgagggcatggggaaccccggcgcccgccctgcgatcccctggctgacaccattgacagctcagggccctccctgaccctgcccaatgggggctgcctttcagccgtggggctgccactggggccaggccgggaggccctggaaaaggccctggtcatccaggagtcagagaggcggaagaagctccgtttccaccctcggcagttgtacctgtccgtgaagcagggcgagctgcagaaggtgatcctgatgctgttggacaacctggaccccaacttccagagcgaccagcagagcaagcgcacgcccctgcatgcagccgcccagaagggctccgtggagatctgccatgtgctgctgcaggctggagccaacataaatgcagtggacaaacagcagcggacgccactgatggaggccgtggtgaacaaccacctggaggtagcccgttacatggtgcagcgtggtggctgtgtctatagcaaggaggaggacggttccacctgcctccaccacgcagccaaaatcgggaacttggagatggtcagcctgctgctgagcacaggacaggtggacgtcaacgcccaggacagtggggggtggacgcccatcatctgggctgcagagcacaagcacatcgaggtgatccgcatgctactgacgcggggcgccgacgtcaccctcactgacaacgaggagaacatctgcctgcactgggcctccttcacgggcagcgccgccatcgccgaagtccttctgaatgcgcgctgtgacctccatgctgtcaactaccatggggacacccccctgcacatcgcagctcgggagagctaccatgactgcgtgctgttattcctgtcacgtggggccaaccctgagctgcggaacaaagagggggacacagcatgggacctgactcccgagcgctccgacgtgtggtttgcgcttcaactcaaccgcaagctccgacttggggtgggaaatcgggccatccgcacagagaagatcatctgccgggacgtggctcggggctatgagaacgtgcccattccctgtgtcaacggtgtggatggggagccctgccctgaggattacaagtacatctcagagaactgcgagacgtccaccatgaacatcgatcgcaacatcacccacctgcagcactgcacgtgtgtggacgactgctctagctccaactgcctgtgcggccagctcagcatccggtgctggtatgacaaggatgggcgattgctccaggaatttaacaagattgagcctccgctgattttcgagtgtaaccaggcgtgctcatgctggagaaactgcaagaaccgggtcgtacagagtggcatcaaggtgcggctacagctctaccgaacagccaagatgggctggggggtccgcgccctgcagaccatcccacaggggaccttcatctgcgagtatgtcggggagctgatctctgatgctgaggctgatgtgagagaggatgattcttacctcttcgacttagacaacaaggatggagaggtgtactgcatagatgcccgttactatggcaacatcagccgcttcatcaaccacctgtgtgaccccaacatcattcccgtccgggtcttcatgctgcaccaagacctgcgatttccacgcatcgccttcttcagttcccgagacatccggactggggaggagctagggtttgactatggcgaccgcttctgggacatcaaaagcaaatatttcacctgccaatgtggctctgagaagtgcaagcactcagccgaagccattgccctggagcagagccgtctggcccgcctggacccacaccctgagctgctgcccgagctcggctccctgccccctgtcaacacatgagaacggaccacaccctctctccccagcatggatggccacagctcagccgcctcctctgccaccagctgctcgcagcccatgcctgggggtgctgccatcttctctccccaccaccctttcacacattcctgaccagagatcccagccaggccctggaggtctgacagcccctccctcccagagctggttcctccctgggagggcaacttcagggctggccaccccccgtgttccccatcctcagttgaagtttgatgaattgaagtcgggcctctatgccaactggttccttttgttctcaataaatgttgggtttggtaataaa

SEQ ID NO: 9908 - DNA, 4129 bp, Homo sapiens
  source 1..4129: mol_type = unassigned DNA
atgcggggtctaccgagagggagggggttgatgcgggcccgggggaggggtcgtgcggcccctccgggcagccgaggccgcggaaggggggggccccacagaggaagaggtaggccccggagcctactctctcttcccagggcccaggcatcctggaccccccaactctctactgggctgaccagccctcctgtcccttgtctcccctcccagggggaggcccccgctgagatgggggcgctgctgctggagaaggaaaccagaggagccaccgagagagttcatggctctttgggggacacccctcgtagtgaagaaaccctgcccaaggccacccccgactccctggagcctgctggcccctcatctccagcctctgtcactgtcactgttggtgatgagggggctgacacccctgtaggggctacaccactcattggggatgaatctgagaatcttgagggagatggggacctccgtgggggccggatcctgctgggccatgccacaaagtcattcccctcttcccccagcaaggggggttcctgtcctagccgggccaagatgtcaatgacaggggcgggaaaatcacctccatctgtccagagtttggctatgaggctactgagtatgccaggagcccagggagctgcagcagcagggtctgaaccccctccagccaccacgagcccagagggacagcccaaggtccaccgagcccgcaaaaccatgtccaaaccaggaaatggacagcccccggtccctgagaagcggccccctgaaatacagcatttccgcatgagtgatgatgtccactcactgggaaaggtgacctcagatctggccaaaaggaggaagctgaactcaggaggtggcctgtcggaggagttaggttctgcccggcgttcaggagaagtgaccctgacgaaaggggaccccgggtccctggaggagtgggagacggtggtgggtgatgacttcagtctctactatgattcctactctgtggatgagcgcgtggactccgacagcaagtctgaagttgaagctctaactgaacaactaagtgaagaggaggaggaggaagaggaggaagaagaagaagaggaagaggaggaggaagaggaagaagaagaggaagatgaggagtcagggaatcagtcagataggagtggttccagtggccggcgcaaggccaagaagaaatggcgaaaagacagcccatgggtgaagccgtctcggaaacggcgcaagcgggagcctccgcgggccaaggagccacgaggagtgaatggtgtgggctcctcaggccccagtgagtacatggaggtccctctggggtccctggagctgcccagcgaggggaccctctcccccaaccacgctggggtgtccaatgacacatcttcgctggagacagagcgagggtttgaggagttgcccctgtgcagctgccgcatggaggcacccaagattgaccgcatcagcgagagggcggggcacaagtgcatggccactgagagtgtggacggagagctgtcaggctgcaatgccgccatcctcaagcgggagaccatgaggccatccagccgtgtggccctgatggtgctctgtgagacccaccgcgcccgcatggtcaaacaccactgctgcccgggctgcggctacttctgcacggcgggcaccttcctggagtgccaccctgacttccgtgtggcccaccgcttccacaaggcctgtgtgtctcagctgaatgggatggtcttctgtccccactgtggggaggatgcttctgaagctcaagaggtgaccatcccccggggtgacggggtgaccccaccggccggcactgcagctcctgcacccccacccctgtcccaggatgtccccgggagagcagacacttctcagcccagtgcccggatgcgagggcatggggaaccccggcgcccgccctgcgatcccctggctgacaccattgacagctcagggccctccctgaccctgcccaatgggggctgcctttcagccgtggggctgccactggggccaggccgggaggccctggaaaaggccctggtcatccaggagtcagagaggcggaagaagctccgtttccaccctcggcagttgtacctgtccgtgaagcagggcgagctgcagaaggtgatcctgatgctgttggacaacctggaccccaacttccagagcgaccagcagagcaagcgcacgcccctgcatgcagccgcccagaagggctccgtggagatctgccatgtgctgctgcaggctggagccaacataaatgcagtggacaaacagcagcggacgccactgatggaggccgtggtgaacaaccacctggaggtagcccgttacatggtgcagcgtggtggctgtgtctatagcaaggaggaggacggttccacctgcctccaccacgcagccaaaatcgggaacttggagatggtcagcctgctgctgagcacaggacaggtggacgtcaacgcccaggacagtggggggtggacgcccatcatctgggctgcagagcacaagcacatcgaggtgatccgcatgctactgacgcggggcgccgacgtcaccctcactgacaacgaggagaacatctgcctgcactgggcctccttcacgggcagcgccgccatcgccgaagtccttctgaatgcgcgctgtgacctccatgctgtcaactaccatggggacacccccctgcacatcgcagctcgggagagctaccatgactgcgtgctgttattcctgtcacgtggggccaaccctgagctgcggaacaaagagggggacacagcatgggacctgactcccgagcgctccgacgtgtggtttgcgcttcaactcaaccgcaagctccgacttggggtgggaaatcgggccatccgcacagagaagatcatctgccgggacgtggctcggggctatgagaacgtgcccattccctgtgtcaacggtgtggatggggagccctgccctgaggattacaagtacatctcagagaactgcgagacgtccaccatgaacatcgatcgcaacatcacccacctgcagcactgcacgtgtgtggacgactgctctagctccaactgcctgtgcggccagctcagcatccggtgctggtatgacaaggatgggcgattgctccaggaatttaacaagattgagcctccgctgattttcgagtgtaaccaggcgtgctcatgctggagaaactgcaagaaccgggtcgtacagagtggcatcaaggtgcggctacagctctaccgaacagccaagatgggctggggggtccgcgccctgcagaccatcccacaggggaccttcatctgcgagtatgtcggggagctgatctctgatgctgaggctgatgtgagagaggatgattcttacctcttcgacttagacaacaaggatggagaggtgtactgcatagatgcccgttactatggcaacatcagccgcttcatcaaccacctgtgtgaccccaacatcattcccgtccgggtcttcatgctgcaccaagacctgcgatttccacgcatcgccttcttcagttcccgagacatccggactggggaggagctagggtttgactatggcgaccgcttctgggacatcaaaagcaaatatttcacctgccaatgtggctctgagaagtgcaagcactcagccgaagccattgccctggagcagagccgtctggcccgcctggacccacaccctgagctgctgcccgagctcggctccctgccccctgtcaacacatgagaacggaccacaccctctctccccagcatggatggccacagctcagccgcctcctctgccaccagctgctcgcagcccatgcctgggggtgctgccatcttctctccccaccaccctttcacacattcctgaccagagatcccagccaggccctggaggtctgacagcccctccctcccagagctggttcctccctgggagggcaacttcagggctggccaccccccgtgttccccatcctcagttgaagtttgatgaattgaagtcgggcctctatgccaactggttccttttgttctcaataaatgttgggtttggtaataaa

SEQ ID NO: 9909 - DNA, 4047 bp, Homo sapiens
  source 1..4047: mol_type = unassigned DNA
ctcttctctcggccccagagatgcggggtctaccgagagggagggggttgatgcgggcccgggggaggggtcgtgcggcccctccgggcagccgaggccgcggaaggggggggccccacagaggaagaggtaggccccggagcctactctctcttcccagggcccaggcatcctggaccccccaactctctactgggctgaccagccctcctgtcccttgtctcccctcccagggggaggcccccgctgagatgggggcgctgctgctggagaaggaaaccagaggagccaccgagagagttcatggctctttgggggacacccctcgtagtgaagaaaccctgcccaaggccacccccgactccctggagcctgctggcccctcatctccagcctctgtcactgtcactgttggtgatgagggggctgacacccctgtaggggctacaccactcattggggatgaatctgagaatcttgagggagatggggacctccgtgggggccggatcctgctgggccatgccacaaagtcattcccctcttcccccagcaaggggggttcctgtcctagccgggccaagatgtcaatgacaggggcgggaaaatcacctccatctgtccagagtttggctatgaggctactgagtatgccaggagcccagggagctgcagcagcagggtctgaaccccctccagccaccacgagcccagagggacagcccaaggtccaccgagcccgcaaaaccatgtccaaaccaggaaatggacagcccccggtccctgagaagcggccccctgaaatacagcatttccgcatgagtgatgatgtccactcactgggaaaggtgacctcagatctggccaaaaggaggaagctgaactcaggaggtggcctgtcggaggagttaggttctgcccggcgttcaggagaagtgaccctgacgaaaggggaccccgggtccctggaggagtgggagacggtggtgggtgatgacttcagtctctactatgattcctactctgtggatgagcgcgtggactccgacagcaagtctgaagttgaagctctaactgaacaactaagtgaagaggaggaggaggaagaggaggaagaagaagaagaggaagaggaggaggaagaggaagaagaagaggaagatgaggagtcagggaatcagtcagataggagtggttccagtggccggcgcaaggccaagaagaaatggcgaaaagacagcccatgggtgaagccgtctcggaaacggcgcaagcgggagcctccgcgggccaaggagccacgaggggtgtccaatgacacatcttcgctggagacagagcgagggtttgaggagttgcccctgtgcagctgccgcatggaggcacccaagattgaccgcatcagcgagagggcggggcacaagtgcatggccactgagagtgtggacggagagctgtcaggctgcaatgccgccatcctcaagcgggagaccatgaggccatccagccgtgtggccctgatggtgctctgtgagacccaccgcgcccgcatggtcaaacaccactgctgcccgggctgcggctacttctgcacggcgggcaccttcctggagtgccaccctgacttccgtgtggcccaccgcttccacaaggcctgtgtgtctcagctgaatgggatggtcttctgtccccactgtggggaggatgcttctgaagctcaagaggtgaccatcccccggggtgacggggtgaccccaccggccggcactgcagctcctgcacccccacccctgtcccaggatgtccccgggagagcagacacttctcagcccagtgcccggatgcgagggcatggggaaccccggcgcccgccctgcgatcccctggctgacaccattgacagctcagggccctccctgaccctgcccaatgggggctgcctttcagccgtggggctgccactggggccaggccgggaggccctggaaaaggccctggtcatccaggagtcagagaggcggaagaagctccgtttccaccctcggcagttgtacctgtccgtgaagcagggcgagctgcagaaggtgatcctgatgctgttggacaacctggaccccaacttccagagcgaccagcagagcaagcgcacgcccctgcatgcagccgcccagaagggctccgtggagatctgccatgtgctgctgcaggctggagccaacataaatgcagtggacaaacagcagcggacgccactgatggaggccgtggtgaacaaccacctggaggtagcccgttacatggtgcagcgtggtggctgtgtctatagcaaggaggaggacggttccacctgcctccaccacgcagccaaaatcgggaacttggagatggtcagcctgctgctgagcacaggacaggtggacgtcaacgcccaggacagtggggggtggacgcccatcatctgggctgcagagcacaagcacatcgaggtgatccgcatgctactgacgcggggcgccgacgtcaccctcactgacaacgaggagaacatctgcctgcactgggcctccttcacgggcagcgccgccatcgccgaagtccttctgaatgcgcgctgtgacctccatgctgtcaactaccatggggacacccccctgcacatcgcagctcgggagagctaccatgactgcgtgctgttattcctgtcacgtggggccaaccctgagctgcggaacaaagagggggacacagcatgggacctgactcccgagcgctccgacgtgtggtttgcgcttcaactcaaccgcaagctccgacttggggtgggaaatcgggccatccgcacagagaagatcatctgccgggacgtggctcggggctatgagaacgtgcccattccctgtgtcaacggtgtggatggggagccctgccctgaggattacaagtacatctcagagaactgcgagacgtccaccatgaacatcgatcgcaacatcacccacctgcagcactgcacgtgtgtggacgactgctctagctccaactgcctgtgcggccagctcagcatccggtgctggtatgacaaggatgggcgattgctccaggaatttaacaagattgagcctccgctgattttcgagtgtaaccaggcgtgctcatgctggagaaactgcaagaaccgggtcgtacagagtggcatcaaggtgcggctacagctctaccgaacagccaagatgggctggggggtccgcgccctgcagaccatcccacaggggaccttcatctgcgagtatgtcggggagctgatctctgatgctgaggctgatgtgagagaggatgattcttacctcttcgacttagacaacaaggatggagaggtgtactgcatagatgcccgttactatggcaacatcagccgcttcatcaaccacctgtgtgaccccaacatcattcccgtccgggtcttcatgctgcaccaagacctgcgatttccacgcatcgccttcttcagttcccgagacatccggactggggaggagctagggtttgactatggcgaccgcttctgggacatcaaaagcaaatatttcacctgccaatgtggctctgagaagtgcaagcactcagccgaagccattgccctggagcagagccgtctggcccgcctggacccacaccctgagctgctgcccgagctcggctccctgccccctgtcaacacatgagaacggaccacaccctctctccccagcatggatggccacagctcagccgcctcctctgccaccagctgctcgcagcccatgcctgggggtgctgccatcttctctccccaccaccctttcacacattcctgaccagagatcccagccaggccctggaggtctgacagcccctccctcccagagctggttcctccctgggagggcaacttcagggctggccaccccccgtgttccccatcctcagttgaagtttgatgaattgaagtcgggcctctatgccaactggttccttttgttctcaataaatgttgggtttggtaataaa

SEQ ID NO: 9910 - DNA, 4129 bp, Homo sapiens
  source 1..4129: mol_type = unassigned DNA
atgcggggtctaccgagagggagggggttgatgcgggcccgggggaggggtcgtgcggcccctccgggcagccgaggccgcggaaggggggggccccacagaggaagaggtaggccccggagcctactctctcttcccagggcccaggcatcctggaccccccaactctctactgggctgaccagccctcctgtcccttgtctcccctcccagggggaggcccccgctgagatgggggcgctgctgctggagaaggaaaccagaggagccaccgagagagttcatggctctttgggggacacccctcgtagtgaagaaaccctgcccaaggccaaccccgactccctggagcctgctggcccctcatctccagcctctgtcactgtcactgttggtgatgagggggctgacacccctgtaggggctacaccactcattggggatgaatctgagaatcttgagggagatggggacctccgtgggggccggatcctgctgggccatgccacaaagtcattcccctcttcccccagcaaggggggttcctgtcctagccgggccaagatgtcaatgacaggggcgggaaaatcacctccatctgtccagagtttggctatgaggctactgagtatgccaggagcccagggagctgcagcagcagggtctgaaccccctccagccaccacgagcccagagggacagcccaaggtccaccgagcccgcaaaaccatgtccaaaccaggaaatggacagcccccggtccctgagaagcggccccctgaaatacagcatttccgcatgagtgatgatgtccactcactgggaaaggtgacctcagatctggccaaaaggaggaagctgaactcaggaggtggcctgtcggaggagttaggttctgcccggcgttcaggagaagtgaccctgacgaaaggggaccccgggtccctggaggagtgggagacggtggtgggtgatgacttcagtctctactatgattcctactctgtggatgagcgcgtggactccgacagcaagtctgaagttgaagctctaactgaacaactaagtgaagaggaggaggaggaagaggaggaagaagaagaagaggaagaggaggaggaagaggaagaagaagaggaagatgaggagtcagggaatcagtcagataggagtggttccagtggccggcgcaaggccaagaagaaatggcgaaaagacagcccatgggtgaagccgtctcggaaacggcgcaagcgggagcctccgcgggccaaggagccacgaggagtgaatggtgtgggctcctcaggccccagtgagtacatggaggtccctctggggtccctggagctgcccagcgaggggaccctctcccccaaccacgctggggtgtccaatgacacatcttcgctggagacagagcgagggtttgaggagttgcccctgtgcagctgccgcatggaggcacccaagattgaccgcatcagcgagagggcggggcacaagtgcatggccactgagagtgtggacggagagctgtcaggctgcaatgccgccatcctcaagcgggagaccatgaggccatccagccgtgtggccctgatggtgctctgtgagacccaccgcgcccgcatggtcaaacaccactgctgcccgggctgcggctacttctgcacggcgggcaccttcctggagtgccaccctgacttccgtgtggcccaccgcttccacaaggcctgtgtgtctcagctgaatgggatggtcttctgtccccactgtggggaggatgcttctgaagctcaagaggtgaccatcccccggggtgacggggtgaccccaccggccggcactgcagctcctgcacccccacccctgtcccaggatgtccccgggagagcagacacttctcagcccagtgcccggatgcgagggcatggggaaccccggcgcccgccctgcgatcccctggctgacaccattgacagctcagggccctccctgaccctgcccaatgggggctgcctttcagccgtggggctgccactggggccaggccgggaggccctggaaaaggccctggtcatccaggagtcagagaggcggaagaagctccgtttccaccctcggcagttgtacctgtccgtgaagcagggcgagctgcagaaggtgatcctgatgctgttggacaacctggaccccaacttccagagcgaccagcagagcaagcgcacgcccctgcatgcagccgcccagaagggctccgtggagatctgccatgtgctgctgcaggctggagccaacataaatgcagtggacaaacagcagcggacgccactgatggaggccgtggtgaacaaccacctggaggtagcccgttacatggtgcagcgtggtggctgtgtctatagcaaggaggaggacggttccacctgcctccaccacgcagccaaaatcgggaacttggagatggtcagcctgctgctgagcacaggacaggtggacgtcaacgcccaggacagtggggggtggacgcccatcatctgggctgcagagcacaagcacatcgaggtgatccgcatgctactgacgcggggcgccgacgtcaccctcactgacaacgaggagaacatctgcctgcactgggcctccttcacgggcagcgccgccatcgccgaagtccttctgaatgcgcgctgtgacctccatgctgtcaactaccatggggacacccccctgcacatcgcagctcgggagagctaccatgactgcgtgctgttattcctgtcacgtggggccaaccctgagctgcggaacaaagagggggacacagcatgggacctgactcccgagcgctccgacgtgtggtttgcgcttcaactcaaccgcaagctccgacttggggtgggaaatcgggccatccgcacagagaagatcatctgccgggacgtggctcggggctatgagaacgtgcccattccctgtgtcaacggtgtggatggggagccctgccctgaggattacaagtacatctcagagaactgcgagacgtccaccatgaacatcgatcgcaacatcacccacctgcagcactgcacgtgtgtggacgactgctctagctccaactgcctgtgcggccagctcagcatccggtgctggtatgacaaggatgggcgattgctccaggaatttaacaagattgagcctccgctgattttcgagtgtaaccaggcgtgctcatgctggagaaactgcaagaaccgggtcgtacagagtggcatcaaggtgcggctacagctctaccgaacagccaagatgggctggggggtccgcgccctgcagaccatcccacaggggaccttcatctgcgagtatgtcggggagctgatctctgatgctgaggctgatgtgagagaggatgattcttacctcttcgacttagacaacaaggatggagaggtgtactgcatagatgcccgttactatggcaacatcagccgcttcatcaaccacctgtgtgaccccaacatcattcccgtccgggtcttcatgctgcaccaagacctgcgatttccacgcatcgccttcttcagttcccgagacatccggactggggaggagctagggtttgactatggcgaccgcttctgggacatcaaaagcaaatatttcacctgccaatgtggctctgagaagtgcaagcactcagccgaagccattgccctggagcagagccgtctggcccgcctggacccacaccctgagctgctgcccgagctcggctccctgccccctgtcaacacatgagaacggaccacaccctctctccccagcatggatggccacagctcagccgcctcctctgccaccagctgctcgcagcccatgcctgggggtgctgccatcttctctccccaccaccctttcacacattcctgaccagagatcccagccaggccctggaggtctgacagcccctccctcccagagctggttcctccctgggagggcaacttcagggctggccaccccccgtgttccccatcctcagttgaagtttgatgaattgaagtcgggcctctatgccaactggttccttttgttctcaataaatgttgggtttggtaataaa

SEQ ID NO: 9911 - DNA, 894 bp, Homo sapiens
  source 1..894: mol_type = unassigned DNA
gagcaagcgcacgcccctgcatgcagccgcccagaagggctccgtggagatctgccatgtgctgctgcaggctggagccaacataaatgcagtggacaaacagcagcggacgccactgatggaggccgtggtgaacaaccacctggaggtagcccgttacatggtgcagcgtggtggctgtgtctatagcaaggaggaggacggttccacctgcctccaccacgcagccaaaatcgggaacttggagatggtcagcctgctgctgagcacaggacaggtggacgtcaacgcccagggccagctgcccccaccctcactcccttcccacccacaggacagtggggggtggacgcccatcatctgggctgcagagcacaagcacatcgaggtgatccgcatgctactgacgcggggcgccgacgtcaccctcactgacaacgaggagaacatctgcctgcactgggcctccttcacgggcagcgccgccatcgccgaagtccttctgaatgcgcgctgtgacctccatgctgtcaactaccatggggacacccccctgcacatcgcagctcgggagagctaccatgactgcgtgctgttattcctgtcacgtggggccaaccctgagctgcggaacaaagagggggacacagcatgggacctgactcccgagcgctccgacgtgtggtttgcgcttcaactcaaccgcaagctccgacttggggtgggaaatcgggccatccgcacagagaagatcatctgccgggacgtggctcggggctatgagaacgtgcccattccctgtgtcaacggtgtggatggggagccctgccctgaggattacaagtacatctcagagaactgcgagacgtccaccatgaacatcgatcgcaacat

SEQ ID NO: 9912 - DNA, 3965 bp, Homo sapiens
  source 1..3965: mol_type = unassigned DNA
agcggcgatggcggcggcggcgggagctgcagcggcggcggccgccgagggggaggcccccgctgagatgggggcgctgctgctggagaaggaaaccagaggagccaccgagagagttcatggctctttgggggacacccctcgtagtgaagaaaccctgcccaaggccaaccccgactccctggagcctgctggcccctcatctccagcctctgtcactgtcactgttggtgatgagggggctgacacccctgtaggggctacaccactcattggggatgaatctgagaatcttgagggagatggggacctccgtgggggccggatcctgctgggccatgccacaaagtcattcccctcttcccccagcaaggggggttcctgtcctagccgggccaagatgtcaatgacaggggcgggaaaatcacctccatctgtccagagtttggctatgaggctactgagtatgccaggagcccagggagctgcagcagcagggtctgaaccccctccagccaccacgagcccagagggacagcccaaggtccaccgagcccgcaaaaccatgtccaaaccaggaaatggacagcccccggtccctgagaagcggccccctgaaatacagcatttccgcatgagtgatgatgtccactcactgggaaaggtgacctcagatctggccaaaaggaggaagctgaactcaggaggtggcctgtcggaggagttaggttctgcccggcgttcaggagaagtgaccctgacgaaaggggaccccgggtccctggaggagtgggagacggtggtgggtgatgacttcagtctctactatgattcctactctgtggatgagcgcgtggactccgacagcaagtctgaagttgaagctctaactgaacaactaagtgaagaggaggaggaggaagaggaggaagaagaagaagaggaagaggaggaggaagaggaagaagaagaggaagatgaggagtcagggaatcagtcagataggagtggttccagtggccggcgcaaggccaagaagaaatggcgaaaagacagcccatgggtgaagccgtctcggaaacggcgcaagcgggagcctccgcgggccaaggagccacgaggagtgaatggtgtgggctcctcaggccccagtgagtacatggaggtccctctggggtccctggagctgcccagcgaggggaccctctcccccaaccacgctggggtgtccaatgacacatcttcgctggagacagagcgagggtttgaggagttgcccctgtgcagctgccgcatggaggcacccaagattgaccgcatcagcgagagggcggggcacaagtgcatggccactgagagtgtggacggagagctgtcaggctgcaatgccgccatcctcaagcgggagaccatgaggccatccagccgtgtggccctgatggtgctctgtgagacccaccgcgcccgcatggtcaaacaccactgctgcccgggctgcggctacttctgcacggcgggcaccttcctggagtgccaccctgacttccgtgtggcccaccgcttccacaaggcctgtgtgtctcagctgaatgggatggtcttctgtccccactgtggggaggatgcttctgaagctcaagaggtgaccatcccccggggtgacggggtgaccccaccggccggcactgcagctcctgcacccccacccctgtcccaggatgtccccgggagagcagacacttctcagcccagtgcccggatgcgagggcatggggaaccccggcgcccgccctgcgatcccctggctgacaccattgacagctcagggccctccctgaccctgcccaatgggggctgcctttcagccgtggggctgccactggggccaggccgggaggccctggaaaaggccctggtcatccaggagtcagagaggcggaagaagctccgtttccaccctcggcagttgtacctgtccgtgaagcagggcgagctgcagaaggtgatcctgatgctgttggacaacctggaccccaacttccagagcgaccagcagagcaagcgcacgcccctgcatgcagccgcccagaagggctccgtggagatctgccatgtgctgctgcaggctggagccaacataaatgcagtggacaaacagcagcggacgccactgatggaggccgtggtgaacaaccacctggaggtagcccgttacatggtgcagcgtggtggctgtgtctatagcaaggaggaggacggttccacctgcctccaccacgcagccaaaatcgggaacttggagatggtcagcctgctgctgagcacaggacaggtggacgtcaacgcccaggacagtggggggtggacgcccatcatctgggctgcagagcacaagcacatcgaggtgatccgcatgctactgacgcggggcgccgacgtcaccctcactgacaacgaggagaacatctgcctgcactgggcctccttcacgggcagcgccgccatcgccgaagtccttctgaatgcgcgctgtgacctccatgctgtcaactaccatggggacacccccctgcacatcgcagctcgggagagctaccatgactgcgtgctgttattcctgtcacgtggggccaaccctgagctgcggaacaaagagggggacacagcatgggacctgactcccgagcgctccgacgtgtggtttgcgcttcaactcaaccgcaagctccgacttggggtgggaaatcgggccatccgcacagagaagatcatctgccgggacgtggctcggggctatgagaacgtgcccattccctgtgtcaacggtgtggatggggagccctgccctgaggattacaagtacatctcagagaactgcgagacgtccaccatgaacatcgatcgcaacatcacccacctgcagcactgcacgtgtgtggacgactgctctagctccaactgcctgtgcggccagctcagcatccggtgctggtatgacaaggatgggcgattgctccaggaatttaacaagattgagcctccgctgattttcgagtgtaaccaggcgtgctcatgctggagaaactgcaagaaccgggtcgtacagagtggcatcaaggtgcggctacagctctaccgaacagccaagatgggctggggggtccgcgccctgcagaccatcccacaggggaccttcatctgcgagtatgtcggggagctgatctctgatgctgaggctgatgtgagagaggatgattcttacctcttcgacttagacaacaaggatggagaggtgtactgcatagatgcccgttactatggcaacatcagccgcttcatcaaccacctgtgtgaccccaacatcattcccgtccgggtcttcatgctgcaccaagacctgcgatttccacgcatcgccttcttcagttcccgagacatccggactggggaggagctagggtttgactatggcgaccgcttctgggacatcaaaagcaaatatttcacctgccaatgtggctctgagaagtgcaagcactcagccgaagccattgccctggagcagagccgtctggcccgcctggacccacaccctgagctgctgcccgagctcggctccctgccccctgtcaacacatgagaacggaccacaccctctctccccagcatggatggccacagctcagccgcctcctctgccaccagctgctcgcagcccatgcctgggggtgctgccatcttctctccccaccaccctttcacacattcctgaccagagatcccagccaggccctggaggtctgacagcccctccctcccagagctggttcctccctgggagggcaacttcagggctggccaccccccgtgttccccatcctcagttgaagtttgatgaattgaagtcgggcctctatgccaactggttccttttgttctcaataaatgttgggtttggtaataaa

SEQ ID NO: 9913 - DNA, 894 bp, Homo sapiens; identical to SEQ ID NO: 9911
  source 1..894: mol_type = unassigned DNA

SEQ ID NO: 9914 - DNA, 3856 bp, Homo sapiens; identical to SEQ ID NO: 9903
  source 1..3856: mol_type = unassigned DNA

SEQ ID NO: 9915 - DNA, 4129 bp, Homo sapiens; identical to SEQ ID NO: 9907
  source 1..4129: mol_type = unassigned DNA

SEQ ID NO: 9916 - DNA, 3965 bp, Homo sapiens; identical to SEQ ID NO: 9912
  source 1..3965: mol_type = unassigned DNA

SEQ ID NO: 9917 - DNA, 894 bp, Homo sapiens; identical to SEQ ID NO: 9911
  source 1..894: mol_type = unassigned DNA

SEQ ID NO: 9918 - DNA, 3094 bp, Homo sapiens
  source 1..3094: mol_type = unassigned DNA
tctgaagttgaagctctaactgaacaactaagtgaagaggaggaggaggaagaggaggaagaagaagaagaggaagaggaggaggaagaggaagaagaagaggaagatgaggagtcagggaatcagtcagataggagtggttccagtggccggcgcaaggccaagaagaaatggcgaaaagacagcccatgggtgaagccgtctcggaaacggcgcaagcgggagcctccgcgggccaaggagccacgaggagtgaatggtgtgggctcctcaggccccagtgagtacatggaggtccctctggggtccctggagctgcccagcgaggggaccctctcccccaaccacgctggggtgtccaatgacacatcttcgctggagacagagcgagggtttgaggagttgcccctgtgcagctgccgcatggaggcacccaagattgaccgcatcagcgagagggcggggcacaagtgcatggccactgagagtgtggacggagagctgtcaggctgcaatgccgccatcctcaagcgggagaccatgaggccatccagccgtgtggccctgatggtgctctgtgagacccaccgcgcccgcatggtcaaacaccactgctgcccgggctgcggctacttctgcacggcgggcaccttcctggagtgccaccctgacttccgtgtggcccaccgcttccacaaggcctgtgtgtctcagctgaatgggatggtcttctgtccccactgtggggaggatgcttctgaagctcaagaggtgaccatcccccggggtgacggggtgaccccaccggccggcactgcagctcctgcacccccacccctgtcccaggatgtccccgggagagcagacacttctcagcccagtgcccggatgcgagggcatggggaaccccggcgcccgccctgcgatcccctggctgacaccattgacagctcagggccctccctgaccctgcccaatgggggctgcctttcagccgtggggctgccactggggccaggccgggaggccctggaaaaggccctggtcatccaggagtcagagaggcggaagaagctccgtttccaccctcggcagttgtacctgtccgtgaagcagggcgagctgcagaaggtgatcctgatgctgttggacaacctggaccccaacttccagagcgaccagcagagcaagcgcacgcccctgcatgcagccgcccagaagggctccgtggagatctgccatgtgctgctgcaggctggagccaacataaatgcagtggacaaacagcagcggacgccactgatggaggccgtggtgaacaaccacctggaggtagcccgttacatggtgcagcgtggtggctgtgtctatagcaaggaggaggacggttccacctgcctccaccacgcagccaaaatcgggaacttggagatggtcagcctgctgctgagcacaggacaggtggacgtcaacgcccaggacagtggggggtggacgcccatcatctgggctgcagagcacaagcacatcgaggtgatccgcatgctactgacgcggggcgccgacgtcaccctcactgacaacgaggagaacatctgcctgcactgggcctccttcacgggcagcgccgccatcgccgaagtccttctgaatgcgcgctgtgacctccatgctgtcaactaccatggggacacccccctgcacatcgcagctcgggagagctaccatgactgcgtgctgttattcctgtcacgtggggccaaccctgagctgcggaacaaagagggggacacagcatgggacctgactcccgagcgctccgacgtgtggtttgcgcttcaactcaaccgcaagctccgacttggggtgggaaatcgggccatccgcacagagaagatcatctgccgggacgtggctcggggctatgagaacgtgcccattccctgtgtcaacggtgtggatggggagccctgccctgaggattacaagtacatctcagagaactgcgagacgtccaccatgaacatcgatcgcaacatcacccacctgcagcactgcacgtgtgtggacgactgctctagctccaactgcctgtgcggccagctcagcatccggtgctggtatgacaaggatgggcgattgctccaggaatttaacaagattgagcctccgctgattttcgagtgtaaccaggcgtgctcatgctggagaaactgcaagaaccgggtcgtacagagtggcatcaaggtgcggctacagctctaccgaacagccaagatgggctggggggtccgcgccctgcagaccatcccacaggggaccttcatctgcgagtatgtcggggagctgatctctgatgctgaggctgatgtgagagaggatgattcttacctcttcgacttagacaacaaggatggagaggtgtactgcatagatgcccgttactatggcaacatcagccgcttcatcaaccacctgtgtgaccccaacatcattcccgtccgggtcttcatgctgcaccaagacctgcgatttccacgcatcgccttcttcagttcccgagacatccggactggggaggagctagggtttgactatggcgaccgcttctgggacatcaaaagcaaatatttcacctgccaatgtggctctgagaagtgcaagcactcagccgaagccattgccctggagcagagccgtctggcccgcctggacccacaccctgagctgctgcccgagctcggctccctgccccctgtcaacacatgagaacggaccacaccctctctccccagcatggatggccacagctcagccgcctcctctgccaccagctgctcgcagcccatgcctgggggtgctgccatcttctctccccaccaccctttcacacattcctgaccagagatcccagccaggccctggaggtctgacagcccctccctcccagagctggttcctccctgggagggcaacttcagggctggccaccccccgtgttccccatcctcagttgaagtttgatgaattgaagtcgggcctctatgccaactggttccttttgttctcaataaatgttgggtttggtaataaa

SEQ ID NO: 9919 - DNA, 4047 bp, Homo sapiens
  source 1..4047: mol_type = unassigned DNA
ctcttctctcggccccagagatgcggggtctaccgagagggagggggttgatgcgggcccgggggaggggtcgtgcggcccctccgggcagccgaggccgcggaaggggggggccccacagaggaagaggtaggccccggagcctactctctcttcccagggcccaggcatcctggaccccccaactctctactgggctgaccagccctcctgtcccttgtctcccctcccagggggaggcccccgctgagatgggggcgctgctgctggagaaggaaaccagaggagccaccgagagagttcatggctctttgggggacacccctcgtagtgaagaaaccctgcccaaggccaaccccgactccctggagcctgctggcccctcatctccagcctctgtcactgtcactgttggtgatgagggggctgacacccctgtaggggctacaccactcattggggatgaatctgagaatcttgagggagatggggacctccgtgggggccggatcctgctgggccatgccacaaagtcattcccctcttcccccagcaaggggggttcctgtcctagccgggccaagatgtcaatgacaggggcgggaaaatcacctccatctgtccagagtttggctatgaggctactgagtatgccaggagcccagggagctgcagcagcagggtctgaaccccctccagccaccacgagcccagagggacagcccaaggtccaccgagcccgcaaaaccatgtccaaaccaggaaatggacagcccccggtccctgagaagcggccccctgaaatacagcatttccgcatgagtgatgatgtccactcactgggaaaggtgacctcagatctggccaaaaggaggaagctgaactcaggaggtggcctgtcggaggagttaggttctgcccggcgttcaggagaagtgaccctgacgaaaggggaccccgggtccctggaggagtgggagacggtggtgggtgatgacttcagtctctactatgattcctactctgtggatgagcgcgtggactccgacagcaagtctgaagttgaagctctaactgaacaactaagtgaagaggaggaggaggaagaggaggaagaagaagaagaggaagaggaggaggaagaggaagaagaagaggaagatgaggagtcagggaatcagtcagataggagtggttccagtggccggcgcaaggccaagaagaaatggcgaaaagacagcccatgggtgaagccgtctcggaaacggcgcaagcgggagcctccgcgggccaaggagccacgaggggtgtccaatgacacatcttcgctggagacagagcgagggtttgaggagttgcccctgtgcagctgccgcatggaggcacccaagattgaccgcatcagcgagagggcggggcacaagtgcatggccactgagagtgtggacggagagctgtcaggctgcaatgccgccatcctcaagcgggagaccatgaggccatccagccgtgtggccctgatggtgctctgtgagacccaccgcgcccgcatggtcaaacaccactgctgcccgggctgcggctacttctgcacggcgggcaccttcctggagtgccaccctgacttccgtgtggcccaccgcttccacaaggcctgtgtgtctcagctgaatgggatggtcttctgtccccactgtggggaggatgcttctgaagctcaagaggtgaccatcccccggggtgacggggtgaccccaccggccggcactgcagctcctgcacccccacccctgtcccaggatgtccccgggagagcagacacttctcagcccagtgcccggatgcgagggcatggggaaccccggcgcccgccctgcgatcccctggctgacaccattgacagctcagggccctccctgaccctgcccaatgggggctgcctttcagccgtggggctgccactggggccaggccgggaggccctggaaaaggccctggtcatccaggagtcagagaggcggaagaagctccgtttccaccctcggcagttgtacctgtccgtgaagcagggcgagctgcagaaggtgatcctgatgctgttggacaacctggaccccaacttccagagcgaccagcagagcaagcgcacgcccctgcatgcagccgcccagaagggctccgtggagatctgccatgtgctgctgcaggctggagccaacataaatgcagtggacaaacagcagcggacgccactgatggaggccgtggtgaacaaccacctggaggtagcccgttacatggtgcagcgtggtggctgtgtctatagcaaggaggaggacggttccacctgcctccaccacgcagccaaaatcgggaacttggagatggtcagcctgctgctgagcacaggacaggtggacgtcaacgcccaggacagtggggggtggacgcccatcatctgggctgcagagcacaagcacatcgaggtgatccgcatgctactgacgcggggcgccgacgtcaccctcactgacaacgaggagaacatctgcctgcactgggcctccttcacgggcagcgccgccatcgccgaagtccttctgaatgcgcgctgtgacctccatgctgtcaactaccatggggacacccccctgcacatcgcagctcgggagagctaccatgactgcgtgctgttattcctgtcacgtggggccaaccctgagctgcggaacaaagagggggacacagcatgggacctgactcccgagcgctccgacgtgtggtttgcgcttcaactcaaccgcaagctccgacttggggtgggaaatcgggccatccgcacagagaagatcatctgccgggacgtggctcggggctatgagaacgtgcccattccctgtgtcaacggtgtggatggggagccctgccctgaggattacaagtacatctcagagaactgcgagacgtccaccatgaacatcgatcgcaacatcacccacctgcagcactgcacgtgtgtggacgactgctctagctccaactgcctgtgcggccagctcagcatccggtgctggtatgacaaggatgggcgattgctccaggaatttaacaagattgagcctccgctgattttcgagtgtaaccaggcgtgctcatgctggagaaactgcaagaaccgggtcgtacagagtggcatcaaggtgcggctacagctctaccgaacagccaagatgggctggggggtccgcgccctgcagaccatcccacaggggaccttcatctgcgagtatgtcggggagctgatctctgatgctgaggctgatgtgagagaggatgattcttacctcttcgacttagacaacaaggatggagaggtgtactgcatagatgcccgttactatggcaacatcagccgcttcatcaaccacctgtgtgaccccaacatcattcccgtccgggtcttcatgctgcaccaagacctgcgatttccacgcatcgccttcttcagttcccgagacatccggactggggaggagctagggtttgactatggcgaccgcttctgggacatcaaaagcaaatatttcacctgccaatgtggctctgagaagtgcaagcactcagccgaagccattgccctggagcagagccgtctggcccgcctggacccacaccctgagctgctgcccgagctcggctccctgccccctgtcaacacatgagaacggaccacaccctctctccccagcatggatggccacagctcagccgcctcctctgccaccagctgctcgcagcccatgcctgggggtgctgccatcttctctccccaccaccctttcacacattcctgaccagagatcccagccaggccctggaggtctgacagcccctccctcccagagctggttcctccctgggagggcaacttcagggctggccaccccccgtgttccccatcctcagttgaagtttgatgaattgaagtcgggcctctatgccaactggttccttttgttctcaataaatgttgggtttggtaataaa

SEQ ID NO: 9920 - DNA, 4047 bp, Homo sapiens; identical to SEQ ID NO: 9902
  source 1..4047: mol_type = unassigned DNA

SEQ ID NO: 9921 - DNA, 3965 bp, Homo sapiens; identical to SEQ ID NO: 9904
  source 1..3965: mol_type = unassigned DNA

SEQ ID NO: 9922 - DNA, 894 bp, Homo sapiens; identical to SEQ ID NO: 9911
  source 1..894: mol_type = unassigned DNA

SEQ ID NO: 9923 - DNA, 4129 bp, Homo sapiens; identical to SEQ ID NO: 9907
  source 1..4129: mol_type = unassigned DNA

SEQ ID NO: 9924 - DNA, 2992 bp, Homo sapiens
  source 1..2992: mol_type = unassigned DNA
tctgaagttgaagctctaactgaacaactaagtgaagaggaggaggaggaagaggaggaagaagaagaagaggaagaggaggaggaagaggaagaagaagaggaagatgaggagtcagggaatcagtcagataggagtggttccagtggccggcgcaaggccaagaagaaatggcgaaaagacagcccatgggtgaagccgtctcggaaacggcgcaagcgggagcctccgcgggccaaggagccacgaggggtgtccaatgacacatcttcgctggagacagagcgagggtttgaggagttgcccctgtgcagctgccgcatggaggcacccaagattgaccgcatcagcgagagggcggggcacaagtgcatggccactgagagtgtggacggagagctgtcaggctgcaatgccgccatcctcaagcgggagaccatgaggccatccagccgtgtggccctgatggtgctctgtgagacccaccgcgcccgcatggtcaaacaccactgctgcccgggctgcggctacttctgcacggcgggcaccttcctggagtgccaccctgacttccgtgtggcccaccgcttccacaaggcctgtgtgtctcagctgaatgggatggtcttctgtccccactgtggggaggatgcttctgaagctcaagaggtgaccatcccccggggtgacggggtgaccccaccggccggcactgcagctcctgcacccccacccctgtcccaggatgtccccgggagagcagacacttctcagcccagtgcccggatgcgagggcatggggaaccccggcgcccgccctgcgatcccctggctgacaccattgacagctcagggccctccctgaccctgcccaatgggggctgcctttcagccgtggggctgccactggggccaggccgggaggccctggaaaaggccctggtcatccaggagtcagagaggcggaagaagctccgtttccaccctcggcagttgtacctgtccgtgaagcagggcgagctgcagaaggtgatcctgatgctgttggacaacctggaccccaacttccagagcgaccagcagagcaagcgcacgcccctgcatgcagccgcccagaagggctccgtggagatctgccatgtgctgctgcaggctggagccaacataaatgcagtggacaaacagcagcggacgccactgatggaggccgtggtgaacaaccacctggaggtagcccgttacatggtgcagcgtggtggctgtgtctatagcaaggaggaggacggttccacctgcctccaccacgcagccaaaatcgggaacttggagatggtcagcctgctgctgagcacaggacaggtggacgtcaacgcccaggacagtggggggtggacgcccatcatctgggctgcagagcacaagcacatcgaggtgatccgcatgctactgacgcggggcgccgacgtcaccctcactgacaacgaggagaacatctgcctgcactgggcctccttcacgggcagcgccgccatcgccgaagtccttctgaatgcgcgctgtgacctccatgctgtcaactaccatggggacacccccctgcacatcgcagctcgggagagctaccatgactgcgtgctgttattcctgtcacgtggggccaaccctgagctgcggaacaaagagggggacacagcatgggacctgactcccgagcgctccgacgtgtggtttgcgcttcaactcaaccgcaagctccgacttggggtgggaaatcgggccatccgcacagagaagatcatctgccgggacgtggctcggggctatgagaacgtgcccattccctgtgtcaacggtgtggatggggagccctgccctgaggattacaagtacatctcagagaactgcgagacgtccaccatgaacatcgatcgcaacatcacccacctgcagcactgcacgtgtgtggacgactgctctagctccaactgcctgtgcggccagctcagcatccggtgctggtatgacaaggatgggcgattgctccaggaatttaacaagattgagcctccgctgattttcgagtgtaaccaggcgtgctcatgctggagaaactgcaagaaccgggtcgtacagagtggcatcaaggtgcggctacagctctaccgaacagccaagatgggctggggggtccgcgccctgcagaccatcccacaggggaccttcatctgcgagtatgtcggggagctgatctctgatgctgaggctgatgtgagagaggatgattcttacctcttcgacttagacaacaaggatggagaggtgtactgcatagatgcccgttactatggcaacatcagccgcttcatcaaccacctgtgtgaccccaacatcattcccgtccgggtcttcatgctgcaccaagacctgcgatttccacgcatcgccttcttcagttcccgagacatccggactggggaggagctagggtttgactatggcgaccgcttctgggacatcaaaagcaaatatttcacctgccaatgtggctctgagaagtgcaagcactcagccgaagccattgccctggagcagagccgtctggcccgcctggacccacaccctgagctgctgcccgagctcggctccctgccccctgtcaacacatgagaacggaccacaccctctctccccagcatggatggccacagctcagccgcctcctctgccaccagctgctcgcagcccatgcctgggggtgctgccatcttctctccccaccaccctttcacacattcctgaccagagatcccagccaggccctggaggtctgacagcccctccctcccagagctggttcctccctgggagggcaacttcagggctggccaccccccgtgttccccatcctcagttgaagtttgatgaattgaagtcgggcctctatgccaactggttccttttgttctcaataaatgttgggtttggtaataaa

SEQ ID NO: 9925 - DNA, 3856 bp, Homo sapiens
  source 1..3856: mol_type = unassigned DNA
atggcggcggcggcgggagctgcagcggcggcggccgccgagggggaggcccccgctgagatgggggcgctgctgctggagaaggaaaccagaggagccaccgagagagttcatggctctttgggggacacccctcgtagtgaagaaaccctgcccaaggccaaccccgactccctggagcctgctggcccctcatctccagcctctgtcactgtcactgttggtgatgagggggctgacacccctgtaggggctacaccactcattggggatgaatctgagaatcttgagggagatggggacctccgtgggggccggatcctgctgggccatgccacaaagtcattcccctcttcccccagcaaggggggttcctgtcctagccgggccaagatgtcaatgacaggggcgggaaaatcacctccatctgtccagagtttggctatgaggctactgagtatgccaggagcccagggagctgcagcagcagggtctgaaccccctccagccaccacgagcccagagggacagcccaaggtccaccgagcccgcaaaaccatgtccaaaccaggaaatggacagcccccggtccctgagaagcggccccctgaaatacagcatttccgcatgagtgatgatgtccactcactgggaaaggtgacctcagatctggccaaaaggaggaagctgaactcaggaggtggcctgtcggaggagttaggttctgcccggcgttcaggagaagtgaccctgacgaaaggggaccccgggtccctggaggagtgggagacggtggtgggtgatgacttcagtctctactatgattcctactctgtggatgagcgcgtggactccgacagcaagtctgaagttgaagctctaactgaacaactaagtgaagaggaggaggaggaagaggaggaagaagaagaagaggaagaggaggaggaagaggaagaagaagaggaagatgaggagtcagggaatcagtcagataggagtggttccagtggccggcgcaaggccaagaagaaatggcgaaaagacagcccatgggtgaagccgtctcggaaacggcgcaagcgggagcctccgcgggccaaggagccacgaggggtgtccaatgacacatcttcgctggagacagagcgagggtttgaggagttgcccctgtgcagctgccgcatggaggcacccaagattgaccgcatcagcgagagggcggggcacaagtgcatggccactgagagtgtggacggagagctgtcaggctgcaatgccgccatcctcaagcgggagaccatgaggccatccagccgtgtggccctgatggtgctctgtgagacccaccgcgcccgcatggtcaaacaccactgctgcccgggctgcggctacttctgcacggcgggcaccttcctggagtgccaccctgacttccgtgtggcccaccgcttccacaaggcctgtgtgtctcagctgaatgggatggtcttctgtccccactgtggggaggatgcttctgaagctcaagaggtgaccatcccccggggtgacggggtgaccccaccggccggcactgcagctcctgcacccccacccctgtcccaggatgtccccgggagagcagacacttctcagcccagtgcccggatgcgagggcatggggaaccccggcgcccgccctgcgatcccctggctgacaccattgacagctcagggccctccctgaccctgcccaatgggggctgcctttcagccgtggggctgccactggggccaggccgggaggccctggaaaaggccctggtcatccaggagtcagagaggcggaagaagctccgtttccaccctcggcagttgtacctgtccgtgaagcagggcgagctgcagaaggtgatcctgatgctgttggacaacctggaccccaacttccagagcgaccagcagagcaagcgcacgcccctgcatgcagccgcccagaagggctccgtggagatctgccatgtgctgctgcaggctggagccaacataaatgcagtggacaaacagcagcggacgccactgatggaggccgtggtgaacaaccacctggaggtagcccgttacatggtgcagcgtggtggctgtgtctatagcaaggaggaggacggttccacctgcctccaccacgcagccaaaatcgggaacttggagatggtcagcctgctgctgagcacaggacaggtggacgtcaacgcccaggacagtggggggtggacgcccatcatctgggctgcagagcacaagcacatcgaggtgatccgcatgctactgacgcggggcgccgacgtcaccctcactgacaacgaggagaacatctgcctgcactgggcctccttcacgggcagcgccgccatcgccgaagtccttctgaatgcgcgctgtgacctccatgctgtcaactaccatggggacacccccctgcacatcgcagctcgggagagctaccatgactgcgtgctgttattcctgtcacgtggggccaaccctgagctgcggaacaaagagggggacacagcatgggacctgactcccgagcgctccgacgtgtggtttgcgcttcaactcaaccgcaagctccgacttggggtgggaaatcgggccatccgcacagagaagatcatctgccgggacgtggctcggggctatgagaacgtgcccattccctgtgtcaacggtgtggatggggagccctgccctgaggattacaagtacatctcagagaactgcgagacgtccaccatgaacatcgatcgcaacatcacccacctgcagcactgcacgtgtgtggacgactgctctagctccaactgcctgtgcggccagctcagcatccggtgctggtatgacaaggatgggcgattgctccaggaatttaacaagattgagcctccgctgattttcgagtgtaaccaggcgtgctcatgctggagaaactgcaagaaccgggtcgtacagagtggcatcaaggtgcggctacagctctaccgaacagccaagatgggctggggggtccgcgccctgcagaccatcccacaggggaccttcatctgcgagtatgtcggggagctgatctctgatgctgaggctgatgtgagagaggatgattcttacctcttcgacttagacaacaaggatggagaggtgtactgcatagatgcccgttactatggcaacatcagccgcttcatcaaccacctgtgtgaccccaacatcattcccgtccgggtcttcatgctgcaccaagacctgcgatttccacgcatcgccttcttcagttcccgagacatccggactggggaggagctagggtttgactatggcgaccgcttctgggacatcaaaagcaaatatttcacctgccaatgtggctctgagaagtgcaagcactcagccgaagccattgccctggagcagagccgtctggcccgcctggacccacaccctgagctgctgcccgagctcggctccctgccccctgtcaacacatgagaacggaccacaccctctctccccagcatggatggccacagctcagccgcctcctctgccaccagctgctcgcagcccatgcctgggggtgctgccatcttctctccccaccaccctttcacacattcctgaccagagatcccagccaggccctggaggtctgacagcccctccctcccagagctggttcctccctgggagggcaacttcagggctggccaccccccgtgttccccatcctcagttgaagtttgatgaattgaagtcgggcctctatgccaactggttccttttgttctcaataaatgttgggtttggtaataaa

SEQ ID NO: 9926 - DNA, 3415 bp, Homo sapiens
  source 1..3415: mol_type = unassigned DNA
tcatgccactgcactccatcctggcccccggtccctgagaagcggccccctgaaatacagcatttccgcatgagtgatgatgtccactcactgggaaaggtgacctcagatctggccaaaaggaggaagctgaactcaggaggtggcctgtcagaggagttaggttctgcccggcgttcaggagaagtgaccctgacgaaaggggaccccgggtccctggaggagtgggagacggtggtgggtgatgacttcagtctctactatgattcctactctgtggatgagcgcgtggactccgacagcaagtctgaagttgaagctctaactgaacaactaagtgaagaggaggaggaggaagaggaggaagaagaagaagaggaagaggaggaggaagaggaagaagaagaggaagatgaggagtcagggaatcagtcagataggagtggttccagtggccggcgcaaggccaagaagaaatggcgaaaagacagcccatgggtgaagccgtctcggaaacggcgcaagcgggagcctccgcgggccaaggagccacgaggagtgaatggtgtgggctcctcaggccccagtgagtacatggaggtccctctggggtccctggagctgcccagcgaggggaccctctcccccaaccacgctggggtgtccaatgacacatcttcgctggagacagagcgagggtttgaggagttgcccctgtgcagctgccgcatggaggcacccaagattgaccgcatcagcgagagggcggggcacaagtgcatggccactgagagtgtggacggagagctgtcaggctgcaatgccgccatcctcaagcgggagaccatgaggccatccagccgtgtggccctgatggtgctctgtgagacccaccgcgcccgcatggtcaaacaccactgctgcccgggctgcggctacttctgcacggcgggcaccttcctggagtgccaccctgacttccgtgtggcccaccgcttccacaaggcctgtgtgtctcagctgaatgggatggtcttctgtccccactgtggggaggatgcttctgaagctcaagaggtgaccatcccccggggtgacggggtgaccccaccggccggcactgcagctcctgcacccccacccctgtcccaggatgtccccgggagagcagacacttctcagcccagtgcccggatgcgagggcatggggaaccccggcgcccgccctgcgatcccctggctgacaccattgacagctcagggccctccctgaccctgcccaatgggggctgcctttcagccgtggggctgccactggggccaggccgggaggccctggaaaaggccctggtcatccaggagtcagagaggcggaagaagctccgtttccaccctcggcagttgtacctgtccgtgaagcagggcgagctgcagaaggtgatcctgatgctgttggacaacctggaccccaacttccagagcgaccagcagagcaagcgcacgcccctgcatgcagccgcccagaagggctccgtggagatctgccatgtgctgctgcaggctggagccaacataaatgcagtggacaaacagcagcggacgccactgatggaggccgtggtgaacaaccacctggaggtagcccgttacatggtgcagcgtggtggctgtgtctatagcaaggaggaggacggttccacctgcctccaccacgcagccaaaatcgggaacttggagatggtcagcctgctgctgagcacaggacaggtggacgtcaacgcccaggacagtggggggtggacgcccatcatctgggctgcagagcacaagcacatcgaggtgatccgcatgctactgacgcggggcgccgacgtcaccctcactgacaacgtgagtgagcgtttggttgaggaggagaacatctgcctgcactgggcctccttcacgggcagcgccgccatcgccgaagtccttctgaatgcgcgctgtgacctccatgctgtcaactaccatggggacacccccctgcacatcgcagctcgggagagctaccatgactgcgtgctgttattcctgtcacgtggggccaaccctgagctgcggaacaaagagggggacacagcatgggacctgactcccgagcgctccgacgtgtggtttgcgcttcaactcaaccgcaagctccgacttggggtgggaaatcgggccatccgcacagagaagatcatctgccgggacgtggctcggggctatgagaacgtgcccattccctgtgtcaacggtgtggatggggagccctgccctgaggattacaagtacatctcagagaactgcgagacgtccaccatgaacatcgatcgcaacatcacccacctgcagcactgcacgtgtgtggacgactgctctagctccaactgcctgtgcggccagctcagcatccggtgctggtatgacaaggatgggcgattgctccaggaatttaacaagattgagcctccgctgattttcgagtgtaaccaggcgtgctcatgctggagaaactgcaagaaccgggtcgtacagagtggcatcaaggtgcggctacagctctaccgaacagccaagatgggctggggggtccgcgccctgcagaccatcccacaggggaccttcatctgcgagtatgtcggggagctgatctctgatgctgaggctgatgtgagagaggatgattcttacctcttcgacttagacaacaaggatggagaggtgtactgcatagatgcccgttactatggcaacatcagccgcttcatcaaccacctgtgtgaccccaacatcattcccgtccgggtcttcatgctgcaccaagacctgcgatttccacgcatcgccttcttcagttcccgagacatccggactggggaggagctagggtttgactatggcgaccgcttctgggacatcaaaagcaaatatttcacctgccaatgtggctctgagaagtgcaagcactcagccgaagccattgccctggagcagagccgtctggcccgcctggacccacaccctgagctgctgcccgagctcggctccctgccccctgtcaacacatgagaacggaccacaccctctctccccagcatggatggccacagctcagccgcctcctctgccaccagctgctcgcagcccatgcctgggggtgctgccatcttctctccccaccaccctttcacacattcctgaccagagatcccagccaggccctggaggtctgacagcccctccctcccagagctggttcctccctgggagggcaacttcagggctggccaccccccgtgttccccatcctcagttgaagtttgatgaattgaagtcgggcctctatgccaactggttccttttgttctcaataaatgttgggtttggt

SEQ ID NO: 9927 - DNA, 4047 bp, Homo sapiens; identical to SEQ ID NO: 9902
  source 1..4047: mol_type = unassigned DNA

SEQ ID NO: 9928 - DNA, 4129 bp, Homo sapiens; identical to SEQ ID NO: 9910
  source 1..4129: mol_type = unassigned DNA

SEQ ID NO: 9929 - DNA, 894 bp, Homo sapiens; identical to SEQ ID NO: 9911
  source 1..894: mol_type = unassigned DNA

SEQ ID NO: 9930 - DNA, 894 bp, Homo sapiens; identical to SEQ ID NO: 9911
  source 1..894: mol_type = unassigned DNA

SEQ ID NO: 9931 - DNA, 3965 bp, Homo sapiens; identical to SEQ ID NO: 9904
  source 1..3965: mol_type = unassigned DNA

SEQ ID NO: 9932 - DNA, 3856 bp, Homo sapiens; identical to SEQ ID NO: 9903
  source 1..3856: mol_type = unassigned DNA

SEQ ID NO: 9933 - DNA, 4047 bp, Homo sapiens; identical to SEQ ID NO: 9919
  source 1..4047: mol_type = unassigned DNA

SEQ ID NO: 9934 - DNA, 894 bp, Homo sapiens; identical to SEQ ID NO: 9911
  source 1..894: mol_type = unassigned DNA

SEQ ID NO: 9935 - DNA, 3856 bp, Homo sapiens; identical to SEQ ID NO: 9925
  source 1..3856: mol_type = unassigned DNA

SEQ ID NO: 9936 - DNA, 2992 bp, Homo sapiens; identical to SEQ ID NO: 9924
  source 1..2992: mol_type = unassigned DNA

SEQ ID NO: 9937 - DNA, 3094 bp, Homo sapiens; identical to SEQ ID NO: 9918
  source 1..3094: mol_type = unassigned DNA

SEQ ID NO: 9938 - DNA, 3415 bp, Homo sapiens
  source 1..3415: mol_type = unassigned DNA
tcatgccactgcactccatccaggcccccggtccctgagaagcggccccctgaaatacagcatttccgcatgagtgatgatgtccactcactgggaaaggtgacctcagatctggccaaaaggaggaagctgaactcaggaggtggcctgtcggaggagttaggttctgcccggcgttcaggagaagtgaccctgacgaaaggggaccccgggtccctggaggagtgggagacggtggtgggtgatgacttcagtctctactatgattcctactctgtggatgagcgcgtggactccgacagcaagtctgaagttgaagctctaactgaacaactaagtgaagaggaggaggaggaagaggaggaagaagaagaagaggaagaggaggaggaagaggaagaagaagaggaagatgaggagtcagggaatcagtcagataggagtggttccagtggccggcgcaaggccaagaagaaatggcgaaaagacagcccatgggtgaagccgtctcggaaacggcgcaagcgggagcctccgcgggccaaggagccacgaggagtgaatggtgtgggctcctcaggccccagtgagtacatggaggtccctctggggtccctggagctgcccagcgaggggaccctctcccccaaccacgctggggtgtccaatgacacatcttcgctggagacagagcgagggtttgaggagttgcccctgtgcagctgccgcatggaggcacccaagattgaccgcatcagcgagagggcggggcacaagtgcatggccactgagagtgtggacggagagctgtcaggctgcaatgccgccatcctcaagcgggagaccatgaggccatccagccgtgtggccctgatggtgctctgtgagacccaccgcgcccgcatggtcaaacaccactgctgcccgggctgcggctacttctgcacggcgggcaccttcctggagtgccaccctgacttccgtgtggcccaccgcttccacaaggcctgtgtgtctcagctgaatgggatggtcttctgtccccactgtggggaggatgcttctgaagctcaagaggtgaccatcccccggggtgacggggtgaccccaccggccggcactgcagctcctgcacccccacccctgtcccaggatgtccccgggagagcagacacttctcagcccagtgcccggatgcgagggcatggggaaccccggcgcccgccctgcgatcccctggctgacaccattgacagctcagggccctccctgaccctgcccaatgggggctgcctttcagccgtggggctgccactggggccaggccgggaggccctggaaaaggccctggtcatccaggagtcagagaggcggaagaagctccgtttccaccctcggcagttgtacctgtccgtgaagcagggcgagctgcagaaggtgatcctgatgctgttggacaacctggaccccaacttccagagcgaccagcagagcaagcgcacgcccctgcatgcagccgcccagaagggctccgtggagatctgccatgtgctgctgcaggctggagccaacataaatgcagtggacaaacagcagcggacgccactgatggaggccgtggtgaacaaccacctggaggtagcccgttacatggtgcagcgtggtggctgtgtctatagcaaggaggaggacggttccacctgcctccaccacgcagccaaaatcgggaacttggagatggtcagcctgctgctgagcacaggacaggtggacgtcaacgcccaggacagtggggggtggacgcccatcatctgggctgcagagcacaagcacatcgaggtgatccgcatgctactgacgcggggcgccgacgtcaccctcactgacaacgtgagtgagcgtttggttgaggaggagaacatctgcctgcactgggcctccttcacgggcagcgccgccatcgccgaagtccttctgaatgcgcgctgtgacctccatgctgtcaactaccatggggacacccccctgcacatcgcagctcgggagagctaccatgactgcgtgctgttattcctgtcacgtggggccaaccctgagctgcggaacaaagagggggacacagcatgggacctgactcccgagcgctccgacgtgtggtttgcgcttcaactcaaccgcaagctccgacttggggtgggaaatcgggccatccgcacagagaagatcatctgccgggacgtggctcggggctatgagaacgtgcccattccctgtgtcaacggtgtggatggggagccctgccctgaggattacaagtacatctcagagaactgcgagacgtccaccatgaacatcgatcgcaacatcacccacctgcagcactgcacgtgtgtggacgactgctctagctccaactgcctgtgcggccagctcagcatccggtgctggtatgacaaggatgggcgattgctccaggaatttaacaagattgagcctccgctgattttcgagtgtaaccaggcgtgctcatgctggagaaactgcaagaaccgggtcgtacagagtggcatcaaggtgcggctacagctctaccgaacagccaagatgggctggggggtccgcgccctgcagaccatcccacaggggaccttcatctgcgagtatgtcggggagctgatctctgatgctgaggctgatgtgagagaggatgattcttacctcttcgacttagacaacaaggatggagaggtgtactgcatagatgcccgttactatggcaacatcagccgcttcatcaaccacctgtgtgaccccaacatcattcccgtccgggtcttcatgctgcaccaagacctgcgatttccacgcatcgccttcttcagttcccgagacatccggactggggaggagctagggtttgactatggcgaccgcttctgggacatcaaaagcaaatatttcacctgccaatgtggctctgagaagtgcaagcactcagccgaagccattgccctggagcagagccgtctggcccgcctggacccacaccctgagctgctgcccgagctcggctccctgccccctgtcaacacatgagaacggaccacaccctctctccccagcatggatggccacagctcagccgcctcctctgccaccagctgctcgcagcccatgcctgggggtgctgccatcttctctccccaccaccctttcacacattcctgaccagagatcccagccaggccctggaggtctgacagcccctccctcccagagctggttcctccctgggagggcaacttcagggctggccaccccccgtgttccccatcctcagttgaagtttgatgaattgaagtcgggcctctatgccaactggttccttttgttctcaataaatgttgggtttggt

SEQ ID NO: 9939 - DNA, 3415 bp, Homo sapiens; identical to SEQ ID NO: 9926
  source 1..3415: mol_type = unassigned DNA

SEQ ID NO: 9940 - DNA, 3415 bp, Homo sapiens
  source 1..3415: mol_type = unassigned DNA
tcatgccactgcactccatcctggcccccggtccctgagaagcggccccctgaaatacagcatttccgcatgagtgatgatgtccactcactgggaaaggtgacctcagatctggccaaaaggaggaagctgaactcaggaggtggcctgtcggaggagttaggttctgcccggcgttcaggagaagtgaccctgacgaaaggggaccccgggtccctggaggagtgggagacggtggtgggtgatgacttcagtctctactatgattcctactctgtggatgagcgcgtggactccgacagcaagtctgaagttgaagctctaactgaacaactaagtgaagaggaggaggaggaagaggaggaagaagaagaagaggaagaggaggaggaagaggaagaagaagaggaagatgaggagtcagggaatcagtcagataggagtggttccagtggccggcgcaaggccaagaagaaatggcgaaaagacagcccatgggtgaagccgtctcggaaacggcgcaagcgggagcctccgcgggccaaggagccacgaggagtgaatggtgtgggctcctcaggccccagtgagtacatggaggtccctctggggtccctggagctgcccagcgaggggaccctctcccccaaccacgctggggtgtccaatgacacatcttcgctggagacagagcgagggtttgaggagttgcccctgtgcagctgccgcatggaggcacccaagattgaccgcatcagcgagagggcggggcacaagtgcatggccactgagagtgtggacggagagctgtcaggctgcaatgccgccatcctcaagcgggagaccatgaggccatccagccgtgtggccctgatggtgctctgtgagacccaccgcgcccgcatggtcaaacaccactgctgcccgggctgcggctacttctgcacggcgggcaccttcctggagtgccaccctgacttccgtgtggcccaccgcttccacaaggcctgtgtgtctcagctgaatgggatggtcttctgtccccactgtggggaggatgcttctgaagctcaagaggtgaccatcccccggggtgacggggtgaccccaccggccggcactgcagctcctgcacccccacccctgtcccaggatgtccccgggagagcagacacttctcagcccagtgcccggatgcgagggcatggggaaccccggcgcccgccctgcgatcccctggctgacaccattgacagctcagggccctccctgaccctgcccaatgggggctgcctttcagccgtggggctgccactggggccaggccgggaggccctggaaaaggccctggtcatccaggagtcagagaggcggaagaagctccgtttccaccctcggcagttgtacctgtccgtgaagcagggcgagctgcagaaggtgatcctgatgctgttggacaacctggaccccaacttccagagcgaccagcagagcaagcgcacgcccctgcatgcagccgcccagaagggctccgtggagatctgccatgtgctgctgcaggctggagccaacataaatgcagtggacaaacagcagcggacgccactgatggaggccgtggtgaacaaccacctggaggtagcccgttacatggtgcagcgtggtggctgtgtctatagcaaggaggaggacggttccacctgcctccaccacgcagccaaaatcgggaacttggagatggtcagcctgctgctgagcacaggacaggtggacgtcaacgcccaggacagtggggggtggacgcccatcatctgggctgcagagcacaagcacatcgaggtgatccgcatgctactgacgcggggcgccgacgtcaccctcactgacaacgtgagtgagcgtttggttgaggaggagaacatctgcctgcactgggcctccttcacgggcagcgccgccatcgccgaagtccttctgaatgcgcgctgtgacctccatgctgtcaactaccatggggacacccccctgcacatcgcagctcgggagagctaccatgactgcgtgctgttattcctgtcacgtggggccaaccctgagctgcggaacaaagagggggacacagcatgggacctgactcccgagcgctccgacgtgtggtttgcgcttcaactcaaccgcaagctccgacttggggtgggaaatcgggccatccgcacagagaagatcatctgccgggacgtggctcggggctatgagaacgtgcccattccctgtgtcaacggtgtggatggggagccctgccctgaggattacaagtacatctcagagaactgcgagacgtccaccatgaacatcgatcgcaacatcacccacctgcagcactgcacgtgtgtggacgactgctctagctccaactgcctgtgcggccagctcagcatccggtgctggtatgacaaggatgggcgattgctccaggaatttaacaagattgagcctccgctgattttcgagtgtaaccaggcgtgctcatgctggagaaactgcaagaaccgggtcgtacagagtggcatcaaggtgcggctacagctctaccgaacagccaagatgggctggggggtccgcgccctgcagaccatcccacaggggaccttcatctgcgagtatgtcggggagctgatctctgatgctgaggctgatgtgagagaggatgattcttacctcttcgacttagacaacaaggatggagaggtgtactgcatagatgcccgttactatggcaacatcagccgcttcatcaaccacctgtgtgaccccaacatcattcccgtccgggtcttcatgctgcaccaagacctgcgatttccacgcatcgccttcttcagttcccgagacatccggactggggaggagctagggtttgactatggcgaccgcttctgggacatcaaaagcaaatatttcacctgccaatgtggctctgagaagtgcaagcactcagccgaagccattgccctggagcagagccgtctggcccgcctggacccacaccctgagctgctgcccgagctcggctccctgccccctgtcaacacatgagaacggaccacaccctctctccccagcatggatggccacagctcagccgcctcctctgccaccagctgctcgcagcccatgcctgggggtgctgccatcttctctccccaccaccctttcacacattcctgaccagagatcccagccaggccctggaggtctgacagcccctccctcccagagctggttcctccctgggagggcaacttcagggctggccaccccccgtgttccccatcctcagttgaagtttgatgaattgaagtcgggcctctatgccaactggttccttttgttctcaataaatgttgggtttggt

SEQ ID NO: 9941 - DNA, 3415 bp, Homo sapiens; identical to SEQ ID NO: 9938
  source 1..3415: mol_type = unassigned DNA

SEQ ID NO: 9942 - DNA, 3415 bp, Homo sapiens; identical to SEQ ID NO: 9926
  source 1..3415: mol_type = unassigned DNA

SEQ ID NO: 9943 - DNA, 5276 bp, Homo sapiens
  source 1..5276: mol_type = unassigned DNA
cccagcttcagcctcagctcccctccttcctggatcgagcgcccgcactcccggccctgcagccacccgagtcccgctcgctgtcgcctgcacgcgagtcccccctggcacgcgctcccacatcccgggatcgtcccaacggcccctgcgcccttcctgggatcactccgactgccccgcgcgccctgggatcggtccatctaccccgcgtggccccagctgcttgcccggagcgccagctagcgctccccgctctccgctccccggcactctcggggggcccgcccgccctgcaccctggagctccgggccgcgagcctctgccaactcctctggaccctcgcggccgtgggcagcggctgccgcgcctgtctgcccgagggaggaccttcgcctctgcatttgtccagtaactctggctgtgccggatactgcttgggtaaaacgggcaccccaggaacatggcagacgaagatctcatcttccgcctggaaggcgttgatggcggccagtccccccgagctggccatgatggtgattctgatggggacagcgacgatgaggaaggttacttcatctgccccatcacggatgacccaagctcgaaccagaatgtcaattccaaggttaataagtactacagcaacctaacaaaaagtgagcggtatagctccagcgggtccccggcaaactccttccacttcaaggaagcctggaagcacgcaatccagaaggccaagcacatgcccgacccctgggctgagttccacctggaagatattgccaccgaacgtgctactcgacacaggtacaacgccgtcaccggggaatggctggatgatgaagttctgatcaagatggcatctcagcccttcggccgaggagcaatgagggagtgcttccggacgaagaagctctccaacttcttgcatgcccagcagtggaagggcgcctccaactacgtggcgaagcgctacatcgagcccgtagaccgggatgtgtactttgaggacgtgcgtctacagatggaggccaagctctggggggaggagtataatcggcacaagccccccaagcaggtggacatcatgcagatgtgcatcatcgagctgaaggacagaccgggcaagcccctcttccacctggagcactacatcgagggcaagtacatcaagtacaactccaactctggctttgtccgcgatgacaacatccgcctgacgccgcaggccttcagccacttcacttttgagcgttccggccatcagctgatagtggtggacatccagggagttggggatctctacactgacccacagatccacacggagacgggcactgactttggagacggcaacctaggtgtccgcgggatggcgctcttcttctactctcatgcctgcaaccggatttgcgagagcatgggccttgctccctttgacctctcgccccgggagagggatgcagtgaatcagaacaccaagctgctgcaatcagccaagaccatcttgagaggaacagaggaaaaatgtgggagcccccaagtaaggaccctctctgggagccggccacccctgctccgtcccctttcagagaactctggagacgagaacatgagcgacgtgaccttcgactctctcccttcttccccatcttcggccacaccacacagccagaagctagaccacctccattggccagtgttcagtgacctcgataacatggcatccagagaccatgatcatctagacaaccaccgggagtctgagaatagtggggacagcggataccccagtgagaagcggggtgagctggatgaccctgagccccgagaacatggccactcatacagtaatcggaagtacgagtctgacgaagacagcctgggcagctctggacgggtatgtgtagagaagtggaatctcctcaactcctcccgcctccacctgccgagggcttcggccgtggccctggaagtgcaaaggcttaatgctctggacctcgaaaagaaaatcgggaagtccattttggggaaggtccatctggccatggtgcgctaccacgagggtgggcgcttctgcgagaagggcgaggagtgggaccaggagtcggctgtcttccacctggagcacgcagccaacctgggcgagctggaggccatcgtgggcctgggactcatgtactcgcagttgcctcatcacatcctagccgatgtctctctgaaggagacagaagagaacaaaaccaaaggatttgattacttactaaaggccgctgaagctggcgacaggcagtccatgatcctagtggcgcgagcttttgactctggccagaacctcagcccggacaggtgccaagactggctagaggccctgcactggtacaacactgccctggagatgacggactgtgatgagggcggtgagtacgacggaatgcaggacgagccccggtacatgatgctggccagggaggccgagatgctgttcacaggaggctacgggctggagaaggacccgcagagatcaggggacttgtatacccaggcagcagaggcagcgatggaagccatgaagggccgactggccaaccagtactaccaaaaggctgaagaggcctgggcccagatggaggagtaaccaggaaaatcactgccggctagtcccaagcaaacgggctaggaggaaagattaaaaaaacaacaacaacaacttatttagtttggggaggggaagcatttttaagtgtgttgtaaaatcaaattttatatttcattttttgactcttgaaaaatgtctttgctccttggcagctaccagcagagactctatagctgtctcttagggcagtattttggggaagtggggcttgaagaagcagcctaatgaaccaacataccgttttgtgtgtggttttttttgtttgtttgtttgtttgttttgagacagagtcttgctctgtcacccaggctggagtgcagtgacatgatcttagctcactgcaacctccgcctcctgggttcaagtgattctcctgcctcagcctcccaagtagctgggattactggtgcacaccaccacactcagctaatttttgcatttttagtagagatggggtttcaccatgttggccaggctggtctcgaactcctaacctcaggtgatccacctgcctcagcctcccaaagtgctgggattacaggtgtgagccaccatgcctgcccattttgtggttctattttcatttttatttctttttttttttttgtcacgagatataagaaagtgctttttgccttgaatggacaattttagggctgtgctcactagtcttttcaggctggactgaaatgtcgggcccatggagccctgtgttttgtgcatcgggatgagaaatgaagcacttcacgctggctttcctaagtcacggggcgtgtattgccgtggcttagtgcaaagcattctttctcagagcatttagaggcatgcgtggcattttttcagtgggtgtgagattgcacaatacccaggctcccttctactgtggggaagggcctgcatgttggctgttttttaaacttctagttcaatttccttccataatgctactgattttctggcatacagccgaattccatcttttaagcatgctttctacggtgggcttttcaaaacaggtttgagttttgtatgcacacgtttactacctctaactcctacatcagctagtgtggaagagggtgcacctcaaagcttttacacgtaaggacagcggcttggaatgtgagagccttttctccaagcagacccacactctgcatctcagtggcagctcccacaacgtgactgcaatgtctcttatacagtattccttggtgttttcttagtgtctggatgttcttacgtgaaatctgctccccagccctggtccttggcattttctgcttgaagctgggctgattttcttgtaatttacagcaggacgctttcagcagcagtctcttgggattttatctaagatgtttgaggatgagagggcaagaactataaacactcattaattctagtagtctccccatggccagacaatggcgattgttatttaatgagcttttcctttcaatggaattcagctctcacattagtatgatttcatttgatgtttcaaatagcaaagatgctaggtgcggtggctcccgcctgtaatctcagcactttgaggagggccaaggtgggaggattgcttgagctcaggacttcaagaccagcctgggtaaacatggcgagaccctgtctctaccaaaacaacaaaaaaaagacagactgctttgatcaaccctaaatgcaaaagcagcctatttttctttgtttaaaagtcaaaacataaaaaagcagagtataacatacaaaccattcttaactattcattaaaatgggtccttcaacaccttagtggggtttgttgttgttgcttatgcagagagattattttctttttattattttataatttttgaaatagagatggggtctcactgtgttgcccaggctggtctcgaactcctggacttaagtgagcctcccgcctcagtctcccaaagcgctgggattacaggcaggagccactgagcccagccaagacttcagtgttgactgctttggaggcacaaacccatgcaagcgttagttccaaagttcagtgtgtacccttaaatgaacaatgaagcaggtaaaattacccttgaaaaaaatcccttggaccacccataaatgacagtgactttttcaatatggactcatcatagccagttttccttttgaagttggaactgatcacccttttgtcatctgtaccagatcagtagttggcttgtgttacattttgtgtgtgtgtgtgcgtgttttaaaccagtgcatataaattgtatgttaaatgtaagtaactttaagttgacttatctcttcacagtaatcaagcctcacgtaattcatgctttttaaattcagccagccccccctctctgaaattttattatgtaaataatttgtgttccctgatcactcgtttaagttcttagttgtatgtcatctcttctctagcaggaattggcaaacttttttgtaaaggggtagaaagtgaagattttaggctttgcaggccatatagcctctgctgcaaatgctcagccctgctgttgtaatgtaaaagctgccacagacactacatgaacacgaatgagtgtggctggtgttccaataaaactttatttacacaaa

SEQ ID NO: 9944 - DNA, 2303 bp, Homo sapiens
  source 1..2303: mol_type = unassigned DNA
cgcagaggaagacgctctagggatttgtcccggactagcgagatggcaaggctgaggacgggaggctgattgagaggcgaaggtacaccctaatctcaatacaacctttggagctaagccagcaatggtagagggaagattctgcacgtcccttccaggcggcctccccgtcaccaccccccccaacccgccccgaccggagctgagagtaattcatacaaaaggactcgcccctgccttggggaatcccagggaccgtcgttaaactcccactaacgtagaacccagagatcgctgcgttcccgccccctcacccgcccgctctcgtcatcactgaggtggagaagagcatgcgtgaggctccggtgcccgtcagtgggcagagcgcacatcgcccacagtccccgagaagttggggggaggggtcggcaattgaaccggtgcctagagaaggtggcgcggggtaaactgggaaagtgatgtcgtgtactggctccgcctttttcccgagggtgggggagaaccgtatataagtgcagtagtcgccgtgaacgttctttttcgcaacgggtttgccgccagaacacaggtgtcgtgaaaactacccctaaaagccaaaatgggaaaggaaaagactcatatcaacattgtcgtcattggacacgtagattcgggcaagtccaccactactggccatctgatctataaatgcggtggcatcgacaaaagaaccattgaaaaatttgagaaggaggctgctgagatgggaaagggctccttcaagtatgcctgggtcttggataaactgaaagctgagcgtgaacgtggtatcaccattgatatctccttgtggaaatttgagaccagcaagtactatgtgactatcattgatgccccaggacacagagactttatcaaaaacatgattacagggacatctcaggctgactgtgctgtcctgattgttgctgctggtgttggtgaatttgaagctggtatctccaagaatgggcagacccgagagcatgcccttctggcttacacactgggtgtgaaacaactaattgtcggtgttaacaaaatggattccactgagccaccctacagccagaagagatatgaggaaattgttaaggaagtcagcacttacattaagaaaattggctacaaccccgacacagtagcatttgtgccaatttctggttggaatggtgacaacatgctggagccaagtgctaacatgccttggttcaagggatggaaagtcacccgtaaggatggcaatgccagtggaaccacgctgcttgaggctctggactgcatcctaccaccaactcgtccaactgacaagcccttgcgcctgcctctccaggatgtctacaaaattggtggtattggtactgttcctgttggccgagtggagactggtgttctcaaacccggtatggtggtcacctttgctccagtcaacgttacaacggaagtaaaatctgtcgaaatgcaccatgaagctttgagtgaagctcttcctggggacaatgtgggcttcaatgtcaagaatgtgtctgtcaaggatgttcgtcgtggcaacgttgctggtgacagcaaaaatgacccaccaatggaagcagctggcttcactgctcaggtgattatcctgaaccatccaggccaaataagcgccggctatgcccctgtattggattgccacacggctcacattgcatgcaagtttgctgagctgaaggaaaagattgatcgccgttctggtaaaaagctggaagatggccctaaattcttgaagtctggtgatgctgccattgttgatatggttcctggcaagcccatgtgtgttgagagcttctcagactatccacctttgggtcgctttgctgttcgtgatatgagacagacagttgcggtgggtgtcatcaaagcagtggacaagaaggctgctggagctggcaaggtcaccaagtctgcccagaaagctcagaaggctaaatgaatattatccctaatacctgccaccccactcttaatcagtggtggaagaacggtctcagaactgtttgtttcaattggccatttaagtttagtagtaaaagactggttaatgataacaatgcatcgtaaaaccttcagaaggaaaggagaatgttttgtggaccactttggttttcttttttgcgtgtggcagttttaagttattagtttttaaaatcagtactttttaatggaaacaacttgaccaaaaatttgtcacagaattttgagacccattaaaaaagttaaatgagaaa

SEQ ID NO: 9945 - DNA, 4441 bp, Homo sapiens
  source 1..4441: mol_type = unassigned DNA
gtttgccgccagaacacaggtaagtgccgtgtgtggttcccgcgggcctggcctctttacgggttatggcccttgcgtgccttgaattacttccacgcccctggctgcagtacgtgattcttgatcccgagcttcgggttggaagtgggtgggagagttcgaggccttgcgcttaaggagccccttcgcctcgtgcttgagttgaggcctggcttgggcgctggggccgccgcgtgcgaatctggtggcaccttcgcgcctgtctcgctgctttcgataagtctctagccatttaaaatttttgatgacctgctgcgacgctttttttctggcaagatagtcttgtaaatgcgggccaagatctgcacactggtatttcggtttttggggccgcgggcggcgacggggcccgtgcgtcccagcgcacatgttcggcgaggcggggcctgcgagcgcggccaccgagaatcggacgggggtagtctcaagctggccggcctgctctggtgcctggcctcgcgccgccgtgtatcgccccgccctgggcggcaaggctggcccggtcggcaccagttgcgtgagcggaaagatggccgcttcccggccctgctgcagggagctcaaaatggaggacgcggcgctcgggagagcgggcgggtgagtcacccacacaaaggaaaagggcctttccgtcctcagccgtcgcttcatgtgactccacggagtaccgggcgccgtccaggcacctcgattagttctcgagcttttggagtacgtcgtctttaggttggggggaggggttttatgcgatggagtttccccacactgagtgggtggagactgaagttaggccagcttggcacttgatgtaattctccttggaatttgccctttttgagtttggatcttggttcattctcaagcctcagacagtggttcaaagtttttttcttccatttcaggtgtcgtgaaaactacccctaaaagccaaaatgggaaaggaaaagactcatatcaacattgtcgtcattggacacgtagattcgggcaagtccaccactactggccatctgatctataaatgcggtggcatcgacaaaagaaccattgaaaaatttgagaaggaggctgctgagatgggaaagggctccttcaagtatgcctgggtcttggataaactgaaagctgagcgtgaacgtggtatcaccattgatatctccttgtggaaatttgagaccagcaagtactatgtgactatcattgatgccccaggacacagagactttatcaaaaacatgattacagggacatctcaggctgactgtgctgtcctgattgttgctgctggtgttggtgaatttgaagctggtatctccaagaatgggcagacccgagagcatgcccttctggcttacacactgggtgtgaaacaactaattgtcggtgttaacaaaatggattccactgagccaccctacagccagaagagatatgaggaaattgttaaggaagtcagcacttacattaagaaaattggctacaaccccgacacagtagcatttgtgccaatttctggttggaatggtgacaacatgctggagccaagtgctaacatgccttggttcaagggatggaaagtcacccgtaaggatggcaatgccagtggaaccacgctgcttgaggctctggactgcatcctaccaccaactcgtccaactgacaagcccttgcgcctgcctctccaggatgtctacaaaattggtggtattggtactgttcctgttggccgagtggagactggtgttctcaaacccggtatggtggtcacctttgctccagtcaacgttacaacggaagtaaaatctgtcgaaatgcaccatgaagctttgagtgaagctcttcctggggacaatgtgggcttcaatgtcaagaatgtgtctgtcaaggatgttcgtcgtggcaacgttgctggtgacagcaaaaatgacccaccaatggaagcagctggcttcactgctcaggtgattatcctgaaccatccaggccaaataagcgccggctatgcccctgtattggattgccacacggctcacattgcatgcaagtttgctgagctgaaggaaaagattgatcgccgttctggtaaaaagctggaagatggccctaaattcttgaagtctggtgatgctgccattgttgatatggttcctggcaagcccatgtgtgttgagagcttctcagactatccacctttgggtcgctttgctgttcgtgatatgagacagacagttgcggtgggtgtcatcaaagcagtggacaagaaggctgctggagctggcaaggtcaccaagtctgcccagaaagctcagaaggctaaatgaatattatccctaatacctgccaccccactcttaatcagtggtggaagaacggtctcagaactgtttgtttcaattggccatttaagtttagtagtaaaagactggttaatgataacaatgcatcgtaaaaccttcagaaggaaaggagaatgttttgtggaccactttggttttcttttttgcgtgtggcagttttaagttattagtttttaaaatcagtactttttaatggaaacaacttgaccaaaaatttgtcacagaattttgagacccattaaaaaagttaaatgagaaacctgtgtgttcctttggtcaacaccgagacatttaggtgaaagacatctaattctggttttacgaatctggaaacttcttgaaaatgtaattcttgagttaacacttctgggtggagaatagggttgttttccccccacataattggaaggggaaggaatatcatttaaagctatgggagggttgctttgattacaacactggagagaaatgcagcatgttgctgattgcctgtcactaaaacaggccaaaaactgagtccttgtgttgcatagaaagcttcatgttgctaaaccaatgttaagtgaatctttggaaacaaaatgtttccaaattactgggatgtgcatgttgaaacgtgggttaaaatgactgggcagtgaaagttgactatttgccatgacataagaaataagtgtagtggctagtgtacaccctatgagtggaagggtccattttgaagtcagtggagtaagctttatgccagtttgatggtttcacaagttctattgagtgctattcagaataggaacaaggttctaatagaaaaagatggcaatttgaagtagctataaaattagactaatctacattgcttttctcctgcagagtctaataccttttatgctttgataattagcagtttgtctacttggtcactaggaatgaaactacatggtaataggcttaacaggtgtaatagcccacttactcctgaatctttaagcatttgtgcatttgaaaaatgcttttcgcgatcttcctgctgggattacaggcatgagccactgtgcctgacctcccatatgtaaaagtgtctaaaggtttttttttggttataaaaggaaaatttttgcttaagtttgaaggataggtaaaattaaaggacatgctttctgtttgtgtgatggtttttaaaaattttttttaagatggagttcttgttgcccaggctagaatgcaatggcaaaatctcactgcaatctcctcctcctgggttcaagcaattctcctacttcagcctcccaagtagctgggattacaggcatgtgctaatttggtgtttttaatagagatgaggtttttccatgttggtcaggctggtctcaaactcctgaccttaggtgatcgcctcggcctcctaaagtgctggaattacaggcatgagccaccatgcctggccaggacatgtgttcttaaggacatgctaagcaggagttaaagcagcccaagagataaggcctcttaaagtgactggcaatgtgtattgctcaagattcaaaggtacttgaattggccatagacaagtctgtaatgaagtgttatcgttttccctcatctgagtctgaattagataaaatgccttcccatcagccagtgctctgaggtatcaagtctaaattgaactagagatttttgtccttagtttctttgctatctaatgtttacacaagtaaatagtctaagatttgctggatgacagaaaaaacaggtaaggcctttaatagatggccaatagatgccctgataatgaaagttgacacctgtaagatttaccagtagagaattcttgacatgcaaggaagcaagatttaactgaaaaattgttcccactggaagcaggaatgagtcagtttacttgcatatactgagattgagattaacttcctgtgaaacccagtgtcttagacaactgtggcttgagcaccacctgctggtattcattacaaacttgctcactacaataaatgaattttaagctttaa

SEQ ID NO: 9946 - DNA, 1923 bp, Homo sapiens
  source 1..1923: mol_type = unassigned DNA
cgttaaggaggcccccagtcccgacccttcgccccaagcccctcggggtccccgggcctggtactccttgccacacgggaggggcgcggaagccggggcggaggaggagccaaccccgggctgggctgagacccgcagaggaagacgctctagggatttgtcccggactagcgagatggcaaggctgaggacgggaggctgattgagaggcgaaggtgtcgtgaaaactacccctaaaagccaaaatgggaaaggaaaagactcatatcaacattgtcgtcattggacacgtagattcgggcaagtccaccactactggccatctgatctataaatgcggtggcatcgacaaaagaaccattgaaaaatttgagaaggaggctgctgagatgggaaagggctccttcaagtatgcctgggtcttggataaactgaaagctgagcgtgaacgtggtatcaccattgatatctccttgtggaaatttgagaccagcaagtactatgtgactatcattgatgccccaggacacagagactttatcaaaaacatgattacagggacatctcaggctgactgtgctgtcctgattgttgctgctggtgttggtgaatttgaagctggtatctccaagaatgggcagacccgagagcatgcccttctggcttacacactgggtgtgaaacaactaattgtcggtgttaacaaaatggattccactgagccaccctacagccagaagagatatgaggaaattgttaaggaagtcagcacttacattaagaaaattggctacaaccccgacacagtagcatttgtgccaatttctggttggaatggtgacaacatgctggagccaagtgctaacatgccttggttcaagggatggaaagtcacccgtaaggatggcaatgccagtggaaccacgctgcttgaggctctggactgcatcctaccaccaactcgtccaactgacaagcccttgcgcctgcctctccaggatgtctacaaaattggtggtattggtactgttcctgttggccgagtggagactggtgttctcaaacccggtatggtggtcacctttgctccagtcaacgttacaacggaagtaaaatctgtcgaaatgcaccatgaagctttgagtgaagctcttcctggggacaatgtgggcttcaatgtcaagaatgtgtctgtcaaggatgttcgtcgtggcaacgttgctggtgacagcaaaaatgacccaccaatggaagcagctggcttcactgctcaggtgattatcctgaaccatccaggccaaataagcgccggctatgcccctgtattggattgccacacggctcacattgcatgcaagtttgctgagctgaaggaaaagattgatcgccgttctggtaaaaagctggaagatggccctaaattcttgaagtctggtgatgctgccattgttgatatggttcctggcaagcccatgtgtgttgagagcttctcagactatccacctttgggtcgctttgctgttcgtgatatgagacagacagttgcggtgggtgtcatcaaagcagtggacaagaaggctgctggagctggcaaggtcaccaagtctgcccagaaagctcagaaggctaaatgaatattatccctaatacctgccaccccactcttaatcagtggtggaagaacggtctcagaactgtttgtttcaattggccatttaagtttagtagtaaaagactggttaatgataacaatgcatcgtaaaaccttcagaaggaaaggagaatgttttgtggaccactttggttttcttttttgcgtgtggcagttttaagttattagtttttaaaatcagtactttttaatggaaacaacttgaccaaaaatttgtcacagaattttgagacccattaaaaaagttaaat

SEQ ID NO: 9947 - DNA, 635 bp, Homo sapiens
  source 1..635: mol_type = unassigned DNA
gtaggactgagtctattctaaactgaaagcctggacatctggagtaccagggggagatgacgtgttacgggcttccataaaagcagctggctttgaatggaaggagccaagaggccagcacaggagcggattcgtcgctttcacggccatcgagccgaacctctcgcaagtgtcgtgaaaactacccctaaaagccaaaatgggaaaggaaaagactcatatcaacattgtcgtcattggacacgtagattcgggcaagtccaccactactggccatctgatctataaatgcggtggcatcgacaaaagaaccattgaaaaatttgagaaggaggctgctgagatgggaaagggctccttcaagtatgcctgggtcttggataaactgaaagctgagcgtgaacgtggtatcaccattgatatctccttgtggaaatttgagaccagcaagtactatgtgactatcattgatgccccaggacacagagactttatcaaaaacatgattacagggacatctcaggctgactgtgctgtcctgattgttgctgctggtgttggtgaatttgaagctggtatctccaagaatgggcagacccgagagcatgcccttctggcttacacactgggtgtga

SEQ ID NO: 9948 - DNA, 3459 bp, Homo sapiens
  source 1..3459: mol_type = unassigned DNA
ccctaaaagccaaaatgggaaaggaaaagactcatatcaacattgtcgtcattggacacgtagattcgggcaagtccaccactactggccatctgatctataaatgcggtggcatcgacaaaagaaccattgaaaaatttgagaaggaggctgctgagatgggaaagggctccttcaagtatgcctgggtcttggataaactgaaagctgagcgtgaacgtggtatcaccattgatatctccttgtggaaatttgagaccagcaagtactatgtgactatcattgatgccccaggacacagagactttatcaaaaacatgattacagggacatctcaggctgactgtgctgtcctgattgttgctgctggtgttggtgaatttgaagctggtatctccaagaatgggcagacccgagagcatgcccttctggcttacacactgggtgtgaaacaactaattgtcggtgttaacaaaatggattccactgagccaccctacagccagaagagatatgaggaaattgttaaggaagtcagcacttacattaagaaaattggctacaaccccgacacagtagcatttgtgccaatttctggttggaatggtgacaacatgctggagccaagtgctaacatgccttggttcaagggatggaaagtcacccgtaaggatggcaatgccagtggaaccacgctgcttgaggctctggactgcatcctaccaccaactcgtccaactgacaagcccttgcgcctgcctctccaggatgtctacaaaattggtggtattggtactgttcctgttccgagtggagactggtgttctcccggtatggtggtcacctttgctccagtcaacgttacaacggaagtaaaatctgtcgaaatgcaccatgaagctttgagtgaagctcttcctggggacaatgtgggcttcaatgtcaagaatgtgtctgtcaaggatgttcgtcgtggcaacgttgctggtgacagcaaaaatgacccaccaatggaagcagctggcttcactgctcaggtgattatcctgaaccatccaggccaaataagcgccggctatgcccctgtattggattgccacacggctcacattgcatgcaagtttgctgagctgaaggaaaagattgatcgccgttctggtaaaaagctggaagatggccctaaattcttgaagtctggtgatgctgccattgttgatatggttcctggcaagcccatgtgtgttgagagcttctcagactatccacctttgggtaagtcgctttgctgttcgtgatatgagacagacagttgcggtgggtgtcatcaaagcagtggacaagaaggctgctggagctggcaaggtcaccaagtctgcccagaaagctcagaaggctaaatgaatattatccctaatacctgccaccccactcttaatcagtggtggaagaacggtctcagaactgtttgtttcaattggccatttaagtttagtagtaaaagactggttaatgataacaatgcatcgtaaaaccttcagaaggaaaggagaatgttttgtggaccactttggttttcttttttgcgtgtggcagttttaagttattagtttttaaaatcagtactttttaatggaaacaacttgaccaaaaatttgtcacagaattttgagacccattaaaaaagttaaatgagaaacctgtgtgttcctttggtcaacaccgagacatttaggtgaaagacatctaattctggttttacgaatctggaaacttcttgaaaatgtaattcttgagttaacacttctgggtggagaatagggttgttttccccccacataattggaaggggaaggaatatcatttaaagctatgggagggttgctttgattacaacactggagagaaatgcagcatgttgctgattgcctgtcactaaaacaggccaaaaactgagtccttgtgttgcatagaaagcttcatgttgctaaaccaatgttaagtgaatctttggaaacaaaatgtttccaaattactgggatgtgcatgttgaaacgtgggttaaaatgactgggcagtgaaagttgactatttgccatgacataagaaataagtgtagtggctagtgtacaccctatgagtggaagggtccattttgaagtcagtggagtaagctttatgccagtttgatggtttcacaagttctattgagtgctattcagaataggaacaaggttctaatagaaaaagatggcaatttgaagtagctataaaattagactaatctacattgcttttctcctgcagagtctaataccttttatgctttgataattagcagtttgtctacttggtcactaggaatgaaactacatggtaataggcttaacaggtgtaatagcccacttactcctgaatctttaagcatttgtgcatttgaaaaatgcttttcgcgatcttcctgctgggattacaggcatgagccactgtgcctgacctcccatatgtaaaagtgtctaaaggtttttttttggttataaaaggaaaatttttgcttaagtttgaaggataggtaaaattaaaggacatgctttctgtttgtgtgatggtttttaaaaattttttttaagatggagttcttgttgcccaggctagaatgcaatggcaaaatctcactgcaatctcctcctcctgggttcaagcaattctcctacttcagcctcccaagtagctgggattacaggcatgtgctaatttggtgtttttaatagagatgaggtttttccatgttggtcaggctggtctcaaactcctgaccttaggtgatcgcctcggcctcctaaagtgctggaattacaggcatgagccaccatgcctggccaggacatgtgttcttaaggacatgctaagcaggagttaaagcagcccaagagataaggcctcttaaagtgactggcaatgtgtattgctcaagattcaaaggtacttgaattggccatagacaagtctgtaatgaagtgttatcgttttccctcatctgagtctgaattagataaaatgccttcccatcagccagtgctctgaggtatcaagtctaaattgaactagagatttttgtccttagtttctttgctatctaatgtttacacaagtaaatagtctaagatttgctggatgacagaaaaaacaggtaaggcctttaatagatggccaatagatgccctgataatgaaagttgacacctgtaagatttaccagtagagaattcttgacatgcaaggaagcaagatttaactgaaaaattgttcccactggaagcaggaatgagtcagtttacttgcatatactgagattgagattaacttcctgtgaaacccagtgtcttagacaactgtggcttgagcaccacctgctggtattcattacaaacttgctcactacaataaatgaattttaagcttt

SEQ ID NO: 9949 - DNA, 1635 bp, Homo sapiens
  source 1..1635: mol_type = unassigned DNA
caggtgtcgtgaaaactacccctaaaagccaaaatgggaaaggaaaagactcatatcaacattgtcgtcattggacacgtagattcgggcaagtccaccactactggccatctgatctataaatgcggtggcatcgacaaaagaaccattgaaaaatttgagaaggaggctgctgagatgggaaagggctccttcaagtatgcctgggtcttggataaactgaaagctgagcgtgaacgtggtatcaccattgatatctccttgtggaaatttgagaccagcaagtactatgtgactatcattgatgccccaggacacagagactttatcaaaaacatgattacagggacatctcaggctgactgtgctgtcctgattgttgctgctggtgttggtgaatttgaagctggtatctccaagaatgggcagacccgagagcatgcccttctggcctacagccagaagagatatgaggaaattgttaaggaagtcagcacttacattaagaaaattggctacaaccccgacacagtagcatttgtgccaatttctggttggaatggtgacaacatgctggagccaagtgctaacatgccttggttcaagggatggaaagtcacccgtaaggatggcaatgccagtggaaccacgctgcttgaggctctggactgcatcctaccaccaactcgtccaactgacaagcccttgcgcctgcctctccaggatgtctacaaaattggtggtattggtactgttcctgttggccgagtggagactggtgttctcaaacccggtatggtggtcacctttgctccagtcaacgttacaacggaagtaaaatctgtcgaaatgcaccatgaagctttgagtgaagctcttcctggggacaatgtgggcttcaatgtcaagaatgtgtctgtcaaggatgttcgtcgtggcaacgttgctggtgacagcaaaaatgacccaccaatggaagcagctggcttcactgctcaggtgattatcctgaaccatccaggccaaataagcgccggctatgcccctgtattggattgccacacggctcacattgcatgcaagtttgctgagctgaaggaaaagattgatcgccgttctggtaaaaagctggaagatggccctaaattcttgaagtctggtgatgctgccattgttgatatggttcctggcaagcccatgtgtgttgagagcttctcagactatccacctttgggtcgctttgctgttcgtgatatgagacagacagttgcggtgggtgtcatcaaagcagtggacaagaaggctgctggagctggcaaggtcaccaagtctgcccagaaagctcagaaggctaaatgaatattatccctaatacctgccaccccactcttaatcagtggtggaagaacggtctcagaactgtttgtttcaattggccatttaagtttagtagtaaaagactggttaatgataacaatgcatcgtaaaaccttcagaaggaaaggagaatgttttgtggaccactttggttttcttttttgcgtgtggcagttttaagttattagtttttaaaatcagtactttttaatggaaacaacttgaccaaaaatttgtcacagaattttgagacccatt

SEQ ID NO: 9950 - DNA, 701 bp, Homo sapiens
  source 1..701: mol_type = unassigned DNA
ctgacgctgcggaggctcgagcggcgtatccataccacccagctgttcgccgcgggaacccgccggcccgcaggtgacccagcgctggaaaaacgccagcgacgtggcctggcgagctggcgcggggcaaggaccacccgcgcccgccttgccgccccagcctccctccctaggaagcagggtgcgccccggtgcgcgcggggcttccccggaccggcgttccagtccctctccggcttccggcccaccccggccccactgagagcagaaatgtgatctctgccctgagaaaatgctcgtggccagtgactacccctaacgcacaataatatggctccgatgggctcaaaggtgtcgtgaaaactacccctaaaagccaaaatgggaaaggaaaagactcatatcaacattgtcgtcattggacacgtagattcgggcaagtccaccactactggccatctgatctataaatgcggtggcatcgacaaaagaaccattgaaaaatttgagaaggaggctgctgagatgggaaagggctccttcaagtatgcctgggtcttggataaactgaaagctgagcgtgaacgtggtatcaccattgatatctccttgtggaaatttgagaccagcaagtactatgtgactatcattgatgccccaggacacagagactttatcaaaaacatgattacagggacatc

SEQ ID NO: 9951 - DNA, 1328 bp, Homo sapiens
  source 1..1328: mol_type = unassigned DNA
gtttgccgccagaacacaggtaagtgccgtgtgtggttcccgcgggcctggcctctttacgggttatggcccttgcgtgccttgaattacttccacgcccctggctgcagtacgtgattcttgatcccgagcttcgggttggaagtgggtgggagagttcgaggccttgcgcttaaggagccccttcgcctcgtgcttgagttgaggcctggcttgggcgctggggccgccgcgtgcgaatctggtggcaccttcgcgcctgtctcgctgctttcgataagtctctagccatttaaaatttttgatgacctgctgcgacgctttttttctggcaagatagtcttgtaaatgcgggccaagatctgcacactggtatttcggtttttggggccgcgggcggcgacggggcccgtgcgtcccagcgcacatgttcggcgaggcggggcctgcgagcgcggccaccgagaatcggacgggggtagtctcaagctggccggcctgctctggtgcctggcctcgcgccgccgtgtatcgccccgccctgggcggcaaggctggcccggtcggcaccagttgcgtgagcggaaagatggccgcttcccggccctgctgcagggagctcaaaatggaggacgcggcgctcgggagagcgggcgggtgagtcacccacacaaaggaaaagggcctttccgtcctcagccgtcgcttcatgtgactccacggagtaccgggcgccgtccaggcacctcgattagttctcgagcttttggagtacgtcgtctttaggttggggggaggggttttatgcgatggagtttccccacactgagtgggtggagactgaagttaggccagcttggcacttgatgtaattctccttggaatttgccctttttgagtttggatcttggttcattctcaagcctcagacagtggttcaaagtttttttcttccatttcaggtgtcgtgaaaactacccctaaaagccaaaatgggaaaggaaaagactcatatcaacattgtcgtcattggacacgtagattcgggcaagtccaccactactggccatctgatctataaatgcggtggcatcgacaaaagaaccattgaaaaatttgagaaggaggctgctgagatgggaaagggctccttcaagtatgcctgggtcttggataaactgaaagctgagcgtgaacgtggtatcaccattgatatctccttgtggaaatttgagaccacaaagcagtggacaagaaggctgctggagctggcaaggtcaccaagtctgcccagaaagctcagaaggctaaatgaatattatccctaa

SEQ ID NO: 9952 - DNA, 1843 bp, Homo sapiens
  source 1..1843: mol_type = unassigned DNA
actgcgccgccaccgtcaataggtggaccccctcccggagataaaaccgccggcgccggcgccgccagtccctctggctgagacctcggctccggaatcactgcagcccccctcgccctgagccagagcaccccgggtcccgccagcccctcacactcccagcaaaatgggcaaggagaagacccacatcaacatcgtggtcatcggccacgtggactccggaaagtccaccaccacgggccacctcatctacaaatgcggaggtattgacaaaaggaccattgagaagttcgagaaggaggcggctgagatggggaagggatccttcaagtatgcctgggtgctggacaagctgaaggcggagcgtgagcgcggcatcaccatcgacatctccctctggaagttcgagaccaccaagtactacatcaccatcatcgatgcccccggccaccgcgacttcatcaagaacatgatcacgggtacatcccaggcggactgcgcagtgctgatcgtggcggcgggcgtgggcgagttcgaggcgggcatctccaagaatgggcagacgcgggagcatgccctgctggcctacacgctgggtgtgaagcagctcatcgtgggcgtgaacaaaatggactccacagagccggcctacagcgagaagcgctacgacgagatcgtcaaggaagtcagcgcctacatcaagaagatcggctacaacccggccaccgtgccctttgtgcccatctccggctggcacggtgacaacatgctggagccctcccccaacatgccgtggttcaagggctggaaggtggagcgtaaggagggcaacgcaagcggcgtgtccctgctggaggccctggacaccatcctgccccccacgcgccccacggacaagcccctgcgcctgccgctgcaggacgtgtacaagattggcggcattggcacggtgcccgtgggccgggtggagaccggcatcctgcggccgggcatggtggtgacctttgcgccagtgaacatcaccactgaggtgaagtcagtggagatgcaccacgaggctctgagcgaagctctgcccggcgacaacgtcggcttcaatgtgaagaacgtgtcggtgaaggacatccggcggggcaacgtgtgtggggacagcaagtctgacccgccgcaggaggctgctcagttcacctcccaggtcatcatcctgaaccacccggggcagattagcgccggctactccccggtcatcgactgccacacagcccacatcgcctgcaagtttgcggagctgaaggagaagattgaccggcgctctggcaagaagctggaggacaaccccaagtccctgaagtctggagacgcggccatcgtggagatggtgccgggaaagcccatgtgtgtggagagcttctcccagtacccgcctctcggccgcttcgccgtgcgcgacatgaggcagacggtggccgtaggcgtcatcaagaacgtggagaagaagagcggcggcgccggcaaggtcaccaagtcggcgcagaaggcgcagaaggcgggcaagtgaagcgcgggcgcccgcggcgcgaccctccccggcggtgccgcgctccgaaccccgggcccgggcccccgccccgcccccgccccgcgcgccggtccggcgccccgcacccccgccaggcgcatgtctgcacctccgcttgccagaggccctcggtcagcgactggatgctcgccatcaaggtccagtggaagttcttcaagaggaaaggcgcccccgccccaggcttccgcgcccagcgctcgccacgctcagtgcccgttttaccaataaactgagcgaccccag

SEQ ID NO: 9953 - DNA, 1748 bp, Homo sapiens
  source 1..1748: mol_type = unassigned DNA
aatcactgcagcccccctcgccctgagccagagcaccccgggtcccgccagcccctcacactcccagcaaaatgggcaaggagaagacccacatcaacatcgtggtcatcggccacgtggactccggaaagtccaccaccacgggccacctcatctacaaatgcggaggtattgacaaaaggaccattgagaagttcgagaaggaggcggctgagatggggaagggatccttcaagtatgcctgggtgctggacaagctgaaggcggagcgtgagcgcggcatcaccatcgacatctccctctggaagttcgagaccaccaagtactacatcaccatcatcgatgcccccggccaccgcgacttcatcaagaacatgatcacgggtacatcccaggcggactgcgcagtgctgatcgtggcggcgggcgtgggcgagttcgaggcgggcatctccaagaatgggcagacgcgggagcatgccctgctggcctacacgctgggtgtgaagcagctcatcgtgggcgtgaacaaaatggactccacagagccggcctacagcgagaagcgctacgacgagatcgtcaaggaagtcagcgcctacatcaagaagatcggctacaacccggccaccgtgccctttgtgcccatctccggctggcacggtgacaacatgctggagccctcccccaacatgccgtggttcaagggctggaaggtggagcgtaaggagggcaacgcaagcggcgtgtccctgctggaggccctggacaccatcctgccccccacgcgccccacggacaagcccctgcgcctgccgctgcaggacgtgtacaagattggcggcattggcacggtgcccgtgggccgggtggagaccggcatcctgcggccgggcatggtggtgacctttgcgccagtgaacatcaccactgaggtgaagtcagtggagatgcaccacgaggctctgagcgaagctctgcccggcgacaacgtcggcttcaatgtgaagaacgtgtcggtgaaggacatccggcggggcaacgtgtgtggggacagcaagtctgacccgccgcaggaggctgctcagttcacctcccaggtcatcatcctgaaccacccggggcagattagcgccggctactccccggtcatcgactgccacacagcccacatcgcctgcaagtttgcggagctgaaggagaagattgaccggcgctctggcaagaagctggaggacaaccccaagtccctgaagtctggagacgcggccatcgtggagatggtgccgggaaagcccatgtgtgtggagagcttctcccagtacccgcctctcggccgcttcgccgtgcgcgacatgaggcagacggtggccgtaggcgtcatcaagaacgtggagaagaagagcggcggcgccggcaaggtcaccaagtcggcgcagaaggcgcagaaggcgggcaagtgaagcgcgggcgcccgcggcgcgaccctccccggcggtgccgcgctccgaaccccgggcccgggcccccgccccgcccccgccccgcgcgccggtccggcgccccgcacccccgccaggcgcatgtctgcacctccgcttgccagaggccctcggtcagcgactggatgctcgccatcaaggtccagtggaagttcttcaagaggaaaggcgcccccgccccaggcttccgcgcccagcgctcgccacgctcagtgcccgttttaccaataaactgagcgaccccag

SEQ ID NO: 9954 - DNA, 844 bp, Homo sapiens
  source 1..844: mol_type = unassigned DNA
cgcagttccgccggaagtggccccagcctcgaggccgggcgtcttcggtcatctccggcgcttctagggctggttcccgtcatcttcgggagccgtggagctctcggatacagccgacaccatgggtttcggagacctgaaaagccctgccggcctccaggtgctcaacgattacctggcggacaagagctacatcgaggggtatgtgccatcacaagcagatgtggcagtatttgaagccgtgtccagcccaccgcctgccgacttgtgtcatgccctacgttggtataatcacatcaagtcttacgaaaaggaaaaggccagcctgccaggagtgaagaaagctttgggcaaatatggtcctgccgatgtggaagacactacaggaagtggagctacagatagtaaagatgatgatgacattgacctctttggatctgatgatgaggaggaaagtgaagaagcaaagaggctaagggaagaacgtcttgcacaatatgaatcaaagaaagccaaaaaacctgcacttgttgccaagtcttccatcttactagatgtgaaaccttgggatgatgagacagatatggcgaaattagaggagtgcgtcagaagcattcaagcagacggcttagtctggggctcatctaaactagttccagtgggatacggaattaagaaacttcaaatacagtgtgtagttgaagatgataaagttggaacagatatgctggaggagcagatcactgcttttgaggactatgtgcagtccatggatgtggctgctttcaacaagatctaaaatccatcctggatcatggcatttaaataaaagattgaaagatta

SEQ ID NO: 9955 - DNA, 880 bp, Homo sapiens
  source 1..880: mol_type = unassigned DNA
gccggaagtggccccagcctcgaggccgggcgtcttcggtcatctccggcgcttctagggctggttcccgtcatcttcgggagccgtggagcgtggggcgcccacaatttgcgcgctctctttctgctgctccccagctctcggatacagccgacaccatgggtttcggagacctgaaaagccctgccggcctccaggtgctcaacgattacctggcggacaagagctacatcgaggggtatgtgccatcacaagcagatgtggcagtatttgaagccgtgtccagcccaccgcctgccgacttgtgtcatgccctacgttggtataatcacatcaagtcttacgaaaaggaaaaggccagcctgccaggagtgaagaaagctttgggcaaatatggtcctgccgatgtggaagacactacaggaagtggagctacagatagtaaagatgatgatgacattgacctctttggatctgatgatgaggaggaaagtgaagaagcaaagaggctaagggaagaacgtcttgcacaatatgaatcaaagaaagccaaaaaacctgcacttgttgccaagtcttccatcttactagatgtgaaaccttgggatgatgagacagatatggcgaaattagaggagtgcgtcagaagcattcaagcagacggcttagtctggggctcatctaaactagttccagtgggatacggaattaagaaacttcaaatacagtgtgtagttgaagatgataaagttggaacagatatgctggaggagcagatcactgcttttgaggactatgtgcagtccatggatgtggctgctttcaacaagatctaaaatccatcctggatcatggcatttaaataaaagattgaaagatt

SEQ ID NO: 9956 - DNA, 1098 bp, Homo sapiens
  source 1..1098: mol_type = unassigned DNA
ccccagcctcgaggccgggcgtcttcggtcatctccggcgcttctagggctggttcccgtcatcttcgggagccgtggaggtacgaacttaagacatgcctattttattaatttacttccaaacgcaacgaaaggtccatggacaatttgtgggccatttaattcagggcccccaattcgtacgtggagaagtgggaatgcaaaagtactttgacctttaaccttcggtccggcgcggtggagggaaacgcctccgtctctatataaggaattttccggtctcttcgggtcctttttcctctcttcagcgtggggcgcccacaatttgcgcgctctctttctgctgctccccagctctcggatacagccgacaccatgggtttcggagacctgaaaagccctgccggcctccaggtgctcaacgattacctggcggacaagagctacatcgaggggtatgtgccatcacaagcagatgtggcagtatttgaagccgtgtccagcccaccgcctgccgacttgtgtcatgccctacgttggtataatcacatcaagtcttacgaaaaggaaaaggccagcctgccaggagtgaagaaagctttgggcaaatatggtcctgccgatgtggaagacactacaggaagtggagctacagatagtaaagatgatgatgacattgacctctttggatctgatgatgaggaggaaagtgaagaagcaaagaggctaagggaagaacgtcttgcacaatatgaatcaaagaaagccaaaaaacctgcacttgttgccaagtcttccatcttactagatgtgaaaccttgggatgatgagacagatatggcgaaattagaggagtgcgtcagaagcattcaagcagacggcttagtctggggctcatctaaactagttccagtgggatacggaattaagaaacttcaaatacagtgtgtagttgaagatgataaagttggaacagatatgctggaggagcagatcactgcttttgaggactatgtgcagtccatggatgtggctgctttcaacaagatctaaaatccatcctggatcatggcatttaaataaaagattgaaagatta

SEQ ID NO: 9957 - DNA, 515 bp, Homo sapiens
  source 1..515: mol_type = unassigned DNA
ccagcctcgaggccgggcgtcttcggtcatctccggcgcttctagggctggttcccgtcatcttcgggagccgtggagcgtggggcgcccacaatttgcgcgctctctttctgctgctccccagctctcggatacagccgacaccatgggtttcggagacctgaaaagccctgccggcctccaggtgctcaacgattacctggcggacaagagctacatcgaggggtatgtgccatcacaagcagatgtggcagtatttgaagccgtgtccagcccaccgcctgccgacttgtgtcatgccctacgttggtataatcacatcaagtcttacgaaaaggaaaaggccagcctgccaggagtgaagaaagctttgggcaaatatggtcctgccgatgtggaagacactacaggaagtggagctacagatagtaaagatgatgatgacattgacctctttggatctgatgatgaggaggaaagtgaagaagcaaagaggctaagggaagaacgtcttg

SEQ ID NO: 9958 - DNA, 1179 bp, Homo sapiens
  source 1..1179: mol_type = unassigned DNA
ttggagggcgtccgcgggacgggggcgccgggagcactgtctcacggcgcatcccggtcgtggaagcccctcggccaggctgctggggcctaaggcctgtgtttgctgccgtctccgtgggagaccagacatctgccccagctgtttctctggcctgcagaccttcgtacaccacgtctttgtcaagcaccagttactgcacgcatcagctgagcacggaggggataggcacggacgcaacacttttggaacttagacgctacagaaaaatggctacaaacttcctagcacatgagaagatctggttcgacaagttcaaatatgacgacgcagaaaggagattctacgagcagatgaacgggcctgtggcaggtgcctcccgccaggagaacggcgccagcgtgatcctccgtgacattgcgagagccagagagaacatccagaaatccctggctggaagctcaggccccggggcctccagcggcaccagcggagaccacggtgagctcgtcgtccggattgccagtctggaagtggagaaccagagtctgcgtggcgtggtacaggagctgcagcaggccatctccaagctggaggcccggctgaacgtgctggagaagagctcgcctggccaccgggccacggccccacagacccagcacgtatctcccatgcgccaagtggagcccccagccaagaagccagccacaccagcagaggatgacgaggatgatgacattgacctgtttggcagtgacaatgaggaggaggacaaggaggcggcacagctgcgggaggagcggctacggcagtacgcggagaagaaggccaagaagcctgcactggtggccaagtcctccatcctgctggatgtcaagccttgggatgatgagacggacatggcccagctggaggcctgtgtgcgctctatccagctggacgggctggtctggggggcttccaagctggtgcccgtgggctacggtatccggaagctacagattcagtgtgtggtggaggacgacaaggtggggacagacttgctggaggaggagatcaccaagtttgaggagcacgtgcagagtgtcgatatcgcagctttcaacaagatctgaagcctgagtgtgtgtacgtgcgcgcgtgcgtgaggccctgccacgattaaagactgagaccggc

SEQ ID NO: 9959 - DNA, 2044 bp, Homo sapiens
  source 1..2044: mol_type = unassigned DNA
cttggtcgccgcgtccttggctggcgtgtgtccggaagatgaggagcgggaaggcctcctgcaccctggagaccgtgtgggaagacaagcacaagtatgaggaggccgagcggcgcttctacgaacacgaggccacacaggcggccgcctccgcccagcagctgccagccgaggggccagccatgaatgggcccggccaggacgaccctgaggacgctgatgaggcggaagcccctgacggcggcagcaggcgtgatcccaggaagagccaggacagcaggaagcccctgcagaaaaagaggaagcgctcccccaagagcgggctcggccccgcggacctggccctcctgggcctctcggccgaacgcgtgtggctggacaagtcacttttcgaccaggcagagagctcctaccgccagaagctggcagatgtggctgcccaggcagcctggcctcctgccttggccccttggggtctctgcacccatggaaaccaggtggcctgccaccacgtgacctgggggatctgggtcaacaagtcctccttcgaccaggctgagcgggccttcgtggagtggtctcaggccctgttgctggcccccgacggcagccgcaggcaggggactcccaacacaggccagcaggtggccgtccccgacctggcccaccagcccagcccaccggtcaatggccagcccccgctgggcagcctgcaggcactggttcgggaggtgtggctggagaagccccggtatgatgcagccgagaggggcttctacgaggccctgtttgacggccatcccccagggaaggtgcgcctgcaagagcgagccggcctggccgagggtgcccggcggggccgcagagaccggcggggccgcaacatcttagggaacaagcgggccgggctgcgacgggccgatggggaggccccctctgccttgccctactgttacttcctgcagaaggatgcagaggccccctggctcagcaagcctgcctacgacagcgccgagtgccgccaccacgctgccgaggccctgcgggtggcctggtgcctcgaagctgcctccctgtctcaccgacccggtcctcggtctggcctgtccgtgtccagcctgagacccaacagaaaaatggctacaaacttcctagcacatgagaagatctggttcgacaagttcaaatatgacgacgcagaaaggagattctacgagcagatgaacgggcctgtggcaggtgcctcccgccaggagaacggcgccagcgtgatcctccgtgacattgcgagagccagagagaacatccagaaatccctggctggaagctcaggccccggggcctccagcggcaccagcggagaccacggtgagctcgtcgtccggattgccagtctggaagtggagaaccagagtctgcgtggcgtggtacaggagctgcagcaggccatctccaagctggaggcccggctgaacgtgctggagaagagctcgcctggccaccgggccacggccccacagacccagcacgtatctcccatgcgccaagtggagcccccagccaagaagccagccacaccagcagaggatgacgaggatgatgacattgacctgtttggcagtgacaatgaggaggaggacaaggaggcggcacagctgcgggaggagcggctacggcagtacgcggagaagaaggccaagaagcctgcactggtggccaagtcctccatcctgctggatgtcaagccttgggatgatgagacggacatggcccagctggaggcctgtgtgcgctctatccagctggacgggctggtctggggggcttccaagctggtgcccgtgggctacggtatccggaagctacagattcagtgtgtgggaggacgacaaggtggggacagacttgctggaggaggagatcaccaagtttgaggagcacgtgcagagtgtcgatatcgcagctttcaacaagatctgaagcctgagtgtgtgtacgtgcgcgcgtgcgtgaggccctgccacgattaaagactgagaccggc

SEQ ID NO: 9960 - DNA, 2133 bp, Homo sapiens
  source 1..2133: mol_type = unassigned DNA
ccctttcatcagtcttcccgcgtccgccgattcctcctccttggtcgccgcgtccttggctggcgttagagacagggtttcaacgtgttagccaggatggtctcagtctccagaccctgtgatccgcccgcctcggcctcccaaagtgttgggattacaggtgtgagccaccgtgcctggccgaggctccttcttttatgaggagcgggaaggcctcctgcaccctggagaccgtgtgggaagacaagcacaagtatgaggaggccgagcggcgcttctacgaacacgaggccacacaggcggccgcctccgcccagcagctgccagccgaggggccagccatgaatgggcccggccaggacgaccctgaggacgctgatgaggcggaagcccctgacggcggcagcaggcgtgatcccaggaagagccaggacagcaggaagcccctgcagaaaaagaggaagcgctcccccaagagcgggctcggccccgcggacctggccctcctgggcctctcggccgaacgcgtgtggctggacaagtcacttttcgaccaggcagagagctcctaccgccagaagctggcagatgtggctgcccaggcagcctggcctcctgccttggccccttggggtctctgcacccatggaaaccaggtggcctgccaccacgtgacctgggggatctgggtcaacaagtcctccttcgaccaggctgagcgggccttcgtggagtggtctcaggccctgttgctggcccccgacggcagccgcaggcaggggactcccaacacaggccagcaggtggccgtccccgacctggcccaccagcccagcccaccggtcaatggccagcccccgctgggcagcctgcaggcactggttcgggaggtgtggctggagaagccccggtatgatgcagccgagaggggcttctacgaggccctgtttgacggccatcccccagggaaggtgcgcctgcaagagcgagccggcctggccgagggtgcccggcggggccgcagagaccggcggggccgcaacatcttagggaacaagcgggccgggctgcgacgggccgatggggaggccccctctgccttgccctactgttacttcctgcagaaggatgcagaggccccctggctcagcaagcctgcctacgacagcgccgagtgccgccaccacgctgccgaggccctgcgggtggcctggtgcctcgaagctgcctccctgtctcaccgacccggtcctcggtctggcctgtccgtgtccagcctgagacccaacagaaaaatggctacaaacttcctagcacatgagaagatctggttcgacaagttcaaatatgacgacgcagaaaggagattctacgagcagatgaacgggcctgtggcaggtgcctcccgccagagctcaggccccggggcctccagcggcaccagcggagaccacggtgagctcgtcgtccggattgccagtctggaagtggagaaccagagtctgcgtggcgtggtacaggagctgcagcaggccatctccaagctggaggcccggctgaacgtgctggagaagagctcgcctggccaccgggccacggccccacagacccagcacgtatctcccatgcgccaagtggagcccccagccaagaagccagccacaccagcagaggatgacgaggatgatgacattgacctgtttggcagtgacaatgaggaggaggacaaggaggcggcacagctgcgggaggagcggctacggcagtacgcggagaagaaggccaagaagcctgcactggtggccaagtcctccatcctgctggatgtcaagccttgggatgatgagacggacatggcccagctggaggcctgtgtgcgctctatccagctggacgggctggtctggggggcttccaagctggtgcccgtgggctacggtatccggaagctacagattcagtgtgtggtggaggacgacaaggtggggacagacttgctggaggaggagatcaccaagtttgaggagcacgtgcagagtgtcgatatcgcagctttcaacaagatctgaagcctgagtgtgtgtacgtgcgcgcgtgcgtgaggccctgccacgattaaagactgagaccggc

SEQ ID NO: 9961 - DNA, 1249 bp, Homo sapiens
  source 1..1249: mol_type = unassigned DNA
cggcgacaccactggccgcgaagcgcagggggggcgcgcgcgctgccgcccgttcccagcacttgtgcagactcctccggggaagagcggcctccgcggtcatctccaacggaattctgcctttgaagtgtcggggcacggcgcgtcgagggtcctggcggccaggcggggcgtgtgcaagggtcgcgtcccccccccgggcccccggcccgtggctcttggtagagcccagtgcttcatttcccgtgcgcggcccgggcggccctccctttcatcagtcttcccgcgtccgccgattcctcctccttggtcgccgcgtccttggctggcgtcagaaaaatggctacaaacttcctagcacatgagaagatctggttcgacaagttcaaatatgacgacgcagaaaggagattctacgagcagatgaacgggcctgtggcaggtgcctcccgccaggagaacggcgccagcgtgatcctccgtgacattgcgagagccagagagaacatccagaaatccctggctggaagctcaggccccggggcctccagcggcaccagcggagaccacggtgagctcgtcgtccggattgccagtctggaagtggagaaccagagtctgcgtggcgtggtacaggagctgcagcaggccatctccaagctggaggcccggctgaacgtgctggagaagagctcgcctggccaccgggccacggccccacagacccagcacgtatctcccatgcgccaagtggagcccccagccaagaagccagccacaccagcagaggatgacgaggatgatgacattgacctgtttggcagtgacaatgaggaggaggacaaggaggcggcacagctgcgggaggagcggctacggcagtacgcggagaagaaggccaagaagcctgcactggtggccaagtcctccatcctgctggatgtcaagccttgggatgatgagacggacatggcccagctggaggcctgtgtgcgctctatccagctggacgggctggtctggggggcttccaagctggtgcccgtgggctacggtatccggaagctacagattcagtgtgtggtggaggacgacaaggtggggacagacttgctggaggaggagatcaccaagtttgaggagcacgtgcagagtgtcgatatcgcagctttcaacaagatctgaagcctgagtgtgtgtacgtgcgcgcgtgcgtgaggccctgccacgattaaagactgagaccggc

SEQ ID NO: 9962 - DNA, 1452 bp, Homo sapiens
  source 1..1452: mol_type = unassigned DNA
gacaccactggccgcgaagcgcagggggggcgcgcgcgctgccgcccgttcccagcacttgtgcagactcctccggggaagagcggcctccgcggtcatctccaacggaattctgcctttgaagtgtcggggcacggcgcgtcgagggtcctggcggccaggcggggcgtgtgcaagggtcgcgtcccccccccgggcccccggcccgtggctcttggtagagcccagtgcttcatttcccgtgcgcggcccgggcggccctccctttcatcagtcttcccgcgtccgccgattcctcctccttggtcgccgcgtccttggctggcgtaaagctcctcctgagcttggataaactgcaggagcgaaggggctgaccgtttgtcgggacgcagttgaaagagtcgctgtgtcctgctccgggctctcctgctggagaggagaggcttgcacgtgcctgtcgtctgcgcaagctttgaagctcagacttggtctctgttaggagagatgaaaaatggctacaaacttcctagcacatgagaagatctggttcgacaagttcaaatatgacgacgcagaaaggagattctacgagcagatgaacgggcctgtggcaggtgcctcccgccaggagaacggcgccagcgtgatcctccgtgacattgcgagagccagagagaacatccagaaatccctggctggaagctcaggccccggggcctccagcggcaccagcggagaccacggtgagctcgtcgtccggattgccagtctggaagtggagaaccagagtctgcgtggcgtggtacaggagctgcagcaggccatctccaagctggaggcccggctgaacgtgctggagaagagctcgcctggccaccgggccacggccccacagacccagcacgtatctcccatgcgccaagtggagcccccagccaagaagccagccacaccagcagaggatgacgaggatgatgacattgacctgtttggcagtgacaatgaggaggaggacaaggaggcggcacagctgcgggaggagcggctacggcagtacgcggagaagaaggccaagaagcctgcactggtggccaagtcctccatcctgctggatgtcaagccttgggatgatgagacggacatggcccagctggaggcctgtgtgcgctctatccagctggacgggctggtctggggggcttccaagctggtgcccgtgggctacggtatccggaagctacagattcagtgtgtggtggaggacgacaaggtggggacagacttgctggaggaggagatcaccaagtttgaggagcacgtgcagagtgtcgatatcgcagctttcaacaagatctgaagcctgagtgtgtgtacgtgcgcgcgtgcgtgaggccctgccacgattaaagactgagaccggccctctggctccgtcctggtcatttcctgctc

SEQ ID NO: 9963 - DNA, 2350 bp, Homo sapiens
  source 1..2350: mol_type = unassigned DNA
gacaccactggccgcgaagcgcagggggggcgcgcgcgctgccgcccgttcccagcacttgtgcagactcctccggggaagagcggcctccgcggtcatctccaacggaattctgcctttgaagtgtcggggcacggcgcgtcgagggtcctggcggccaggcggggcgtgtgcaagggtcgcgtcccccccccgggcccccggcccgtggctcttggtagagcccagtgcttcatttcccgtgcgcggcccgggcggccctccctttcatcagtcttcccgcgtccgccgattcctcctccttggtcgccgcgtccttggctggcgtgaggccaaagcaaaatgaggagcgggaaggcctcctgcaccctggagaccgtgtgggaagacaagcacaagtatgaggaggccgagcggcgcttctacgaacacgaggccacacaggcggccgcctccgcccagcagctgccagccgaggggccagccatgaatgggcccggccaggacgaccctgaggacgctgatgaggcggaagcccctgacggcggcagcaggcgtgatcccaggaagagccaggacagcaggaagcccctgcagaaaaagaggaagcgctcccccaagagcgggctcggccccgcggacctggccctcctgggcctctcggccgaacgcgtgtggctggacaagtcacttttcgaccaggcagagagctcctaccgccagaagctggcagatgtggctgcccaggcagcctggcctcctgccttggccccttggggtctctgcacccatggaaaccaggtggcctgccaccacgtgacctgggggatctgggtcaacaagtcctccttcgaccaggctgagcgggccttcgtggagtggtctcaggccctgttgctggcccccgacggcagccgcaggcaggggactcccaacacaggccagcaggtggccgtccccgacctggcccaccagcccagcccaccggtcaatggccagcccccgctgggcagcctgcaggcactggttcgggaggtgtggctggagaagccccggtatgatgcagccgagaggggcttctacgaggccctgtttgacggccatcccccagggaaggtgcgcctgcaagagcgagccggcctggccgagggtgcccggcggggccgcagagaccggcggggccgcaacatcttagggaacaagcgggccgggctgcgacgggccgatggggaggccccctctgccttgccctactgttacttcctgcagaaggatgcagaggccccctggctcagcaagcctgcctacgacagcgccgagtgccgccaccacgctgccgaggccctgcgggtggcctggtgcctcgaagctgcctccctgtctcaccgacccggtcctcggtctggcctgtccgtgtccagcctgagacccaacagaaaaatggctacaaacttcctagcacatgagaagatctggttcgacaagttcaaatatgacgacgcagaaaggagattctacgagcagatgaacgggcctgtggcaggtgcctcccgccaggagaacggcgccagcgtgatcctccgtgacattgcgagagccagagagaacatccagaaatccctggctggaagctcaggccccggggcctccagcggcaccagcggagaccacggtgagctcgtcgtccggattgccagtctggaagtggagaaccagagtctgcgtggcgtggtacaggagctgcagcaggccatctccaagctggaggcccggctgaacgtgctggagaagagctcgcctggccaccgggccacggccccacagacccagcacgtatctcccatgcgccaagtggagcccccagccaagaagccagccacaccagcagaggatgacgaggatgatgacattgacctgtttggcagtgacaatgaggaggaggacaaggaggcggcacagctgcgggaggagcggctacggcagtacgcggagaagaaggccaagaagcctgcactggtggccaagtcctccatcctgctggatgtcaagccttgggatgatgagacggacatggcccagctggaggcctgtgtgcgctctatccagctggacgggctggtctggggggcttccaagctggtgcccgtgggctacggtatccggaagctacagattcagtgtgtggtggaggacgacaaggtggggacagacttgctggaggaggagatcaccaagtttgaggagcacgtgcagagtgtcgatatcgcagctttcaacaagatctgaagcctgagtgtgtgtacgtgcgcgcgtgcgtgaggccctgccacgattaaagactgagaccggc

SEQ ID NO: 9964 - DNA, 2207 bp, Homo sapiens
  source 1..2207: mol_type = unassigned DNA
ctccctttcatcagtcttcccgcgtccgccgattcctcctccttggtcgccgcgtccttggctggcgttagagacagggtttcaacgtgttagccaggatggtctcagtctccagaccctgtgatccgcccgcctcggcctcccaaagtgttgggattacaggtgtgagccaccgtgcctggccgaggctccttcttttatgaggagcgggaaggcctcctgcaccctggagaccgtgtgggaagacaagcacaagtatgaggaggccgagcggcgcttctacgaacacgaggccacacaggcggccgcctccgcccagcagctgccagccgaggggccagccatgaatgggcccggccaggacgaccctgaggacgctgatgaggcggaagcccctgacggcggcagcaggcgtgatcccaggaagagccaggacagcaggaagcccctgcagaaaaagaggaagcgctcccccaagagcgggctcggccccgcggacctggccctcctgggcctctcggccgaacgcgtgtggctggacaagtcacttttcgaccaggcagagagctcctaccgccagaagctggcagatgtggctgcccaggcagcctggcctcctgccttggccccttggggtctctgcacccatggaaaccaggtggcctgccaccacgtgacctgggggatctgggtcaacaagtcctccttcgaccaggctgagcgggccttcgtggagtggtctcaggccctgttgctggcccccgacggcagccgcaggcaggggactcccaacacaggccagcaggtggccgtccccgacctggcccaccagcccagcccaccggtcaatggccagcccccgctgggcagcctgcaggcactggttcgggaggtgtggctggagaagccccggtatgatgcagccgagaggggcttctacgaggccctgtttgacggccatcccccagggaaggtgcgcctgcaagagcgagccggcctggccgagggtgcccggcggggccgcagagaccggcggggccgcaacatcttagggaacaagcgggccgggctgcgacgggccgatggggaggccccctctgccttgccctactgttacttcctgcagaaggatgcagaggccccctggctcagcaagcctgcctacgacagcgccgagtgccgccaccacgctgccgaggccctgcgggtggcctggtgcctcgaagctgcctccctgtctcaccgacccggtcctcggtctggcctgtccgtgtccagcctgagacccaacagaaaaatggctacaaacttcctagcacatgagaagatctggttcgacaagttcaaatatgacgacgcagaaaggagattctacgagcagatgaacgggcctgtggcaggtgcctcccgccaggagaacggcgccagcgtgatcctccgtgacattgcgagagccagagagaacatccagaaatccctggctggaagctcaggccccggggcctccagcggcaccagcggagaccacggtgagctcgtcgtccggattgccagtctggaagtggagaaccagagtctgcgtggcgtggtacaggagctgcagcaggccatctccaagctggaggcccggctgaacgtgctggagaagagctcgcctggccaccgggccacggccccacagacccagcacgtatctcccatgcgccaagtggagcccccagccaagaagccagccacaccagcagaggatgacgaggatgatgacattgacctgtttggcagtgacaatgaggaggaggacaaggaggcggcacagctgcgggaggagcggctacggcagtacgcggagaagaaggccaagaagcctgcactggtggccaagtcctccatcctgctggatgtcaagccttgggatgatgagacggacatggcccagctggaggcctgtgtgcgctctatccagctggacgggctggtctggggggcttccaagctggtgcccgtgggctacggtatccggaagctacagattcagtgtgtggtggaggacgacaaggtggggacagacttgctggaggaggagatcaccaagtttgaggagcacgtgcagagtgtcgatatcgcagctttcaacaagatctgaagcctgagtgtgtgtacgtgcgcgcgtgcgtgaggccctgccacgattaaagactgagaccggc

SEQ ID NO: 9965 - DNA, 1084 bp, Homo sapiens
  source 1..1084: mol_type = unassigned DNA
ctccctttcatcagtcttcccgcgtccgccgattcctcctccttggtcgccgcgtccttggctggcgtgggatgacggagtgacgtcacctgtgtggactcagctgccacctgggattgtggtggcggcgggtctgtctggcgctcagcttccatctccaccagtgtcacctccacaccacctcgccaagcagcttctggaaaggcccccggccgccccgggctgacctgctgctgtgtctgacccgcagaaaaatggctacaaacttcctagcacatgagaagatctggttcgacaagttcaaatatgacgacgcagaaaggagattctacgagcagatgaacgggcctgtggcaggtgcctcccgccagagctcaggccccggggcctccagcggcaccagcggagaccacggtgagctcgtcgtccggattgccagtctggaagtggagaaccagagtctgcgtggcgtggtacaggagctgcagcaggccatctccaagctggaggcccggctgaacgtgctggagaagagctcgcctggccaccgggccacggccccacagacccagcacgtatctcccatgcgccaagtggagcccccagccaagaagccagccacaccagcagaggatgacgaggatgatgacattgacctgtttggcagtgacaatgaggaggaggacaaggaggcggcacagctgcgggaggagcggctacggcagtacgcggagaagaaggccaagaagcctgcactggtggccaagtcctccatcctgctggatgtcaagccttgggatgatgagacggacatggcccagctggaggcctgtgtgcgctctatccagctggacgggctggtctggggggcttccaagctggtgcccgtgggctacggtatccggaagctacagattcagtgtgtggtggaggacgacaaggtggggacagacttgctggaggaggagatcaccaagtttgaggagcacgtgcagagtgtcgatatcgcagctttcaacaagatctgaagcctgagtgtgtgtacgtgcgcgcgtgcgtgaggccctgccacgattaaagactg

SEQ ID NO: 9966 - DNA, 828 bp, Homo sapiens
  source 1..828: mol_type = unassigned DNA
gctctgttgtccaggctggagtgcagtggcgccatctcggttcactgcaagctccgcctcccggcttcacgccattctcctgcctcagcctccctaggagctgggactacaggcgcctgccaccacgcccggctaatttttatttttatttttagtagagacagggtttcaacgtgttagccaggatggtctcagtctccagaccctgtgatccgcccgcctcggcctcccaaagtgttgggattacaggtgtgagccaccgtgcctggccgaggctccttcttttatgaggagcgggaaggcctcctgcaccctggagaccgtgtgggaagacaagcacaagtatgaggaggccgagcggcgcttctacgaacacgaggccacacaggcggccgcctccgcccagcagctgccagccgaggggccagccatgaatgggcccggccaggacgaccctgaggacgctgatgaggcggaagcccctgacggcggcagcaggcgtgatcccaggaagagccaggacagcaggaagcccctgcagaaaaagaggaagcgctcccccaagagcgggctcggccccgcggacctggccctcctgggcctctcggccgaacgcgtgtggctggacaagtcacttttcgaccaggcagagagctcctaccgccagaagctggcagatgtggctgcccaggcagcctggcctcctgccttggccccttggggtctctgcacccatggaaaccaggtggcctgccaccacgtgacctgggggatctgggtcaacaagtcctccttcgaccaggctgagcgggccttcgtggagtggtc

SEQ ID NO: 9967 - DNA, 343 bp, Homo sapiens
  source 1..343: mol_type = unassigned DNA
ctttcatcagtcttcccgcgtccgccgattcctcctccttggtcgccgcgtccttggctggcgtagacagggtttcaacgtgttagccaggatggtctcagtctccagaccctgtgatccgcccgcctcggcctcccaaagtgttgggattacagatgaggagcgggaaggcctcctgcaccctggagaccgtgtgggaagacaagcacaagtatgaggaggccgagcggcgcttctacgaacacgaggccacacaggcggccgcctccgcccagcagctgccagccgaggggccagccatgaatgggcccggccaggacgaccctgaggacgctgatgaggc

SEQ ID NO: 9968 - DNA, 610 bp, Homo sapiens
  source 1..610: mol_type = unassigned DNA
ccagggaaggtgcgcctgcaagagcgagccggcctggccgagggtgcccggcggggccgcagagaccggcggggccgcaacatcttagggaacaagcgggccgggctgcgacgggccgatggggaggccccctctgccttgccctactgttacttcctgcagaaggatgcagaggccccctggctcagcaagcctgcctacgacagcgccgagtgccgccaccacgctgccgaggccctgcgggtggcctggtgcctcgaagctgcctccctgtctcaccgacccggtcctcggtctggcctgtccgtgtccagcctgagacccaagtaggagaaacgtgctgggtgggcacccagcctgggctgtgggcacagggacagccatcccaggctggggctcctccagcttcctcccctgcccacctggggtgggggctccccgagacccgtgggcccagcagagttgaatgcaggagcaggctgagtaaagaaaaatggctacaaacttcctagcacatgagaagatctggttcgacaagttcaaatatgacgacgcagaaaggagattctacgagcagatgaacgggcctgtggcaggtgcctcccgccag

SEQ ID NO: 9969 - DNA, 559 bp, Homo sapiens
  source 1..559: mol_type = unassigned DNA
ctccctttcatcagtcttcccgcgtccgccgattcctcctccttggtcgccgcgtccttggctggcgtgggatgacggagtgacgtcacctgtgtggactcagctgccacctgggattgtggtggcggcgggtctgtctggcgctcagcttccatctccaccagtgtcacctccacaccacctcgccaagcagcttctggaaaggcccccggccgccccgggctgacctgctgctgtgtctgacccggttagtctttctggctgcctctaaccttgctgcttttccttcatgctgtcctaggaggccaaagcaaaatgaggagcgggaaggcctcctgcaccctggagaccgtgtgggaagacaagcacaagtatgaggaggccgagcggcgcttctacgaacacgaggccacacaggcggccgcctccgcccagcagctgccagccgaggggccagccatgaatgggcccggccaggacgaccctgaggacgctgatgaggcggaagcccctgacggcggcagcaggcgtgatcccaggaagagccaggacagcagga

SEQ ID NO: 9970 - DNA, 367 bp, Homo sapiens
  source 1..367: mol_type = unassigned DNA
gggagcactgtctcacggcgcatcccggtcgtggaagcccctcggccaggctgctggggcctaaggcctgtgtttgctgccgtctccgtgggagaccagacatctgccccagctgtttctctggcctgcagaccttcgtacaccacgtctttgtcaagcaccagttactgcacgcatcagctgagcacggaggggataggcacggacgcaacacttttggaacttagacgctagtgagcacggaaaggaataagcctatgaggagcgggaaggcctcctgcaccctggagaccgtgtgggaagacaagcacaagtatgaggaggccgagcggcgcttctacgaacacgaggccacacaggcggccgc

SEQ ID NO: 9971 - DNA, 535 bp, Homo sapiens
  source 1..535: mol_type = unassigned DNA
gggatgacggagtgacgtcacctgtgtggactcagctgccacctgggattgtggtggcggcgggtctgtctggcgctcagcttccatctccaccagtgtcacctccacaccacctcgccaagcagcttctggaaaggcccccggccgccccgggctgacctgctgctgtgtctgacccggttagtctttctggctgcctctaaccttgctgcttttccttcatgctgtcctaggaggccaaagcaaaagacagggtttcaacgtgttagccaggatggtctcagtctccagaccctgtgatccgcccgcctcggcctcccaaagtgttgggattacaggtgtgagccaccgtgcctggccgaggctccttcttttatgaggagcgggaaggcctcctgcaccctggagaccgtgtgggaagacaagcacaagtatgaggaggccgagcggcgcttctacgaacacgaggccacacaggcggccgcctccgcccagcagctgccagccgaggggccagccatgaatgggcccggcc

SEQ ID NO: 9972 - DNA, 770 bp, Homo sapiens
  source 1..770: mol_type = unassigned DNA
cgtccgccgattcctcctccttggtcgccgcgtccttggctggcgtatgtgtggagacctccaggccgtgcagcaccttggtggccacagctctccaggatgtcctcaccttcctcagggccctgccctcctgacctggagtgttctggaaagctcctcctgagcttggataaactgcaggagcgaaggggctgaccgtttgtcgggacgcagttgaaagagtcgctgtgtcctgctccgggctctcctgctggagaggagaggcttgcacgtgcctgtcgtctgcgcaagctttgaagctcagacttggtctctgttaggagagatggtgcgctgcgtccggcagggcctgcctaggctccaactgacagtaatcccaagagctcccctttcaggggatgacggagtgacgtcacctgtgtggactcagctgccacctgggattgtggtggcggcgggtctgtctggcgctcagcttccatctccaccagtgtcacctccacaccacctcgccaagcagcttctggaaaggcccccggccgccccgggctgacctgctgctgtgtctgacccgcagaaaaatggctacaaacttcctagcacatgagaagatctggttcgacaagttcaaatatgacgacgcagaaaggagattctacgagcagatgaacgggcctgtggcaggtgcctcccgccaggagaacggcgccagcgtgatcctccgtgacattgcgagagccagagagaacatccagaaatccctggctgga

SEQ ID NO: 9973 - DNA, 996 bp, Homo sapiens
  source 1..996: mol_type = unassigned DNA
catttcccgtgcgcggcccgggcggccctccctttcatcagtcttcccgcgtccgccgattcctcctccttggtcgccgcgtccttggctggcgtatgaggagcgggaaggcctcctgcaccctggagaccgtgtgggaagacaagcacaagtatgaggaggccgagcggcgcttctacgaacacgaggccacacaggcggccgcctccgcccagcagctgccagccgaggggccagccatgaatgggcccggccaggacgaccctgaggacgctgatgaggcggaagcccctgacggcggcagcaggcgtgatcccaggaagagccaggacagcaggaagcccctgcagaaaaagaggaagcgctcccccaagagcgggctcggccccgcggacctggccctcctgggcctctcggccgaacgcgtgtggctggacaagtcacttttcgaccaggcagagagctcctaccgccagaagctggcagatgtggctgcccaggcagcctggcctcctgccttggccccttggggtctctgcacccatggaaaccaggtggcctgccaccacgtgacctgggggatctgggtcaacaagtcctccttcgaccaggctgagcgggccttcgtggagtggtctcaggccctgttgctggcccccgacggcagccgcaggcaggggactcccaacacaggccagcaggtggccgtccccgacctggcccaccagcccagcccaccggtcaatggccagcccccgctgggcagcctgcaggcactggttcgggaggtgtggctggagaagccccggtatgatgcagccgagaggggcttctacgaggccctgtttgacggccatcccccagggaaggtgcgcctgcaagagcgagccggcctggccgagggtgcccggcggggccgcagagaccggcggggccgcaacatcttagggaacaagcgggccgggctgcgacgggccgatggggaggccccctctg

SEQ ID NO: 9974 - DNA, 558 bp, Homo sapiens
  source 1..558: mol_type = unassigned DNA
ctccctttcatcagtcttcccgcgtccgccgattcctcctccttggtcgccgcgtccttggctggcgtaaagctcctcctgagcttggataaactgcaggagcgaaggggctgaccgtttgtcgggacgcagttgaaagagtcgctgtgtcctgctccgggctctcctgctggagaggagaggcttgcacgtgcctgtcgtctgcgcaagctttgaagctcagacttggtctctgttaggagagatggggatgacggagtgacgtcacctgtgtggactcagctgccacctgggattgtggtggcggcgggtctgtctggcgctcagcttccatctccaccagtgtcacctccacaccacctcgccaagcagcttctggaaaggcccccggccgccccgggctgacctgctgctgtgtctgacccggttagtctttctggctgcctctaaccttgctgcttttccttcatgctgtcctaggaggccaaagcaaaatgaggagcgggaaggcctcctgcaccctggagaccgtgtgggaagacaagcacaagtatgagg

SEQ ID NO: 9975 - DNA, 553 bp, Homo sapiens
  source 1..553: mol_type = unassigned DNA
acaatgccctgtctcctgggctcttgctcccaccccacccccaacccacaacccctgcctctgcccatcagcctggccttgatgaggagcgggaaggcctcctgcaccctggagaccgtgtgggaagacaagcacaagtatgaggaggccgagcggcgcttctacgaacacgaggccacacaggcggccgcctccgcccagcagctgccagccgaggggccagccatgaatgggcccggccaggacgaccctgaggacgctgatgaggcggaagcccctgacggcggcagcaggcgtgatcccaggaagagccaggacagcaggaagcccctgcagaaaaagaggaagcgctcccccaagagcgggctcggccccgcggacctggccctcctgggcctctcggccgaacgcgtgtggctggacaagtcacttttcgaccaggcagagagctcctaccgccagaagctggcagatgtggctgcccaggcagcctggcctcctgccttggccccttggggtctctgcacccatggaaaccaggtggcctgccacc

SEQ ID NO: 9976 - DNA, 923 bp, Homo sapiens
  source 1..923: mol_type = unassigned DNA
ccgggcggccctccctttcatcagtcttcccgcgtccgccgattcctcctccttggtcgccgcgtccttggctggcgtcagaaaaatggctacaaacttcctagcacatgagaagatctggttcgacaagttcaaatatgacgacgcagaaaggagattctacgagcagatgaacgggcctgtggcaggtgcctcccgccagagctcaggccccggggcctccagcggcaccagcggagaccacggtgagctcgtcgtccggattgccagtctggaagtggagaaccagagtctgcgtggcgtggtacaggagctgcagcaggccatctccaagctggaggcccggctgaacgtgctggagaagagctcgcctggccaccgggccacggccccacagacccagcacgtatctcccatgcgccaagtggagcccccagccaagaagccagccacaccagcagaggatgacgaggatgatgacattgacctgtttggcagtgacaatgaggaggaggacaaggaggcggcacagctgcgggaggagcggctacggcagtacgcggagaagaaggccaagaagcctgcactggtggccaagtcctccatcctgctggatgtcaagccttgggatgatgagacggacatggcccagctggaggcctgtgtgcgctctatccagctggacgggctggtctggggggcttccaagctggtgcccgtgggctacggtatccggaagctacagattcagtgtgtggtggaggacgacaaggtggggacagacttgctggaggaggagatcaccaagtttgaggagcacgtgcagagtgtcgatatcgcagctttcaacaagatctgaagcctgagtgtgtgtacgtgcgcgcgtgcgtgaggccctgccacgattaaagactgagaccggc

SEQ ID NO: 9977 - DNA, 1311 bp, Homo sapiens
  source 1..1311: mol_type = unassigned DNA
cgcgcctgcgcgctggccgcctcgtgcgtcactcggcgcttgccggctgccggacccgcccccaccggcgacaccactggccgcgaagcgcagggggggcgcgcgcgctgccgcccgttcccagcacttgtgcagactcctccggggaagagcggcctccgcggtcatctccaacggaattctgcctttgaagtgtcggggcacggcgcgtcgagggtcctggcggccaggcggggcgtgtgcaagggtcgcgtcccccccccgggcccccggcccgtggctcttggtagagcccagtgcttcatttcccgtgcgcggcccgggcggccctccctttcatcagtcttcccgcgtccgccgattcctcctccttggtcgccgcgtccttggctggcgtaaaaatggctacaaacttcctagcacatgagaagatctggttcgacaagttcaaatatgacgacgcagaaaggagattctacgagcagatgaacgggcctgtggcaggtgcctcccgccaggagaacggcgccagcgtgatcctccgtgacattgcgagagccagagagaacatccagaaatccctggctggaagctcaggccccggggcctccagcggcaccagcggagaccacggtgagctcgtcgtccggattgccagtctggaagtggagaaccagagtctgcgtggcgtggtacaggagctgcagcaggccatctccaagctggaggcccggctgaacgtgctggagaagagctcgcctggccaccgggccacggccccacagacccagcacgtatctcccatgcgccaagtggagcccccagccaagaagccagccacaccagcagaggatgacgaggatgatgacattgacctgtttggcagtgacaatgaggaggaggacaaggaggcggcacagctgcgggaggagcggctacggcagtacgcggagaagaaggccaagaagcctgcactggtggccaagtcctccatcctgctggatgtcaagccttgggatgatgagacggacatggcccagctggaggcctgtgtgcgctctatccagctggacgggctggtctggggggcttccaagctggtgcccgtgggctacggtatccggaagctacagattcagtgtgtggtggaggacgacaaggtggggacagacttgctggaggaggagatcaccaagtttgaggagcacgtgcagagtgtcgatatcgcagctttcaacaagatctgaagcctgagtgtgtgtacgtgcgcgcgtgcgtgaggccctgccacgattaaagactgagaccggc

SEQ ID NO: 9978 - DNA, 600 bp, Homo sapiens
  source 1..600: mol_type = unassigned DNA
ctccctttcatcagtcttcccgcgtccgccgattcctcctccttggtcgccgcgtccttggctggcgttagagacagggtttcaacgtgttagccaggatggtctcagtctccagaccctgtgatccgcccgcctcggcctcccaaagtgttgggattacagatgaggagcgggaaggcctcctgcaccctggagaccgtgtgggaagacaagcacaagtatgaggaggccgagcggcgcttctacgaacacgaggccacacaggcggccgcctccgcccagcagctgccagccgaggggccagccatgaatgggcccggccaggacgaccctgaggacgctgatgaggcggaagcccctgacggcggcagcaggcgtgatcccaggaagagccaggacagcaggaagcccctgcagaaaaagaggaagcgctcccccaagagcgggctcggccccgcggacctggccctcctgggcctctcggccgaacgcgtgtggctggacaagtcacttttcgaccaggcagagagctcctaccgccagaagctggcagatgtggctgcccaggcagcctggcctcctgccttggccccttggggt

SEQ ID NO: 9979 - DNA, 853 bp, Homo sapiens
  source 1..853: mol_type = unassigned DNA
gtcttcccgcgtccgccgattcctcctccttggtcgccgcgtccttggctggcgtaaagctcctcctgagcttggataaactgcaggagcgaaggggctgaccgtttgtcgggacgcagttgaaagagtcgctgtgtcctgctccgggctctcctgctggagaggagaggcttgcacgtgcctgtcgtctgcgcaagctttgaagctcagacttggtctctgttaggagagatgcagaaaaatggctacaaacttcctagcacatgagaagatctggttcgacaagttcaaatatgacgacgcagaaaggagattctacgagcagatgaacgggcctgtggcaggtgcctcccgccaggagaacggcgccagcgtgatcctccgtgacattgcgagagccagagagaacatccagaaatccctggctggaagctcaggccccggggcctccagcggcaccagcggagaccacggtgagctcgtcgtccggattgccagtctggaagtggagaaccagagtctgcgtggcgtggtacaggagctgcagcaggccatctccaagctggaggcccggctgaacgtgctggagaagagctcgcctggccaccgggccacggccccacagacccagcacgtatctcccatgcgccaagtggagcccccagccaagaagccagccacaccagcagaggatgacgaggatgatgacattgacctgtttggcagtgacaatgaggaggaggacaaggaggcggcacagctgcgggaggagcggctacggcagtacgcggagaagaaggccaagaagcctgcactggtggccaagtcctccatcctgctggatgtcaagcct

SEQ ID NO: 9980 - DNA, 583 bp, Homo sapiens
  source 1..583: mol_type = unassigned DNA
ctccctttcatcagtcttcccgcgtccgccgattcctcctccttggtcgccgcgtccttggctggcgtagacagggtttcaacgtgttagccaggatggtctcagtctccagaccctgtgatccgcccgcctcggcctcccaaagtgttgggattacaggtgtgagccaccgtgcctggccgaggctccttcttttatgaggagcgggaaggcctcctgcaccctggagaccgtgtgggaagacaagcacaagtatgaggaggccgagcggcgcttctacgaacacgaggccacacaggcggccgcctccgcccagcagctgccagccgaggggccagccatgaatgggcccggccaggacgaccctgaggacgctgatgaggcggaagcccctgacggcggcagcaggcgtgatcccaggaagagccaggacagcaggaagcccctgcagaaaaagaggaagcgctcccccaagagcgggctcggccccgcggacctggccctcctgggcctctcggccgaacgcgtgtggctggacaagtcacttttcgaccaggcagagagctcctaccgccagaagctg

SEQ ID NO: 9981 - DNA, 1217 bp, Homo sapiens
  source 1..1217: mol_type = unassigned DNA
ctgagatcaggagttcaagaccagcctggccaacatggtgaaaccttgtctactaaaaatacaaaaaattagccaggcacagtggtgtgcactggtagtcccagttactcgggaggctgaggcaggaaaatcgcttgaacccaggaggcggacgttgcggtgagccgagatcgcgccgctgattccagcctgggcgacaagagtgagactccatctcacacaaaaaaaaaataacaaaaaaactcagaaatgctaagtgtacttatttgttgaagaaacttgttacatattactaacatcttttttttttatgagaaatacttttcccataaccaaaaaattcagtgagcagaatggccttgcttgaggtttttgcaaatctctcgggtgtctggcttagtgggaggcagctgggccctcatacctgcctccgcacttcagctgtttgacataaacccagcttcgtgtgagtgaaagggaagggcctggggaccctcagaggttctcggaccacactttgagaactcctcgtctggaagacaggcctggggatgccatgtggggtgagggcttacgggcttggtgtcgctttgtggagaaccgctggtgtctgaagcgggtgtcagccccactgcaccttggtgcttctgggctgtcctgatgccgaggcccacttcccagccatgctgactttgcctctttcccctcccagcagaaaaatggctacaaacttcctagcacatgagaagatctggttcgacaagttcaaatatgacgacgcagaaaggagattctacgagcagatgaacgggcctgtggcaggtgcctcccgccaggagaacggcgccagcgtgatcctccgtgacattgcgagagccagagagaacatccagaaatccctggctggaagctcaggccccggggcctccagcggcaccagcggagaccacggtgagctcgtcgtccggattgccagtctggaagtggagaaccagagtctgcgtggcgtggtacaggagctgcagcaggccatctccaagctggaggcccggctgaacgtgctggagaagagctcgcctggccaccgggccacggccccacagacccagcacgtatctcccatgcgccaagtggagcccccagccaagaagccagccacaccagcagaggatgacgaggatgatgacattgacctgtttggcagtgacaatgaggag

SEQ ID NO: 9982 - DNA, 616 bp, Homo sapiens
  source 1..616: mol_type = unassigned DNA
ctccctttcatcagtcttcccgcgtccgccgattcctcctccttggtcgccgcgtccttggctggcgtggcctgcctaggctccaactgacagtaatcccaagagctcccctttcaggggatgacggagtgacgtcacctgtgtggactcagctgccacctgggattgtggtggcggcgggtctgtctggcgctcagcttccatctccaccagtgtcacctccacaccacctcgccaagcagcttctggaaaggcccccggccgccccgggctgacctgctgctgtgtctgacccggttagtctttctggctgcctctaaccttgctgcttttccttcatgctgtcctaggaggccaaagcaaaatgaggagcgggaaggcctcctgcaccctggagaccgtgtgggaagacaagcacaagtatgaggaggccgagcggcgcttctacgaacacgaggccacacaggcggccgcctccgcccagcagctgccagccgaggggccagccatgaatgggcccggccaggacgaccctgaggacgctgatgaggcggaagcccctgacggcggcagcaggcgtgatcccaggaagagccaggacagcaggaagcccctg

SEQ ID NO: 9983 - DNA, 787 bp, Homo sapiens
  source 1..787: mol_type = unassigned DNA
ctcctccttggtcgccgcgtccttggctggcgttgtcacctccacaccacctcgccaagcagcttctggaaaggcccccggccgccccgggctgacctgctgctgtgtctgacccggttagtctttctggctgcctctaaccttgctgcttttccttcatgctgtcctaggaggccaaagcaaacagaaaaatggctacaaacttcctagcacatgagaagatctggttcgacaagttcaaatatgacgacgcagaaaggagattctacgagcagatgaacgggcctgtggcaggtgcctcccgccaggagaacggcgccagcgtgatcctccgtgacattgcgagagccagagagaacatccagaaatccctggctggaagctcaggccccggggcctccagcggcaccagcggagaccacggtgagctcgtcgtccggattgccagtctggaagtggagaaccagagtctgcgtggcgtggtacaggagctgcagcaggccatctccaagctggaggcccggctgaacgtgctggagaagagctcgcctggccaccgggccacggccccacagacccagcacgtatctcccatgcgccaagtggagcccccagccaagaagccagccacaccagcagaggatgacgaggatgatgacattgacctgtttggcagtgacaatgaggaggaggacaaggaggcggcacagctgcgggaggagcggctacggcagtacgcggagaagaaggccaagaagcctgcactggtggccaagtcctccatcct

SEQ ID NO: 9984 - DNA, 813 bp, Homo sapiens
  source 1..813: mol_type = unassigned DNA
ttgctcccgggttgctgggtgaggctgcaaggtttagcacagatgaggagcgggaaggcctcctgcaccctggagaccgtgtgggaagacaagcacaagtatgaggaggccgagcggcgcttctacgaacacgaggccacacaggcggccgcctccgcccagcagctgccagccgaggggccagccatgaatgggcccggccaggacgaccctgaggacgctgatgaggcggaagcccctgacggcggcagcaggcgtgatcccaggaagagccaggacagcaggaagcccctgcagaaaaagaggaagcgctcccccaagagcgggctcggccccgcggacctggccctcctgggcctctcggccgaacgcgtgtggctggacaagtcacttttcgaccaggcagagagctcctaccgccagaagctggcagatgtggctgcccaggcagcctggcctcctgccttggccccttggggtctctgcacccatggaaaccaggtggcctgccaccacgtgacctgggggatctgggtcaacaagtcctccttcgaccaggctgagcgggccttcgtggagtggtctcaggccctgttgctggcccccgacggcagccgcaggcaggggactcccaacacaggccagcaggtggccgtccccgacctggcccaccagcccagcccaccggtcaatggccagcccccgctgggcagcctgcaggcactggttcgggaggtgtggctggagaagccccggtatgatgcagccgagaggggcttctacgaggccctgtttgacggccatcccccaggg

SEQ ID NO: 9985 - DNA, 926 bp, Homo sapiens
  source 1..926: mol_type = unassigned DNA
caccttcgccttctcaccacatgcctcaggcccagccaggctcctagacctgcctctgtagaggctttctgggcgcagtgccaatcctgtgagacagcagcatctcccctgggctgctgcagggttcacacgcagtcagtgctggcagagtgagcgcccagccgacagagcccccgctgcctcccgcctcctctggaggactaggccctctgggctttgctcccgggttgctgggtgaggctgcaaggtttagcacagtagagacagggtttcaacgtgttagccaggatggtctcagtctccagaccctgtgatccgcccgcctcggcctcccaaagtgttgggattacaggtgtgagccaccgtgcctggccgaggctccttcttttatgaggagcgggaaggcctcctgcaccctggagaccgtgtgggaagacaagcacaagtatgaggaggccgagcggcgcttctacgaacacgaggccacacaggcggccgcctccgcccagcagctgccagccgaggggccagccatgaatgggcccggccaggacgaccctgaggacgctgatgaggcggaagcccctgacggcggcagcaggcgtgatcccaggaagagccaggacagcaggaagcccctgcagaaaaagaggaagcgctcccccaagagcgggctcggccccgcggacctggccctcctgggcctctcggccgaacgcgtgtggctggacaagtcacttttcgaccaggcagagagctcctaccgccagaagctggcagatgtggctgcccaggcagcctggcctcctgccttggccccttggggtctctgcacccatggaaaccaggtggcctgccaccacgtgacctgggggatctgggtcaacaagtcctccttcgaccaggctgagcgggccttcgtggag

SEQ ID NO: 9986 - DNA, 614 bp, Homo sapiens
  source 1..614: mol_type = unassigned DNA
ccctttcatcagtcttcccgcgtccgccgattcctcctccttggtcgccgcgtccttggctggcgtgtgagtaccgcggcccccgccggaaggagtcgggcgcgacagagacgcccgaggggccgggagggcgggcggcccgggctgcgccagaagctcgcgccgttagggactgaggcacaagtgcgccagcgcgggcttaggggccgtgggccaagtgcggcacttggggcgagcgcagagaggcggggcgacggaggccacgtggccggcttggagggcgtccgcgggacgggggcgccgggagcactgtctcacggcgcatcccggtcgtggaagcccctcggccaggctgctggggcctaaggcctgtgtttgctgccgtctccgtgggagaccagacatctgccccagctgtttctctggcctgcagaccttcgtacaccacgtctttgtcaagcaccagttactgcacgcatcagctgagcacggaggggatagcagaaaaatggctacaaacttcctagcacatgagaagatctggttcgacaagttcaaatatgacgacgcagaaaggagattctacgagcagatgaacgggcctgtggcaggtg

SEQ ID NO: 9987 - DNA, 506 bp, Homo sapiens
  source 1..506: mol_type = unassigned DNA
actgtctcacggcgcatcccggtcgtggaagcccctcggccaggctgctggggcctaaggcctgtgtttgctgccgtctccgtgggagaccagacatctgccccagctgtttctctggcctgcagaccttcgtacaccacgtctttgtcaagcaccagttactgcacgcatcagctgagcacggaggggataggcacggacgcaacacttttggaacttagacgctatagagacagggtttcaacgtgttagccaggatggtctcagtctccagaccctgtgatccgcccgcctcggcctcccaaagtgttgggattacaggtgtgagccaccgtgcctggccgaggctccttcttttatgaggagcgggaaggcctcctgcaccctggagaccgtgtgggaagacaagcacaagtatgaggaggccgagcggcgcttctacgaacacgaggccacacaggcggccgcctccgcccagcagctgccagccgaggggccagccatga

SEQ ID NO: 9988 - DNA, 791 bp, Homo sapiens
  source 1..791: mol_type = unassigned DNA
cagaggctttaagtggaaggaagaaggcaaagggggcggagtgggttggggacctgatgagacgtcaggattggtttccagaatgaaggaccgcctggcagcagaagaactgtgtagctaaacttggggttgtccctgcccgacagggcggggtgcttcttaagttgacactgcctgcggctcacctcccagggaggcaggccaggccatctcacctgagcagcctccttctacagctccgcccaccccgtcatctggaccccatgagccttaagcagctggctcgcaggcagttggttacttccggagcccgtgtgtgcccagccccgttctgggggtgggggatgcagctgaggggctgggcaggtgtggaaggagcccccgagcgtcctctgaggaagtagacgctcaccttcgccttctcaccacatgcctcaggcccagccaggctcctagacctgcctctgtagaggctttctgggcgcagtgccaatcctgtgagacagcagcatctcccctgggctgctgcagggttcacacgcagtcagtgctggcagagtgagcgcccagccgacagagcccccgctgcctcccgcctcctctggaggactaggccctctgggctttgctcccgggttgctgggtgaggctgcaaggtttagcacagcagaaaaatggctacaaacttcctagcacatgagaagatctggttcgacaagttcaaatatgacgacgcagaaaggagattctacgagcagatgaacgggcctgtggcaggtgcctcccgccag

SEQ ID NO: 9989 - DNA, 761 bp, Homo sapiens
  source 1..761: mol_type = unassigned DNA
ctccctttcatcagtcttcccgcgtccgccgattcctcctccttggtcgccgcgtccttggctggcgtggtttcaacgtgttagccaggatggtctcagtctccagaccctgtgatccgcccgcctcggcctcccaaagtgttgggattacaggtgtgagccaccgtgcctggccgaggctccttcttttatgaggagcgggaaggcctcctgcaccctggagaccgtgtgggaagacaagcacaagtatgaggaggccgagcggcgcttctacgaacacgaggccacacaggcggccgcctccgcccagcagctgccagccgaggggccagccatgaatgggcccggccaggacgaccctgaggacgctgatgaggcggaagcccctgacggcggcagcaggcgtgatcccaggaagagccaggacagcaggaagcccctgcagaaaaagaggaagcgctcccccaagagcgggctcggccccgcggacctggccctcctgggcctctcggccgaacgcgtgtggctggacaagtcacttttcgaccaggcagagagctcctaccgccagaagctggcagatgtggctgcccaggcagcctggcctcctgccttggccccttggggtctctgcacccatggaaaccaggtggcctgccaccacgtgacctgggggatctgggtcaacaagtcctccttcgaccaggctgagcgggccttcgtggagtggtctcaggccctgttgctggcccccgacggca

SEQ ID NO: 9990 - DNA, 2387 bp, Homo sapiens
  source 1..2387: mol_type = unassigned DNA
taaagcttatttcagataaatgacgaaaaatttttagtgtaagtatgtctcagatacttcatgggccatacattcactaacaaaattatatattgttcatgtattgggaggcacttggcctcccagagtactgagattacaggcatgagccactgcgcccggcctgttttctcttcacaacaaaacgtccccacatgggcttgacttcgaagtcctcgaatgtcatctcatggaagccccactggggagcatcctcagcccctgcccagggagggcagccacggggagggcgggcacggggagggtgggcacggggctgcggccacccgctgtgttgcaactctgccctctgcttgctttttatcgctgtgtccggaagatgaggagcgggaaggcctcctgcaccctggagaccgtgtgggaagacaagcacaagtatgaggaggccgagcggcgcttctacgaacacgaggccacacaggcggccgcctccgcccagcagctgccagccgaggggccagccatgaatgggcccggccaggacgaccctgaggacgctgatgaggcggaagcccctgacggcggcagcaggcgtgatcccaggaagagccaggacagcaggaagcccctgcagaaaaagaggaagcgctcccccaagagcgggctcggccccgcggacctggccctcctgggcctctcggccgaacgcgtgtggctggacaagtcacttttcgaccaggcagagagctcctaccgccagaagctggcagatgtggctgcccaggcagcctggcctcctgccttggccccttggggtctctgcacccatggaaaccaggtggcctgccaccacgtgacctgggggatctgggtcaacaagtcctccttcgaccaggctgagcgggccttcgtggagtggtctcaggccctgttgctggcccccgacggcagccgcaggcaggggactcccaacacaggccagcaggtggccgtccccgacctggcccaccagcccagcccaccggtcaatggccagcccccgctgggcagcctgcaggcactggttcgggaggtgtggctggagaagccccggtatgatgcagccgagaggggcttctacgaggccctgtttgacggccatcccccagggaaggtgcgcctgcaagagcgagccggcctggccgagggtgcccggcggggccgcagagaccggcggggccgcaacatcttagggaacaagcgggccgggctgcgacgggccgatggggaggccccctctgccttgccctactgttacttcctgcagaaggatgcagaggccccctggctcagcaagcctgcctacgacagcgccgagtgccgccaccacgctgccgaggccctgcgggtggcctggtgcctcgaagctgcctccctgtctcaccgacccggtcctcggtctggcctgtccgtgtccagcctgagacccaacagaaaaatggctacaaacttcctagcacatgagaagatctggttcgacaagttcaaatatgacgacgcagaaaggagattctacgagcagatgaacgggcctgtggcaggtgcctcccgccaggagaacggcgccagcgtgatcctccgtgacattgcgagagccagagagaacatccagaaatccctggctggaagctcaggccccggggcctccagcggcaccagcggagaccacggtgagctcgtcgtccggattgccagtctggaagtggagaaccagagtctgcgtggcgtggtacaggagctgcagcaggccatctccaagctggaggcccggctgaacgtgctggagaagagctcgcctggccaccgggccacggccccacagacccagcacgtatctcccatgcgccaagtggagcccccagccaagaagccagccacaccagcagaggatgacgaggatgatgacattgacctgtttggcagtgacaatgaggaggaggacaaggaggcggcacagctgcgggaggagcggctacggcagtacgcggagaagaaggccaagaagcctgcactggtggccaagtcctccatcctgctggatgtcaagccttgggatgatgagacggacatggcccagctggaggcctgtgtgcgctctatccagctggacgggctggtctggggggcttccaagctggtgcccgtgggctacggtatccggaagctacagattcagtgtgtggtggaggacgacaaggtggggacagacttgctggaggaggagatcaccaagtttgaggagcacgtgcagagtgtcgatatcgcagctttcaacaagatctgaagcctgagtgtgtgtacgtgcgcgcgtgcgtgaggccctgccacgattaaagactgagaccggc

SEQ ID NO: 9991 - DNA, 842 bp, Homo sapiens
  source 1..842: mol_type = unassigned DNA
gcgtccgccgattcctcctccttggtcgccgcgtccttggctggcgtaaagctcctcctgagcttggataaactgcaggagcgaaggggctgaccgtttgtcgggacgcagttgaaagagtcgctgtgtcctgctccgggctctcctgctggagaggagaggcttgcacgtgcctgtcgtctgcgcaagctttgaagctcagacttggtctctgttaggagagatgaaaaatggctacaaacttcctagcacatgagaagatctggttcgacaagttcaaatatgacgacgcagaaaggagattctacgagcagatgaacgggcctgtggcaggtgcctcccgccaggagaacggcgccagcgtgatcctccgtgacattgcgagagccagagagaacatccagaaatccctggctggaagctcaggccccggggcctccagcggcaccagcggagaccacggtgagctcgtcgtccggattgccagtctggaagtggagaaccagagtctgcgtggcgtggtacaggagctgcagcaggccatctccaagctggaggcccggctgaacgtgctggagaagagctcgcctggccaccgggccacggccccacagacccagcacgtatctcccatgcgccaagtggagcccccagccaagaagccagccacaccagcagaggatgacgaggatgatgacattgacctgtttggcagtgacaatgaggaggaggacaaggaggcggcacagctgcgggaggagcggctacggcagtacgcggagaagaaggccaagaagcctgcactggtggccaagtcctccatcctgctggatgtcaagcct

SEQ ID NO: 9992 - DNA, 758 bp, Homo sapiens
  source 1..758: mol_type = unassigned DNA
cgcgtccttggctggcgtggcctgcctaggctccaactgacagtaatcccaagagctcccctttcaggggatgacggagtgacgtcacctgtgtggactcagctgccacctgggattgtggtggcggcgggtctgtctggcgctcagcttccatctccaccagtgtcacctccacaccacctcgccaagcagcttctggaaaggcccccggccgccccgggctgacctgctgctgtgtctgacccgcagaaaaatggctacaaacttcctagcacatgagaagatctggttcgacaagttcaaatatgacgacgcagaaaggagattctacgagcagatgaacgggcctgtggcaggtgcctcccgccaggagaacggcgccagcgtgatcctccgtgacattgcgagagccagagagaacatccagaaatccctggctggaagctcaggccccggggcctccagcggcaccagcggagaccacggtgagctcgtcgtccggattgccagtctggaagtggagaaccagagtctgcgtggcgtggtacaggagctgcagcaggccatctccaagctggaggcccggctgaacgtgctggagaagagctcgcctggccaccgggccacggccccacagacccagcacgtatctcccatgcgccaagtggagcccccagccaagaagccagccacaccagcagaggatgacgaggatgatgacattgacctgtttggcagtgacaatgaggaggaggaca

SEQ ID NO: 9993 - DNA, 1001 bp, Homo sapiens
  source 1..1001: mol_type = unassigned DNA
gtccttggctggcgtaaagctcctcctgagcttggataaactgcaggagcgaaggggctgaccgtttgtcgggacgcagttgaaagagtcgctgtgtcctgctccgggctctcctgctggagaggagaggcttgcacgtgcctgtcgtctgcgcaagctttgaagctcagacttggtctctgttaggagagatggtgcgctgcgtccggcagaaaaatggctacaaacttcctagcacatgagaagatctggttcgacaagttcaaatatgacgacgcagaaaggagattctacgagcagatgaacgggcctgtggcaggtgcctcccgccaggagaacggcgccagcgtgatcctccgtgacattgcgagagccagagagaacatccagaaatccctggctggaagctcaggccccggggcctccagcggcaccagcggagaccacggtgagctcgtcgtccggattgccagtctggaagtggagaaccagagtctgcgtggcgtggtacaggagctgcagcaggccatctccaagctggaggcccggctgaacgtgctggagaagagctcgcctggccaccgggccacggccccacagacccagcacgtatctcccatgcgccaagtggagcccccagccaagaagccagccacaccagcagaggatgacgaggatgatgacattgacctgtttggcagtgacaatgaggaggaggacaaggaggcggcacagctgcgggaggagcggctacggcagtacgcggagaagaaggccaagaagcctgcactggtggccaagtcctccatcctgctggatgtcaagccttgggatgatgagacggacatggcccagctggaggcctgtgtgcgctctatccagctggacgggctggtctggggggcttccaagctggtgcccgtgggctacggtatccggaagctacagattcagtgtgtggtggaggacgacaaggtggggacagacttgctggaggagga

SEQ ID NO: 9994 - DNA, 538 bp, Homo sapiens
  source 1..538: mol_type = unassigned DNA
ccctttcatcagtcttcccgcgtccgccgattcctcctccttggtcgccgcgtccttggctggcgtgggatgacggagtgacgtcacctgtgtggactcagctgccacctgggattgtggtggcggcgggtctgtctggcgctcagcttccatctccaccagtgtcacctccacaccacctcgccaagcagcttctggaaaggcccccggccgccccgggctgacctgctgctgtgtctgacccggttagtctttctggctgcctctaaccttgctgcttttccttcatgctgtcctaggaggccaaagcaaatagagacagggtttcaacgtgttagccaggatggtctcagtctccagaccctgtgatccgcccgcctcggcctcccaaagtgttgggattacaggtgtgagccaccgtgcctggccgaggctccttcttttatgaggagcgggaaggcctcctgcaccctggagaccgtgtgggaagacaagcacaagtatgaggaggccgagcggcgcttctacgaacacgagg

SEQ ID NO: 9995 - DNA, 555 bp, Homo sapiens
  source 1..555: mol_type = unassigned DNA
ctccctttcatcagtcttcccgcgtccgccgattcctcctccttggtcgccgcgtccttggctggcgttgtcacctccacaccacctcgccaagcagcttctggaaaggcccccggccgccccgggctgacctgctgctgtgtctgacccggttagtctttctggctgcctctaaccttgctgcttttccttcatgctgtcctaggaggccaaagcaaatagagacagggtttcaacgtgttagccaggatggtctcagtctccagaccctgtgatccgcccgcctcggcctcccaaagtgttgggattacaggtgtgagccaccgtgcctggccgaggctccttcttttatgaggagcgggaaggcctcctgcaccctggagaccgtgtgggaagacaagcacaagtatgaggaggccgagcggcgcttctacgaacacgaggccacacaggcggccgcctccgcccagcagctgccagccgaggggccagccatgaatgggcccggccaggacgaccctgaggacgctgatgaggcggaagcccctgacggcg

SEQ ID NO: 9996 - DNA, 926 bp, Homo sapiens
  source 1..926: mol_type = unassigned DNA
ccctttcatcagtcttcccgcgtccgccgattcctcctccttggtcgccgcgtccttggctggcgtcagaaaaatggctacaaacttcctagcacatgagaagatctggttcgacaagttcaaatatgacgacgcagaaaggagattctacgagcagatgaacgggcctgtggcaggtgcctcccgccaggagaacggcgccagcgtgatcctccgtgacattgcgagagccagagagaacatccagaaatccctggctggaagctcaggccccggggcctccagcggcaccagcggagaccacgtggtacaggagctgcagcaggccatctccaagctggaggcccggctgaacgtgctggagaagagctcgcctggccaccgggccacggccccacagacccagcacgtatctcccatgcgccaagtggagcccccagccaagaagccagccacaccagcagaggatgacgaggatgatgacattgacctgtttggcagtgacaatgaggaggaggacaaggaggcggcacagctgcgggaggagcggctacggcagtacgcggagaagaaggccaagaagcctgcactggtggccaagtcctccatcctgctggatgtcaagccttgggatgatgagacggacatggcccagctggaggcctgtgtgcgctctatccagctggacgggctggtctggggggcttccaagctggtgcccgtgggctacggtatccggaagctacagattcagtgtgtggtggaggacgacaaggtggggacagacttgctggaggaggagatcaccaagtttgaggagcacgtgcagagtgtcgatatcgcagctttcaacaagatctgaagcctgagtgtgtgtacgtgcgcgcgtgcgtgaggccctgccacgattaaagactgagaccggc

SEQ ID NO: 9997 - DNA, 1077 bp, Homo sapiens
  source 1..1077: mol_type = unassigned DNA
aatgcgggaggttcttgttctgcaggtctcgcgtctgccaggagctacggccggaagatggcggcggccgcagagttgtcgctactggagaagtccctgggactgagtaaggggaataaatacagtgctcagggcgagcgacagattccagttcttcagacaaacaatggtccaagtctaacaggattgactactatagcagctcatctagtcaagcaagccaacaaagaatatttgctggggagtactgcagaagaaaaagcaatcgttcagcagtggttagaatacagggtcactcaagtagatgggcactccagtaaaaatgacatccacacactgttgaaggatcttaattcatatcttgaagataaagtctaccttacagggtataactttacattagcagatatactattgtactatggacttcatcgctttatagttgacctgacagttcaagaaaaggagaaatatcttaatgtgtctcgctggttttgtcacattcagcattatccaggcatcaggcaacatctgtctagtgttgtcttcatcaagaacagactatatactaattcccactagaagctgtccatgccatacagaagatctattaaaaatgttttaaatggaaaatgtactctagaccacaggactaatgtaaattaatatacagtcattcattatttgttgaagttgatagaatttttgaagtgtaaacttgtgtctgaatgttttatttgttctttagctgaagttttgcaatttttatgtcaaaattcaattgctattaaacaagttgagatccagttataaattaaccttgtttttagtagatgacatttatttcaataaaagttgcaaatcgggcttaatcttaaaattggtggtcatttcaatggttgacatatttggctatttattaacctctctttcatattctaaaattcattttccccttatggatatttatggtagtttgttaagaactgataaattgtgccaaggaagccaaaagggaagacagatggatttgttttaaaatatttatgtgagctagtaaatgtggttgaaaaaata

SEQ ID NO: 9998 - DNA, 562 bp, Homo sapiens
  source 1..562: mol_type = unassigned DNA
gcgtctgccaggagctacggccggaagatggcggcggccgcagagttgtcgctactggagaagtccctgggactgagtaaggggaataaatacagtgctcagggcgagcgacagattccagttcttcagacaaacaatggtccaagtctaacaggattgactactatagcagctcatctagtcaagcaagccaacaaagaatatttgctggggagtactgcagaagaaaaagcaatcgttcagcagtggttagaatacagggtcactcaagtagatgggcactccagtaaaaatgacatccacacactgttgaaggatcttaattcatatcttgaagataaagtctaccttacagggtataactttacattagcagatatactattgtactatggacttcatcgctttataataaggaagctgaggcacacagaggtagggaactaacccaacatcatacaaggaactgagatcaaggaactgagattcaaacacaaatgtctggctcaaacttacctgtaaactactctacatggagtgccataaaattctgcttaattaa

SEQ ID NO: 9999 - DNA, 1523 bp, Homo sapiens
  source 1..1523: mol_type = unassigned DNA
gtcttctgtttcgtcctcgctttccggctgctgtttctccacggctctcctctttccccctcccttctctcccgggcggcttactttgcggcagcgccgagaaccccaccccctttctttgcggaatcaccatggcggctgggaccctgtacacgtatcctgaaaactggagggccttcaaggctctcatcgctgctcagtacagcggggctcaggtccgcgtgctctccgcaccaccccacttccattttggccaaaccaaccgcacccctgaatttctccgcaaatttcctgccggcaaggtcccagcatttgagggtgatgatggattctgtgtgtttgagagcaacgccattgcctactatgtgagcaatgaggagctgcggggaagtactccagaggcagcagcccaggtggtgcagtgggtgagctttgctgattccgatatagtgcccccagccagtacctgggtgttccccaccttgggcatcatgcaccacaacaaacaggccactgagaatgcaaaggaggaagtgaggcgaattctggggctgctggatgcttacttgaagacgaggacttttctggtgggcgaacgagtgacattggctgacatcacagttgtctgcaccctgttgtggctctataagcaggttctagagccttctttccgccaggcctttcccaataccaaccgctggttcctcacctgcattaaccagccccagttccgggctgtcttgggcgaagtgaaactgtgtgagaagatggcccagtttgatgctaaaaagtttgcagagacccaacctaaaaaggacacaccacggaaagagaagggttcacgggaagagaagcagaagccccaggctgagcggaaggaggagaaaaaggcggctgcccctgctcctgaggaggagatggatgaatgtgagcaggcgctggctgctgagcccaaggccaaggaccccttcgctcacctgcccaagagtacctttgtgttggatgaatttaagcgcaagtactccaatgaggacacactctctgtggcactgccatatttctgggagcactttgataaggacggctggtccctgtggtactcagagtatcgcttccctgaagaactcactcagaccttcatgagctgcaatctcatcactggaatgttccagcgactggacaagctgaggaagaatgccttcgccagtgtcatcctttttggaaccaacaatagcagctccatttctggagtctgggtcttccgaggccaggagcttgcctttccgctgagtccagattggcaggtggactacgagtcatacacatggcggaaactggatcctggcagcgaggagacccagacgctggttcgagagtacttttcctgggagggggccttccagcatgtgggcaaagccttcaatcagggcaagatcttcaagtgaacatctcttgccatcacctagctgcctgcacctgcccttcagggagatgggggtcattaaaggaaactgaacattgaa

SEQ ID NO: 10000 - DNA, 1631 bp, Homo sapiens
  source 1..1631: mol_type = unassigned DNA
accagcttctccttcctacagttcgcacagctcgaggggagtgcgggggcagcaccgcgcgtggcacctggcacccgcgcagagttcctgaatggcagagcggtgggtggctccagcagtactgagaagagccaggtttgcctccacattcttcctgtcgcctcagatttatgcgcacaaggacggagatttgcgttcagcgttcttcattctctcctttaaacgaggagagttcatcccgttcttaaactggaccctgtacacgtatcctgaaaactggagggccttcaaggctctcatcgctgctcagtacagcggggctcaggtccgcgtgctctccgcaccaccccacttccattttggccaaaccaaccgcacccctgaatttctccgcaaatttcctgccggcaaggtcccagcatttgagggtgatgatggattctgtgtgtttgagagcaacgccattgcctactatgtgagcaatgaggagctgcggggaagtactccagaggcagcagcccaggtggtgcagtgggtgagctttgctgattccgatatagtgcccccagccagtacctgggtgttccccaccttgggcatcatgcaccacaacaaacaggccactgagaatgcaaaggaggaagtgaggcgaattctggggctgctggatgcttacttgaagacgaggacttttctggtgggcgaacgagtgacattggctgacatcacagttgtctgcaccctgttgtggctctataagcaggttctagagccttctttccgccaggcctttcccaataccaaccgctggttcctcacctgcattaaccagccccagttccgggctgtcttgggcgaagtgaaactgtgtgagaagatggcccagtttgatgctaaaaagtttgcagagacccaacctaaaaaggacacaccacggaaagagaagggttcacgggaagagaagcagaagccccaggctgagcggaaggaggagaaaaaggcggctgcccctgctcctgaggaggagatggatgaatgtgagcaggcgctggctgctgagcccaaggccaaggaccccttcgctcacctgcccaagagtacctttgtgttggatgaatttaagcgcaagtactccaatgaggacacactctctgtggcactgccatatttctgggagcactttgataaggacggctggtccctgtggtactcagagtatcgcttccctgaagaactcactcagaccttcatgagctgcaatctcatcactggaatgttccagcgactggacaagctgaggaagaatgccttcgccagtgtcatcctttttggaaccaacaatagcagctccatttctggagtctgggtcttccgaggccaggagcttgcctttccgctgagtccagattggcaggtggactacgagtcatacacatggcggaaactggatcctggcagcgaggagacccagacgctggttcgagagtacttttcctgggagggggccttccagcatgtgggcaaagccttcaatcagggcaagatcttcaagtgaacatctcttgccatcacctagctgcctgcacctgcccttcagggagatgggggtcattaaaggaaactgaacattg

SEQ ID NO: 10001 - DNA, 1008 bp, Homo sapiens
  source 1..1008: mol_type = unassigned DNA
ctttctttgcggaatcaccatggcggctgggaccctgtacacgtatcctgaaaactggagggccttcaaggctctcatcgctgctcagtacagcggggctcaggtccgcgtgctctccgcaccaccccacttccattttggccaaaccaaccgcacccctgaatttctccgccattgcctactatgtgagcaatgaggagctgcggggaagtactccagaggcagcagcccaggtggtgcagtgggtgagctttgctgattccgatatagtgcccccagccagtacctgggtgttccccaccttgggcatcatgcaccacaacaaacaggccactgagaatgcaaaggaggaagtgaggcgaattctggggctgctggatgcttacttgaagacgaggacttttctggtgggcgaacgagtgacattggctgctgagcccaaggccaaggaccccttcgctcacctgcccaagagtacctttgtgttggatgaatttaagcgcaagtactccaatgaggacacactctctgtggcactgccatatttctgggagcactttgataaggacggctggtccctgtggtactcagagtatcgcttccctgaagaactcactcagaccttcatgagctgcaatctcatcactggaatgttccagcgactggacaagctgaggaagaatgccttcgccagtgtcatcctttttggaaccaacaatagcagctccatttctggagtctgggtcttccgaggccaggagcttgcctttccgctgagtccagattggcaggtggactacgagtcatacacatggcggaaactggatcctggcagcgaggagacccagacgctggttcgagagtacttttcctgggagggggccttccagcatgtgggcaaagccttcaatcagggcaagatcttcaagtgaacatctcttgccatcacctagctgcctgcacctgcccttcagggagatgggggtcattaaaggaaactgaacattg

SEQ ID NO: 10002 - DNA, 3157 bp, Homo sapiens
  source 1..3157: mol_type = unassigned DNA
ctcttccgccgtcgtcgccgccatcctcggcgcgactcgcttctttcggttctacctgggagaatccaccgccatccgccaccatggtgaacttcacggtagaccagatccgcgccatcatggacaagaaggccaacatccgcaacatgtctgtcatcgcccacgtggaccatggcaagtccacgctgacagactccctggtgtgcaaggcgggcatcatcgcctcggcccgggccggggagacacgcttcactgatacccggaaggacgagcaggagcgttgcatcaccatcaagtcaactgccatctccctcttctacgagctctcggagaatgacttgaacttcatcaagcagagcaaggacggtgccggcttcctcatcaacctcattgactcccccgggcatgtcgacttctcctcggaggtgactgctgccctccgagtcaccgatggcgcattggtggtggtggactgcgtgtcaggcgtgtgcgtgcagacggagacagtgctgcggcaggccattgccgagcgcatcaagcctgtgctgatgatgaacaagatggaccgcgccctgctggagctgcagctggagcccgaggagctctaccagactttccagcgcatcgtggagaacgtgaacgtcatcatctccacctacggcgagggcgagagcggccccatgggcaacatcatgatcgatcctgtcctcggtaccgtgggctttgggtctggcctccacgggtgggccttcaccctgaagcagtttgccgagatgtatgtggccaagttcgccgccaagggggagggccagttggggcctgccgagcgggccaagaaagtagaggacatgatgaagaagctgtggggtgacaggtactttgacccagccaacggcaagttcagcaagtcagccaccagccccgaagggaagaagctgccacgcaccttctgccagctgatcctggaccccatcttcaaggtgtttgatgcgatcatgaatttcaagaaagaggagacagcaaaactgatagagaaactggacatcaaactggacagcgaggacaaggacaaagaaggcaaacccctgctgaaggctgtgatgcgccgctggctgcctgccggagacgccttgttgcagatgatcaccatccacctgccctcccctgtgacggcccagaagtaccgctgcgagctcctgtacgaggggcccccggacgacgaggctgccatgggcattaaaagctgtgaccccaaaggccctcttatgatgtatatttccaaaatggtgccaacctccgacaaaggtcggttctacgcctttggacgagtcttctcggggctggtctccactggcctgaaggtcaggatcatggggcccaactatacccctgggaagaaggaggacctctacctgaagccaatccagagaacaatcttgatgatgggccgctacgtggagcccatcgaggatgtgccttgtgggaacattgtgggcctcgtgggcgtggaccagttcctggtgaagacgggcaccatcaccaccttcgagcacgcgcacaacatgcgggtgatgaagttcagcgtcagccctgttgtcagagtggccgtggaggccaagaacccggctgacctgcccaagctggtggaggggctgaagcggctggccaagtccgaccccatggtgcagtgcatcatcgaggagtcgggagagcatatcatcgcgggcgccggcgagctgcacctggagatctgcctgaaggacctggaggaggaccacgcctgcatccccatcaagaaatctgacccggtcgtctcgtaccgcgagacggtcagtgaagagtcgaacgtgctctgcctctccaagtcccccaacaagcacaaccggctgtacatgaaggcgcggcccttccccgacggcctggccgaggacatcgataaaggcgaggtgtccgcccgtcaggagctcaagcagcgggcgcgctacctggccgagaagtacgagtgggacgtggctgaggcccgcaagatctggtgctttgggcccgacggcaccggccccaacatcctcaccgacatcaccaagggtgtgcagtacctcaacgagatcaaggacagtgtggtggccggcttccagtgggccaccaaggagggcgcactgtgtgaggagaacatgcggggtgtgcgcttcgacgtccacgacgtcaccctgcacgccgacgccatccaccgcggagggggccagatcatccccacagcacggcgctgcctctatgccagtgtgctgaccgcccagccacgcctcatggagcccatctaccttgtggagatccagtgtccagagcaggtggtcggtggcatctacggggttttgaacaggaagcggggccacgtgttcgaggagtcccaggtggccggcacccccatgtttgtggtcaaggcctatctgcccgtcaacgagtcctttggcttcaccgctgacctgaggtccaacacgggcggccaggcgttcccccagtgtgtgtttgaccactggcagatcctgcccggagaccccttcgacaacagcagccgccccagccaggtggtggcggagacccgcaagcgcaagggcctgaaagaaggcatccctgccctggacaacttcctggacaaattgtaggcggcccttcctgcagcgcctgccgccccggggactcgcagcacccacagcaccacgtcctcgaattctcagacgacacctggagactgtcccgacacagcgacgctcccctgagaggtttctggggcccgctgcgtgccatcactcaaccataacacttgatgccgtttctttcaatatttatttccagagtccggaggcagcagacacgccctcttagtagggacttaatgggccggtcggggagggggaggcgggatgggacacccaacactttttccatttcttcagagggaaactcagatgtccaaactaattttaacaaacgcattaagaggtttatttgggtacatggcccgcagtggcttttgccccagaaaggggaaaggaacacgcgggtagatgatttctagcaggcaggaagtcctgtgcggtgtcaccatgagcacctccagctgtactagtgccattggaataataaatttgataaggtggtg

SEQ ID NO: 10003 - DNA, 1832 bp, Homo sapiens
  source 1..1832: mol_type = unassigned DNA
ctcttccgccgtcgtcgccgccatcctcggcgcgactcgcttctttcggttctacctgggagaatccaccgccatccgccaccatggtgaacttcacggtagaccagatccgcgccatcatggacaagaaggccaacatccgcaacatgtctgtcatcgcccacgtggaccatggcaagtccacgctgacagactccctggtgtgcaaggcgggcatcatcgcctcggcccgggccggggagacacgcttcactgatacccggaaggacgagcaggagcgttgcatcaccatcaagtcaactgccatctccctcttctacgagctctcggagaatgacttgaacttcatcaagcagagcaaggacggtgccggcttcctcatcaacctcattgactcccccgggcatgtcgacttctcctcggaggtgactgctgccctccgagtcaccgatggcgcattggtggtggtggactgcgtgtcaggcgtgtgcgtgcagacggagacagtgctgcggcaggccattgccgagcgcatcaagcctgtgctgatgatgaacaagatggaccgcgccctgctggagctgcagctggagcccgaggagctctaccagactttccagcgcatcgtggagaacgtgaacgtcatcatctccacctacggcgagggcgagagcggccccatgggcaacatcatgatcgatcctgtcctcggtaccgtgggctttgggtctggcctccacgggtgggccttcaccctgaagcagtttgccgagatgtatgtggccaagttcgccgccaagggggagggccagttggggcctgccgagcgggccaagaaagtagaggacatgatgaagaagctgtggggtgacaggtactttgacccagccaacggcaagttcagcaagtcagccaccagccccgaagggaagaagctgccacgcaccttctgccagctgatcctggaccccatcttcaaggtgtttgatgcgatcatgaatttcaagaaagaggagacagcaaaactgatagagaaactggacatcaaactggacagcgaggacaaggacaaagaaggcaaacccctgctgaaggctgtgatgcgccgctggctgcctgccggagacgccttgttgcagatgatcaccatccacctgccctcccctgtgacggcccagaagtaccgctgcgagctcctgtacgaggggcccccggacgacgaggctgccatgggcattaaaagctgtgaccccaaaggccctcttatgatgtatatttccaaaatggtgccaacctccgacaaaggtcggttctacgcctttggacgagtcttctcggggctggtctccactggcctgaaggtcaggatcatggggcccaactatacccctgggaagaaggaggacctctacctgaagccaatccagagaacaatcttgatgatgggccgctacgtggagcccatcgaggatgtgccttgtgggaacattgtgggcctcgtgggcgtggaccagttcctggtgaagacgggcaccatcaccaccttcgagcacgcgcacaacatgcgggtgatgaagttcagcgtcagccctgttgtcagagtggccgtggaggccaagaacccggctgacctgcccaagctggtggaggggctgaagcggctggccaagtccgaccccatggtgcagtgcatcatcgaggagtcgggagagcatatcatcgcgggcgccggcgagctgcacctggagatctgcctgaaggacctggaggaggaccacgcctgcatccccatcaagaaggagactgtctcaaaaaaaaaaaaaaaaaaaaaa

SEQ ID NO: 10004 - DNA, 765 bp, Homo sapiens
  source 1..765: mol_type = unassigned DNA
cgccgagcgtggacgcaggcggatctctgaagagctgggtcgccagcctctcccgcgcacgttgcctggcctccagcacctacttggtcccgcgcgctccctcgtgtcgcccctcggagcagcagccgccgcggtcgccgctacccggaaagaagtcagagacgccgcgaggtcgccgccaccgccatgcccaagaataaagagtatgctcaggtaatcaaaatgttgggaaatggacggctagaagcaatgtgtttcgatggtgtaaagaggttatgtcacatcagaggaaaattgagaaaaaaggtttggataaatacctcggacattattttggttggtctccgagactaccaggataacaaagctgatgtaattttaaaatacaatgcagacgaagctagaagtctgaaggcatacggcgagcttccagagcatgctaaaatcaatgaaactgatacatttggtcctggagatgatgatgaaattcagtttgatgacattggagatgatgatgaagatattgatgacatctaaattgaactcaacattttacattccatcttttctgaagattgtcctacaatttggattttgatcatgacaaagaagattaaaatttcattagcatgaatgcaatttgttaaagcagactgatttgtttctaagatatttttggtttttttaaaactgataataatgctgaattatcttaagtgagatgttaagcccactttgttcttttaatgtaatggagcttatggg

SEQ ID NO: 10005 - DNA, 4427 bp, Homo sapiens
  source 1..4427: mol_type = unassigned DNA
cgcggcgccatttgctgccgccgagcgtggacgcaggcggatctctgaagagctgggtcgccagcctctcccgcgcacgttgcctggcctccagcacctacttggtcccgcgcgctccctcgtgtcgcccctcggagcagcagccgccgcggtcgccgctacccggaaagaagtcagagacgccgcgaggtcgccgccaccgccatgcccaagaataaaggtaaaggaggtaaaaacagacgcaggggtaagaatgagaatgaatctgaaaaaagagaactggtattcaaagaggatggtcaggagtatgctcaggtaatcaaaatgttgggaaatggacggctagaagcaatgtgtttcgatggtgtaaagaggttatgtcacatcagaggaaaattgagaaaaaaggtttggataaatacctcggacattattttggttggtctccgagactaccaggataacaaagctgatgtaattttaaaatacaatgcagacgaagctagaagtctgaaggcatacggcgagcttccagagcatgctaaaatcaatgaaactgatacatttggtcctggagatgatgatgaaattcagtttgatgacattggagatgatgatgaagatattgatgacatctaaattgaactcaacattttacattccatcttttctgaagattgtcctacaatttggattttgatcatgacaaagaagattaaaatttcattagcatgaatgcaatttgttaaagcagactgatttgtttctaagatatttttggtttttttaaaactgataataatgctgaattatcttaagtgagatgttaagcccactttgttcttttaatgtaatggagcttatgggtagaagaccatgtctactaattacaaaaaaaaaaaaaaaccatgcattgctgcttttcctaccacttccagtaagaaaatgggtgttttgaagaaatcatttgccttgtcctcacggaatctgattaagccctggcctcttgattgtatagagtcattgtgtatattccagttacctagatattcccttgagattttgatacaatttgagggaggcagaagtctgcagttgaagaaaaaaaataagtctgtttgtcatatttaagtagcctgtggctatttttatactgattttgatatcatgttcttttcatagtcgtattttgccaccgtaaacataaaaaaaaaaaaaaagatttccaaaatgccgttttcagaacctgggttttaatagcagtattgaatttgtaagcttagtagttgcagaaattgaacactaggtggcactcagttatcttaacaggggaagtactgatacaattgttgacttttcttttactatgtgtaagaaataccccaaacatgaaaagattgttttgatcatatgcatgtatgtagaatatttttgcagagcagaaagattatgttagaagtgtgatttttattttcagaagtcatatacatgtaagctacaattttgagtgctttataaacacttaagatatatatataaattttaatttcatagcaacttgtaaaaaataaaatacttgttgaaaagcctttttcaacatatccctaagctaagggaagaggaaggaataacaactcagtgaaaagatggtctccagtttctgaatgaaaaagctacagctgagaaataaaataaaatgtcatgctgcagaatatgttatacccttattttgtgttaaggatatattttattatgtgaatggttttgtttttgttttttgtttttgttttttgcttgtattgggaattagctttactggtaacttccttatttagtttttagtggtcaactctaataaaatgaaactagggctgagctagttagccctcactagccaaactgaaactctatgcaacattaaaagaagagatccatcatgtagcttgtgacacttttattttattagtcaccggggaacttttcagtgatgaaaatacacagggtaataaaccttcacatggcttcaaaaggaaaacaagcaaatcttctctaatctactcttactataatttcctaagtgtacaccaaactctggatttaaaaatctgaagtactatagaacattaagttgaagaatggaaattaagagtacgtattcatggtttatatttcttattctatggagttcgtgaacacatctaggtggaatgcatctgagactaagggctggtttttaatcctcataagaaaccagccttgaagaattaacaattctcttcattggtattctaaacctcctaagatatttaggcttctgtacataaaagtgtttttgctaaatttacagtatatatagatcctttcatattattttactaagaatgtttgaactttgcatatttgatatagttcctggtaggaatagcacagctcaaacattagtttttctacttacctcctctaacacgtggtttgtctggagagtttctaaaaattcagctataaccccagttcatgtatttactggtgattgttcttgctgaggtagtaacagcccaatcttgggctgttaaatcctaggaaatctcgaatcatagtgattaaaatagttggggtaaagttgtagcttatatgcaatactacttggaggaattcttctactaatttgtatttaatgtggaaattgtatagtttcattgatttaatcataaataatggaaatggtctccaagaagttttatttttcatttttttgcttatacactctgattcctataatacagtgctataagctatgcacagaaaataaaatgtttgaaatccaagaataatggttcttactgctaagagggagtaatagttattactaatgattttgattgggttgcatttttgttgcaatgtttattccacttgcagttagaatatgaatatgttttatcactagtgtggctaaataaccaaacatttgtgtaaaaaaaaaaaaaagccaagatttcattgtttgttgaatatttcttaagcatctggcccctaaagagaccgcttcttaccaagcctgtaaactatgcatgatggaaattcttgtattttatttaggaatggctgttggtttactcaccacatctgtggaatcatggctataaatgtttgcttacaaactctttgtgacttgtaatttaacttaatctcatctaatgtaaatattagattatgatgttcagtaacatcttccataggtataaactgctgtcattattgatttcagagtaactctgagtaatcaaataggtaaaagcatgttttgagtaaaatagctagatttatactttacttgtatacagacttaacaacaaccggtattgactggattgacagctaaagtatcagaatgaaagcaaggtttttttgatgttacctgactgtcataaagatgaaaatgatttgtattggtatgaaatgcttatctttattctacttcgtaagggtaagttttatttatactctttggactcccatgaacttttgcacactgctttgtgtttttggtttaccctaaactaccatcctttttatctttgctttttttcttcctattcagaaaagagcaaaatgtgaaaagacacaagactctcaggtatagaatgaactgagcaatttggagaatgtattggactttgtcctctcttattcccccctcctagccctgcaagttgctaggtacttgtgaggcagtgtactggagaggggagagcatggatcctggggtcaaagggcctttgcccccacccttacttggccctctacctgcaggtgaccactggcacattctcctgcttgtctcagcttcaggttcttcacctctaagatggggatgatgaaaacagtacctgtcatgcagaattgttgggaggattgataatttagatgtttatacatgtaatgtacttagatcagtgtctgctcttttcacttgatatccagtactatgtaagatagaaggtgcatgtcttctgtattctgtatttcccatttcttttgcgtgcagtctttgattcgtacaatagaaggaacacgtagaatgtatatttgtacattcatgtcaacatagtatttgaaattgctaccaaactcatttaatttggcataagactaacagatgaagtctctcatttgcttgaagatattttacaaaataccaactgttctatatttctttagaaaaagattatagttattaatattgatacctctgataatattttattcttaaatcttcagtgattccttttactatagattcatgacagctaattagtactaactgatttagaggtttcctttcccatcatatggaatgatgtaaagaaatcagatacaaactactgcaattagaaaataaaatatgaacaactttcaacaatgta

SEQ ID NO: 10006 - DNA, 1390 bp, Homo sapiens
  source 1..1390: mol_type = unassigned DNA
agagagtgcgcgtcagcagtttattagagagctctgtagccagcctcttctgcgcacccacctgctgcatcttagttcagtcggctcttagagtagtaaccgccagaaaggagtcggaagaggtctcacgaggctgtcatcaccgccatgcccaagaataaaggtaaaggaggtaaaaacaggcgcaggggtaaaaatgagaatgaatctgaaaaaagagagttggtgtttaaagaggatggacaagagtatgctcaggtaatcaaaatgttgggaaatggacgattggaagcattgtgttttgatggtgtaaagaggttatgccatatcagagggaaattgagaaaaaaggtttggataaatacatcagacattatattggttggtctacgggactatcaggataacaaagctgatgtaattttaaagtacaatgcagatgaagctagaagcctgaaggcatatggcgagcttccagaacatgctaaaatcaatgaaacagacacatttggtcctggagatgatgatgaaatccagtttgacgatattggagatgatgatgaagacattgatgatatctaaattgaaccaagtgtttttacatgacaagttctctgaggatggttctacagttgggattttggccatcatcaaccaagaagagaaattcatttagtgtgtagtttctgaaagcaaactgatttattttcattgttttaaagtatttatttctttaaaagctgaggacactgaattaccttaagttaaatgttaatactttattgttttgatgtaatggaacttaaggataaaagaccataatatttgctgttaaaataaataaacgagtgcctttcctactgtgataacgtcaagtaattggatattttgaatacatttctgcctgataatcatgctgggttctaataagccctacttccacctaatctgtttacagtcttttggtatgtttcagttacttagatggtctcataaggtttctgatacaatttgaagacagaaatctgcatttagaatcagaaaacatggacatatttttcatatttatctagtcatatgtaattttatgctaacattgatagtttataaatccttttcatcctttgtgcctcggttattaaggaaaaaaaaatgtccaacatacagtttttaaagtgtggcagttttgagtagtaacttagaatgtataagattaagagttaaagaaaccgaacaataagtggcaaccaattatcttaacattggaaatactggggtgccattttgttttcaaaagttattcattgtaatccactgttttggctttcatgaacaagtaaattacagtgtataaatgaaaagcaatttcataataaattctataaactga

SEQ ID NO: 10007 - DNA, 746 bp, Homo sapiens
  source 1..746: mol_type = unassigned DNA
tcttagttcagtcggctcttagagtagtaaccgccagaaaggagtcggaagaggtctcacgaggctgtcatcaccgccatgcccaagaataaaggtaaaggaggtaaaaacaggcgcaggggtaaaaatgagaatgaatctgaaaaaagagagttggtgtttaaagaggatggacaagagtatgctcaggtaatcaaaatgttgggaaatggacgattggaagcattgtgttttgatggtgtaaagaggttatgccatatcagagggaaattgagaaaaaaggataacaaagctgatgtaattttaaagtacaatgcagatgaagctagaagcctgaaggcatatggcgagcttccagaacatgctaaaatcaatgaaacagacacatttggtcctggagatgatgatgaaatccagtttgacgatattggagatgatgatgaagacattgatgatatctaaattgaaccaagtgtttttacatgacaagttctctgaggatggttctacagttgggattttggccatcatcaaccaagaagagaaattcatttagtgtgtagtttctgaaagcaaactgatttattttcattgttttaaagtatttatttctttaaaagctgaggacactgaattaccttaagttaaatgttaatactttattgttttgatgtaatggaacttaaggataaaagaccataatatttgctgttaaaataaataaacgagtgcctttcctactgtga

SEQ ID NO: 10008 - DNA, 2858 bp, Homo sapiens
  source 1..2858: mol_type = unassigned DNA
agtattgcctgcacaaatatctaccaggtctgcgacgaatagctccagcaacttcgcaccgtgttttccactcagcctaccgacaggcactgtgcagattcaagcggagagatgtccaagcagtgaggccgctgctgcaccggccatcctgagcccctactcggccttcccgtctccgcttccccgccccgcactaggacccctgcagatgatcaggcggcagccggggtgatttccttcctcttttggcaacatggcgggcggagaagctggagtgactctagggcagccgcatctttcgcgtcaggatctcaccaccttggatgttaccaagttgacgccactttcacacgaagttatcagcagacaagccacaattaacataggtacaattggtcatgtagctcatgggaaatccacagtcgtcaaagctatttctggagttcatactgtcaggttcaaaaatgaactagaaagaaatattacaatcaagcttggatatgctaatgctaagatttataagcttgatgacccaagttgccctcggccagaatgttatagatcttgtgggagcagtacacctgacgagtttcctacggacattccagggaccaaagggaacttcaaattagtcagacatgtttcctttgttgactgtcctggccacgatattttgatggctactatgctgaacggtgcagcagtgatggatgcagctcttctgttgatagctggtaatgaatcttgccctcagcctcagacatcggaacacctggctgctatagagatcatgaaactgaagcatattttgattctacaaaataaaattgatttggtaaaagaaagtcaggctaaagaacaatacgagcagatccttgcatttgtccaaggtacagtagcagagggagctcccattattccaatttcagctcagctgaaatacaatattgaagttgtttgtgagtacatagtaaagaaaattccagtacccccaagagactttacttcagagccccggcttattgttattagatcttttgatgtcaacaaacctggctgtgaagttgatgaccttaagggaggtgtagctggtggtagtatcctaaaaggagtattaaaggtgggccaggagatagaagtaagacctggtattgtttccaaagatagtgaaggaaaactcatgtgtaaaccaatcttttccaaaattgtatcactttttgcggagcataatgatctgcaatatgctgctccaggcggtcttattggagttggaacaaaaattgaccccactttgtgccgggctgacagaatggtggggcaagtacttggtgcagtcggagctttacctgagatattcacagaattggaaatttcctatttcctgcttagacggcttctaggtgtacgcactgaaggagacaagaaagcagcaaaggttcaaaagctgtctaagaatgaagtgctcatggtgaacataggatccctgtcaacaggagggagagttagtgctgtcaaggccgatttgggtaaaattgttttgaccaatccagtgtgcacagaggtaggagaaaaaattgcccttagccgaagagttgaaaaacactggcgtttaattggttggggtcagataagaagaggagtgacaatcaagccaacagtagatgatgactgaagaataccagttaaataatacattcggatggatttggaagttggaattcctcttaacaaccaaggggtttattttcaaagcaatattggggaattgatttcacagttcgttaccttagtaggtaacggtaaggttattctctttttttttttttttttttttggttatgaaaacttagggactaaaattaatataaaaattggcataatgttggattgaatctacattttggcagaagttaaacattcccacataatgtcaaaattatacatcatgcagttctgtttttttgtttgttttattttgttttgtttttgagtctggctctgtcacccaggctggagtgcagtggcgtgatctgcaacctctgccccccgggttcaagcgattctcctgcctcagcctcccgagtagctgagattacaggtgcgcgccaccacacttggctaatttttgtattattagtagagacggggtttcagcatgttggctaggccggtctctcctgacctcagggtgatcagcccacctcggcctcacaaagtgctgggattacaggcgtgagccaccttgcccagcccacatcatacagtttgaaatgaaactttgccacaaccagcctttgctgtagcacacacatatatcactgaacctgtttgaaataaagttttttttctttttcatgattcgtctttgagtacctccaggctgaaagactgttgtaccagtaaaaacttaaaggcacaaattctccttgaagaccttctcccttttatgtggccccatattttatgttgctttatctttgaaattttgcatgaaaaggaaatgaatggattcgaatgaaattgtcctttagagcatgattacttgttcccatggacaaatatttttctccccttgctcttcctggcctgaaacacgggaaaccagagtcaaaagttatctccctctccctgtgatgccttgagatttttttctgcgttgtttaatgcctgaaatccaagtcttcctccatgggaaaatactgttataccaaataattctagatgagtaacaaagatctttttaggccttcattttatgttttttcttaactgttatattatgattgtgacatagattatactactactaatttttggatgtttcaaaaggtcaagaagtaaaagatgttagaaagcaa

SEQ ID NO: 10009 - DNA, 773 bp, Homo sapiens
  source 1..773: mol_type = unassigned DNA
ggcgggcggagaagctggagtgactctagggcagccgcatctttcgcgtcaggatctcaccaccttggatgttaccaagttgacgccactttcacacgaagttatcagcagacaagccacaattaacataggtacaattggtcatgtagctcatgggaaatccacagtcgtcaaagctatttctggagttcatactgtcaggttcaaaaatgaactagaaagaaatattacaatcaagcttggatatgctaatgctaagatttataagcttgatgacccaagttgccctcggccagaatgttatagatcttgtgggagcagtacacctgacgagtttcctacggacattccagggaccaaagggaacttcaaattagtcagacatgtttcctttgttgactgtcctggccacgatattttgatggctactatgctgaacggtgcagcagtgatggatgcagctcttctgttgataggtaaatacctcacaattggtttggacaaatcaatgtggaacaaatccaagatgaaatatttaaaggggaactaaggcctttaaggatcatatctattacctaagggtgacatgaatgggaactaacatgtcatccaggatgactttcctacctatcagctatcacaaaatactcaaaaagatagacttggggctgatagcttgcgagaattcttgtggtagcatttgagaaaaagaaaaaaagtcaatagttcatttttctcatttaaatcacatgaggtgatttatttagttttaa

SEQ ID NO: 10010 - DNA, 1445 bp, Homo sapiens
  source 1..1445: mol_type = unassigned DNA
atgttccaggaagtaaaggcagataaagttacaatgctgtggaataaaaaagctactgctgtgttggtaatagctagcacagatgttgacaagacaggagcttcctactatggagaacaaactctacactacattgcaacaaatggagaaagtgctgtagtgcaattaccaaaaaatggccccatttatgatgtagtttggaattctagttctactgagttttgtgctgtatatggttttatgcctgccaaagcgacaattttcaacttgaaatgtgatcctgtatttgactttggaactggtcctcgtaatgcagcctactatagccctcatggacatatattagtattagctggatttggaaatctgaggggacaaatggaagtgtgggatgtgaaaaactacaaacttatttctaaaccggtggcttctgattctacatattttgcttggtgcccggatggtgagcatattttaacagctacatgtgctcccaggttacgggttaataatggatacaaaatttggcattatactggctctatcttgcacaagtatgatgtgccatcaaatgcagaattatggcaggtttcttggcagccatttttggatggaatatttccagcaaaaacaataacttaccaagcagttccaagtgaagtacccaatgaggaacctaaagttgcaacagcttatagacccccagctttaagaaataaaccaatcaccaattccaaattgcatgaagaggaaccacctcagaatatgaaaccacaatcaggaaacgataagccattatcaaaaacagctcttaaaaatcaaaggaagcatgaagctaagaaagctgcaaagcaggaagcaagaagtgacaagagtccagatttggcacctactcctgccccacagagcacaccacgaaacactgtctctcagtcaatttctggggaccctgagatagacaaaaaaatcaagaacctaaagaagaaactgaaagcaatcgaacaactgaaagaacaagcagcaactggaaaacagctagaaaaaaatcagttggagaaaattcagaaagaaacagcccttctccaggagctggaagatttggaattgggtatttaaagattcacggaaagcaagttgatgaccagaaatcagtgcaaacacatcttctgttaaacccattggtatacacagaatattcctgtgcccacacttaatgtcaatctataattttaaccatttatccaagattctactaagtgtaaaattatttaataatgtctattaaattgatatttatatcttgcatcctatatcatgtcaatatgtgatatagaaaagagatacgtgaattttttagctaagcttgacagattgaaagacaagtgtcatttttttttgtagagggtgatatataccatgtaaatgaacaaagacattttaaattt

SEQ ID NO: 10011 - DNA, 2198 bp, Homo sapiens
  source 1..2198: mol_type = unassigned DNA
gatggctccggaaacaccaattcgctgtctccacgcatgaggagacgtgtaggggccgggttcggccctggtgaactctcacccgagcggtttctctttccgggacaacatggcgccgtccacgccgctcttgacagtccgaggatcagaaggactgtacatggtgaatggaccaccacattttacagaaagcacagtgtttccaagggaatctgggaagaattgcaaagtctgtatctttagtaaggatgggaccttgtttgcctggggcaatggagaaaaagtaaatattatcagtgtcactaacaagggactactgcactccttcgacctcctgaaggcagtttgccttgaattctcacccaaaaatactgtcctggcaacgtggcagccttacactacttctaaagatggcacagctgggatacccaacctacaactttatgatgtgaaaactgggacatgtttgaaatctttcatccagaaaaaaatgcaaaattggtgtccatcctggtcagaagatgaaactctttgtgcccgcaatgttaacaatgaagttcacttctttgaaaacaacaattttaacacaattgcaaataaattgcatttgcaaaaaattaatgattttgtattatcacctggaccccaaccatacaaggtggctgtctatgttccaggaagtaaaggtgcaccttcatttgttagattatatcagtaccccaactttgctggacctcatgcagctttagctaataaaagtttctttaaggcagataaagttacaatgctgtggaataaaaaagctactgctgtgttggtaatagctagcacagatgttgacaagacaggagcttcctactatggagaacaaactctacactacattgcaacaaatggagaaagtgctgtagtgcaattaccaaaaaatggccccatttatgatgtagtttggaattctagttctactgagttttgtgctgtatatggttttatgcctgccaaagcgacaattttcaacttgaaatgtgatcctgtatttgactttggaactggtcctcgtaatgcagcctactatagccctcatggacatatattagtattagctggatttggaaatctgaggggacaaatggaagtgtgggatgtgaaaaactacaaacttatttctaaaccggtggcttctgattctacatattttgcttggtgcccggatggtgagcatattttaacagctacatgtgctcccaggttacgggttaataatggatacaaaatttggcattatactggctctatcttgcacaagtatgatgtgccatcaaatgcagaattatggcaggtttcttggcagccatttttggatggaatatttccagcaaaaacaataacttaccaagcagttccaagtgaagtacccaatgaggaacctaaagttgcaacagcttatagacccccagctttaagaaataaaccaatcaccaattccaaattgcatgaagaggaaccacctcagaatatgaaaccacaatcaggaaacgataagccattatcaaaaacagctcttaaaaatcaaaggaagcatgaagctaagaaagctgcaaagcaggaagcaagaagtgacaagagtccagatttggcacctactcctgccccacagagcacaccacgaaacactgtctctcagtcaatttctggggaccctgagatagacaaaaaaatcaagaacctaaagaagaaactgaaagcaatcgaacaactgaaagaacaagcagcaactggaaaacagctagaaaaaaatcagttggagaaaattcagaaagaaacagcccttctccaggagctggaagatttggaattgggtatttaaagattcacggaaagcaagttgatgaccagaaatcagtgcaaacacatcttctgttaaacccattggtatacacagaatattcctgtgcccacacttaatgtcaatctataattttaaccatttatccaagattctactaagtgtaaaattatttaataatgtctattaaattgatatttatatcttgcatcctatatcatgtcaatatgtgatatagaaaagagatacgtgaattttttagctaagcttgacagattgaaagacaagtgtcatttttttttgtagagggtgatatataccatgtaaatgaacaaagacattttaaatttaa

SEQ ID NO: 10012 - DNA, 4463 bp, Homo sapiens
  source 1..4463: mol_type = unassigned DNA
cccccagtgaaggtgcgcgcgtggcggaggctggttttccgtctggtgaggggttacttccgggtcggacggcgctagctgcagcatcggagtgtggcagtgctgggctggccggcgggctgggctgcggcccgcgcgcggccggcgatgcaggggggcaactccggggtccgcaagcgcgaagaggagggcgacggggctggggctgtggctgcgccgccggccatcgactttcccgccgagggcccggaccccgaatatgacgaatctgatgttccagcagaaatccaggtgttaaaagaacccctacaacagccaaccttcccttttgcagttgcaaaccaactcttgctggtttctttgctggagcacttgagccacgtgcatgaaccaaacccacttcgttcaagacaggtgtttaagctactttgccagacgtttatcaaaatggggctgctgtcttctttcacttgtagtgacgagtttagctcattgagactacatcacaacagagctattactcacttaatgaggtctgctaaagagagagttcgtcaggatccttgtgaggatatttctcgtatccagaaaatcagatcaagggaagtagccttggaagcacaaacttcacgttacttaaatgaatttgaagaacttgccatcttaggaaaaggtggatacggaagagtatacaaggtcaggaataaattagatggtcagtattatgcaataaaaaaaatcctgattaagggtgcaactaaaacagtttgcatgaaggtcctacgggaagtgaaggtgctggcaggtcttcagcaccccaatattgttggctatcacaccgcgtggatagaacatgttcatgtgattcagccacgagcagacagagctgccattgagttgccatctctggaagtgctctccgaccaggaagaggacagagagcaatgtggtgttaaaaatgatgaaagtagcagctcatccattatctttgctgagcccaccccagaaaaagaaaaacgctttggagaatctgacactgaaaatcagaataacaagtcggtgaagtacaccaccaatttagtcataagagaatctggtgaacttgagtcgaccctggagctccaggaaaatggcttggctggtttgtctgccagttcaattgtggaacagcagctgccactcaggcgtaattcccacctagaggagagtttcacatccaccgaagaatcttccgaagaaaatgtcaactttttgggtcagacagaggcacagtaccacctgatgctgcacatccagatgcagctgtgtgagctctcgctgtgggattggatagtcgagagaaacaagcggggccgggagtatgtggacgagtctgcctgtccttatgttatggccaatgttgcaacaaaaatttttcaagaattggtagaaggtgtgttttacatacataacatgggaattgtgcaccgagatctgaagccaagaaatatttttcttcatggccctgatcagcaagtaaaaataggagactttggtctggcctgcacagacatcctacagaagaacacagactggaccaacagaaacgggaagagaacaccaacacatacgtccagagtgggtacttgtctgtacgcttcacccgaacagttggaaggatctgagtatgatgccaagtcagatatgtacagcttgggtgtggtcctgctagagctctttcagccgtttggaacagaaatggagcgagcagaagttctaacaggtttaagaactggtcagttgccggaatccctccgtaaaaggtgtccagtgcaagccaagtatatccagcacttaacgagaaggaactcatcgcagagaccatctgccattcagctgctgcagagtgaacttttccaaaattctggaaatgttaacctcaccctacagatgaagataatagagcaagaaaaagaaattgcagaactaaagaagcagctaaacctcctttctcaagacaaaggggtgagggatgacggaaaggatgggggcgtgggatgaaagtggacttaacttttaaggtagttaactggaatgtaaatttttaatctttattagggtatagttggtacaatgcttcgttgtatttagtaagcctttacaagacttgttaaagatgtcagagtgccccaagctgccgttccttcccttcctgccccacaagctccttttcctgaatttcctacctaaatattaaccatatgcctagtctctgaaactaaaaacttggacctcatcctcaattattttctcctttcaactctgttgaccctctgtctggtcttcctctagaaggtaccgcagaaattgatgtgtgctccctgccctcgtcactgcccaagcccgggcctgcacatactcactggactgttccagttttgacagctgccagtcttcctgcccctttcacactgcagctgaagttcattacctgaaggacgcctcatcatttcattccttggctccaaaccttctgctgcctctaagataaaagctcaacttcttaacagtgtacagtgtgcaacttccaacctttttatctgttctctccaccttcagtttagcgtcattccaaaaccacacccttgcaaagctttgtactccgcaccccagatgatctccaggcagctcagatctctttcctgcctttgccctgcactgttccccggtacttcctcctttattgtagcactcagctccccagccaatctgtacatccctcagaggcagcgatctgatgaattggtttttgaatcccagaaagggtctgccatggagttggcagtcatcacggtagatggcgtatgattttgctgaattttaaataaaatgaaaaccataaattacatgatgcttttattgacacttgacaactggcctaaataaaaagactctgactctaatacaagtccccttactgataataggcatgaaagagcaccattcttaaaatctaaaccctttaaaatcagttacggcaattcacttaaggagcttgagggccgtgttaaaaggagccaggttttcacaagacctcatccacctctgcacattggctggcactgtcacactgcagcctccgatctgctggagtacagaccacagcaccacgtctgctacggtgagttcattcccagcgagccaagggctcttcccaagagcagagttcatggagcggaaaacagcggctttttctttactgcttccctcttttaactgaaaaatcgcaatatctacccagctatctataagggttgcgttgacagcattatgcttctggccaaacagagagaacaagaaacgtgcaatgttcccttcgccttcgatggggcacatcgtctggatgctgaatttcatctgcgtcttcggcactgaaaagaaaaaacacgccaggtagcatcaccagagcagccctgagggaagtactcgcacagtggggaaggggacagtcaccaaacaccacagactgatgacatgggaaagggtgttttcaagaagaacatcacattttcagtctgtctctaagatgcttactactgaaaagggtttaagtgcaaactatgttaaaaaagtaaccaaagagtcattcctggtatttgattatgacacttctgaagctagaagggacctcagaccacctgctccaatccctgctgcctaaggttttgggggctgagggctggaaacccaggagctgcatctcccaggctcttggcctcataatcgccttctgtgagactgagggcaattaagatatgaatgacatgaactcgcttatctccatatcaacataaaccagaagaggcatacatctgtgggatagtcaatacataacatcctatctttatatggccatatgagaagataacttcagtgtccctatgatggtaagttcttgaatgtgagggcaagatggctgtgatagccatgactccccgctttgcctggttggacagaacccccttccccaaatgctcacagtcccccccttgagctgtgtctcactcagagaccctaaattttgcagacgaacaagggcatctttgcgttgcttcatctctgctcctcctctagaactatcccacaggctttctagacttagaatatctgacctgatgcaaatcgctatgtggccagtatgccacagaatgtcctaaacccttgctgcctcttatcaaaaccatgttgcacatctcatcatatagtacagctaacccttgaacagtgggggggttagggacactgacccccgactgctgtgcagtcgaaaatccacataaaacttctgactccttcaaaacttaagcactaatagcctactattcatgggaagccttacccatcacagttgattaacacgttttgtatggtctgtatattatatgctatattcttacaataaacttgagaaaatgttaagaaaa

SEQ ID NO: 10013 - DNA, 2294 bp, Homo sapiens
  source 1..2294: mol_type = unassigned DNA
ggacggcgctagctgcagcatcggagtgtggcagtgctgggctggccggcgggctgggctgcggcccgcgcgcggccggcgatgcaggggggcaactccggggtccgcaagcgcgaagaggagggcgacggggctggggctgtggctgcgccgccggccatcgactttcccgccgagggcccggaccccgaatatgacgaatctgatgttccagcagaaatccaggtgttaaaagaacccctacaacagccaaccttcccttttgcagttgcaaaccaactcttgctggtttctttgctggagcacttgagccacgtgcatgaaccaaacccacttcgttcaagacaggtgtttaagcgatccttgtgaggatatttctcgtatccagaaaatcagatcaagggaagtagccttggaagcacaaacttcacgttacttaaatgaatttgaagaacttgccatcttaggaaaaggtggatacggaagagtatacaaggtcaggaataaattagatggtcagtattatgcaataaaaaaaatcctgattaagggtgcaactaaaacagtttgcatgaaggtcctacgggaagtgaaggtgctggcaggtcttcagcaccccaatattgttggctatcacaccgcgtggatagaacatgttcatgtgattcagccacgagcagacagagctgccattgagttgccatctctggaagtgctctccgaccaggaagaggacagagagcaatgtggtgttaaaaatgatgaaagtagcagctcatccattatctttgctgagcccaccccagaaaaagaaaaacgctttggagaatctgacactgaaaatcagaataacaagtcggtgaagtacaccaccaatttagtcataagagaatctggtgaacttgagtcgaccctggagctccaggaaaatggcttggctggtttgtctgccagttcaattgtggaacagcagctgccactcaggcgtaattcccacctagaggagagtttcacatccaccgaagaatcttccgaagaaaatgtcaactttttgggtcagacagaggcacagtaccacctgatgctgcacatccagatgcagctgtgtgagctctcgctgtgggattggatagtcgagagaaacaagcggggccgggagtatgtggacgagtctgcctgtccttatgttatggccaatgttgcaacaaaaatttttcaagaattggtagaaggtgtgttttacatacataacatgggaattgtgcaccgagatctgaagccaagaaatatttttcttcatggccctgatcagcaagtaaaaataggagactttggtctggcctgcacagacatcctacagaagaacacagactggaccaacagaaacgggaagagaacaccaacacatacgtccagagtgggtacttgtctgtacgcttcacccgaacagttggaaggatctgagtatgatgccaagtcagatatgtacagcttgggtgtggtcctgctagagctctttcagccgtttggaacagaaatggagcgagcagaagttctaacaggtttaagaactggtcagttgccggaatccctccgtaaaaggtgtccagtgcaagccaagtatatccagcacttaacgagaaggaactcatcgcagagaccatctgccattcagctgctgcagagtgaacttttccaaaattctggaaatgttaacctcaccctacagatgaagataatagagcaagaaaaagaaattgcagaactaaagaagcagctaaacctcctttctcaagacaaagggtttagcgtcattccaaaaccacacccttgcaaagctttgtactccgcaccccagatgatctccaggcagctcagatctctttcctgcctttgccctgcactgttccccggtacttcctcctttattgtagcactcagctccccagccaatctgtacatccctcagaggcagcgatctgatgaattggtttttgaatcccagaaagggtctgccatggagttggcagtcatcacggtagatggcgtatgattttgctgaattttaaataaaatgaaaaccataaattacatgatgcttttattgacacttgacaactggcctaaataaaaagactctgactctaatacaagtccccttactgataataggcatgaaagagcaccattcttaaaatctaaaccctttaaaatcagttacggcaattcacttaaggagcttgagggccgtgttaaaaggagccaggttttcacaagacctcatccacctctgc

SEQ ID NO: 10014 - DNA, 4646 bp, Homo sapiens
  source 1..4646: mol_type = unassigned DNA
ggaaagtccaccttccccaacaaggccagcctgggaacatggagtggcagcggccgcagccaatgagagagcaaacgcgcggaaagtttgctcaatgggcgatgtccgagataggctgtcactcaggtggcagcggcagaggccgggctgagacgtggccaggggaacacggctggctgtccaggccgtcggggcggcagtagggtccctagcacgtccttgccttcttgggagctccaagcggcgggagaggcaggcgtcagtggctgcgcctccatgcctgcgcgcggggcgggacgctgatggagcgcgccatcagcccggggctgctggtacgggcgctgctgctgctgctgctgctgctggggctcgcggcaaggacggtggccgcggggcgcgcccgtggcctcccagcgccgacggcggaggcggcgttcggcctcggggcggccgctgctcccacctcagcgacgcgagtaccggcggcgggcgccgtggctgcggccgaggtgactgtggaggacgctgaggcgctgccggcagccgcgggagagcaggagcctcggggtccggaaccagacgatgagacagagttgcgaccgcgcggcaggtcattagtaattatcagcactttagatgggagaattgctgccttggatcctgaaaatcatggtaaaaagcagtgggatttggatgtgggatccggttccttggtgtcatccagccttagcaaaccagaggtatttgggaataagatgatcattccttccctggatggagccctcttccagtgggaccaagaccgtgaaagcatggaaacagttcctttcacagttgaatcacttcttgaatcttcttataaatttggagatgatgttgttttggttggaggaaaatctctgactacatatggactcagtgcatatagtggaaaggtgaggtatatctgttcagctctgggttgtcgccaatgggatagtgacgaaatggaacaagaggaagacatcctgcttctacagcgtacccaaaaaactgttagagctgtcggacctcgcagtggcaatgagaagtggaatttcagtgttggccactttgaacttcggtatattccagacatggaaacgagagccggatttattgaaagcacctttaagcccaatgagaacacagaagagtctaaaattatttcagatgtggaagaacaggaagctgccataatggacatagtgataaaggtttcggttgctgactggaaagttatggcattcagtaagaagggaggacatctggaatgggagtaccagttttgtactccaattgcatctgcctggttacttaaggatgggaaagtcattcccatcagtctttttgatgatacaagttatacatctaatgatgatgttttagaagatgaagaagacattgtagaagctgccagaggagccacagaaaacagtgtttacttgggaatgtatagaggccagctgtatctgcagtcatcagtcagaatttcagaaaagtttccttcaagtcccaaggctttggaatctgtcactaatgaaaacgcaattattcctttaccaacaatcaaatggaaacccttaattcattctccttccagaactcctgtcttggtaggatctgatgaatttgacaaatgtctcagtaatgataagttttctcatgaagaatatagtaatggtgcactttcaatcttgcagtatccatatgataatggttattatctaccatactacaagagggagaggaacaaacgaagcacacagattacagtcagattcctcgacaacccacattacaacaagaatatccgcaaaaaggatcctgttcttcttttacactggtggaaagaaatagttgcaacgattttgttttgtatcatagcaacaacgtttattgtgcgcaggcttttccatcctcatcctcacaggcaaaggaaggagtctgaaactcagtgtcaaactgaaaataaatatgattctgtaagtggtgaagccaatgacagtagctggaatgacataaaaaactctggatatatatcacgatatctaactgattttgagccaattcaatgcctgggacgtggtggctttggagttgtttttgaagctaaaaacaaagtagatgactgcaattatgctatcaagaggatccgtctccccaatagggaattggctcgggaaaaggtaatgcgagaagttaaagccttagccaagcttgaacacccgggcattgttagatatttcaatgcctggctcgaagcaccaccagagaagtggcaagaaaagatggatgaaatttggctgaaagatgaaagcacagactggccactcagctctcctagcccaatggatgcaccatcagttaaaatacgcagaatggatcctttcgctacaaaagaacatattgaaatcatagctccttcaccacaaagaagcaggtctttttcagtagggatttcctgtgaccagacaagttcatctgagagccagttctcaccactggaattctcaggaatggaccatgaggacatcagtgagtcagtggatgcagcatacaacctccaggacagttgccttacagactgtgatgtggaagatgggactatggatggcaatgatgaggggcactcctttgaactttgtccttctgaagcttctccttatgtaaggtcaagggagagaacctcctcttcaatagtatttgaagattctggctgtgataatgcttccagtaaagaagagccgaaaactaatcgattgcatattggcaaccattgtgctaataaactaactgctttcaagcccaccagtagcaaatcttcttctgaagctacattgtctatttctcctccaagaccaaccactttaagtttagatctcactaaaaacaccacagaaaaactccagcccagttcaccaaaggtgtatctttacattcaaatgcagctgtgcagaaaagaaaacctcaaagactggatgaatggacgatgtaccatagaggagagagagaggagcgtgtgtctgcacatcttcctgcagatcgcagaggcagtggagtttcttcacagtaaaggactgatgcacagggacctcaagccatccaacatattctttacaatggatgatgtggtcaaggttggagactttgggttagtgactgcaatggaccaggatgaggaagagcagacggttctgaccccaatgccagcttatgccagacacacaggacaagtagggaccaaactgtatatgagcccagagcagattcatggaaacagctattctcataaagtggacatcttttctttaggcctgattctatttgaattgctgtatccattcagcactcagatggagagagtcaggaccttaactgatgtaagaaatctcaaatttccaccattatttactcagaaatatccttgtgagtacgtgatggttcaagacatgctctctccatcccccatggaacgacctgaagctataaacatcattgaaaatgctgtatttgaggacttggactttccaggaaaaacagtgctcagacagaggtctcgctccttgagttcatcgggaacaaaacattcaagacagtccaacaactcccatagccctttgccaagcaattagccttaagttgtgctagcaaccctaataggtgatgcagataatagcctacttcttagaatatgcctgtccaaaattgcagacttgaaaagtttgttcttcgctcaatttttttgtggactactttttttatatcaaatttaagctggatttgggggcataacctaatttgagccaactcctgagttttgctatacttaaggaaagggctatctttgttctttgttagtctcttgaaactggctgctggccaagctttatagccctcaccatttgcctaaggaggtagcagcaatccctaatatatatatatagtgagaactaaaatggatatatttttataatgcagaagaaggaaagtccccctgtgtggtaactgtattgttctagaaatatgctttctagagatatgatgattttgaaactgatttctagaaaaagctgactccatttttgtccctggcgggtaaattaggaatctgcactattttggaggacaagtagcacaaactgtataacggtttatgtccgtagttttatagtcctatttgtagcattcaatagctttattccttagatggttctagggtgggtttacagctttttgtacttttacctccaataaagggaaaatgaagctttttatgtaaattggttgaaaggtctagttttgggaggaaaaaagccgtagtaagaaatggatcatatatattacaactaacttcttcaactatggactttttaagcctaatgaaatcttaagtgtcttatatgtaatcctgtaggttggtacttcccccaaactgattataggtaacagtttaatcatctcacttgctaacatgtttttatttttcactgtaaatatgtttatgttttatttataaaaattctgaaatcaatccatttgggttggtggtgtacagaacacacttaagtgtgttaacttgtgacttctttcaagtctaaatgatttaataaaactttttttaaatt

SEQ ID NO: 10015 - DNA, 4402 bp, Homo sapiens
  source 1..4402: mol_type = unassigned DNA
agtagggtccctagcacgtccttgccttcttgggagctccaagcggcgggagaggcaggcgtcagtggctgcgcctccatgcctgcgcgcggggcgggacgctgatggagcgcgccatcagcccggggctgctggtacgggcgctgctgctgctgctgctgctgctggggctcgcggcaaggacggtggccgcggggcgcgcccgtggcctcccagcgcctcagcgacgcgagtaccggcggcgggcgccgtggctgcggccgaggtgactgtggaggacgctgaggcgctgccggcagccgcgggagagcaggagcctcggggtccggaaccagacgatgagacagagttgcgaccgcgcggcaggtcattagtaattatcagcactttagatgggagaattgctgccttggatcctgaaaatcatggtaaaaagcagtgggatttggatgtgggatccggttccttggtgtcatccagccttagcaaaccagaggtatttgggaataagatgatcattccttccctggatggagccctcttccagtgggaccaagaccgtgaaagcatggaaacagttcctttcacagttgaatcacttcttgaatcttcttataaatttggagatgatgttgttttggttggaggaaaatctctgactacatatggactcagtgcatatagtggaaaggtgaggtatatctgttcagctctgggttgtcgccaatgggatagtgacgaaatggaacaagaggaagacatcctgcttctacagcgtacccaaaaaactgttagagctgtcggacctcgcagtggcaatgagaagtggaatttcagtgttggccactttgaacttcggtatattccagacatggaaacgagagccggatttattgaaagcacctttaagcccaatgagaacacagaagagtctaaaattatttcagatgtggaagaacaggaagctgccataatggacatagtgataaaggtttcggttgctgactggaaagttatggcattcagtaagaagggaggacatctggaatgggagtaccagttttgtactccaattgcatctgcctggttacttaaggatgggaaagtcattcccatcagtctttttgatgatacaagttatacatctaatgatgatgttttagaagatgaagaagacattgtagaagctgccagaggagccacagaaaacagtgtttacttgggaatgtatagaggccagctgtatctgcagtcatcagtcagaatttcagaaaagtttccttcaagtcccaaggctttggaatctgtcactaatgaaaacgcaattattcctttaccaacaatcaaatggaaacccttaattcattctccttccagaactcctgtcttggtaggatctgatgaatttgacaaatgtctcagtaatgataagttttctcatgaagaatatagtaatggtgcactttcaatcttgcagtatccatatgataatggttattatctaccatactacaagagggagaggaacaaacgaagcacacagattacagtcagattcctcgacaacccacattacaacaagaatatccgcaaaaaggatcctgttcttcttttacactggtggaaagaaatagttgcaacgattttgttttgtatcatagcaacaacgtttattgtgcgcaggcttttccatcctcatcctcacaggcaaaggaaggagtctgaaactcagtgtcaaactgaaaataaatatgattctgtaagtggtgaagccaatgacagtagctggaatgacataaaaaactctggatatatatcacgatatctaactgattttgagccaattcaatgcctgggacgtggtggctttggagttgtttttgaagctaaaaacaaagtagatgactgcaattatgctatcaagaggatccgtctccccaatagggaattggctcgggaaaaggtaatgcgagaagttaaagccttagccaagcttgaacacccgggcattgttagatatttcaatgcctggctcgaagcaccaccagagaagtggcaagaaaagatggatgaaatttggctgaaagatgaaagcacagactggccactcagctctcctagcccaatggatgcaccatcagttaaaatacgcagaatggatcctttcgctacaaaagaacatattgaaatcatagctccttcaccacaaagaagcaggtctttttcagtagggatttcctgtgaccagacaagttcatctgagagccagttctcaccactggaattctcaggaatggaccatgaggacatcagtgagtcagtggatgcagcatacaacctccaggacagttgccttacagactgtgatgtggaagatgggactatggatggcaatgatgaggggcactcctttgaactttgtccttctgaagcttctccttatgtaaggtcaagggagagaacctcctcttcaatagtatttgaagattctggctgtgataatgcttccagtaaagaagagccgaaaactaatcgattgcatattggcaaccattgtgctaataaactaactgctttcaagcccaccagtagcaaatcttcttctgaagctacattgtctatttctcctccaagaccaaccactttaagtttagatctcactaaaaacaccacagaaaaactccagcccagttcaccaaaggtgtatctttacattcaaatgcagctgtgcagaaaagaaaacctcaaagactggatgaatggacgatgtaccatagaggagagagagaggagcgtgtgtctgcacatcttcctgcagatcgcagaggcagtggagtttcttcacagtaaaggactgatgcacagggacctcaagccatccaacatattctttacaatggatgatgtggtcaaggttggagactttgggttagtgactgcaatggaccaggatgaggaagagcagacggttctgaccccaatgccagcttatgccagacacacaggacaagtagggaccaaactgtatatgagcccagagcagattcatggaaacagctattctcataaagtggacatcttttctttaggcctgattctatttgaattgctgtatccattcagcactcagatggagagagtcaggaccttaactgatgtaagaaatctcaaatttccaccattatttactcagaaatatccttgtgagtacgtgatggttcaagacatgctctctccatcccccatggaacgacctgaagctataaacatcattgaaaatgctgtatttgaggacttggactttccaggaaaaacagtgctcagacagaggtctcgctccttgagttcatcgggaacaaaacattcaagacagtccaacaactcccatagccctttgccaagcaattagccttaagttgtgctagcaaccctaataggtgatgcagataatagcctacttcttagaatatgcctgtccaaaattgcagacttgaaaagtttgttcttcgctcaatttttttgtggactactttttttatatcaaatttaagctggatttgggggcataacctaatttgagccaactcctgagttttgctatacttaaggaaagggctatctttgttctttgttagtctcttgaaactggctgctggccaagctttatagccctcaccatttgcctaaggaggtagcagcaatccctaatatatatatatagtgagaactaaaatggatatatttttataatgcagaagaaggaaagtccccctgtgtggtaactgtattgttctagaaatatgctttctagagatatgatgattttgaaactgatttctagaaaaagctgactccatttttgtccctggcgggtaaattaggaatctgcactattttggaggacaagtagcacaaactgtataacggtttatgtccgtagttttatagtcctatttgtagcattcaatagctttattccttagatggttctagggtgggtttacagctttttgtacttttacctccaataaagggaaaatgaagctttttatgtaaattggttgaaaggtctagttttgggaggaaaaaagccgtagtaagaaatggatcatatatattacaactaacttcttcaactatggactttttaagcctaatgaaatcttaagtgtcttatatgtaatcctgtaggttggtacttcccccaaactgattataggtaacagtttaatcatctcacttgctaacatgtttttatttttcactgtaaatatgtttatgttttatttataaaaattctgaaatcaatccatttgggttggtggtgtacagaacacacttaagtgtgttaacttgtgacttctttcaagtctaaatgatttaataaaactttttttaaatt

SEQ ID NO: 10016 - DNA, 1608 bp, Homo sapiens
  source 1..1608: mol_type = unassigned DNA
ggagcctaggactgagggcgatggctgctgtggccgtggctgttcgcgaggactcgggatccgggatgaaggcggagcttccccctgggcctggggcagtggggagggaaatgaccaaagaagaaaagctgcagcttcggaaggaaaagaaacagcagaagaagaaacggaaggaagaaaagggggcagaaccagagactggctctgctgtatctgcagcccaatgtcaaggcccaaccagagaactgccagaatcgggcattcagttgggcactcctcgggagaaagttccagctggtcggagtaaggccgaacttcgggctgagcgtcgagccaagcaggaggccgagcgggccctgaaacaggcaagaaaaggggaacaaggaggaccacctcctaaggccagccccagcacagctggagaaaccccctcaggagtgaagcgtctccctgagtaccctcaggttgatgacctacttctgagaaggcttgttaaaaaaccagagcgtcaacaggttcctacacgaaaggattatggatccaaagtcagtctcttctctcacctaccccagtacagcagacaaaactctctgacccagtttatgagcatcccatcctctgtgatccacccagccatggtgcgactcggcctgcagtactcccagggcctggtcagtggctccaatgcccggtgtattgccctgcttcgtgccttgcagcaggtgattcaggattacacaacaccgcctaatgaagaactctccagggatctagtgaataaactaaaaccctacatgagcttcctgactcagtgccgtcccctgtcagcgagcatgcacaacgccatcaagttccttaacaaggaaatcaccagtgtgggcagttccaagcgggaagaggaggccaagtcagaacttcgagcagccattgatcggtatgtgcaagagaagattgtgctagcagctcaggcaatttcacgctttgcttaccagaagatcagtaatggagatgtgatcctggtatatggatgctcatctctggtatcacgaattcttcaggaggcttggacagagggccggcggtttcgggtggtagtggtggacagccggccatggctggaaggaaggcacacactacgttctctagtccatgctggtgtcccagcctcctacctgctgattcctgcagcctcctatgtgctcccagaggtttccaaggtgctattgggagctcatgcactcttggccaacgggtctgtgatgtcacgggtagggacagcacagttagccctggtggctcgagcccataatgtaccagtgctggtttgctgtgaaacatacaagttctgtgagcgtgtgcagactgatgcctttgtctctaatgagctagatgaccctgatgatctgcaatgtaagcggggagaacatgttgcgctggctaactggcagaaccacgcatccctacggttgttgaatctagtctatgatgtgactcccccagagcttgtggatctggtgatcacggagctggggatgatcccttgcagttctgtacctgttgttctacgagtcaagagcagtgaccagtgacgggggaaacacagggtta

SEQ ID NO: 10017 - DNA, 1633 bp, Homo sapiens
  source 1..1633: mol_type = unassigned DNA
atgccaacccagcagccggctgcgccgagtactcgtgcccccaaaccctcccggagtctctctggctcactttgtgccctgttttctgatgcagactcgggatccgggatgaaggcggagcttccccctgggcctggggcagtggggagggaaatgaccaaagaagaaaagctgcagcttcggaaggaaaagaaacagcagaagaagaaacggaaggaagaaaagggggcagaaccagagactggctctgctgtatctgcagcccaatgtcaaggcccaaccagagaactgccagaatcgggcattcagttgggcactcctcgggagaaagttccagctggtcggagtaaggccgaacttcgggctgagcgtcgagccaagcaggaggccgagcgggccctgaaacaggcaagaaaaggggaacaaggaggaccacctcctaaggccagccccagcacagctggagaaaccccctcaggagtgaagcgtctccctgagtaccctcaggttgatgacctacttctgagaaggcttgttaaaaaaccagagcgtcaacaggttcctacacgaaaggattatggatccaaagtcagtctcttctctcacctaccccagtacagcagacaaaactctctgacccagtttatgagcatcccatcctctgtgatccacccagccatggtgcgactcggcctgcagtactcccagggcctggtcagtggctccaatgcccggtgtattgccctgcttcgtgccttgcagcaggtgattcaggattacacaacaccgcctaatgaagaactctccagggatctagtgaataaactaaaaccctacatgagcttcctgactcagtgccgtcccctgtcagcgagcatgcacaacgccatcaagttccttaacaaggaaatcaccagtgtgggcagttccaagcgggaagaggaggccaagtcagaacttcgagcagccattgatcggtatgtgcaagagaagattgtgctagcagctcaggcaatttcacgctttgcttaccagaagatcagtaatggagatgtgatcctggtatatggatgctcatctctggtatcacgaattcttcaggaggcttggacagagggccggcggtttcgggtggtagtggtggacagccggccatggctggaaggaaggcacacactacgttctctagtccatgctggtgtcccagcctcctacctgctgattcctgcagcctcctatgtgctcccagaggtttccaaggtgctattgggagctcatgcactcttggccaacgggtctgtgatgtcacgggtagggacagcacagttagccctggtggctcgagcccataatgtaccagtgctggtttgctgtgaaacatacaagttctgtgagcgtgtgcagactgatgcctttgtctctaatgagctagatgaccctgatgatctgcaatgtaagcggggagaacatgttgcgctggctaactggcagaaccacgcatccctacggttgttgaatctagtctatgatgtgactcccccagagcttgtggatctggtgatcacggagctggggatgatcccttgcagttctgtacctgttgttctacgagtcaagagcagtgaccagtgac

SEQ ID NO: 10018 - DNA, 2477 bp, Homo sapiens
  source 1..2477: mol_type = unassigned DNA
cgaggtgctgtgactcgtgccagccccctaatctgcggaagtggagtgcggggagtgcgccggaagaggggtacggaagtgcgccggaagtggggtgcggaggtgtgcagcgcgctgtcagactggctcgcaggcggcgcggccggcggacccgttcgagacagcgcgggcggctcgggtcccctggggctccgcagcaggaggacgccatggacgacaaggagttaattgaatactttaagtctcagatgaaagaagatcctgacatggcctcagcagtggctgccatccggacgttgctggagttcttgaagagagataaaggggagacaatccagggtctgagggcgaatctcaccagtgccatagaaaccctgtgtggtgtggactcctctgtggcagtgtcctctggcggggagctcttcctccgcttcatcagtcttgcctccctggaatactccgattactccaaatgtaaaaagatcatgattgagcggggagaactttttctcaggagaatatcactgtcaagaaacaaaattgcagatctgtgccatactttcatcaaagatggagcgacaatattgactcacgcctactccagagtggtcctgagagtcctggaagcagccgtggcggccaagaagcgatttagtgtatacgtcacagagtcacagcctgatttgtcaggtaagaaaatggccaaagccctctgccacctcaacgtccctgtcactgtggtgctagatgctgctgtcggctacatcatggagaaagcagatcttgtcatagttggtgctgaaggagttgttgaaaacggaggaattattaacaagattggaaccaaccagatggctgtgtgtgccaaagcacagaacaaacctttctatgtggttgcagaaagtttcaagtttgtccggctctttccactaaaccagcaagacgtcccagataagtttaagtataaggcagacactctcaaggtcgcgcagactggacaagacctcaaagaggagcatccgtgggtcgactacactgccccttccttaatcactctgctgtttacagacctgggcgtgctgacaccctcagcagtcagcgatgagctcatcaagctctatctgtaacctgtgagccctttcctgccaaggtgcagcttacgtagttgaggcagggtgagtagctgcttgacaccccagtgagtcaggccaaaactgagatgtgtttaatgaagatttatggagtaaggacttaaaatcatacatcttggagaacctttcttactcatttcagtcccatctaaaaatgtgtcagctattctaaatcccaacttaaattgttcttacggtttctagaaactttccttttcagtttccagaaatacaagttagataattggctacttaactgatgaaagatgagcccaagtccacctgtcttcatcctcccctgcactccagactgatctgcctaaagcacgcgagatgcaggcgaaaagcagccacacccctctgccacaaatgaccaacagctggtcaggacgttacacgcggtgccttgtaagaggcaagaaacacttgctgaatctgcatctggcttccagtggtaagcacattcctcagcaggatcaagccaaacagtaaaaactaccaagagaacacgaggaaggcagaaacgatgtttagcaacagtattctgcatggttcactgcttaagaaaatgccttctggaatatttgtaaactgaaattctgtatgtgtaagagatgtttaaatatgtttgggtcctaaacagctttttaaaattatacttgggaataaattcagcatcttttcaaataaactctatgaaagacgctgatgtggtgttgcatcaatactgcaagctgaccaggccatctaggggaaaacactgtccagctacatttacacacttaagacccaggcaatcaggacaccatttattcaacaggaggcataaaaactataattctctttcccggaatatgacttaatccctctgtttttcagctattcaccaataaaacaatactgtgactattaacacagaaaaaccccagcacattagccacccctgcaggacatcaaaggataactgaagcccagggccaagcacattcaggaggtcaaatgcctgaagatactgaggaatggttttgaaaatcagaagtcaagaagacttctgtatctttatgtttaaaaataactataaaatagcctcagaaaaaagagcttatatatatatatatatatatatatatatatatatatatatatatataatatgtacatatgtctatatgtgacccatcatgataaatactgacatctattatttacactcaaataattttacattttcttctgttagactactccaagactggaattgttttgttttgttgtttttaatgagagggtctcgctgtgttcccaggctggtcttgaactcctggg

SEQ ID NO: 10019 - DNA, 1537 bp, Homo sapiens
  source 1..1537: mol_type = unassigned DNA
cgcccgccccggaagtgcaaactgtgtggtctggcaggtgtggattccgccggtgaaggctgaaggcagctaccttaaagatgccgggatccgcagcgaagggctcggagttgtcagagaggatcgagagcttcgtggagaccctgaagcggggtggtgggccgcgcagctccgaggaaatggctcgggagaccctagggttgctgcgccagatcatcacggaccaccgctggagcaacgcgggggagctgatggagctgatccgcagagagggcaggaggatgacggccgctcagccctccgagaccaccgtgggcaacatggtgcggagagtgctcaagattatccgggaggagtatggcagactccatggacgcagcgacgagagtgatcagcaggagtccctgcacaaactgttgacatccggaggcctaaacgaggatttcagcttccattatgcccaactccagtccaacatcattgaggcgattaatgagctgctagtggagctggaagggacaatggagaacattgcagcccaggctctggagcacattcactccaatgaggtgatcatgaccattggcttctcccgaacagtagaggccttcctcaaagaggctgcccgaaagaggaaattccatgtcattgtagcagagtgtgctcctttctgccagggtcatgaaatggctgtgaatttgtccaaagcaggtattgagacaactgtcatgactgatgctgccatttttgccgttatgtcaagagtcaacaaggtgatcattggcacgaagaccatcctggccaatggggccctgagagctgtgacaggaactcacactctggcactggcagcaaaacaccattccaccccactcatcgtctgtgcacctatgttcaaactttctccacagttccccaatgaagaagactcatttcataagtttgtggctcctgaagaagtcctgccattcacagaaggggacattctggagaaggtcagcgtgcattgccctgtgtttgactacgttcccccagagctcattaccctctttatctccaacattggtgggaatgcaccttcctacatctaccgcctgatgagtgaactctaccatcctgatgatcatgttttatgaccgaccacacgtgtcctaagcagattgcttaggcagatacagaatgaagaggagacttgagtgttgctgctgaagcacatccttgcaatgtgggagtgcacaggagtccacctaaaaaaaaaatccttgatactgttgcctgcctttttagtcaccccgtaacaagggcacacatccaggactgtgtcttgcctttcagatcttaacagagcagcagggcttaacttgttgattttggagcctcttagtgacctggttgcgtctgtgtcaggaacttaaactttctggttcagtagtgtgttaaacataacactgaataccttactgggatacagatttttgctcagaaatggctatgacactttttctaggctctaccaataaaagccacttgaaggttc

SEQ ID NO: 10020 - DNA, 1659 bp, Homo sapiens
  source 1..1659: mol_type = unassigned DNA
attgggctgtcagtcagaggcggcgtggagatcgctgggagcggttgcggcgtgccgggagctgagttatagctgtgacttctgccctgccaggccgcacacaagctggctgacccggtttgtaaaaatggaatttcaagcagtagtgatggcagtaggtggaggatctcggatgacagacctaacttccagcattcccaaacctctgcttccagttgggaacaaacctttaatttggtacccattgaacctgcttgagcgtgttggatttgaagaagtcattgtggttacaaccagggatgttcaaaaggctctatgtgcagaattcaagatgaaaatgaagccagatattgtgtgtattcctgatgacgctgacatgggaactgcagattctttgcgctacatatatccaaaacttaagacagatgtgctggtgctgagctgtgatctgataacagacgttgccttacatgaggttgtggacctgtttagagcttatgatgcatcacttgctatgttgatgagaaaaggccaagatagcatagaacctgttcccggtcaaaaggggaaaaaaaaagcagtggagcagcgtgacttcattggagtggacagcacaggaaagaggctgctcttcatggctaatgaagcagacttggatgaagagctggtcattaagggatccatcctacagaagcatcctagaatacgtttccacacgggtcttgtggatgcccacctctactgtttgaaaaaatacatcgtggatttcctaatggaaaatgggtcaataacttctatccggagtgaactgattccatatttagtgagaaaacagttttcctcagcttcctcacaacagggacaagaagaaaaagaggaggatctaaagaaaaaggagctgaagtccttagatatctacagttttataaaagaagccaatacactgaacctggctccctatgatgcctgctggaatgcctgtcgaggagacaggtgggaagacttgtccagatcacaggtgcgctgctatgtccacatcatgaaagaggggctctgctctcgagtgagcacactgggactctacatggaagcaaacagacaggtgcccaaattgctgtctgctctctgtccagaagaaccaccagtccattcgtcagcccagattgtcagcaaacacctggttggagttgacagcctcattgggccagagacacagattggagagaagtcatccattaagcgctcagtcattggctcatcctgtctcataaaagatagagtgactattaccaattgccttctcatgaactcagtcactgtggaggaaggaagcaatatccaaggcagtgtcatctgcaacaatgctgtgatcgagaagggtgcagacatcaaggactgcttgattggaagtggccagaggattgaagccaaagctaaacgagtgaatgaggtgatcgtggggaatgaccagctcatggagatctgagttctgagcaagtcagactccttccttttggcctccaaagccacagatgttggccggcccacctgtttaactctgtatttatttcccaataaagaagggcttccaaaggcatgctggagacttgtggagcagtccaaagctccatgtcaggtgggctccaggtgtacacagtg

SEQ ID NO: 10021 - DNA, 705 bp, Homo sapiens
  source 1..705: mol_type = unassigned DNA
cagaggcggcgtggagatcgctgggagcggttgcggcgtgccgggagctgagttatagctgtgacttctgccctgccaggccgcacacaagctggctgacccggtttgtaaaaatggaatttcaagcagtagtgatggcagtaggtggaggatctcggatgacagacctaacttccagcattcccaaacctctgcttccagttgggaacaaacctttaatttggtacccattgaacctgcttgagcgtgttggatttgaagaagtcattgtggttacaaccagggatgttcaaaaggctctatgtgcagaattcaagatgaaaatgaagccagatattgtgtgtattcctgatgacgctgacatgggaactgcagattctttgcgctacatatatccaaaacttaagacagatgtgctggtgctgagctgtgatctgataacagacgttgccttacatgaggttgtggacctgtttagagcttatgatgcatcacttgctatgttgatgagaaaaggccaagatagcatagaacctgttcccggtcaaaaggggaaaaaaaaagcagatggagactcgctctgttgccaggctggagtgcagtggcaccatctcggttcactccaatctccacctcccgggttcaagcacttcacctgcctcagcctcccgagtagctgggactacatgcacatgccaccacacc

SEQ ID NO: 10022 - DNA, 1457 bp, Homo sapiens
  source 1..1457: mol_type = unassigned DNA
cgtggagatcgctgggagcggttgcggcgtgccgggagctgagttatagctgtgacttctgccctgccaggccgcacacaagctggctgacccggtttgtaaaaatggaatttcaagcagtagtgatggcagtaggtggaggatctcggatgacagacctaacttccagcattcccaaacctctgcttccagttgggaacaaacctttaatttggtacccattgaacctgcttgagcgtgttggatttgaagaagtcattgtggttacaaccagggatgttcaaaaggctctatgtgcagaattcaagatgaaaatgaagccagatattgtgtgtattcctgatgacgctgacatgggaactgcagattctttgcgctacatatatccaaaacttaagacagatgtgctggtgctgagctgtgatctgataacagacgttgccttacatgaggttgtggacctgtttagagcttatgatgcatcacttgctatgttgatgagaaaaggccaagatagcatagaacctgttcccggtcaaaaggggaaaaaaaaagcagtggagcagcgtgacttcattggagtggacagcacaggaaagaggctgctcttcatggctaatgaagcagacttggatgaagagctggtcattaagggatccatcctacagaagcatcctagaatacgtttccacacgggtcttgtggatgcccacctctactgtttgaaaaaatacatcgtggatttcctaatggaaaatgggtcaataacttctatccggagtgaactgattccatatttagtgagaaaacagttttcctcagcttcctcacaacagggacaagaagaaaaagaggaggatctaaagaaaaaggagctgaagtccttagatatctacagttttataaaagaagccaatacactgaacctggctccctatgatgcctgctggaatgcctgtcgaggagacaggtgggaagacttgtccagatcacaggtgcgctgctatgtccacatcatgaaagaggggctctgctctcgagtgagcacactgggactctacatggaagcaaacagacaggtgcccaaattgctgtctgctctctgtccagaagaaccaccagtccattcgtcagcccagattgtcagcaaacacctggttggagttgacagcctcattgggccagagacacagattggagagaagtcatccattaagcgctcagtcattggctcatcctgtctcataaaagatagagtgactattaccaattgccttctcatgaactcagtcactgtggaggaagggtatgtttccccctgtacccacttgaggcaaagataatggaaaaatgccttcaaaattctgaaggaaggttaattttaacctaaaattgtatacccaggcaaagtgctaatcaagagggcaatagaataaaaacattttcagatatcaaaa

SEQ ID NO: 10023 - DNA, 890 bp, Homo sapiens
  source 1..890: mol_type = unassigned DNA
tggtcattaagggatccatcctacagaagcatcctagaatacgtttccacacgggtcttgtggatgcccacctctactgtttgaaaaaatacatcgtggatttcctaatggaaaatgggtcaataacttctatccggagtgaactgattccatatttagtgagaaaacagttttcctcagcttcctcacaacagggacaagaagaaaaagaggaggatctaaagaaaaaggagctgaagtccttagatatctacagttttataaaagaagccaatacactgaacctggctccctatgatgcctgctggaatgcctgtcgaggagacaggtgggaagacttgtccagatcacaggtgcgctgctatgtccacatcatgaaagaggggctctgctctcgagtgagcacactgggactctacatggaagcaaacagacaggtgcccaaattgctgtctgctctctgtccagaagaaccaccagtccattcgtcagcccagattgtcagcaaacacctggttggagttgacagcctcattgggccagagacacagattggagagaagtcatccattaagcgctcagtcattggctcatcctgtctcataaaagatagagtgactattaccaattgccttctcatgaactcagtcactgtggaggaaggctaaacgagtgaatgaggtgatcgtggggaatgaccagctcatggagatctgagttctgagcaagtcagactccttccttttggcctccaaagccacagatgttggccggcccacctgtttaactctgtatttatttcccaataaagaagggcttccaaaggcatgctggagacttgtggagcagtccaaagctccatgtcaggtgggctccaggtgtacacagtg

SEQ ID NO: 10024 - DNA, 1792 bp, Homo sapiens
  source 1..1792: mol_type = unassigned DNA
agtgcggggcggggcctcggggcccgtcggaaattgtagtccgattggggctgcgcgcttcgcttctgcggctcagcctccagcccaggtggcgctgtggaccctgcagccgcggagcgaggcagcggggcggctccgtgaccacggcgggcggagcctaggactgagggcgatggctgctgtggccgtggctgttcgcgaggactcgggatccgggatgaaggcggagcttccccctgggcctggggcagtggggagggaaatgaccaaagaagaaaagctgcagcttcggaaggaaaagaaacagcagaagaagaaacggaaggaagaaaagggggcagaaccagagactggctctgctgtatctgcagcccaatgtcaagtaggcccaaccagagaactgccagaatcgggcattcagttgggcactcctcgggagaaagttccagctggtcggagtaaggccgaacttcgggctgagcgtcgagccaagcaggaggccgagcgggccctgaaacaggcaagaaaaggggaacaaggaggaccacctcctaaggccagccccagcacagctggagaaaccccctcaggagtgaagcgtctccctgagtaccctcaggttgatgacctacttctgagaaggcttgttaaaaaaccagagcgtcaacaggttcctacacgaaaggattatggatccaaagtcagtctcttctctcacctaccccagtacagcagacaaaactctctgacccagtttatgagcatcccatcctctgtgatccacccagccatggtgcgactcggcctgcagtactcccagggcctggtcagtggctccaatgcccggtgtattgccctgcttcgtgccttgcagcaggtgattcaggattacacaacaccgcctaatgaagaactctccagggatctagtgaataaactaaaaccctacatgagcttcctgactcagtgccgtcccctgtcagcgagcatgcacaacgccatcaagttccttaacaaggaaatcaccagtgtgggcagttccaagcgggaagaggaggccaagtcagaacttcgagcagccattgatcggtatgtgcaagagaagattgtgctagcagctcaggcaatttcacgctttgcttaccagaagatcagtaatggagatgtgatcctggtatatggatgctcatctctggtatcacgaattcttcaggaggcttggacagagggccggcggtttcgggtggtagtggtggacagccggccatggctggaaggaaggcacacactacgttctctagtccatgctggtgtcccagcctcctacctgctgattcctgcagcctcctatgtgctcccagaggtttccaaggtgctattgggagctcatgcactcttggccaacgggtctgtgatgtcacgggtagggacagcacagttagccctggtggctcgagcccataatgtaccagtgctggtttgctgtgaaacatacaagttctgtgagcgtgtgcagactgatgcctttgtctctaatgagctagatgaccctgatgatctgcaatgtaagcggggagaacatgttgcgctggctaactggcagaaccacgcatccctacggttgttgaatctagtctatgatgtgactcccccagagcttgtggatctggtgatcacggagctggggatgatcccttgcagttctgtacctgttgttctacgagtcaagagcagtgaccagtgacgggggaaacacagggttaataaatgccatactccctaccctcagcaa

SEQ ID NO: 10025 - DNA, 1626 bp, Homo sapiens
  source 1..1626: mol_type = unassigned DNA
gagcctaggactgagggcgatggctgctgtggccgtggctgttcgcgaggactcgggatccgggatgaaggcggagtccccctgggcctgggtggggagggaaatgaccaaagaagaaaagctgcagcttcggaaggaaaagaaacagcagaagaagaaacggaaggaagaaaagggggcagaaccagagactggctctgctgtatctgcagcccaatgtcaaggcccaaccagagaactgccagaatcgggcattcagttgggcactcctcgggagaaagttccagctggtcggagtaaggccgaacttcgggctgagcgtcgagccaagcaggaggccgagcgggccctgaaacaggcaagaaaaggggaacaaggaggaccacctcctaaggccagccccagcacagctggagaaaccccctcaggagtgaagcgtctccctgagtaccctcaggttgatgacctacttctgagaaggcttgttaaaaaaccagagcgtcaacaggttcctacacgaaaggattatggatccaaagtcagtctcttctctcacctaccccagtacagcagacaaaactctctgacccagtttatgagcatcccatcctctgtgatccacccagccatggtgcgactcggcctgcagtactcccagggcctggtcagtggctccaatgcccggtgtattgccctgcttcgtgccttgcagcaggtgattcaggattacacaacaccgcctaatgaagaactctccagggatctagtgaataaactaaaaccctacatgagcttcctgactcagtgccgtcccctgtcagcgagcatgcacaacgccatcaagttccttaacaaggaaatcaccagtgtgggcagttccaagcgggaagaggaggccaagtcagaacttcgagcagccattgatcggtatgtgcaagagaagattgtgctagcagctcaggcaatttcacgctttgcttaccagaagatcagtaatggagatgtgatcctggtatatggatgctcatctctggtatcacgaattcttcaggaggcttggacagagggccggcggtttcgggtggtagtggtggacagccggccatggctggaaggaaggcacacactacgttctctagtccatgctggtgtcccagcctcctacctgctgattcctgcagcctcctatgtgctcccagaggtttccaaggtgctattgggagctcatgcactcttggccaacgggtctgtgatgtcacgggtagggacagcacagttagccctggtggctcgagcccataatgtaccagtgctggtttgctgtgaaacatacaagttctgtgagcgtgtgcagactgatgcctttgtctctaatgagctagatgaccctgatgatctgcaatgtaagcggggagaacatgttgcgctggctaactggcagaaccacgcatccctacggttgttgaatctagtctatgatgtgactcccccagagcttgtggatctggtgatcacggagctggggatgatcccttgcagttctgtacctgttgttctacgagtcaagagcagtgaccagtgacgggggaaacacagggttaataaatgccatactccctaccctca

SEQ ID NO: 10026 - DNA, 2655 bp, Homo sapiens
  source 1..2655: mol_type = unassigned DNA
tccctcctcgtctccttcccttcgttaattagtccatcgcatttcaagtgctggatcctttttgtcccctactgcgtgcggtggcagcttccttgcggaagtggtgaccgtgagagaagaagatggcggcccctgtagtggcgccgcctggtgtggtggttagtcgggctaacaagcgcagcggcgcggggccgggaggcagcggtggcgggggagccagaggggcggaggaggaaccgccgccgcccctacaagcagttctggtggccgatagcttcgatcgccgcttcttccccatctccaaggaccagcctcgggtcctcttgcccctggccaatgtggcattaattgactacactctggaattcctgactgccacaggtgtacaggaaacatttgtcttttgttgctggaaagctgctcaaatcaaagaacatttactgaagtcaaagtggtgccgccctacatctctcaatgtggttcgaataattacatcagagctctatcgatcactgggagatgtcctccgtgatgttgatgccaaggctttggtgcgctctgactttcttctggtgtatggggatgtcatctcaaacatcaatatcaccagagcccttgaggaacacaggttgagacggaagctagaaaaaaatgtttctgtgatgacgatgatcttcaaggagtcatcccccagccacccaactcgttgccacgaagacaatgtggtagtggctgtggatagtaccacaaacagggttctccattttcagaagacccagggtctccggcgttttgcatttcctctgagcctgtttcagggcagtagtgatggagtggaggttcgatatgatttactggattgtcatatcagcatctgttctcctcaggtggcacaactctttacagacaactttgactaccaaactcgagatgactttgtgcgaggtctcttagtgaatgaggagatcctagggaaccagatccacatgcacgtaacagctaaggaatatggtgcccgtgtctccaacctacacatgtactcagctgtctgtgctgacgtcatccgccgatgggtctaccctctcaccccagaggcgaacttcactgacagcaccacccagagctgcactcattcccggcacaacatctaccgagggcctgaggtcagcctgggccatggcagcatcctagaggaaaatgtgctcctgggctctggcactgtcattggcagcaattgctttatcaccaacagtgtcattggccccggctgccacattggtgataacgtggtgctggaccagacctacctgtggcagggtgttcgagtggcggctggagcacagatccatcagtctctgctttgtgacaatgctgaggtcaaggaacgagtgacactgaaaccacgctctgtcctcacttcccaggtggtcgtgggcccaaatatcacgctgcctgagggctcggtgatctctttgcaccctccagatgcagaggaagatgaagatgatggcgagttcagtgatgattctggggctgaccaagaaaaggacaaagtgaagatgaaaggttacaatccagcagaagtaggagctgctggcaagggctacctctggaaagctgcaggcatgaacatggaggaagaggaggaactgcagcagaatctgtggggactcaagatcaacatggaagaagagagtgaaagtgaaagtgagcaaagtatggattctgaggagccggacagccggggaggctcccctcagatggatgacatcaaagtgttccagaatgaagttttaggaacactacagcggggcaaagaggagaacatttcttgtgacaatctcgtcctggaaatcaactctctcaagtatgcctataacataagtctaaaggaggtgatgcaggtactgagccacgtggtcctggagttccccctgcaacagatggattccccgcttgactcaagccgctactgtgccctgctgcttcctctgctaaaggcctggagccctgtttttaggaactacataaagcgcgcagccgaccatttggaagcgttagcagccattgaggacttcttcctagagcatgaagctcttggtatttccatggccaaggtactgatggctttctaccagctggagatcctggctgaggaaacaattctgagctggttcagccaaagagatacaactgacaagggccagcagttgcgcaagaatcaacagctgcagaggttcatccagtggctaaaagaggcagaagaggagtcatctgaagatgactgaagtcacactgcctgctcctttgggtgtgattgagtgccctcctggctcctgggctgggacaagtgaggaactagctgcagagggatgagtgaccaccatccaggctgagactgaaaggagcagaggctggaactacagtattctttcccctgctagcaaccatgtgcctcccatcctgactgtggagttgggatgtggaagtggggctggaacaaagcttctgcctagggaggagctaagcaggcccggcagttggaggaaggccagaggaacagctttgtgctccggctttccctcagggaacagcagagagcagttggctctttctgctgcttgtatatgttaatattaaaagagagagtggtgt

SEQ ID NO: 10027 - DNA, 1801 bp, Homo sapiens
  source 1..1801: mol_type = unassigned DNA
ccacctcagccttccaaaatgctgggattacaggtggcacaactctttacagacaactttgactaccaaactcgagatgactttgtgcgaggtctcttagtgaatgaggagatcctagggaaccagatccacatgcacgtaacagctaaggaatatggtgcccgtgtctccaacctacacatgtactcagctgtctgtgctgacgtcatccgccgatgggtctaccctctcaccccagaggcgaacttcactgacagcaccacccagagctgcactcattcccggcacaacatctaccgagggcctgaggtcagcctgggccatggcagcatcctagaggaaaatgtgctcctgggctctggcactgtcattggcagcaattgctttatcaccaacagtgtcattggccccggctgccacattggtgataacgtggtgctggaccagacctacctgtggcagggtgttcgagtggcggctggagcacagatccatcagtctctgctttgtgacaatgctgaggtcaaggaacgagtgacactgaaaccacgctctgtcctcacttcccaggtggtcgtgggcccaaatatcacgctgcctgagggctcggtgatctctttgcaccctccagatgcagaggaagatgaagatgatggcgagttcagtgatgattctggggctgaccaagaaaaggacaaagtgaagatgaaaggttacaatccagcagaagtaggagctgctggcaagggctacctctggaaagctgcaggcatgaacatggaggaagaggaggaactgcagcagaatctgtggggactcaagatcaacatggaagaagagagtgaaagtgaaagtgagcaaagtatggattctgaggagccggacagccggggaggctcccctcagatggatgacatcaaagtgttccagaatgaagttttaggaacactacagcggggcaaagaggagaacatttcttgtgacaatctcgtcctggaaatcaactctctcaagtatgcctataacataagtctaaaggaggtgatgcaggtactgagccacgtggtcctggagttccccctgcaacagatggattccccgcttgactcaagccgctactgtgccctgctgcttcctctgctaaaggcctggagccctgtttttaggaactacataaagcgcgcagccgaccatttggaagcgttagcagccattgaggacttcttcctagagcatgaagctcttggtatttccatggccaaggtactgatggctttctaccagctggagatcctggctgaggaaacaattctgagctggttcagccaaagagatacaactgacaagggccagcagttgcgcaagaatcaacagctgcagaggttcatccagtggctaaaagaggcagaagaggagtcatctgaagatgactgaagtcacactgcctgctcctttgggtgtgattgagtgccctcctggctcctgggctgggacaagtgaggaactagctgcagagggatgagtgaccaccatccaggctgagactgaaaggagcagaggctggaactacagtattctttcccctgctagcaaccatgtgcctcccatcctgactgtggagttgggatgtggaagtggggctggaacaaagcttctgcctagggaggagctaagcaggcccggcagttggaggaaggccagaggaacagctttgtgctccggctttccctcagggaacagcagagagcagttggctctttctgctgcttgtatatgttaatattaaaagagagagtggtgt

SEQ ID NO: 10028 - DNA, 7479 bp, Homo sapiens
  source 1..7479: mol_type = unassigned DNA
actggcagctggccgggcgctcgcagtgggagctgctgcaggctccgcggcggcggcaacggaggctgcgggggcggcggcgcgagcggccgggcttggtaggggagccgagcccggcccgggatcccgagcagcgagagtgtggggtacctaggcccctcacgctggacttcacagtctccgggccgcctgacctccgcacgggtatatgggatggaagcgggaccctcgggagcagctgcgggcgcttacctgccccccctgcagcaggtgttccaggcacctcgccggcctggcattggcactgtggggaaaccaatcaagctcctggccaattactttgaggtggacatccctaagatcgacgtgtaccactacgaggtggacatcaagccggataagtgtccccgtagagtcaaccgggaagtggtggaatacatggtccagcatttcaagcctcagatctttggtgatcgcaagcctgtgtatgatggaaagaagaacatttacactgtcacagcactgcccattggcaacgaacgggtcgactttgaggtgacaatccctggggaagggaaggatcgaatctttaaggtctccatcaagtggctagccattgtgagctggcgaatgctgcatgaggccctggtcagcggccagatccctgttcccttggagtctgtgcaagccctggatgtggccatgaggcacctggcatccatgaggtacacccctgtgggccgctccttcttctcaccgcctgagggctactaccacccgctggggggtgggcgcgaggtctggttcggctttcaccagtctgtgcgccctgccatgtggaagatgatgctcaacattgatgtctcagccactgccttttataaggcacagccagtgattgagttcatgtgtgaggtgctggacatcaggaacatagatgagcagcccaagcccctcacggactctcagcgcgttcgcttcaccaaggagatcaagggcctgaaggtggaagtcacccactgtggacagatgaagaggaagtaccgcgtgtgtaatgttacccgtcgccctgctagccatcagacattccccttacagctggagagtggacagactgtggagtgcacagtggcacagtatttcaagcagaaatataaccttcagctcaagtatccccatctgccctgcctacaagttggccaggaacaaaagcatacctaccttcccctagaggtctgtaacattgtggctgggcagcgctgtattaaaaagctgaccgacaaccagacctcgaccatgataaaggccacagctagatccgctccagacagacaggaggagatcagtcgcctgatgaagaatgccagctacaacttagatccctacatccaggaatttgggatcaaagtgaaggatgacatgacggaggtgacagggcgagtgctgccggcgcccatcttgcagtacggcggccggaaccgggccattgccacacccaatcagggtgtctgggacatgcgggggaaacagttctacaatgggattgagatcaaagtctgggccatcgcctgcttcgcaccccaaaaacagtgtcgagaagaggtgctcaagaacttcacagaccagctgcggaagatttccaaggatgcggggatgcctatccagggtcaaccttgtttctgcaaatatgcacagggggcagacagcgtggagcctatgttccggcatctcaagaacacctactcagggctgcagctcattattgtcatcctgccagggaagacgccggtgtatgctgaggtgaaacgtgtcggagatacactcttgggaatggctacgcagtgtgtgcaggtgaagaacgtggtcaagacctcacctcagactctgtccaacctctgcctcaagatcaatgtcaaacttggtggcattaacaacatcctagtcccacaccagcgctctgccgtttttcaacagccagtgatattcctgggagcagatgttacacaccccccagcaggggatgggaaaaaaccttctatcacagcagtggtaggcagtatggatgcccaccccagccgatactgtgctactgtgcgggtacagcgaccacggcaagagatcattgaagacttgtcctacatggtgcgtgagctcctcatccaattctacaagtccacccgtttcaagcctacccgcatcatcttctaccgagatggggtgcctgaaggccagctaccccagatactccactatgagctactggccattcgtgatgcctgcatcaaactggaaaaggactaccagcctgggatcacttatattgtggtgcagaaacgccatcacacccgccttttctgtgctgacaagaatgagcgaattgggaagagtggtaacatcccagctgggaccacagtggacaccaacatcacccacccatttgagtttgacttctatctgtgcagccacgcaggcatccagggcaccagccgaccatcccattactatgttctttgggatgacaaccgtttcacagcagatgagctccagatcctgacgtaccagctgtgccacacttacgtacgatgcacacgctctgtctctatcccagcacctgcctactatgcccgcctggtggctttccgggcacgataccacctggtggacaaggagcatgacagtggagaggggagccacatatcggggcagagcaatgggcgggacccccaggccctggccaaagccgtgcaggttcaccaggatactctgcgcaccatgtacttcgcttgaaggcagaacgctgttacctcactggatagaagaaagctttccaagccccaggagctgtgccacccaaatccagaggaagcaaggaggagggaggtggggtagggaggagtgtaggatgccttgtttccttctatagaggtggtgtaagagtggggaacagggccagcaagacagaccaccagccagaaatctctgatatcaacctcatgtcccccacccctcaccccatcttgtcacatctggccctgaccccactggaccaaaaggggcagcactggtgcccaccatacacacaggtgtctcatgtgactcacagtgctaaagactcatgcttgacagcttggtaaggtcaactctgtagccctgcagacaaaagctggttaggtttgggtttgatactttagatgggaaagtgaggggcttgagaaagtgggtgggaggagggaaggattttttaggagccttaatcagaaaaggactagatttgtttaagaagaaaaatgaaaccagacccagatcaatattttaggatactagatgttttaatgggttcagaatccagtttgtaggaagattttttaatggttttggttgctcctcccccagctgccaccccccaccttacccttattcctctctgtccacattttctgccccaccttacttctcctccctgacagacatccagcccctagtaatacttaaggcactatggcacttagctttgaagtgacacgaccctgtcttccttccgcccgctggtgggtaaccagtgccttccctgtaacggtaatgctgcagaactgcaaccttttgtacctttctttggggaatggggtgggggtgggagaggaggtagatggggaagaaataccccagacccaacaaacctccagccagaaagccagctattttgcatttgaaggaattgacttcctcattcattgagctttttaaaagatcacaacctcaagatggttaaaatccattgacatttgcactttcaaacatgacaagtctcggagctgctgagatgacaggcccctggcctttccacttatgcctccttttctccttattcctcctacctcccgccccgcccaggtctggagttactttcatagcatttttcactcttggcttcttttctcccttgatggtcaagtctcttatgtttcaatatttcttaactggggtgtcttataacaaaaaactcttaggtctaaaatgagaaaaaagagagaaaacaaaatgttatttttataccataacttgagtgtattgccaaaatttggaaatccttcccatgcctgatgagtttatatcccagaaacattgagccatcagaatgaactgtgtacctgatttgttctctgacctggctaggtagggagggggtggttatcgccccaagatggggtccaggctccatccttcctctgtgcagataatacctttttcttgctatagcctccctcctctgcactgtcctgcactctttcttgcaagtgcatctttttccttcccctggactgtcctctgaccctttggctcatcctagattgcagtgtgtcctgtggacaggctggggaattttgctgctccctattgcttctgtttacaaaaatgaatttttcctggtttcccactagggcatgtgggtgggtggcatggacttttttttttttttttttttgtcttgagacatggggtttggctgtcttgcaggactggagaaggtggtggttctagcttggtctctgttggccttgaagcaagcatcccccctgccctttttccttgactgttcatttttttcctgccccactgcttgggatggggagttgcaacttcagtgtggaatttcctctttgaggagcctgggcttggatctatcctgatctggtgatgaagccatgattactttagacctagcccaggcttggaggccagctggaggaagaagggtctaaatcctggcctgtagagttagaactaccatttcctccccttagctgcccttgtatgacccggatttgctatgcaaaacaatctatcccaggttctgttctggttggctacattgttcagcaactcacaaaacgtagcacaaacattcattatggagaaagcatcaggactgttgagtaactcctcctttacttttttcctgctggctacagcatggggtgccctataggcacaagcccagctgaagaacagaatggagggctctgggaggaggcagctcactggagagcctacattccttacacaagtgcctaaagagagtgatgctaacactccatctgccctgtccattgccttcatatacagtctacttcgtgttctgtcaccctttggggaggggagttctcctgggacagtgggctctgcatgttctccacttggatacattttggggctaggatcagggcactattcctggagggtccagtcattcaccagcatttgcaaatgtccatagggagcaggtggcagcctctactcccagcaacaagtttgtgttctctccttttctctctttgcctcactctctccagttggttttcagctggggcttgaaatgcatttttagccctttgacgtggcttatgccattcaagaaataaaaagcaagagaatcagctttgggcaatgacaagaaatgagttcttactctgatttttttgtaaaaagataatttttgagacttgaaaaataccccgaccttgagattattcctgtttgaaaggtggtgcatgcagatggagaagtggtgttggcagcaagctttggctcatgtggatttggtttaagtggtgcttcttacccaagcttcaaggaagtgcttgggggacccccagcctcatcctcttagttgggtctcttgttccctttgtaccactgttttgccttccttttcctcttctctctttgcctggcttcctttcccttttcttctattcactctgcttgcttgctggccggcctgcctgcctgcctgcctgcctgcctgcctgtctgcctatgtgatgatgaaatctctgcatggctgcaatgatcccactgttagctggcagggtcaggcttagctccttgactgcagaagaccaagaacctgttccccaagcccagagatgtccacctgggctggactgccctcaagcttatactagagaagagcaactgacctgcccaacttgtgtgaagtcaggagggtttctggcattttccacacctgtccactccttggagctggtttctctcattgctttttctaaatctggttctttttctctttacctggggcctggcttttctgagattgtcttagggttgagctatttgggtatcctgggtttgagtgttaggggatggacataaaggaaaaagagtgatgagaagagaatggagagaatttgaataaaaggtgggaaaggagagcactgttctttgattgtttatccagtccaacctgatccattagggatcgaggtgctacactggcctccagggataagcctggggctactgttgctgggaacttaggcttaacataaagccgaagaaggtacctagaaatttgaaacttccctaaaaagctcctaatgcccacctgctagatagcttctctgtggcctcctatttagctaagcagcagtgtttttggatactttttttttctgtttgtgaataaggccagcactcaagatgggcagccaagggtgcactgactattagctggcccataggatatctgtaaggctggtgggacagttttggacctggaatcatgtgtaactaacaaggttggacgtttcttccccatcagggtagaaaaatcatctcaaactagccaaaaggcagttttggaaactacattgggggacgttatttttatttatatatggggcctaggccaatccaggatggtagctggaataccttccttcttaaaatctgatcatggcagggatatgcagggcactttttactatttggccttctaagcagattgggaaggaggtattttctggttttcgctttcctccgacttaataggacttgccttctccctgggcagggagagaggctgggttggtgctctcccttactctactcatactgacttagagcctctggctgctgtttgggcatccaagaaagggaggggaaggaatgagctaaaaacaaaacagaatgaggtgggaaagggagattttcttctttacagaggaaaataggaaaccctccaagaattgtgcaagtaaagacatttgttgaatgcactgagtcccttggtgtagtagcaataaggaaaaatgaaattactttcctgtgcacacagtccagcctaattggtatgtgatgttgcacttagcagccatgtggtgggcatgtgtgactactctggttttcactttagtttctaaactttttatccctctcaagtccagcatggatggggaaatgtctctggatccccacagctgtgtacttgtttgcatttgtttccctttgagatttgtgtttgtgtcctgctttgagctgtaccttgtccagtccattgtgaaattatcccagcagctgtaatgtacagttccttctgaagcaagcaacatcagcagcagcagcagcagcagcacaattctgtgttttataaagacaacagtggcttctatttctaaa

SEQ ID NO: 10029 - DNA, 3996 bp, Homo sapiens
  source 1..3996: mol_type = unassigned DNA
tgaggcaagcgcctcaggagtgcgtgaggcccacgcagaactcggggagccttttatcctgaggacacaggggaagaattggaggactatattcagctgcgggcgcttacctgccccccctgcagcaggtgttccaggcacctcgccggcctggcattggcactgtggggaaaccaatcaagctcctggccaattactttgaggtggacatccctaagatcgacgtgtaccactacgaggtggacatcaagccggataagtgtccccgtagagtcaaccgggaagtggtggaatacatggtccagcatttcaagcctcagatctttggtgatcgcaagcctgtgtatgatggaaagaagaacatttacactgtcacagcactgcccattggcaacgaacgggtcgactttgaggtgacaatccctggggaagggaaggatcgaatctttaaggtctccatcaagtggctagccattgtgagctggcgaatgctgcatgaggccctggtcagcggccagatccctgttcccttggagtctgtgcaagccctggatgtggccatgaggcacctggcatccatgaggtacacccctgtgggccgctccttcttctcaccgcctgagggctactaccacccgctggggggtgggcgcgaggtctggttcggctttcaccagtctgtgcgccctgccatgtggaagatgatgctcaacattgatgtctcagccactgccttttataaggcacagccagtgattgagttcatgtgtgaggtgctggacatcaggaacatagatgagcagcccaagcccctcacggactctcagcgcgttcgcttcaccaaggagatcaagggcctgaaggtggaagtcacccactgtggacagatgaagaggaagtaccgcgtgtgtaatgttacccgtcgccctgctagccatcagacattccccttacagctggagagtggacagactgtggagtgcacagtggcacagtatttcaagcagaaatataaccttcagctcaagtatccccatctgccctgcctacaagttggccaggaacaaaagcatacctaccttcccctagaggtctgtaacattgtggctgggcagcgctgtattaaaaagctgaccgacaaccagacctcgaccatgataaaggccacagctagatccgctccagacagacaggaggagatcagtcgcctgatgaagaatgccagctacaacttagatccctacatccaggaatttgggatcaaagtgaaggatgacatgacggaggtgacagggcgagtgctgccggcgcccatcttgcagtacggcggccggaaccgggccattgccacacccaatcagggtgtctgggacatgcgggggaaacagttctacaatgggattgagatcaaagtctgggccatcgcctgcttcgcaccccaaaaacagtgtcgagaagaggtgctcaagaacttcacagaccagctgcggaagatttccaaggatgcggggatgcctatccagggtcaaccttgtttctgcaaatatgcacagggggcagacagcgtggagcctatgttccggcatctcaagaacacctactcagggctgcagctcattattgtcatcctgccagggaagacgccggtgtatgctgaggtgaaacgtgtcggagatacactcttgggaatggctacgcagtgtgtgcaggtgaagaacgtggtcaagacctcacctcagactctgtccaacctctgcctcaagatcaatgtcaaacttggtggcattaacaacatcctagtcccacaccagcgctctgccgtttttcaacagccagtgatattcctgggagcagatgttacacaccccccagcaggggatgggaaaaaaccttctatcacagcagtggtaggcagtatggatgcccaccccagccgatactgtgctactgtgcgggtacagcgaccacggcaagagatcattgaagacttgtcctacatggtgcgtgagctcctcatccaattctacaagtccacccgtttcaagcctacccgcatcatcttctaccgagatggggtgcctgaaggccagctaccccagatactccactatgagctactggccattcgtgatgcctgcatcaaactggaaaaggactaccagcctgggatcacttatattgtggtgcagaaacgccatcacacccgccttttctgtgctgacaagaatgagcgaattgggaagagtggtaacatcccagctgggaccacagtggacaccaacatcacccacccatttgagtttgacttctatctgtgcagccacgcaggcatccagggcaccagccgaccatcccattactatgttctttgggatgacaaccgtttcacagcagatgagctccagatcctgacgtaccagctgtgccacacttacgtacgatgcacacgctctgtctctatcccagcacctgcctactatgcccgcctggtggctttccgggcacgataccacctggtggacaaggagcatgacagtggagaggggagccacatatcggggcagagcaatgggcgggacccccaggccctggccaaagccgtgcaggttcaccaggatactctgcgcaccatgtacttcgcttgaaggcagaacgctgttacctcactggatagaagaaagctttccaagccccaggagctgtgccacccaaatccagaggaagcaaggaggagggaggtggggtagggaggagtgtaggatgccttgtttccttctatagaggtggtgtaagagtggggaacagggccagcaagacagaccaccagccagaaatctctgatatcaacctcatgtcccccacccctcaccccatcttgtcacatctggccctgaccccactggaccaaaaggggcagcactggtgcccaccatacacacaggtgtctcatgtgactcacagtgctaaagactcatgcttgacagcttggtaaggtcaactctgtagccctgcagacaaaagctggttaggtttgggtttgatactttagatgggaaagtgaggggcttgagaaagtgggtgggaggagggaaggattttttaggagccttaatcagaaaaggactagatttgtttaagaagaaaaatgaaaccagacccagatcaatattttaggatactagatgttttaatgggttcagaatccagtttgtaggaagattttttaatggttttggttgctcctcccccagctgccaccccccaccttacccttattcctctctgtccacattttctgccccaccttacttctcctccctgacagacatccagcccctagtaatacttaaggcactatggcacttagctttgaagtgacacgaccctgtcttccttccgcccgctggtgggtaaccagtgccttccctgtaacggtaatgctgcagaactgcaaccttttgtacctttctttggggaatggggtgggggtgggagaggaggtagatggggaagaaataccccagacccaacaaacctccagccagaaagccagctattttgcatttgaaggaattgacttcctcattcattgagctttttaaaagatcacaacctcaagatggttaaaatccattgacatttgcactttcaaacatgacaagtctcggagctgctgagatgacaggcccctggcctttccacttatgcctccttttctccttattcctcctacctcccgccccgcccaggtctggagttactttcatagcatttttcactcttggcttcttttctcccttgatggtcaagtctcttatgtttcaatatttcttaactggggtgtcttataacaaaaaactcttaggtctaaaatgagaaaaaagagagaaaacaaaatgttatttttataccataacttgagtgtattgccaaaatttggaaatccttcccatgcctgatgagtttatatcccagaaacattgagccatcagaatg

SEQ ID NO: 10030 - DNA, 3572 bp, Homo sapiens
  source 1..3572: mol_type = unassigned DNA
ggccgcgccggggcggatcgtgcggccggcggctccctcgcggctcgcggcgtcggggcccgtggcgcgcgcgcggccgcccctcggccccggagcccctcggcggcgccaccatgtactcgggagccggccccgcacttgcacctcctgcgccgccgccccccatccaaggatatgccttcaagcctccacctagacccgactttgggacctccgggagaacaatcaaattacaggccaatttcttcgaaatggacatccccaaaattgacatctatcattatgaattggatatcaagccagagaagtgcccgaggagagttaacagggaaatcgtggaacacatggtccagcactttaaaacacagatctttggggatcggaagcccgtgtttgacggcaggaagaatctatacacagccatgccccttccgattgggagggacaaggtggagctggaggtcacgctgccaggagaaggcaaggatcgcatcttcaaggtgtccatcaagtgggtgtcctgcgtgagcttgcaggcgttacacgatgcactttcagggcggctgcccagcgtcccttttgagacgatccaggccctggacgtggtcatgaggcacttgccatccatgaggtacacccccgtgggccgctccttcttcaccgcgtccgaaggctgctctaaccctcttggcgggggccgagaagtgtggtttggcttccatcagtccgtccggccttctctctggaaaatgatgctgaatattgatgtgtcagcaacagcgttttacaaggcacagccagtaatcgagtttgtttgtgaagttttggattttaaaagtattgaagaacaacaaaaacctctgacagattcccaaagggtaaagtttaccaaagaaattaaaggtctaaaggtggagataacgcactgtgggcagatgaagaggaagtaccgcgtctgcaatgtgacccggcggcccgccagtcaccaaacattcccgctgcagcaggagagcgggcagacggtggagtgcacggtggcccagtatttcaaggacaggcacaagttggttctgcgctacccccacctcccatgtttacaagtcggacaggagcagaaacacacctaccttcccctggaggtctgtaacattgtggcaggacaaagatgtattaaaaaattaacggacaatcagacctcaaccatgatcagagcgactgctaggtcggcgcccgatcggcaagaagagattagcaaattgatgcgaagtgcaagtttcaacacagatccatacgtccgtgaatttggaatcatggtcaaagatgagatgacagacgtgactgggcgggtgctgcagccgccctccatcctctacgggggcaggaataaagctattgcgacccctgtccagggcgtctgggacatgcggaacaagcagttccacacgggcatcgagatcaaggtgtgggccattgcgtgcttcgccccccagcgccagtgcacggaagtccatctgaagtccttcacagagcagctcagaaagatctcgagagacgccggcatgcccatccagggccagccgtgcttctgcaaatacgcgcagggggcggacagcgtggagcccatgttccggcacctgaagaacacgtatgcgggcctgcagctggtggtggtcatcctgcccggcaagacgcccgtgtacgccgaggtcaagcgcgtgggagacacggtgctggggatggccacgcagtgcgtgcagatgaagaacgtgcagaggaccacgccacagaccctgtccaacctctgcctgaagatcaacgtcaagctgggaggcgtgaacaacatcctgctgccccagggcaggccgccggtgttccagcagcccgtcatctttctgggagcagacgtcactcacccccccgccggggatgggaagaagccctccattgccgccgtggtgggcagcatggacgcccaccccaatcgctactgcgccaccgtgcgcgtgcagcagcaccggcaggagatcatacaagacctggccgccatggtccgcgagctcctcatccagttctacaagtccacgcgcttcaagcccacccgcatcatcttctaccgcgacggtgtctctgaaggccagttccagcaggttctccaccacgagttgctggccatccgtgaggcctgtatcaagctagaaaaagactaccagcccgggatcaccttcatcgtggtgcagaagaggcaccacacccggctcttctgcactgacaagaacgagcgggttgggaaaagtggaaacattccagcaggcacgactgtggacacgaaaatcacccaccccaccgagttcgacttctacctgtgtagtcacgctggcatccaggggacaagcaggccttcgcactatcacgtcctctgggacgacaatcgtttctcctctgatgagctgcagatcctaacctaccagctgtgtcacacctacgtgcgctgcacacgctccgtgtccatcccagcgccagcatactacgctcacctggtggccttccgggccaggtaccacctggtggataaggaacatgacagtgctgaaggaagccatacctctgggcagagtaacgggcgagaccaccaagcactggccaaggcggtccaggttcaccaagacactctgcgcaccatgtactttgcttgacatgttttagtgtttagcgattgtgtaccgagtgggattcacgagaccagctacactcagaccaacagatggccagcccttccgtgacagccagcatcgaacatgagacgtcattgattttattagattctccgttttccagaatgccttccgtcccagatttcaaacttggattttgaactgcagacctgtatgagaacccaatgtcataggaaatatggtttgctaaaatctataagctgcttattaaaacagagtcccgtgtgtcctaaaaatctcctaaaaccagtctatgaactcagggctttaaaacatttttaatttatttggtcattcaatttacttgtttttaatacatgattctctatgaaattgatgggctcaaactagctgtgaatcttctgagagtgaaagcaacacaaaacacaagtgtggttttaaagccttgaacattctgatgttgtcactaaagttgatttccaggcgatgctcgtgtgcccctggcgtggctcacccaagttcctcgactgagggccggtggccatgcagaggcgtccgcaggtgccgtgttctgccagcaccgcccttcacccggcctgaactaaggagcagtggcagaaggtgggccccgtgtgtttacagcatttccaggtccagagaggttggcagacaagtgccattttaataaaaaatgtatttaaaaaaagaaaaaagacaatatactgacagtctaatcatcagatttgtcctataggactgtgacatttattttccaaagtttttaaagaatacgggtctgtggtgataaatacagtacaatcctttttcactgttatgtctttaatgtaagagaagaatatatatatctggtttgcagta

SEQ ID NO: 10031 - DNA, 3141 bp, Homo sapiens
  source 1..3141: mol_type = unassigned DNA
cggccgcccctcggccccggagcccctcggcggcgccaccatgtactcgggagccggccccgcacttgcacctcctgcgccgccgccccccatccaaggatatgccttcaagcctccacctagacccgactttgggacctccgggagaacaatcaaattacaggccaatttcttcgaaatggacatccccaaaattgacatctatcattatgaattggatatcaagccagagaagtgcccgaggagagttaacagggaaatcgtggaacacatggtccagcactttaaaacacagatctttggggatcggaagcccgtgtttgacggcaggaagaatctatacacagccatgccccttccgattgggagggacaaggtggagctggaggtcacgctgccaggagaaggcaaggatcgcatcttcaaggtgtccatcaagtgggtgtcctgcgtgagcttgcaggcgttacacgatgcactttcagggcggctgcccagcgtcccttttgagacgatccaggccctggacgtggtcatgaggcacttgccatccatgaggtacacccccgtgggccgctccttcttcaccgcgtccgaaggctgctctaaccctcttggcgggggccgagaagtgtggtttggcttccatcagtccgtccggccttctctctggaaaatgatgctgaatattgatgtgtcagcaacagcgttttacaaggcacagccagtaatcgagtttgtttgtgaagttttggattttaaaagtattgaagaacaacaaaaacctctgacagattcccaaagggtaaagtttaccaaagaaattaaaggtctaaaggtggagataacgcactgtgggcagatgaagaggaagtaccgcgtctgcaatgtgacccggcggcccgccagtcaccaaacattcccgctgcagcaggagagcgggcagacggtggagtgcacggtggcccagtatttcaaggacaggcacaagttggttctgcgctacccccacctcccatgtttacaagtcggacaggagcagaaacacacctaccttcccctggaggtctgtaacattgtggcaggacaaagatgtattaaaaaattaacggacaatcagacctcaaccatgatcagagcgactgctaggtcggcgcccgatcggcaagaagagattagcaaattgatgcgaagtgcaagtttcaacacagatccatacgtccgtgaatttggaatcatggtcaaagatgagatgacagacgtgactgggcgggtgctgcagccgccctccatcctctacgggggcaggaataaagctattgcgacccctgtccagggcgtctgggacatgcggaacaagcagttccacacgggcatcgagatcaaggtgtgggccattgcgtgcttcgccccccagcgccagtgcacggaagtccatctgaagtccttcacagagcagctcagaaagatctcgagagacgccggcatgcccatccagggccagccgtgcttctgcaaatacgcgcagggggcggacagcgtggagcccatgttccggcacctgaagaacacgtatgcgggcctgcagctggtggtggtcatcctgcccggcaagacgcccgtgtacgccgaggtcaagcgcgtgggagacacggtgctggggatggccacgcagtgcgtgcagatgaagaacgtgcagaggaccacgccacagaccctgtccaacctctgcctgaagatcaacgtcaagctgggaggcgtgaacaacatcctgctgccccagggcaggccgccggtgttccagcagcccgtcatctttctgggagcagacgtcactcacccccccgccggggatgggaagaagccctccattgccgccgtggtgggcagcatggacgcccaccccaatcgctactgcgccaccgtgcgcgtgcagcagcaccggcaggagatcatacaagacctggccgccatggtccgcgagctcctcatccagttctacaagtccacgcgcttcaagcccacccgcatcatcttctaccgcgacggtgtctctgaaggccagttccagcaggttctccaccacgagttgctggccatccgtgaggcctgtatcaagctagaaaaagactaccagcccgggatcaccttcatcgtggtgcagaagaggcaccacacccggctcttctgcactgacaagaacgagcgggggacaagcaggccttcgcactatcacgtcctctgggacgacaatcgtttctcctctgatgagctgcagatcctaacctaccagctgtgtcacacctacgtgcgctgcacacgctccgtgtccatcccagcgccagcatactacgctcacctggtggccttccgggccaggtaccacctggtggataaggaacatgacagtgctgaaggaagccatacctctgggcagagtaacgggcgagaccaccaagcactggccaaggcggtccaggttcaccaagacactctgcgcaccatgtactttgcttgacatgttttagtgtttagcgattgtgtaccgagtgggattcacgagaccagctacactcagaccaacagatggccagcccttccgtgacagccagcatcgaacatgagacgtcattgattttattagattctccgttttccagaatgccttccgtcccagatttcaaacttggattttgaactgcagacctgtatgagaacccaatgtcataggaaatatggtttgctaaaatctataagctgcttattaaaacagagtcccgtgtgtcctaaaaatctcctaaaaccagtctatgaactcagggctttaaaacatttttaatttatttggtcattcaatttacttgtttttaatacatgattctctatgaaattgatgggctcaaactagctgtgaatcttctgagagtgaaagcaacacaaaacacaagtgtggttttaaagccttgaacattctgatgttgtcactaaagttgatttccaggcgatgctcgtgtgcccctggcgtggctcacccaagttcctcgactgagggccggtggccatgcagaggcgtccgcaggtgccgtgttctgccagcaccgcccttcacccggcctgaactaaggagcagtggcagaaggt

SEQ ID NO: 10032 - DNA, 3211 bp, Homo sapiens
  source 1..3211: mol_type = unassigned DNA
ccggcccagagctttcggagtgcggttgctcaggggaagccgtcgccgcccccgcctcggggccgagtgagagtgcccgtcgcgtcgcgccgcgtcgccccccgggccgcctccttgccgccagtggcgggctccgttctccctcgaagcactccccccagctccatgaatggaaatcggctccgcaggacccgctggggcccagcccctactcatggtgcccagaagacctggctatggcaccatgggcaaacccattaaactgctggctaactgttttcaagttgaaatcccaaagattgatgtctacctctatgaggtagatattaaaccagacaagtgtcctaggagagtgaacaggtagatttagacgttactttacctggggaaggtggaaaagatcgacctttcaaggtgtcaatcaaatttgtctctcgggtgagttggcacctactgcatgaagtactgacaggacggaccttgcctgagccactggaattagacaagccaatcagcactaaccctgtccatgccgttgatgtggtgctacgacatctgccctccatgaatttctgccactgccttctacaaagcacaacctgtaattcagttcatgtgtgaagttcttgatattcataatattgatgagcaaccaagacctctgactgattctcatcgggtaaaattcaccaaagagataaaaggtttgaaggttgaagtgactcattgtggaacaatgagacggaaataccgtgtttgtaatgtaacaaggaggcctgccagtcatcaaacctttcctttacagttagaaaacggccaaactgtggagagaacagtagcgcagtatttcagagaaaagtatactcttcagctgaagtacccgcaccttccctgtctgcaagtcgggcaggaacagaaacacacctacctgccactagaagtctgtaatattgtggcagggcaacgatgtatcaagaagctaacagacaatcagacttccactatgatcaaggcaacagcaagatctgcaccagatagacaagaggaaattagcagattggtaagaagtgcaaattatgaaacagatccatttgttcaggagtttcaatttaaagttcgggatgaaatggctcatgtaactggacgcgtacttccagcacctatgctccagtatggaggacggaatcggacagtagcaacaccgagccatggagtatgggacatgcgagggaaacaattccacacaggagttgaaatcaaaatgtgggctatcgcttgttttgccacacagaggcagtgcagagaagaaatattgaagggtttcacagaccagctgcgtaagatttctaaggatgcagggatgcccatccagggccagccatgcttctgcaaatatgcacagggggcagacagcgtagagcccatgttccggcatctcaagaacacatattctggcctacagcttattatcgtcatcctgccggggaagacaccagtgtatgcggaagtgaaacgtgtaggagacacacttttgggtatggctacacaatgtgttcaagtcaagaatgtaataaaaacatctcctcaaactctgtcaaacttgtgcctaaagataaatgttaaactcggagggatcaataatattcttgtacctcatcaaagaccttctgtgttccagcaaccagtgatctttttgggagccgatgtcactcatccacctgctggtgatggaaagaagccttctattgctgctgttgtaggtagtatggatgcacacccaagcagatactgtgccacagtaagagttcagagaccccgacaggagatcatccaggacttggcctccatggtccgggaacttcttattcaattttataagtcaactcggttcaagcctactcgtatcatcttttatcgggatggtgtttcagaggggcagtttaggcaggtattatattatgaactactagcaattcgagaagcctgcatcagtttggagaaagactatcaacctggaataacctacattgtagttcagaagagacatcacactcgattattttgtgctgataggacagaaagggttggaagaagtggcaatatcccagctggaacaacagttgatacagacattacacacccatatgagttcgatttttacctctgtagccatgctggaatacagggtaccagtcgtccttcacactatcatgttttatgggatgataactgctttactgcagatgaacttcagctgctaacttaccagctctgccacacttacgtacgctgtacacgatctgtttctatacctgcaccagcgtattatgctcacctggtagcatttagagccagatatcatcttgtggacaaagaacatgacagtgctgaaggaagtcacgtttcaggacaaagcaatgggcgagatccacaagctcttgccaaggctgtacagattcaccaagataccttacgcacaatgtacttcgcttaaatagtccaagtatattctctgagaggaagtactgaaagatgaattgacatacaacgtatgtttccagtgaagtcaattgagtaaggacacctccagccatacagaaaccaacactgtgtgggggccaaggtctgatccttatgttaatacaaggaagattgtttacttcatcaaggaacacagcatcattatgcaatatgaaaccagccaactgctttttgtgcggtctcctataggaagtatcgcaattgttttgttttcatttcttgtagtctaacccttttaatgcctttacctcaagttgcttggcagcacaactatctttgcaaaaaaaagtaaagaaaaagtaaatgatggtttaaaaaatacacaccttcatgaataatcaaagtgatttttcagaattatgtgtgcaaaaaattaatgtgcattcatatattcttgtaaaaggtgtctgtgtatttttaaaatatatacatccatacttcatatgcatatatatctagatctggattgataatagatatatatgtgtctgttatatattttagagttcattccattggggaattttctttcccttttattctacccccactaccgcctttatttctctatttcccttgccttcatcacctacatttttttcccagtcctaccagtgacattcaaatgttgatgtatctggttcgtttgaatataaaatatggcaaacta

SEQ ID NO: 10033 - DNA, 1726 bp, Homo sapiens
  source 1..1726: mol_type = unassigned DNA
aggaaggagggtggccctaccccagcgggctcggctcggggcctccgcggcagttcggggtccttcacccgccggctccagtcctgtgccgttttccgtccgcgactcttccggcccagagctttcggagtgcggttgctcaggggaagccgtcgccgcccccgcctcggggccgagtgagagtgcccgtcgcgtcgcgccgcgtcgccccccgggccgcctccttgccgccagtggcgggctccgttctccctcgaagcactccccccagctccatgaatggaaatcggctccgcaggacccgctggggcccagcccctactcatggtgcccagaagacctggctatggcaccatgggcaaacccattaaactgctggctaactgttttcaagttgaaatcccaaagattgatgtctacctctatgaggtagatattaaaccagacaagtgtcctaggagagtgaacagggaggtggttgactcaatggttcagcattttaaagtaactatatttggagaccgtagaccagtttatgatggaaaaagaagtctttacaccgccaatccacttcctgtggcaactacaggggtagatttagacgttactttacctggggaaggtggaaaagatcgacctttcaaggtgtcaatcaaatttgtctctcgggtgagttggcacctactgcatgaagtactgacaggacggaccttgcctgagccactggaattagacaagccaatcagcactaaccctgtccatgccgttgatgtggtgctacgacatctgccctccatgaaatacacacctgtggggcgttcatttttctccgctccagaaggatatgaccaccctctgggagggggcagggaagtgtggtttggattccatcagtctgttcggcctgccatgtggaaaatgatgcttaatatcgatgaaagagacctctggcagcagtgtggagaatagatagaggagaaaaaactaatctgagaagccagttaggaggcttttcaatcactagttcaggtaagagatggtgatggtctaatgtgggatggagaggaaggattaagctgaaaaaataggtttaagaaccatgtccagaaaaaaaaaactttgggtgtagtactggtacatggaacggattggaaaaaaatagaccagagctttactagatttttgaaagaattgtttttgcaaataaactacaagcctggcatatcagtcaaggttcagaacctagagaagcagaaccagtacgaagtatagagagagagtttatgcaattgtaggggctagctaggcaagtctgaaattttgggggcaggctgtcaggaagggcagggaaattcaggcatgggctgaagcagttatctataagtggaatttcttgctctcagggaagcttcagccctacttttaagacctttcacctaattgaatcaggcccatccacattattcaggataatctccattacttaaagtcaacagattatggattttaattacatctacaaaataccttcatagcaacacctagattagtgtttgattaaacaaatggcagctggtagcctagcaagttaacacattaaaaacaacacctgccatgatggcttacacttgtaatcccagcactttgggaggccaaagtgggaggatcacttgagattaggagtttgcgatcaggctgaacaacatagtgagacctgatctctacc

SEQ ID NO: 10034 - DNA, 3649 bp, Homo sapiens
  source 1..3649: mol_type = unassigned DNA
cggcgagcttccggggcggccccgggcaggtcggcggcggcggcccgcagtcgtggaggagcggtgggagcgtcggcggccgcgggcgatgcaacttccggacgggactcccctctgtccgcgcctcacatctccccttcctctcgcctagtcctgtgccgttttccgtccgcgactcttccggcccagagctttcggagtgcggttgctcaggggaagccgtcgccgcccccgcctcggggccgagtgagagtgcccgtcgcgtcgcgccgcgtcgccccccgggccgcctccttgccgccagtggcgggctccgttctccctcgaagcactccccccagctccatgaatggaaatcggctccgcaggacccgctggggcccagcccctactcatggtgcccagaagacctggctatggcaccatgggcaaacccattaaactgctggctaactgttttcaagttgaaatcccaaagattgatgtctacctctatgaggtagatattaaaccagacaagtgtcctaggagagtgaacagggaggtggttgactcaatggttcagcattttaaagtaactatatttggagaccgtagaccagtttatgatggaaaaagaagtctttacaccgccaatccacttcctgtggcaactacaggggtagatttagacgttactttacctggggaaggtggaaaagatcgacctttcaaggtgtcaatcaaatttgtctctcgggtgagttggcacctactgcatgaagtactgacaggacggaccttgcctgagccactggaattagacaagccaatcagcactaaccctgtccatgccgttgatgtggtgctacgacatctgccctccatgaaatacacacctgtggggcgttcatttttctccgctccagaaggatatgaccaccctctgggagggggcagggaagtgtggtttggattccatcagtctgttcggcctgccatgtggaaaatgatgcttaatatcgatgtttctgccactgccttctacaaagcacaacctgtaattcagttcatgtgtgaagttcttgatattcataatattgatgagcaaccaagacctctgactgattctcatcgggtaaaattcaccaaagagataaaaggtttgaaggttgaagtgactcattgtggaacaatgagacggaaataccgtgtttgtaatgtaacaaggaggcctgccagtcatcaaacctttcctttacagttagaaaacggccaaactgtggagagaacagtagcgcagtatttcagagaaaagtatactcttcagctgaagtacccgcaccttccctgtctgcaagtcgggcaggaacagaaacacacctacctgccactagaagtctgtaatattgtggcagggcaacgatgtatcaagaagctaacagacaatcagacttccactatgatcaaggcaacagcaagatctgcaccagatagacaagaggaaattagcagattggtaagaagtgcaaattatgaaacagatccatttgttcaggagtttcaatttaaagttcgggatgaaatggctcatgtaactggacgcgtacttccagcacctatgctccagtatggaggacggaatcggacagtagcaacaccgagccatggagtatgggacatgcgagggaaacaattccacacaggagttgaaatcaaaatgtgggctatcgcttgttttgccacacagaggcagtgcagagaagaaatattgaagggtttcacagaccagctgcgtaagatttctaaggatgcagggatgcccatccagggccagccatgcttctgcaaatatgcacagggggcagacagcgtagagcccatgttccggcatctcaagaacacatattctggcctacagcttattatcgtcatcctgccggggaagacaccagtgtatgcggaagtgaaacgtgtaggagacacacttttgggtatggctacacaatgtgttcaagtcaagaatgtaataaaaacatctcctcaaactctgtcaaacttgtgcctaaagataaatgttaaactcggagggatcaataatattcttgtacctcatcaaagaccttctgtgttccagcaaccagtgatctttttgggagccgatgtcactcatccacctgctggtgatggaaagaagccttctattgctgctgttgtaggtagtatggatgcacacccaagcagatactgtgccacagtaagagttcagagaccccgacaggagatcatccaggacttggcctccatggtccgggaacttcttattcaattttataagtcaactcggttcaagcctactcgtatcatcttttatcgggatggtgtttcagaggggcagtttaggcaggtattatattatgaactactagcaattcgagaagcctgcatcagtttggagaaagactatcaacctggaataacctacattgtagttcagaagagacatcacactcgattattttgtgctgataggacagaaagggttggaagaagtggcaatatcccagctggaacaacagttgatacagacattacacacccatatgagttcgatttttacctctgtagccatgctggaatacagggtaccagtcgtccttcacactatcatgttttatgggatgataactgctttactgcagatgaacttcagctgctaacttaccagctctgccacacttacgtacgctgtacacgatctgtttctatacctgcaccagcgtattatgctcacctggtagcatttagagccagatatcatcttgtggacaaagaacatgacagtgctgaaggaagtcacgtttcaggacaaagcaatgggcgagatccacaagctcttgccaaggctgtacagattcaccaagataccttacgcacaatgtacttcgcttaaatagtccaagtatattctctgagaggaagtactgaaagatgaattgacatacaacgtatgtttccagtgaagtcaattgagtaaggacacctccagccatacagaaaccaacactgtgtgggggccaaggtctgatccttatgttaatacaaggaagattgtttacttcatcaaggaacacagcatcattatgcaatatgaaaccagccaactgctttttgtgcggtctcctataggaagtatcgcaattgttttgttttcatttcttgtagtctaacccttttaatgcctttacctcaagttgcttggcagcacaactatctttgcaaaaaaaagtaaagaaaaagtaaatgatggtttaaaaaatacacaccttcatgaataatcaaagtgatttttcagaattatgtgtgcaaaaaattaatgtgcattcatatattcttgtaaaaggtgtctgtgtatttttaaaatatatacatccatacttcatatgcatatatatctagatctggattgataatagatatatatgtgtctgttatatattttagagttcattccattggggaattttctttcccttttattctacccccactaccgcctttatttctctatttcccttgccttcatcacctacatttttttcccagtcctaccagtgacattcaaatgttgatgtatctggttcgtttgaatataaaatatggcaaacta

SEQ ID NO: 10035 - DNA, 1404 bp, Homo sapiens
  source 1..1404: mol_type = unassigned DNA
gagcttccggggcggccccgggcaggtcggcggcggcggcccgcagtcgtggaggagcggtgggagcgtcggcggccgcgggcgatgcaacttccggacgggactcccctctgtccgcgcctcacatctccccttcctctcgcctagtcctgtgccgttttccgtccgcgactcttccggcccagagctttcggagtgcggttgctcaggggaagccgtcgccgcccccgcctcggggccgagtgagagtgcccgtcgcgtcgcgccgcgtcgccccccgggccgcctccttgccgccagtggcgggctccgttctccctcgaagcactccccccagctccatgaatggaaatcggctccgcaggacccgctggggcccagcccctactcatggtgcccagaagacctggctatggcaccatgggcaaacccattaaactgctggctaactgttttcaagttgaaatcccaaagattgatgtctacctctatgaggtagatattaaaccagacaagtgtcctaggagagtgaacagggaggtggttgactcaatggttcagcattttaaagtaactatatttggagaccgtagaccagtttatgatggaaaaagaagtctttacaccgccaatccacttcctgtggcaactacaggggtagatttagacgttactttacctggggaaggtggaaaagatcgacctttcaaggtgtcaatcaaatttgtctctcgggtgagttggcacctactgcatgaagtactgacaggacggaccttgcctgagccactggaattagacaagccaatcagcactaaccctgtccatgccgttgatgtggtgctacgacatctgccctccatgaaatacacacctgtggggcgttcatttttctccgctccagaaggatatgaccaccctctgggagggggcagggaagtgtggtttggattccatcagtctgttcggcctgccatgtggaaaatgatgcttaatatcgatgaaagagacctctggcagcagtgtggagaatagatagaggagaaaaaactaatctgagaagccagttaggaggcttttcaatcactagttcaggtttcagtctacatgttacttccttgagaagcagtgtttgacacccttctcccccaatccagccatcccccaagtctgagttaggtatttctcttctgtattcccatagcacagtgtaattcccctataatagcatgtatcaccttgaattatgggtgtttattgttctgtctctcctgttagaacgaaagctccatgaagggattgtcattttattcaccagtgtaccctctatgcccagcacaacttttggtcatattaaacaaagaatgaataaataaatccaagagcataggaggaggagcatcc

SEQ ID NO: 10036 - DNA, 7116 bp, Homo sapiens
  source 1..7116: mol_type = unassigned DNA
gcggcggcggcggcggcggcggcggggattgtttttgttgtcgctgaggccggaagagccggagccgggtccctgtccccgggccgggcgccgccgccgccccctgcccagcgcccgcgtctccgcggcgccaccccagcgccaatattccggagatcaagcgttacgcggcggcggcggcggcggcggcggggcccggagcgggaggcgccggggaccggggcgaggcggcccccgccgccgccatggaggcgctgggacccggacctccggctagcctgtttcagccacctcgtcgtcctggccttggaactgttggaaaaccaattcgactgttagccaatcattttcaggttcagattcctaaaatagatgtgtatcactatgatgtggatattaagcctgaaaaacggcctcgtagagtcaacagggaggtagtagatacaatggtgcggcacttcaagatgcaaatatttggtgatcggcagcctgggtatgatggcaaaagaaacatgtacacagcacatccactaccaattggacgggatagggttgatatggaggtgactcttccaggcgagggtaaagaccaaacatttaaagtgtctgttcagtgggtgtcagttgtgagccttcagttgcttttagaagctttggctgggcacttgaatgaagtcccagatgactcagtacaagcacttgatgttatcacaagacaccttccctccatgaggtacaccccagtgggccgttcctttttctcacccccggaaggttactaccaccctctgggagggggcagggaggtctggtttggttttcatcagtctgtgagacctgccatgtggaatatgatgctcaacattgatgtatctgcaactgctttctaccgggctcagcctatcattgagttcatgtgtgaggttttagacattcagaacatcaatgaacagaccaaacctctaacagactcccagcgtgtcaaatttaccaaagaaatcagaggtctcaaagttgaggtgacccactgtggacagatgaaacgaaaataccgagtttgtaatgtgactagacggccagccagtcatcaaacttttcctttgcagctagaaaacggtcaagctatggaatgtacagtagctcaatattttaagcaaaagtatagtctgcaactgaaatacccccatcttccctgtctccaagtgggacaagaacaaaagcatacatacttgccactcgaggtctgtaatatagtggcaggacagcgatgtatcaagaagctcacagacaatcagacttccacaatgatcaaagctacagcaagatctgctcctgacagacaggaagagatcagtagactggtgaagagcaacagtatggtgggtggacctgatccataccttaaagaatttggtattgttgtccacaatgaaatgacagagctcacaggcagggtacttccagcaccaatgctgcaatatggaggccggaataaaacagtagccacacccaaccagggtgtctgggacatgcgaggaaagcagttttatgctggcattgaaattaaagtttgggcagttgcttgttttgcacctcagaaacaatgtagggaagatttactaaagagtttcactgaccagctgcgtaaaatctctaaggatgcaggaatgcccatccagggtcagccatgtttctgcaagtatgcacaaggtgcagacagtgtggagcctatgtttaaacatctgaaaatgacttatgtgggcctacagctaatagtggttatcctgcctggaaagacaccagtatatgcggaggtgaaacgtgttggagatacccttctaggtatggccacacagtgtgtccaggtaaaaaatgtagtgaagacctcacctcaaaccctttccaatctttgcctgaagataaatgcaaaacttggaggaattaacaatgtgcttgtgcctcatcaaaggccctcggtgttccagcagcctgtcatcttcctgggagcggatgtcacacaccccccagcaggggatgggaagaaaccttccattgctgctgtggttggcagtatggatggccaccccagccggtactgtgccaccgttcgggtgcagacttcccggcaggagatctcccaagagctcctctacagtcaagaggtcatccaggacctgactaacatggttcgagagctgctgattcagttctacaaatccacacgcttcaaacccactcggatcatctattaccgtggaggggtatctgagggacaaatgaaacaggtagcttggccagaactaatagcaattcgaaaggcatgtattagcttggaagaagattaccggccaggaataacttatattgtggtgcaaaaaagacatcacacacgactcttctgtgcagataaaacagaaagggtagggaaaagtggcaatgtaccagcaggcactacagtggatagtaccatcacacatccatctgagtttgacttttacctctgtagtcatgcaggaattcagggaaccagccgtccctcacattaccaggtcttgtgggatgacaactgcttcactgcagatgaactccagctactgacttaccagctgtgtcacacctatgtgaggtgcactcgctcagtctctattccagcccctgcatattatgcccggcttgtagcatttagggcaaggtatcatctggtggataaagatcatgacagtgcggaaggcagtcatgtgtcaggacagagcaacggccgggatcctcaggccttggctaaggctgtgcaaatccaccatgatacccagcacacgatgtattttgcctgagagtctcagaaaaagaactcaaccaatttggcaccccatgcagcctcaaaatgtttcaaatgcctaccgcctctagatcgagccacgttgacttcaggtggtcttctaccagcagctcggaatagttgcactgaatctatactttgcagcactgtctgatgcgtcaacaaaattgagccatttttttaaagtaatagatactaatagattatcttttctgatgcactggactgaatttttacctcaatgtgcaaaggctgatcagcctgaactttctaaaggactttacaagaagggtttctatggaatattttgctagctgtggtgttcaccgcatccctctagtcttagaagagaagattattccttttttctgtagtcattgagtggggtatatgcataagtgggagagaaaaaccaaacaatctacttcagttcagtgtaactatttaattgtgtgggtccatagactttttaatgaagatttctgactttgccactgtaaatgcctttaatgagcattaatttttgaaagttttacagagttttattagttttactactttatcttattgatctctgcagacttgtgctggtgcaagtacatgctgacaggcaatttgcactatatttggctgcagattcaaataggcagttctcttatttggtcgacttttgtgaatgtgtgacataaacagatgtaatgcatgtcacagtgacggagataacactgccatgataaaagtactcatgtttcccctatttggaaaaaaaaattgcttttagtatttttccaagttttcaaaagtgcccattttatgctgctgtgtggtttgttaaatctaaatgatttttaaacttttctcatagaaacttaactttggcaataaacattttttaaggtctctcctcttccttccccaacaatgtagttttctagatgagatttcagtatgattttatcagctatttcttatatatcataatctggcaatttctgaaaccagtcagaaaagacatatatttccatgcctttttaaagaattatttttacctgttttatattcacagttggtgtcctgtcactttgttttaaaataagctagaaccaggatgcttccttattggaaaggctttgccagtccttaaggtacaatgagtgatgctgcaacttgcaaatgtaccagcatttaaaatttcttttcctgggaatcaaggtaactcacacgactacttgcagtacaaattttttgcttctctttcgacatgaaatgtacttggtgggttttccttccttttattaaactaaaactgtgtggaaaaggttgatttttcttaatagattctggattccactcacagggagatgggattcctttcttgtccaaacaaagggagttgctctaaagcgagcatcagttaaaatgtaggggaaaatgtattctgtatgtagtgtagataatactttgtgaatggacaacagttacatagtgtcttggtagcaccagccagtgtttcccagcccagagtttactgacttgtaattctctatccaggacatcaggagtgagggatggaaaaggggataaaaggcctggagccacactctatatggctgaggaaggagctagggaaagagatagacacaatggggtgaaaacaattttgccgcccctgcctggaaactgctggtggggaaatgatggtgaagggtgtttgcttgaactcatgagacggtccaaatctcataaactagccttctcaaaatcccagcaatataaagcactgtttttcttcagtcgtttaaataaacttgtaaatacattgaagtttacatttccatgtgctgttgatcaacggcgccacctgtgtttgctgagactggtctctgagagagttttatgtcgatcgaggcctgttgctcattaagctgagtgcagacgtccttaatccctgcagatagtgggatgaaagcaagttctgtaaaatgaagcacaacatagccaggagtgaagagatggcagatgttaatttcttaaaattttccttttttttttttttttttgcaaatacctcacttggataatacaaatcaggacatgttggtgaggggctggctgcttggctgctgcttttattcacacttgttcagggagagcacagagaatacccttcagcatggccactctggacccaagaggaggaaaaaacggaagcttttttaggagaaggaggacttgctggaatccaagatgtgaagaactcttggtgactggctggctggccagcgggcaccacacctgcacttgagtgcctcgggcttgcttattaataacgcacagaagaagcatcacttctcaccatctcctggcatgtatggagcagggagcaaggctatgttcccgaaagccctgattagcttgtcttgctctacgctcgacctcgaacaatacagcttgtaagacctcagtcagtcctggtacactggggtaaatcagtgtggtggtggaagaaaagccgggaggcctatttttataggaaaatagtaccattaaaggtgcaatgctgtcattttggacaaaaggaaagaaatttggaagagctgggattattggcaaaaacttgctgaggggtgaatctttagagctaatcactgcagaatcagagttgcagcaatatgattgcaagcaagtctgaatgcatagttttactttaattcggcttgacaatttgaataggtaaccccctcgggactgactgaatcgttatgcatgtgtcaatcaatgggaggtgtgcattctctagaagtagttttaggctgtttggtttggttttggttttgttttttaaatgcagcctgttgaggcactgtcatgtggtgtgaaagatttaaatgtagcaacgctaaagagtaataatttggggataagaagtggggacattggccgggcgcggtggctcacgcctgtaattccagcactttgggaggcctaggtgggcggatcagctgaggtcgagagttcgaggccagtctgaccaacatggtgaaaccccatctctactaaaaatacagaaaattagctgggtctggtggtggatgcctgtaatcccagctactcgggaggctgaggcaggagaattgcttgaacccaggaggtggacggtgcagtgagctattactccagcctgggcaacaagagcgaaactctgtctcaaaaaaaaaaaggggggggggggacattaagagagtggtgatgacccaaatgttgaaccaattatgttttggtggtggtgttcttagctgttgaatcctgaatggtttataaagtgaactagctggcttaatgcagccagcgttctgggcagcagaacatattcattcttactgtaaattctatttgctgcttccaaaggtgatgattttcaagcagacatgttctatatggtctgtgttttaggatctggtgcccagcctctatcagagcttgcctacctggcaaagctgcctacccttcaagtgggaaaatataatccactgtttaacaaggctcaccctctccaccctgtcctaacgaccttttgtgaatgtgctgtgatattttcttgctcaatagcaaggtggtagctctgctttcattttaagaaagtggaggctgagggcattgtatcaatactgttgcaactccaagaagttttccttgtaaaattaaaggaaagatcttgttattgattaaccattttcttatgccttgctattgacatattcatgctctttctacgtctagtggctgaaaatgtttgcatttgttcatttgactaatggtgtgatttttgtttctatattattagacctgtaatgttttaaaatgtattttattaaatttggactggatgtatgtctctagcaatacgaggtactttctaaactattaagggaggggttgtatcctcatgttgagataagatgatggtcgtttaaattttgcaattttttttggcctgcagggatattttgtgtttatgtgtccaaaaaaggaataaattggcattcttgtgccaaaagttgtttttcctgtcaattgtctaataagtatgcagtacactgtaatggcaacatacatggttgctttataaaaacagtttcctcagtatgagaaattttacaaagaacagtggaaaaactttgtgtttttaactcttgggtctccctatttttaaaaattgctatttggtatacaattattatgtgtcaattaaaactaaaataaaacttttaaaaaagaaa

SEQ ID NO: 10037 - DNA, 2094 bp, Homo sapiens
  source 1..2094: mol_type = unassigned DNA
agttccaggtaccgccactgggggcggccgcggcctccccagcggcaacggccacgaagctgcgcggccctggtttccagccgggcccttttcgcggccgggccccagcatggctgcccccacggctgagggcctggcagctgctgcgccctcgctttcttgacattccctggcttctgtgctctcttccccaggccaccccagcagacatgtttgccaaggcctttcgggtcaagtccaacacggccatcaaggggtcggacaggagaaagcttcgagctgatgtgacaactgctttccccacccttggaactgatcaagtctctgagttagtacctggaaaggaggagctcaacattgtgaagttgtatgctcacaaaggggatgcagtgactgtgtacgtgagtggtggtaaccccatcctctttgaactggagaaaaatctgtatccaacagtgtacacgctgtggtcctatcctgatcttctgccaacctttacaacatggcctctggtgctcgagaaactggtagggggagcagatttgatgctgcctggactggtgatgccccctgctggtctgcctcaggtacagaagggcgacctctgtgccatttctttggtggggaacagagcccctgtagccattggagttgcagccatgtccacagctgagatgctcacgtcaggcctgaagggaaggggcttctctgtgctccacacttaccaggaccacttgtggcggtctggaaacaagtcctctccaccttccattgctccactggccctggattcagcagatctcagtgaagagaaggggtctgtccagatggactccaccctgcagggagacatgaggcacatgaccctggagggggaagaggagaatggggaggttcaccaggcacgtgaagacaagtctctctcagaagccccagaagacaccagcaccaggggcctgaaccaagactccacagatagcaaaacgcttcaagaacaaatggatgagctgttacagcaatgcttcttacatgccttgaagtgccgagtcaaaaaggctgacctccctttactcaccagcactttccttggcagccacatgttctcctgctgccctgaaggacgacaactggacataaagaagtcaagctacaaaaagctctctaagttcctgcagcaaatgcagcaggagcagattatacaggtgaaggagctgagcaaaggggtggagagcattgtggctgtggactggaaacacccgaggattacatctttcgtcatacccgagccctccccgacctcccagactatccaggagggtagcagggaacagccctatcaccctccagatataaaacccctctactgtgtcccagccagcatgaccctgctcttccaggagtctggccacaagaaggggagctttctggagggcagtgaggtccgaacgatcgtcattaactacgccaagaaaaatgacctggttgatgcagacaacaaaaatcttgtgagattggatcccatcctatgtgactgcatcttagagaaaaatgaacagcatacagtcatgaagcttccatgggacagtcttctgaccaggtgtttggaaaaattacagcctgcctatcaagtgacccttcccggacaagagcccattgtgaagaaagggagaatctgtccaattgacatcaccctagcacaaagagcgtctaataaaaaggtgaccgtggtccggaacttggaggcctatggtctggacccatactcagtggctgccatccttcagcagcgatgccaggctagcaccaccgtcaatcctgcccctggggccaaggacagccttcaggtgcagatccagggaaaccaggtccaccacctcggctggctattgcttgaagagtatcagctccctcgaaaacacatccaaggtctagaaaaggccctcaaacctggcaagaagaagtgacagactcttttgtctcacgtggtggatccggtggaaatccaagctctgggctggtaatttttatgagcattttcagcttttgcaaatacaaaatataattctttacaaaaataaatttttattctaatct

SEQ ID NO: 10038 - DNA, 1923 bp, Homo sapiens
  source 1..1923: mol_type = unassigned DNA
cttttcgcggccgggccccagcatggctgcccccacggctgagggcctggcagctgctgcgccctcgctttcttgacattccctggcttctgtgctctcttccccaggccaccccagcagacatgtttgccaaggcctttcgggtcaagtccaacacggccatcaaggggtcggacaggagaaagcttcgagctgatgtgacaactgctttccccacccttggaactgatcaagtctctgagttagtacctggaaaggaggagctcaacattgtgaagttgtatgctcacaaaggggatgcagtgactgtgtacgtgagtggtggtaaccccatcctctttgaactggagaaaaatctgtatccaacagatttgatgctgcctggactggtgatgccccctgctggtctgcctcaggtacagaagggcgacctctgtgccatttctttggtggggaacagagcccctgtagccattggagttgcagccatgtccacagctgagatgctcacgtcaggcctgaagggaaggggcttctctgtgctccacacttaccaggaccacttgtggcggtctggaaacaagtcctctccaccttccattgctccactggccctggattcagcagatctcagtgaagagaaggggtctgtccagatggactccaccctgcagggagacatgaggcacatgaccctggagggggaagaggagaatggggaggttcaccaggcacgtgaagacaagtctctctcagaagccccagaagacaccagcaccaggggcctgaaccaagactccacagatagcaaaacgcttcaagaacaaatggatgagctgttacagcaatgcttcttacatgccttgaagtgccgagtcaaaaaggctgacctccctttactcaccagcactttccttggcagccacatgttctcctgctgccctgaaggacgacaactggacataaagaagtcaagctacaaaaagctctctaagttcctgcagcaaatgcagcaggagcagattatacaggtgaaggagctgagcaaaggggtggagagcattgtggctgtggactggaaacacccgaggattacatctttcgtcatacccgagccctccccgacctcccagactatccaggagggtagcagggaacagccctatcaccctccagatataaaacccctctactgtgtcccagccagcatgaccctgctcttccaggagtctggccacaagaaggggagctttctggagggcagtgaggtccgaacgatcgtcattaactacgccaagaaaaatgacctggttgatgcagacaacaaaaatcttgtgagattggatcccatcctatgtgactgcatcttagagaaaaatgaacagcatacagtcatgaagcttccatgggacagtcttctgaccaggtgtttggaaaaattacagcctgcctatcaagtgacccttcccggacaagagcccattgtgaagaaagggagaatctgtccaattgacatcaccctagcacaaagagcgtctaataaaaaggtgaccgtggtccggaacttggaggcctatggtctggacccatactcagtggctgccatccttcagcagcgatgccaggctagcaccaccgtcaatcctgcccctggggccaaggacagccttcaggtgcagatccagggaaaccaggtccaccacctcggctggctattgcttgaagagtatcagctccctcgaaaacacatccaaggtctagaaaaggccctcaaacctggcaagaagaagtgacagactcttttgtctcacgtggtggatccggtggaaatccaagctctgggctggtaatttttatgagcattttcagcttttgcaaatacaaaatataattctttacaaaaataaatttttattctaatct

SEQ ID NO: 10039 - DNA, 1633 bp, Homo sapiens
  source 1..1633: mol_type = unassigned DNA
cgcggccgggccccagcatggctgcccccacggctgagggcctggcagctgctgcgccctcgctttcttgacattccctggcttctgtgctctcttccccaggccaccccagcagacatgtttgccaaggcctttcgggtcaagtccaacacggccatcaaggggtcggacaggagaaagcttcgagctgatgtgacaactgctttccccacccttggaactgatcaagtctctgagttagtacctggaaaggaggagctcaacattgtgaagttgtatgctcacaaaggggatgcagtgactgtgtacgtgagtggtggtaaccccatcctctttgaactggagaaaaatctgtatccaacagtgtacacgctgtggtcctatcctgatcttctgccaacctttacaacatggcctctggtgctcgagaaactggtagggggagcagatttgatgctgcctggactggtgatgccccctgctggtctgcctcaggtacagaagggcgacctctgtgccatttctttggtggggaacagagcccctgtagccattggagttgcagccatgtccacagctgagatgctcacgtcaggcctgaagggaaggggcttctctgtgctccacacttaccaggaccacttgtgccctgaaggacgacaactggacataaagaagtcaagctacaaaaagctctctaagttcctgcagcaaatgcagcaggagcagattatacaggtgaaggagctgagcaaaggggtggagagcattgtggctgtggactggaaacacccgaggattacatctttcgtcatacccgagccctccccgacctcccagactatccaggagggtagcagggaacagccctatcaccctccagatataaaacccctctactgtgtcccagccagcatgaccctgctcttccaggagtctggccacaagaaggggagctttctggagggcagtgaggtccgaacgatcgtcattaactacgccaagaaaaatgacctggttgatgcagacaacaaaaatcttgtgagattggatcccatcctatgtgactgcatcttagagaaaaatgaacagcatacagtcatgaagcttccatgggacagtcttctgaccaggtgtttggaaaaattacagcctgcctatcaagtgacccttcccggacaagagcccattgtgaagaaagggagaatctgtccaattgacatcaccctagcacaaagagcgtctaataaaaaggtgaccgtggtccggaacttggaggcctatggtctggacccatactcagtggctgccatccttcagcagcgatgccaggctagcaccaccgtcaatcctgcccctggggccaaggacagccttcaggtgcagatccagggaaaccaggtccaccacctcggctggctattgcttgaagagtatcagctccctcgaaaacacatccaaggtctagaaaaggccctcaaacctggcaagaagaagtgacagactcttttgtctcacgtggtggatccggtggaaatccaagctctgggctggtaatttttatgagcattttcagcttttgcaaatacaaaatataattctttacaaaaataaatttttattctaatctaaa

SEQ ID NO: 10040 - DNA, 920 bp, Homo sapiens
  source 1..920: mol_type = unassigned DNA
gccccagcatggctgcccccacggctgagggcctggcagctgctgcgccctcgctttcttgacattccctggcttctgtgctctcttccccaggccaccccagcagacatgtttgccaaggcctttcgggtcaagtccaacacggccatcaaggggtcggacaggagaaagcttcgagctgatgtgacaactgctttccccacccttggaactgatcaagtctctgagttagtacctggaaaggaggagctcaacattgtgaagttgtatgctcacaaaggggatgcagtgactgtgtacgtgagtggtggtaaccccatcctctttgaactggagaaaaatctgtatccaacagatttgatgctgcctggactggtgatgccccctgctggtctgcctcaggtacagaagggcgacctctgtgccatttctttggtggggaacagagcccctgtagccattggagttgcagccatgtccacagctgagatgctcacgtcaggcctgaagggaaggggcttctctgtgctccacacttaccaggaccacttgtggcggtctggaaacaagtcctctccaccttccattgctccactggccctggattcagcagatctcagtgaagagaaggggtctgtccagatggactccaccctgcagggagacatgaggcacatgaccctggagggggaagaggagaatggggaggttcaccaggcacgtgaagacaagtctctctcagaagccccagaagacaccagcaccaggggcctgaaccaagactccacagatagcaaaacgcttcaagaacaaatggatgagctgttacagcaatgcttcttacatgccttgaagtgccgagtcaaaaaggctgacctccctttactcaccagcactttccttggcagccacatgttctc

SEQ ID NO: 10041 - DNA, 3128 bp, Homo sapiens
  source 1..3128: mol_type = unassigned DNA
gtggcaggcagccctgcaccggacacacagtggcattcaacttcctgcctgccagccccagtgtgtggttcccagcctgacaaccttggcaccccagcaccccagcaggaggggtttctgcttgtggtcccctggccaccagcctcggccagctggttgtggaccagccgtgacctggggcaacccagccaacctcaccgtccaatgggctgcagccacctctctccagtgaggtctgagacccagccttaacgaggctacccccttccaggtccggccgtagcacctccgcgccgtcgccatgtcgcggtttttcaccaccggttcggacagcgagtccgagtcgtccttgtccggggaggagctcgtcaccaaacctgtcggaggcaactatggcaaacagccattgttgctgagcgaggatgaagaagataccaagagagttgtccgcagtgccaaggacaagaggtttgaggagctgaccaaccttatccggaccatccgtaatgccatgaagattcgtgatgtcaccaagtgcctggaagagtttgagctcctgggaaaagcatatgggaaggccaaaagcattgtggacaaagaaggtgtcccccggttctatatccgcatcctggctgacctagaggactatcttaatgagctttgggaagataaggaagggaagaagaagatgaacaagaacaatgccaaggctctgagcaccttgcgtcagaagatccgaaaatacaaccgtgatttcgagtcccatatcacaagctacaagcagaaccccgagcagtctgcggatgaagatgctgagaaaaatgaggaggattcagaaggctcttcagatgaggatgaggatgaggacggagtcagtgctgcaactttcttgaagaagaaatcagaagctccttctggggagagtcgcaagttcctcaaaaagatggatgatgaagatgaggactcagaagattccgaagatgatgaagactgggacacaggttccacatcttccgattccgactcagaggaggaagaagggaaacaaaccgcgctggcctcaagatttcttaaaaaggcacccaccacagatgaggacaagaaggcagccgagaagaaacgggaggacaaagctaagaagaagcacgacaggaaatccaagcgcctggatgaggaggaggaggacaatgaaggcggggagtgggaaagggtccggggcggagtgccgttggttaaggagaagccaaaaatgtttgccaagggaactgagatcacccatgctgttgttatcaagaaactgaatgagatcctacaggcacgaggcaagaagggaactgatcgtgctgcccagattgagctgctgcaactgctggttcagattgcagcggaaaacaacctgggagagggcgtcattgtcaagatcaagttcaatatcatcgcctctctctatgactacaaccccaacctggcaacctacatgaagccagagatgtgggggaagtgcctggactgcatcaatgagctgatggatatcctgtttgcaaatcccaacatttttgttggagagaatattctggaagagagtgagaacctgcacaacgctgaccagccactgcgtgtccgtggctgcatcctaactctggtggaacgaatggatgaagaatttaccaaaataatgcaaaatactgaccctcactcccaagagtacgtggagcacttgaaggatgaggcccaggtgtgtgccatcatcgagcgtgtgcagcgctacctggaggagaagggcactaccgaggaggtctgccgcatctacctgctgcgcatcctgcacacctactacaagtttgattacaaggcccatcagcgacagctgaccccgcctgagggctcctcaaagtctgagcaagaccaggcagaaaatgagggcgaggactcggctgtgttgatggagagactgtgcaagtacatctacgccaaggaccgcacagaccggatccgcacatgtgccatcctctgccacatctaccaccatgctctgcactcgcgctggtaccaggcccgcgacctcatgctcatgagccacttgcaggacaacattcagcatgcagacccgccagtgcagatcctttacaaccgcaccatggtgcagctgggcatctgtgccttccgccaaggcctgaccaaggacgcacacaacgccctgctggacatccagtcgagtggccgagccaaggagcttctgggccagggcctgctgctgcgcagcctgcaggagcgcaaccaggagcaggagaaggtggagcggcgccgtcaggtccccttccacctgcacatcaacctggagctgctggagtgtgtctacctggtgtctgccatgctcctggagatcccctacatggccgcccatgagagcgatgcccgccgacgcatgatcagcaagcagttccaccaccagctgcgcgtgggcgagcgacagcccctgctgggtccccctgagtccatgcgggaacatgtggtcgctgcctccaaggccatgaagatgggtgactggaagacctgtcacagttttatcatcaatgagaagatgaatgggaaagtgtgggaccttttccccgaggctgacaaagtccgcaccatgctggttaggaagatccaggaagagtcactgaggacctacctcttcacctacagcagtgtctatgactccatcagcatggagacgctgtcagacatgtttgagctggatctgcccactgtgcactccatcatcagcaaaatgatcattaatgaggagctgatggcctccctggaccagccaacacagacagtggtgatgcaccgcactgagcccactgcccagcagaacctggctctgcagctggccgagaagctgggcagcctggtggagaacaacgaacgggtgtttgaccacaagcagggcacctacgggggctacttccgagaccagaaggacggctaccgcaaaaacgagggctacatgcgccgcggtggctaccgccagcagcagtctcagacggcctactgagctctccactctgtttcccgcctgggccatccaaccttgaagtcctaaaccacacctcagtcactaaaggtctgtttaaagttgt

SEQ ID NO: 10042 - DNA, 5472 bp, Homo sapiens
  source 1..5472: mol_type = unassigned DNA
ggccggctgggcgcgggcgactgctggcgaggcgcgtgggaccttacgctggttccccttcgtctcctctcccggcccgggccactagagagttcgctgacgccgggtgagctgagcctgccgccaagatgccggcctattttcagaggccggaaaatgccctcaaacgcgccaacgaatttcttgaggttggcaaaaagcagcctgctctggatgttctttatgatgttatgaaaagtaaaaaacatagaacatggcaaaagatacacgaaccaattatgttgaaatacttggaactttgcgtggatcttcgcaagagccacttggcaaaggaggggttataccagtataagaacatttgtcaacaggtgaacataaaatctctggaggatgttgttagggcatatttgaaaatggcagaggaaaaaactgaagctgctaaagaagaatctcagcagatggtcttagatatagaggatctagataatattcaaactcctgagagtgttctcctaagtgctgtaagtggtgaagacactcaggatcgtactgacagattacttttaactccatgggttaaattcctgtgggagtcttacaggcagtgtttggaccttcttagaaacaattctagagtagagcgcctgtaccatgatattgcccagcaagctttcaaattctgcctccaatacacgcgtaaggctgaattccgtaaactgtgtgacaatttgagaatgcacttatcgcagattcagcgccaccataaccaaagtacggcaatcaatcttaataatccagagagccagtccatgcatttggaaaccagacttgttcagctggacagtgctatcagcatggaattgtggcaggaagcattcaaagctgtggaagatattcacgggctattctccttgtctaaaaaaccacctaaacctcagttgatggcaaattactataacaaagtctcaactgtgttttggaaatctggaaatgctctttttcatgcatctacactccatcgtctttaccatctctctagagaaatgagaaagaatctcacacaagatgagatgcaaagaatgtctactagagtccttttagccactctttccatccctattactcctgagcgtacggatattgctcgacttctggatatggatggcattatagttgaaaaacagcgtcgccttgcaacactactaggtcttcaagccccaccgacacgaattggccttattaatgatatggtcagatttaatgtactacaatatgttgtcccagaagtgaaagacctttacaattggcttgaagtagaatttaacccattaaaactctgtgagcgagtcacaaaggttctaaattgggttagggaacaacctgaaaaggaaccggaattgcagcagtatgtgccacaactgcaaaacaacaccatcctccgccttctgcagcaggtgtcacagatttatcagagcattgagttttctcgtttgacttctttggttccttttgttgatgctttccaactggaacgggccatagtagatgcagccaggcattgcgacttgcaggttcgtattgatcacacttctcggaccctgagttttggatctgatttgaattatgctactcgagaagatgctccgattggtcctcatttgcaaagcatgccttcagagcagataagaaaccagctgacagccatgtcctcagtacttgcaaaagcacttgaagtcattaaaccagctcatatactgcaagagaaagaagaacagcatcagttggctgtcactgcataccttaaaaattcacgaaaagagcaccagcggatcctggctcgccgccagacaattgaggagagaaaagagcgccttgagagtctgaatattcagcgtgagaaagaagaattggaacagagggaagctgaactccagaaagtgcggaaggctgaggaagagaggctgcgccaggaagcaaaggagagagagaaggagcgtatcttacaggaacatgaacaaatcaaaaagaaaactgtccgagagcgtttggagcagatcaagaaaacagaactgggtgccaaagcattcaaagatattgatattgaagaccttgaggaattggatccagattttatcatggctaaacaggttgaacaactggagaaagaaaagaaagaacttcaagaacgcctaaagaatcaagaaaagaagattgactattttgaaagagccaaacgtttggaagaaattcctttgataaagagcgcttacgaggaacagagaattaaagacatggatctgtgggagcaacaagaggaagaaagaattactacaatgcagctagaacgtgaaaaggctcttgaacataagaatcgaatgtcacgaatgcttgaagacagagatttattcgtaatgcgactcaaagctgcacggcagtctgtttatgaggaaaaacttaaacagtttgaagagcgattagcagaagaaaggcataatcgattggaagaacggaaaaggcagcgtaaagaagaacgcaggataacatactatagagaaaaagaagaggaggagcagagaagggcagaagaacaaatgctaaaagagcgggaagagagagagcgcgccgaacgagcaaaacgcgaggaagagctacgagagtatcaggagcgggtgaagaaattagaagaagtggaaaggaaaaaacgccaaagggagttggaaattgaagaacgagaacggcgtagagaggaagagagaagacttggcgatagttccctttctagaaaggactctcgttggggagatagagattcagaaggcacctggagaaaaggacctgaagcagattctgagtggagaagaggcccgccagagaaggagtggagacgtggagaagggcgagatgaggacaggtctcatagaagagatgaagagcggccccggcgtctgggggatgatgaagatagagagccctctcttagaccagacgatgatcgggttccccggcgtggcatggatgatgacagaggccctagacgtggtcctgaggaagataggttctctcgtcgtggggcagacgatgaccggccttcctggcgtaacacagatgatgacaggcctcccagacgaattgccgatgaagacaggggaaactggcgtcatgcggatgatgacagaccacctagacgaggactggatgaggacagaggaagctggcgaacagctgatgaggacagaggaccaagacgtgggatggatgatgaccgggggccgaggcgaggaggcgctgatgatgagcgatcatcctggcgtaatgctgatgatgaccggggtcccaggcgagggttggatgatgatcggggtcccaggcgaggcatggatgatgaccggggtcccaggcgaggcatggatgatgaccggggtcccaggcgaggcatggatgatgaccggggtcccaggcgagggttggatgatgatcgaggaccttggaggaacgccgatgatgacagaattcccaggcgtggtgcagaggatgacaggggcccttggagaaacatggatgatgatcgcctttcaagacgtgctgatgatgatcggtttcccagacggggtgatgactcaagacctggtccttggagaccattagtcaagccaggtggatggagagagaaagaaaaagccagagaggagagctggggtccacctcgagaatcaaggccatcagaagaacgtgaatgggacagagaaaaagaaagggacagagataatcaagatcgggaggagaatgacaaggaccctgagagagaaagggacagagagagagatgtggatcgagaggatcgcttcagaagacctagggatgaaggtggctggagaagaggaccagctgaggaatcttcaagctggagagactcaagtcgccgggacgatagggatagggatgaccgtcgccgtgagagggatgaccggcgtgatctaagagaaagacgagatctaagagacgacagggaccgaagaggacctccactcagatcagaacgtgaagaagtaagttcttggagacgtgctgatgacaggaaagatgaccgggtggaagagcgggaccctcctcgtcgagttcctcccccagctctttcaagagaccgagaaagagaccgagaccgagaaagagaaggtgaaaaagagaaggcctcatggagagctgagaaagatagggaatctctccgtcgtactaaaaatgagactgatgaagatggatggaccacagtacgacgttaagtctcaagataatggatttaaactggtgtcttaaataggtttgatcacattcaaggattattatacttgtgcttcaaccaatctaaattggattctttaatgttgtttcaccataacacaaaaagcatgaacttgtattaatcctatataatagattgatcatgcaccatatccacaggaggttggaaaaaccatgccattttctggaatttaagggtgttgcattatttcatcaatcatttgttgacaaaaaagaaaaactaaaaaataaatttaaaatgtgacccttcaggtattgagtaacacctttatcttggtatagaactgatactttttttttgattttgaaatatctgataataatttggaatgaagtaaggttctgttaaaatatatttgaagaccctttaaagcagtgaatctgaaacaattttcacacccttaagtggttgatacgtacctattttaggtattttgaggtatttaccataaactaaatttagaaattttttagattcacttgaagtaaacattacaaacattggatacggtggggttttctttagattttacttgagagaaggtgagtacaaagcaatttgcagttgttgtaatgacaagattactgcgcaagtgtgaatccaaacagtatagcttttaaattttaaagcatttggtaaattatcgctgagtttttttctgttgccaatagcaaactgcttttccattaatggagaattcatgcctttcaagcattttaaatatgacaatatttataaatgtatggtttggaggaatcgtttaaattctctttcctaattttctttcttttgaagatagattctttcaacaagtaatttgtagtaatgactgtgttgacttcaattttggagcgcagtagctatgttaaagatgaactatttggtctcattgaagccaacacagaacttgctgctgtgttttttcttcagtgataaataaaatacttacagaatttgttttagtgttgatttgtggttatagtattttgtttataatggtaagtttgcatattcagttgagttttttttacttgaatttttatcagtgccattaaatgtctgtgtttagtatcaatgaaaatgaacctaaatataacaaagaaagcatatgtggctaggatgtccccctaacatgtcttcctttgttaatgcag

SEQ ID NO: 10043 - DNA, 4486 bp, Homo sapiens
  source 1..4486: mol_type = unassigned DNA
agaccgatgcggcctgcccgccgctgtcccagccggtggttgggcatgggtttccttctcactctatcgactggggtctgggaggcgcgtagcccggaaccgtcgccccaggggcctttccttccccctgccgcctccggaatttcttgaggttggcaaaaagcagcctgctctggatgttctttatgatgttatgaaaagtaaaaaacatagaacatggcaaaagatacacgaaccaattatgttgaaatacttggaactttgcgtggatcttcgcaagagccacttggcaaaggaggggttataccagtataagaacatttgtcaacaggtgaacataaaatctctggaggatgttgttagggcatatttgaaaatggcagaggaaaaaactgaagctgctaaagaagaatctcagcagatggtcttagatatagaggatctagataatattcaaactcctgagagtgttctcctaagtgctgtaagtggtgaagacactcaggatcgtactgacagattacttttaactccatgggttaaattcctgtgggagtcttacaggcagtgtttggaccttcttagaaacaattctagagtagagcgcctgtaccatgatattgcccagcaagctttcaaattctgcctccaatacacgcgtaaggctgaattccgtaaactgtgtgacaatttgagaatgcacttatcgcagattcagcgccaccataaccaaagtacggcaatcaatcttaataatccagagagccagtccatgcatttggaaaccagacttgttcagctggacagtgctatcagcatggaattgtggcaggaagcattcaaagctgtggaagatattcacgggctattctccttgtctaaaaaaccacctaaacctcagttgatggcaaattactataacaaagtctcaactgtgttttggaaatctggaaatgctctttttcatgcatctacactccatcgtctttaccatctctctagagaaatgagaaagaatctcacacaagatgagatgcaaagaatgtctactagagtccttttagccactctttccatccctattactcctgagcgtacggatattgctcgacttctggatatggatggcattatagttgaaaaacagcgtcgccttgcaacactactaggtcttcaagccccaccgacacgaattggccttattaatgatatggtcagatttaatgtactacaatatgttgtcccagaagtgaaagacctttacaattggcttgaagtagaatttaacccattaaaactctgtgagcgagtcacaaaggttctaaattgggttagggaacaacctgaaaaggaaccggaattgcagcagtatgtgccacaactgcaaaacaacaccatcctccgccttctgcagcaggtgtcacagatttatcagagcattgagttttctcgtttgacttctttggttccttttgttgatgctttccaactggaacgggccatagtagatgcagccaggcattgcgacttgcaggttcgtattgatcacacttctcggaccctgagttttggatctgatttgaattatgctactcgagaagatgctccgattggtcctcatttgcaaagcatgccttcagagcagataagaaaccagctgacagccatgtcctcagtacttgcaaaagcacttgaagtcattaaaccagctcatatactgcaagagaaagaagaacagcatcagttggctgtcactgcataccttaaaaattcacgaaaagagcaccagcggatcctggctcgccgccagacaattgaggagagaaaagagcgccttgagagtctgaatattcagcgtgagaaagaagaattggaacagagggaagctgaactccagaaagtgcggaaggctgaggaagagaggctgcgccaggaagcaaaggagagagagaaggagcgtatcttacaggaacatgaacaaatcaaaaagaaaactgtccgagagcgtttggagcagatcaagaaaacagaactgggtgccaaagcattcaaagatattgatattgaagaccttgaggaattggatccagattttatcatggctaaacaggttgaacaactggagaaagaaaagaaagaacttcaagaacgcctaaagaatcaagaaaagaagattgactattttgaaagagccaaacgtttggaagaaattcctttgataaagagcgcttacgaggaacagagaattaaagacatggatctgtgggagcaacaagaggaagaaagaattactacaatgcagctagaacgtgaaaaggctcttgaacataagaatcgaatgtcacgaatgcttgaagacagagatttattcgtaatgcgactcaaagctgcacggcagtctgtttatgaggaaaaacttaaacagtttgaagagcgattagcagaagaaaggcataatcgattggaagaacggaaaaggcagcgtaaagaagaacgcaggataacatactatagagaaaaagaagaggaggagcagagaagggcagaagaacaaatgctaaaagagcgggaagagagagagcgcgccgaacgagcaaaacgcgaggaagagctacgagagtatcaggagcgggtgaagaaattagaagaagtggaaaggaaaaaacgccaaagggagttggaaattgaagaacgagaacggcgtagagaggaagagagaagacttggcgatagttccctttctagaaaggactctcgttggggagatagagattcagaaggcacctggagaaaaggacctgaagcagattctgagtggagaagaggcccgccagagaaggagtggagacgtggagaagggcgagatgaggacaggtctcatagaagagatgaagagcggccccggcgtctgggggatgatgaagatagagagccctctcttagaccagacgatgatcgggttccccggcgtggcatggatgatgacagaggccctagacgtggtcctgaggaagataggttctctcgtcgtggggcagacgatgaccggccttcctggcgtaacacagatgatgacaggcctcccagacgaattgccgatgaagacaggggaaactggcgtcatgcggatgatgacagaccacctagacgaggactggatgaggacagaggaagctggcgaacagctgatgaggacagaggaccaagacgtgggatggatgatgaccgggggccgaggcgaggaggcgctgatgatgagcgatcatcctggcgtaatgctgatgatgaccggggtcccaggcgagggttggatgatgatcggggtcccaggcgaggcatggatgatgaccggggtcccaggcgaggcatggatgatgaccggggtcccaggcgaggcatggatgatgaccggggtcccaggcgagggttggatgatgatcgaggaccttggaggaacgccgatgatgacagaattcccaggcgtggtgcagaggatgacaggggcccttggagaaacatggatgatgatcgcctttcaagacgtgctgatgatgatcggtttcccagacggggtgatgactcaagacctggtccttggagaccattagtcaagccaggtggatggagagagaaagaaaaagccagagaggagagctggggtccacctcgagaatcaaggccatcagaagaacgtgaatgggacagagaaaaagaaagggacagagataatcaagatcgggaggagaatgacaaggaccctgagagagaaagggacagagagagagatgtggatcgagaggatcgcttcagaagacctagggatgaaggtggctggagaagaggaccagctgaggaatcttcaagctggagagactcaagtcgccgggacgatagggatagggatgaccgtcgccgtgagagggatgaccggcgtgatctaagagaaagacgagatctaagagacgacagggaccgaagaggacctccactcagatcagaacgtgaagaagtaagttcttggagacgtgctgatgacaggaaagatgaccgggtggaagagcgggaccctcctcgtcgagttcctcccccagctctttcaagagaccgagaaagagaccgagaccgagaaagagaaggtgaaaaagagaaggcctcatggagagctgagaaagatagggaatctctccgtcgtactaaaaatgagactgatgaagatggatggaccacagtacgacgttaagtctcaagataatggatttaaactggtgtcttaaataggtttgatcacattcaaggattattatacttgtgcttcaaccaatctaaattggattctttaatgttgtttcaccataacacaaaaagcatgaacttgtattaatcctatataatagattgatcatgcaccatatccacaggaggttggaaaaaccatgccattttctggaatttaagggtgttgcattatttcatcaatcatttgttg

SEQ ID NO: 10044 - DNA, 3000 bp, Homo sapiens
  source 1..3000: mol_type = unassigned DNA
tagccgtcgcggcgcgcggtgcggcctgggagagtcggaagcgcggcggccgcggagccctgcgagtaggcagcgttgggcccatgcaggacgcggagaacgtggcggtgcccgaggcggccgaggagcgcgccgagcccggccagcagcagccggccgccgagccgccgccagccgaggggctgctgcggcccgcggggcccggcgctccggaggccgcggggaccgaggcctccagtgaggaggtggggatcgcggaggccgggccggagtccgaggtgaggaccgagccggcggccgaggcagaggcggcctccggcccgtccgagtcgccctcgccgccggccgccgaggagctgcccgggtcgcatgctgagccccctgtcccggcacagggcgaggccccaggagagcaggctcgggacgagcgctccgacagccgggcccaggcggtgtccgaggacgcgggaggaaacgagggcagagcggccgaggccgaaccccgggcgctggagaacggcgacgcggacgagccctccttcagcgaccccgaggacttcgtggacgacgtgagcgaggaagaattactgggagatgtactcaaagatcggccccaggaagcagatggaatcgattcggtgattgtagtggacaatgtccctcaggtgggacccgaccgacttgagaaactcaaaaatgtcatccacaagatcttttccaagtttgggaaaatcacaaatgatttttatcctgaagaggatgggaagacaaaagggtatattttcctggagtacgcgtcccctgcccacgctgtggatgctgtgaagaacgccgacggctacaagcttgacaagcagcacacattccgggtcaacctctttacggattttgacaagtatatgacgatcagtgacgagtgggatattccagagaaacagcctttcaaagacctggggaacttacgttactggcttgaagaggcagaatgcagagatcagtacagtgtgatttttgagagtggagaccgcacttccatattctggaatgacgtaaaagaccctgtctcaattgaagaaagagcgagatggacagagacgtatgtgcgttggtctcctaagggcacctacctggctacctttcatcaaagaggcattgctctatgggggggagagaaattcaagcaaattcagagattcagccaccaaggggttcagcttattgacttctcaccttgtgaaaggtacctggtgacctttagccccctgatggacacgcaggatgaccctcaggccataatcatctgggacatccttacggggcacaagaagaggggttttcactgtgagagctcagcccattggcctatttttaagtggagccatgatggcaaattctttgccagaatgaccctggatacgcttagcatctatgaaactccttctatgggtcttttggacaagaagagtttgaagatctctgggataaaagacttttcttggtctcctggtggtaacataatcgccttctgggtgcctgaagacaaagatattccagccagggtaaccctgatgcagctccctaccaggcaagagatccgagtgaggaacctgttcaatgtggtggactgcaagctccattggcagaagaacggagactacttgtgtgtgaaagtagataggactccgaaaggcacccagggtgttgtcacaaattttgaaattttccgaatgagggagaaacaggtacctgtggatgtggtcgagatgaaagaaaccatcatagcctttgcctgggaaccaaatggaagtaagtttgctgtgctgcacggagaggctccgcggatatctgtgtctttctaccacgtcaaaaacaacgggaagattgaactcatcaagatgttcgacaagcagcaggcgaacaccatcttctggagcccccaaggacagttcgtggtgttggcgggcctgaggagtatgaacggtgccttagcgtttgtggacacttcggactgcacggtcatgaacatcgcagagcactacatggcttccgacgtcgaatgggatcctactgggcgctacgtcgtcacctctgtgtcctggtggagccataaggtggacaacgcgtactggctgtggactttccagggacgcctcctgcagaagaacaacaaggaccgcttctgccagctgctgtggcggccccggcctcccacactcctgagccaggaacagatcaagcaaattaaaaaggatctgaagaaatactctaagatctttgaacagaaggatcgtttgagtcagtccaaagcctcaaaggaattggtggagagaaggcgcaccatgatggaagatttccggaagtaccggaaaatggcccaggagctctatatggagcagaaaaacgagcgcctggagttgcgaggaggggtggacactgacgagctggacagcaacgtggacgactgggaagaggagaccattgagttcttcgtcactgaagaaatcattcccggaatcaggagtgacctggagcactgtgcgcagccgtgtgtgctgtggagccgaggccgtcctgcaggaagccgcgtgactcccgcctcctccctgtgctctctggctctggactgtgactgcgcctggattctgccattgcgacacatttttgtgcctttcagcccctggtgtctgcagtgggggatttaaggcacccgcttccacttctttcttgtttggagttttctgttggaaccgccggcgttggctccgaagacttagcgacgccactggcggcaccttctcctgcgcccagtgatgtttccacggtgcctgtacacagccgagcagcatttccgttgaaggacttgcatccccattgcgggcagtgctggacgtgtcccggagacccaccgggagggcgccgccatgccttgtacccccaccgtgcaggttgtggccggttttctccgcaggttgaacatggaaataaaagcaaacttgtatg

SEQ ID NO: 10045 - DNA, 3055 bp, Homo sapiens
  source 1..3055: mol_type = unassigned DNA
gggagagtcggaagcgcggcggccgcggagccctgcgagtaggcagcgttgggcccatgcaggacgcggagaacgtggcggtgcccgaggcggccgaggagcgcgccgagcccggccagcagcagccggccgccgagccgccgccagccgaggggctgctgcggcccgcggggcccggcgctccggaggccgcggggaccgaggcctccagtgaggaggtggggatcgcggaggccgggccggagtccgaggtgaggaccgagccggcggccgaggcagaggcggcctccggcccgtccgagtcgccctcgccgccggccgccgaggagctgcccgggtcgcatgctgagccccctgtcccggcacagggcgaggccccaggagagcaggctcgggacgagcgctccgacagccgggcccaggcggtgtccgaggacgcgggaggaaacgagggcagagcggccgaggccgaaccccgggcgctggagaacggcgacgcggacgagccctccttcagcgaccccgaggacttcgtggacgacgtgagcgaggaagaattactgggagatgtactcaaagatcggccccaggaagcagatggaatcgattcggtgattgtagtggacaatgtccctcaggtgggacccgaccgacttgagaaactcaaaaatgtcatccacaagatcttttccaagtttgggaaaatcacaaatgatttttatcctgaagaggatgggaagacaaaagggtatattttcctggagtacgcgtcccctgcccacgctgtggatgctgtgaagaacgccgacggctacaagcttgacaagcagcacacattccgggtcaacctctttacggattttgacaagtatatgacgatcagtgacgagtgggatattccagagaaacagcctttcaaagacctggggaacttacgttactggcttgaagaggcagaatgcagagatcagtacagtgtgatttttgagagtggagaccgcacttccatattctggaatgacgtaaaagaccctgtctcaattgaagaaagagcgagatggacagagacgtatgtgcgttggtctcctaagggcacctacctggctacctttcatcaaagaggcattgctctatgggggggagagaaattcaagcaaattcagagattcagccaccaaggggttcagcttattgacttctcaccttgtgaaaggtacctggtgacctttagccccctgatggacacgcaggatgaccctcaggccataatcatctgggacatccttacggggcacaagaagaggggttttcactgtgagagctcagcccattggcctatttttaagtggagccatgatggcaaattctttgccagaatgaccctggatacgcttagcatctatgaaactccttctatgggtcttttggacaagaagagtttgaagatctctgggataaaagacttttcttggtctcctggtggtaacataatcgccttctgggtgcctgaagacaaagatattccagccagggtaaccctgatgcagctccctaccaggcaagagatccgagtgaggaacctgttcaatgtggtggactgcaagctccattggcagaagaacggagactacttgtgtgtgaaagtagataggactccgaaaggcacccagggtgttgtcacaaattttgaaattttccgaatgagggagaaacaggtacctgtggatgtggtcgagatgaaagaaaccatcatagcctttgcctgggaaccaaatggaagtaagtttgctgtgctgcacggagaggctccgcggatatctgtgtctttctaccacgtcaaaaacaacgggaagattgaactcatcaagatgttcgacaagcagcaggcgaacaccatcttctggagcccccaaggacagttcgtggtgttggcgggcctgaggagtatgaacggtgccttagcgtttgtggacacttcggactgcacggtcatgaacatcgcagagcactacatggcttccgacgtcgaatgggatcctactgggcgctacgtcgtcacctctgtgtcctggtggagccataaggtggacaacgcgtactggctgtggactttccagggacgcctcctgcagaagaacaacaaggaccgcttctgccagctgctgtggcggccccggcctcccacactcctgagccaggaacagatcaagcaaattaaaaaggatctgaagaaatactctaagatctttgaacagaaggatcgtttgagtcagtccaaagcctcaaaggaattggtggagagaaggcgcaccatgatggaagatttccggaagtaccggaaaatggcccaggagctctatatggagcagaaaaacgagcgcctggagttgcgaggaggggtggacactgacgagctggacagcaacgtggacgactgggaagaggagaccattgagttcttcgtcactgaagaaatcattcccctcgggaatcaggagtgacctggagcactgtggggacggactccgcctgctgttcccgcgctgagctacaggactcccgagtgtgagccgcggttcctctgttgcagcgcagccgtgtgtgctgtggagccgaggccgtcctgcaggaagccgcgtgactcccgcctcctccctgtgctctctggctctggactgtgactgcgcctggattctgccattgcgacacatttttgtgcctttcagcccctggtgtctgcagtgggggatttaaggcacccgcttccacttctttcttgtttggagttttctgttggaaccgccggcgttggctccgaagacttagcgacgccactggcggcaccttctcctgcgcccagtgatgtttccacggtgcctgtacacagccgagcagcatttccgttgaaggacttgcatccccattgcgggcagtgctggacgtgtcccggagacccaccgggagggcgccgccatgccttgtacccccaccgtgcaggttgtggccggttttctccgcaggttgaacatggaaataaaagcaaacttgtatgaaa

SEQ ID NO: 10046 - DNA, 2966 bp, Homo sapiens
  source 1..2966: mol_type = unassigned DNA
cggcggccgcggagccctgcgagtaggcagcgttgggcccatgcaggacgcggagaacgtggcggtgcccgaggcggccgaggagcgcgccgagcccggccagcagcagccggccgccgagccgccgccagccgaggggctgctgcggcccgcggggcccggcgctccggaggccgcggggaccgaggcctccagtgaggaggtggggatcgcggaggccgggccggagtccgaggtgaggaccgagccggcggccgaggcagaggcggcctccggcccgtccgagtcgccctcgccgccggccgccgaggagctgcccgggtcgcatgctgagccccctgtcccggcacagggcgaggccccaggagagcaggctcgggacgagcgctccgacagccgggcccaggcggtgtccgaggacgcgggaggaaacgagggcagagcggccgaggccgaaccccgggcgctggagaacggcgacgcggacgagccctccttcagcgaccccgaggacttcgtggacgacgtgagcgaggaagaattactgggagatgtactcaaagatcggccccaggaagcagatggaatcgattcggtgattgtagtggacaatgtccctcaggtgggacccgaccgacttgagaaactcaaaaatgtcatccacaagatcttttccaagtttgggaaaatcacaaatgatttttatcctgaagaggatgggaagacaaaagggtatattttcctggagtacgcgtcccctgcccacgctgtggatgctgtgaagaacgccgacggctacaagcttgacaagcagcacacattccgggtcaacctctttacggattttgacaagtatatgacgatcagtgacgagtgggatattccagagaaacagcctttcaaagacctggggaacttacgttactggcttgaagaggcagaatgcagagatcagtacagtgtgatttttgagagtggagaccgcacttccatattctggaatgacgtaaaagaccctgtctcaattgaagaaagagcgagatggacagagacgtatgtgcgttggtctcctaagggcacctacctggctacctttcatcaaagaggcattgctctatgggggggagagaaattcaagcaaattcagagattcagccaccaaggggttcagcttattgacttctcaccttgtgaaaggtacctggtgacctttagccccctgatggacacgcaggatgaccctcaggccataatcatctgggacatccttacggggcacaagaagaggggttttcactgtgagagctcagcccattggcctatttttaagtggagccatgatggcaaattctttgccagaatgaccctggatacgcttagcatctatgaaactccttctatgggtcttttggacaagaagagtttgaagatctctgggataaaagacttttcttggtctcctggtggtaacataatcgccttctgggtgcctgaagacaaagatattccagccagggtaaccctgatgcagctccctaccaggcaagagatccgagtgaggaacctgttcaatgtggtggactgcaagctccattggcagaagaacggagactacttgtgtgtgaaagtagataggactccgaaaggcacccagggtgttgtcacaaattttgaaattttccgaatgagggagaaacaggtacctgtggatgtggtcgagatgaaagaaaccatcatagcctttgcctgggaaccaaatggaagtaagtttgctgtgctgcacggagaggctccgcggatatctgtgtctttctaccacgtcaaaaacaacgggaagattgaactcatcaagatgttcgacaagcagcaggcgaacaccatcttctggagcccccaaggacagttcgtggtgttggcgggcctgaggagtatgaacggtgccttagcgtttgtggacacttcggactgcacggtcatgaacatcgcagagcactacatggcttccgacgtcgaatgggatcctactgggcgctacgtcgtcacctctgtgtcctggtggagccataaggtggacaacgcgtactggctgtggactttccagggacgcctcctgcagaagaacaacaaggaccgcttctgccagctgctgtggcggccccggcctcccacactcctgagccaggaacagatcaagcaaattaaaaaggatctgaagaaatactctaagatctttgaacagaaggatcgtttgagtcagtccaaagcctcaaaggaattggtggagagaaggcgcaccatgatggaagatttccggaagtaccggaaaatggcccaggagctctatatggagcagaaaaacgagcgcctggagttgcgaggaggggtggacactgacgagctggacagcaacgtggacgactgggaagaggagaccattgagttcttcgtcactgaagaaatcattcccctcgggaatcaggagtgacctggagcactgtgcgcagccgtgtgtgctgtggagccgaggccgtcctgcaggaagccgcgtgactcccgcctcctccctgtgctctctggctctggactgtgactgcgcctggattctgccattgcgacacatttttgtgcctttcagcccctggtgtctgcagtgggggatttaaggcacccgcttccacttctttcttgtttggagttttctgttggaaccgccggcgttggctccgaagacttagcgacgccactggcggcaccttctcctgcgcccagtgatgtttccacggtgcctgtacacagccgagcagcatttccgttgaaggacttgcatccccattgcgggcagtgctggacgtgtcccggagacccaccgggagggcgccgccatgccttgtacccccaccgtgcaggttgtggccggttttctccgcaggttgaacatggaaataaaagcaaacttgtatgaaaaa

SEQ ID NO: 10047 - DNA, 2693 bp, Homo sapiens
  source 1..2693: mol_type = unassigned DNA
atgcaggacgcggagaacgtggcggtgcccgaggcggccgaggagcgcgccgggtcgcatgctgagccccctgtcccggcacagggcgaggccccaggagagcaggctcgggacgagcgctccgacagccgggcccaggcggtgtccgaggacgcgggaggaaacgagggcagagcggccgaggccgaaccccgggcgctggagaacggcgacgcggacgagccctccttcagcgaccccgaggacttcgtggacgacgtgagcgaggaagaattactgggagatgtactcaaagatcggccccaggaagcagatggaatcgattcggtgattgtagtggacaatgtccctcaggtgggacccgaccgacttgagaaactcaaaaatgtcatccacaagatcttttccaagtttgggaaaatcacaaatgatttttatcctgaagaggatgggaagacaaaagggtatattttcctggagtacgcgtcccctgcccacgctgtggatgctgtgaagaacgccgacggctacaagcttgacaagcagcacacattccgggtcaacctctttacggattttgacaagtatatgacgatcagtgacgagtgggatattccagagaaacagcctttcaaagacctggggaacttacgttactggcttgaagaggcagaatgcagagatcagtacagtgtgatttttgagagtggagaccgcacttccatattctggaatgacgtaaaagaccctgtctcaattgaagaaagagcgagatggacagagacgtatgtgcgttggtctcctaagggcacctacctggctacctttcatcaaagaggcattgctctatgggggggagagaaattcaagcaaattcagagattcagccaccaaggggttcagcttattgacttctcaccttgtgaaaggtacctggtgacctttagccccctgatggacacgcaggatgaccctcaggccataatcatctgggacatccttacggggcacaagaagaggggttttcactgtgagagctcagcccattggcctatttttaagtggagccatgatggcaaattctttgccagaatgaccctggatacgcttagcatctatgaaactccttctatgggtcttttggacaagaagagtttgaagatctctgggataaaagacttttcttggtctcctggtggtaacataatcgccttctgggtgcctgaagacaaagatattccagccagggtaaccctgatgcagctccctaccaggcaagagatccgagtgaggaacctgttcaatgtggtggactgcaagctccattggcagaagaacggagactacttgtgtgtgaaagtagataggactccgaaaggcacccagggtgttgtcacaaattttgaaattttccgaatgagggagaaacaggtacctgtggatgtggtcgagatgaaagaaaccatcatagcctttgcctgggaaccaaatggaagtaagtttgctgtgctgcacggagaggctccgcggatatctgtgtctttctaccacgtcaaaaacaacgggaagattgaactcatcaagatgttcgacaagcagcaggcgaacaccatcttctggagcccccaaggacagttcgtggtgttggcgggcctgaggagtatgaacggtgccttagcgtttgtggacacttcggactgcacggtcatgaacatcgcagagcactacatggcttccgacgtcgaatgggatcctactgggcgctacgtcgtcacctctgtgtcctggtggagccataaggtggacaacgcgtactggctgtggactttccagggacgcctcctgcagaagaacaacaaggaccgcttctgccagctgctgtggcggccccggcctcccacactcctgagccaggaacagatcaagcaaattaaaaaggatctgaagaaatactctaagatctttgaacagaaggatcgtttgagtcagtccaaagcctcaaaggaattggtggagagaaggcgcaccatgatggaagatttccggaagtaccggaaaatggcccaggagctctatatggagcagaaaaacgagcgcctggagttgcgaggaggggtggacactgacgagctggacagcaacgtggacgactgggaagaggagaccattgagttcttcgtcactgaagaaatcattcccctcgggaatcaggagtgacctggagcactgtgcgcagccgtgtgtgctgtggagccgaggccgtcctgcaggaagccgcgtgactcccgcctcctccctgtgctctctggctctggactgtgactgcgcctggattctgccattgcgacacatttttgtgcctttcagcccctggtgtctgcagtgggggatttaaggcacccgcttccacttctttcttgtttggagttttctgttggaaccgccggcgttggctccgaagacttagcgacgccactggcggcaccttctcctgcgcccagtgatgtttccacggtgcctgtacacagccgagcagcatttccgttgaaggacttgcatccccattgcgggcagtgctggacgtgtcccggagacccaccgggagggcgccgccatgccttgtacccccaccgtgcaggttgtggccggttttctccgcaggttgaacatggaaataaaagcaaacttgtatg

SEQ ID NO: 10048 - DNA, 3045 bp, Homo sapiens
  source 1..3045: mol_type = unassigned DNA
tctctctcggcgtttccgctgtcagggccctgcggtgtgactcgcgggctcagctggtccggccgtagcacctccgcgccgtcgccatgtcgcggtttttcaccaccggttcggacagcgagtccgagtcgtccttgtccggggaggagctcgtcaccaaacctgtcggaggcaactatggcaaacagccattgttgctgagcgaggatgaagaagataccaagagagttgtccgcagtgccaaggacaagaggtttgaggagctgaccaaccttatccggaccatccgtaatgccatgaagattcgtgatgtcaccaagtgcctggaagagtttgagctcctgggaaaagcatatgggaaggccaaaagcattgtggacaaagaaggtgtcccccggttctatatccgcatcctggctgacctagaggactatcttaatgagctttgggaagataaggaagggaagaagaagatgaacaagaacaatgccaaggctctgagcaccttgcgtcagaagatccgaaaatacaaccgtgatttcgagtcccatatcacaagctacaagcagaaccccgagcagtctgcggatgaagatgctgagaaaaatgaggaggattcagaaggctcttcagatgaggatgaggatgaggacggagtcagtgctgcaactttcttgaagaagaaatcagaagctccttctggggagagtcgcaagttcctcaaaaagatggatgatgaagatgaggactcagaagattccgaagatgatgaagactgggacacaggttccacatcttccgattccgactcagaggaggaagaagggaaacaaaccgcgctggcctcaagatttcttaaaaaggcacccaccacagatgaggacaagaaggcagccgagaagaaacgggaggacaaagctaagaagaagcacgacaggaaatccaagcgcctggatgaggaggaggaggacaatgaaggcggggagtgggaaagggtccggggcggagtgccgttggttaaggagaagccaaaaatgtttgccaagggaactgagatcacccatgctgttgttatcaagaaactgaatgagatcctacaggcacgaggcaagaagggaactgatcgtgctgcccagattgagctgctgcaactgctggttcagattgcagcggaaaacaacctgggagagggcgtcattgtcaagatcaagttcaatatcatcgcctctctctatgactacaaccccaacctggcaacctacatgaagccagagatgtgggggaagtgcctggactgcatcaatgagctgatggatatcctgtttgcaaatcccaacatttttgttggagagaatattctggaagagagtgagaacctgcacaacgctgaccagccactgcgtgtccgtggctgcatcctaactctggtggaacgaatggatgaagaatttaccaaaataatgcaaaatactgaccctcactcccaagagtacgtggagcacttgaaggatgaggcccaggtgtgtgccatcatcgagcgtgtgcagcgctacctggaggagaagggcactaccgaggaggtctgccgcatctacctgctgcgcatcctgcacacctactacaagtttgattacaaggcccatcagcgacagctgaccccgcctgagggctcctcaaagtctgagcaagaccaggcagaaaatgagggcgaggactcggctgtgttgatggagagactgtgcaagtacatctacgccaaggaccgcacagaccggatccgcacatgtgccatcctctgccacatctaccaccatgctctgcactcgcgctggtaccaggcccgcgacctcatgctcatgagccacttgcaggacaacattcagcatgcagacccgccagtgcagatcctttacaaccgcaccatggtgcagctgggcatctgtgccttccgccaaggcctgaccaaggacgcacacaacgccctgctggacatccagtcgagtggccgagccaaggagcttctgggccagggcctgctgctgcgcagcctgcaggagcgcaaccaggagcaggagaaggtggagcggcgccgtcaggtccccttccacctgcacatcaacctggagctgctggagtgtgtctacctggtgtctgccatgctcctggagatcccctacatggccgcccatgagagcgatgcccgccgacgcatgatcagcaagcagttccaccaccagctgcgcgtgggcgagcgacagcccctgctgggtccccctgagtccatgcgggaacatgtggtcgctgcctccaaggccatgaagatgggtgactggaagacctgtcacagttttatcatcaatgagaagatgaatgggaaagtgtgggaccttttccccgaggctgacaaagtccgcaccatgctggttaggaagatccaggaagagtcactgaggacctacctcttcacctacagcagtgtctatgactccatcagcatggagacgctgtcagacatgtttgagctggatctgcccactgtgcactccatcatcagcaaaatgatcattaatgaggagctgatggcctccctggaccagccaacacagacagtggtgatgcaccgcactgagcccactgcccagcagaacctggctctgcagctggccgagaagctgggcagcctggtggagaacaacgaacgggtgtttgaccacaagcagggcacctacgggggctacttccgagaccagaaggacggctaccgcaaaaacgagggctacatgcgccgcggtggctaccgccagcagcagtctcagacggcctactgagctctccactctgtttcccgcctgggccatccaaccttgaagtcctaaaccacacctcagtcactaaaggtctgtttaaagttgttctggttgattgcttgttgccacaaaggtgtgttgagcccattcatttgctgattatatttctgagctgctaccacatgacagacacaaggctcagatgaagaggtgaattgaacacgttcctgacctcaaa

SEQ ID NO: 10049 - DNA, 2393 bp, Homo sapiens
  source 1..2393: mol_type = unassigned DNA
tctctcggcgtttccgctgtcagggccctgcggtgtgactcgcgggctcagctggtccggccgtagcacctccgcgccgtcgccatgtcgcggtttttcaccaccggttcggacagcgagtccgagtcgtccttgtccggggaggagctcgtcaccaaacctgtcggaggcaactatggcaaacagccattgttgctgagcgaggatgaagaagataccaagagagttgtccgcagtgccaaggacaagaggtttgaggagctgaccaaccttatccggaccatccgtaatgccatgaagattcgtgatgtcaccaagtgcctggaagagtttgagctcctgggaaaagcatatgggaaggccaaaagcattgtggacaaagaaggtgtcccccggttctatatccgcatcctggctgacctagaggactatcttaatgagctttgggaagataaggaagggaagaagaagcacgacaggaaatccaagcgcctggatgaggaggaggaggacaatgaaggcggggagtgggaaagggtccggggcggagtgccgttggttaaggagaagccaaaaatgtttgccaagggaactgagatcacccatgctgttgttatcaagaaactgaatgagatcctacaggcacgaggcaagaagggaactgatcgtgctgcccagattgagctgctgcaactgctggttcagattgcagcggaaaacaacctgggagagggcgtcattgtcaagatcaagttcaatatcatcgcctctctctatgactacaaccccaacctggcaacctacatgaagccagagatgtgggggaagtgcctggactgcatcaatgagctgatggatatcctgtttgcaaatcccaacatttttgttggagagaatattctggaagagagtgagaacctgcacaacgctgaccagccactgcgtgtccgtggctgcatcctaactctggtggaacgaatggatgaagaatttaccaaaataatgcaaaatactgaccctcactcccaagagtacgtggagcacttgaaggatgaggcccaggtgtgtgccatcatcgagcgtgtgcagcgctacctggaggagaagggcactaccgaggaggtctgccgcatctacctgctgcgcatcctgcacacctactacaagtttgattacaaggcccatcagcgacagctgaccccgcctgagggctcctcaaagtctgagcaagaccaggcagaaaatgagggcgaggactcggctgtgttgatggagagactgtgcaagtacatctacgccaaggaccgcacagaccggatccgcacatgtgccatcctctgccacatctaccaccatgctctgcactcgcgctggtaccaggcccgcgacctcatgctcatgagccacttgcaggacaacattcagcatgcagacccgccagtgcagatcctttacaaccgcaccatggtgcagctgggcatctgtgccttccgccaaggcctgaccaaggacgcacacaacgccctgctggacatccagtcgagtggccgagccaaggagcttctgggccagggcctgctgctgcgcagcctgcaggagcgcaaccaggagcaggagaaggtggagcggcgccgtcaggtccccttccacctgcacatcaacctggagctgctggagtgtgtctacctggtgtctgccatgctcctggagatcccctacatggccgcccatgagagcgatgcccgccgacgcatgatcagcaagcagttccaccaccagctgcgcgtgggcgagcgacagcccctgctgggtccccctgagtccatgcgggaacatgtggtcgctgcctccaaggccatgaagatgggtgactggaagacctgtcacagttttatcatcaatgagaagatgaatgggaaagtgtgggaccttttccccgaggctgacaaagtccgcaccatgctggttaggaagatccaggaagagtcactgaggacctacctcttcacctacagcagtgtctatgactccatcagcatggagacgctgtcagacatgtttgagctggatctgcccactgtgcactccatcatcagcaaaatgatcattaatgaggagctgatggcctccctggaccagccaacacagacagtggtgatgcaccgcactgagcccactgcccagcagaacctggctctgcagctggccgagaagctgggcagcctggtggagaacaacgaacgggtgtttgaccacaagcagggcacctacgggggctacttccgagaccagaaggacggctaccgcaaaaacgagggctacatgcgccgcggtggctaccgccagcagcagtctcagacggcctactgagctctccactctgtttcccgcct

SEQ ID NO: 10050 - DNA, 3093 bp, Homo sapiens
  source 1..3093: mol_type = unassigned DNA
cttctctctcggcgtttccgctgtcagggccctgcggtgtgactcgcgggctcagctggttggtattttttgggcctcgtgcttcgtggtgggagacccaggtcgaggtccggccgtagcacctccgcgccgtcgccatgtcgcggtttttcaccaccggttcggacagcgagtccgagtcgtccttgtccggggaggagctcgtcaccaaacctgtcggaggcaactatggcaaacagccattgttgctgagcgaggatgaagaagataccaagagagttgtccgcagtgccaaggacaagaggtttgaggagctgaccaaccttatccggaccatccgtaatgccatgaagattcgtgatgtcaccaagtgcctggaagagtttgagctcctgggaaaagcatatgggaaggccaaaagcattgtggacaaagaaggtgtcccccggttctatatccgcatcctggctgacctagaggactatcttaatgagctttgggaagataaggaagggaagaagaagatgaacaagaacaatgccaaggctctgagcaccttgcgtcagaagatccgaaaatacaaccgtgatttcgagtcccatatcacaagctacaagcagaaccccgagcagtctgcggatgaagatgctgagaaaaatgaggaggattcagaaggctcttcagatgaggatgaggatgaggacggagtcagtgctgcaactttcttgaagaagaaatcagaagctccttctggggagagtcgcaagttcctcaaaaagatggatgatgaagatgaggactcagaagattccgaagatgatgaagactgggacacaggttccacatcttccgattccgactcagaggaggaagaagggaaacaaaccgcgctggcctcaagatttcttaaaaaggcacccaccacagatgaggacaagaaggcagccgagaagaaacgggaggacaaagctaagaagaagcacgacaggaaatccaagcgcctggatgaggaggaggaggacaatgaaggcggggagtgggaaagggtccggggcggagtgccgttggttaaggagaagccaaaaatgtttgccaagggaactgagatcacccatgctgttgttatcaagaaactgaatgagatcctacaggcacgaggcaagaagggaactgatcgtgctgcccagattgagctgctgcaactgctggttcagattgcagcggaaaacaacctgggagagggcgtcattgtcaagatcaagttcaatatcatcgcctctctctatgactacaaccccaacctggcaacctacatgaagccagagatgtgggggaagtgcctggactgcatcaatgagctgatggatatcctgtttgcaaatcccaacatttttgttggagagaatattctggaagagagtgagaacctgcacaacgctgaccagccactgcgtgtccgtggctgcatcctaactctggtggaacgaatggatgaagaatttaccaaaataatgcaaaatactgaccctcactcccaagagtacgtggagcacttgaaggatgaggcccaggtgtgtgccatcatcgagcgtgtgcagcgctacctggaggagaagggcactaccgaggaggtctgccgcatctacctgctgcgcatcctgcacacctactacaagtttgattacaaggcccatcagcgacagctgaccccgcctgagggctcctcaaagtctgagcaagaccaggcagaaaatgagggcgaggactcggctgtgttgatggagagactgtgcaagtacatctacgccaaggaccgcacagaccggatccgcacatgtgccatcctctgccacatctaccaccatgctctgcactcgcgctggtaccaggcccgcgacctcatgctcatgagccacttgcaggacaacattcagcatgcagacccgccagtgcagatcctttacaaccgcaccatggtgcagctgggcatctgtgccttccgccaaggcctgaccaaggacgcacacaacgccctgctggacatccagtcgagtggccgagccaaggagcttctgggccagggcctgctgctgcgcagcctgcaggagcgcaaccaggagcaggagaaggtggagcggcgccgtcaggtccccttccacctgcacatcaacctggagctgctggagtgtgtctacctggtgtctgccatgctcctggagatcccctacatggccgcccatgagagcgatgcccgccgacgcatgatcagcaagcagttccaccaccagctgcgcgtgggcgagcgacagcccctgctgggtccccctgagtccatgcgggaacatgtggtcgctgcctccaaggccatgaagatgggtgactggaagacctgtcacagttttatcatcaatgagaagatgaatgggaaagtgtgggaccttttccccgaggctgacaaagtccgcaccatgctggttaggaagatccaggaagagtcactgaggacctacctcttcacctacagcagtgtctatgactccatcagcatggagacgctgtcagacatgtttgagctggatctgcccactgtgcactccatcatcagcaaaatgatcattaatgaggagctgatggcctccctggaccagccaacacagacagtggtgatgcaccgcactgagcccactgcccagcagaacctggctctgcagctggccgagaagctgggcagcctggtggagaacaacgaacgggtgtttgaccacaagcagggcacctacgggggctacttccgagaccagaaggacggctaccgcaaaaacgagggctacatgcgccgcggtggctaccgccagcagcagtctcagacggcctactgagctctccactctgtttcccgcctgggccatccaaccttgaagtcctaaaccacacctcagtcactaaaggtctgtttaaagttgttctggttgattgcttgttgccacaaaggtgtgttgagcccattcatttgctgattatatttctgagctgctaccacatgacagacacaaggctcagatgaagaggtgaattgaacacgttcctgacctc

SEQ ID NO: 10051 - DNA, 2366 bp, Homo sapiens
  source 1..2366: mol_type = unassigned DNA
gtttccgctgtcagggccctgcggtgtgactcgcgggctcagctggtccggccgtagcacctccgcgccgtcgccatgtcgcggtttttcaccaccggttcggacagcgagtccgagtcgtccttgtccggggaggagctcgtcaccaaacctgtcggaggcaactatggcaaacagccattgttgctgagcgaggatgaagaagataccaagagagttgtccgcagtgccaaggacaagaggtttgaggagctgaccaaccttatccggaccatccgtaatgccatgaagattcgtgatgtcaccaagtgcctggaagagtttgagctcctgggaaaagcatatgggaaggccaaaagcattgtggacaaagctaagaagaagcacgacaggaaatccaagcgcctggatgaggaggaggaggacaatgaaggcggggagtgggaaagggtccggggcggagtgccgttggttaaggagaagccaaaaatgtttgccaagggaactgagatcacccatgctgttgttatcaagaaactgaatgagatcctacaggcacgaggcaagaagggaactgatcgtgctgcccagattgagctgctgcaactgctggttcagattgcagcggaaaacaacctgggagagggcgtcattgtcaagatcaagttcaatatcatcgcctctctctatgactacaaccccaacctggcaacctacatgaagccagagatgtgggggaagtgcctggactgcatcaatgagctgatggatatcctgtttgcaaatcccaacatttttgttggagagaatattctggaagagagtgagaacctgcacaacgctgaccagccactgcgtgtccgtggctgcatcctaactctggtggaacgaatggatgaagaatttaccaaaataatgcaaaatactgaccctcactcccaagagtacgtggagcacttgaaggatgaggcccaggtgtgtgccatcatcgagcgtgtgcagcgctacctggaggagaagggcactaccgaggaggtctgccgcatctacctgctgcgcatcctgcacacctactacaagtttgattacaaggcccatcagcgacagctgaccccgcctgagggctcctcaaagtctgagcaagaccaggcagaaaatgagggcgaggactcggctgtgttgatggagagactgtgcaagtacatctacgccaaggaccgcacagaccggatccgcacatgtgccatcctctgccacatctaccaccatgctctgcactcgcgctggtaccaggcccgcgacctcatgctcatgagccacttgcaggacaacattcagcatgcagacccgccagtgcagatcctttacaaccgcaccatggtgcagctgggcatctgtgccttccgccaaggcctgaccaaggacgcacacaacgccctgctggacatccagtcgagtggccgagccaaggagcttctgggccagggcctgctgctgcgcagcctgcaggagcgcaaccaggagcaggagaaggtggagcggcgccgtcaggtccccttccacctgcacatcaacctggagctgctggagtgtgtctacctggtgtctgccatgctcctggagatcccctacatggccgcccatgagagcgatgcccgccgacgcatgatcagcaagcagttccaccaccagctgcgcgtgggcgagcgacagcccctgctgggtccccctgagtccatgcgggaacatgtggtcgctgcctccaaggccatgaagatgggtgactggaagacctgtcacagttttatcatcaatgagaagatgaatgggaaagtgtgggaccttttccccgaggctgacaaagtccgcaccatgctggttaggaagatccaggaagagtcactgaggacctacctcttcacctacagcagtgtctatgactccatcagcatggagacgctgtcagacatgtttgagctggatctgcccactgtgcactccatcatcagcaaaatgatcattaatgaggagctgatggcctccctggaccagccaacacagacagtggtgatgcaccgcactgagcccactgcccagcagaacctggctctgcagctggccgagaagctgggcagcctggtggagaacaacgaacgggtgtttgaccacaagcagggcacctacgggggctacttccgagaccagaaggacggctaccgcaaaaacgagggctacatgcgccgcggtggctaccgccagcagcagtctcagacggcctactgagctctccactctgtttcccgcctgggccatccaaccttgaagtcctaaaccacacctcagtcactaaaggtctgtttaaagtt

SEQ ID NO: 10052 - DNA, 2865 bp, Homo sapiens
  source 1..2865: mol_type = unassigned DNA
ctctctcggcgtttccgctgtcagggccctgcggtgtgactcgcgggctcagctggtccggccgtagcacctccgcgccgtcgccatgtcgcggtttttcaccaccggttcggacagcgagtccgagtcgtccttgtccggggaggagctcgtcaccaaacctgtcggaggcaactatggcaaacagccattgttgctgagcgaggatgaagaagataccaagagagttgtccgcagtgccaaggacaagaggtttgaggagctgaccaaccttatccggaccatccgtaatgccatgaagattcgtgatgtcaccaagtgcctggaagagtttgagctcctgggaaaagcatatgggaaggccaaaagcattgtggacaaagaaggtgtcccccggttctatatccgcatcctggctgacctagaggactatcttaatgagctttgggaagataaggaagggaagaagaagatccgaaaatacaaccgtgatttcgagtcccatatcacaagctacaagcagaaccccgagcagtctgcggatgaagatgctgagaaaaatgaggaggattcagaaggctcttcagatgaggatgaggatgaggacggagtcagtgctgcaactttcttgaagaagaaatcagaagctccttctggggagagtcgcaagttcctcaaaaagatggatgatgaagatgaggactcagaagattccgaagatgatgaagactgggacacaggttccacatcttccgattccgactcagaggaggaagaagggaaacaaaccgcgctggcctcaagatttcttaaaaaggcacccaccacagatgaggacaagaaggcagccgagaagaaacgggaggacaaagctaagaagaagcacgacaggaaatccaagcgcctggatgaggaggaggaggacaatgaaggcggggagtgggaaagggtccggggcggagtgccgttggttaaggagaagccaaaaatgtttgccaagggaactgagatcacccatgctgttgttatcaagaaactgaatgagatcctacaggcacgaggcaagaagggaactgatcgtgctgcccagattgagctgctgcaactgctggttcagattgcagcggaaaacaacctgggagagggcgtcattgtcaagatcaagttcaatatcatcgcctctctctatgactacaaccccaacctggcaacctacatgaagccagagatgtgggggaagtgcctggactgcatcaatgagctgatggatatcctgtttgcaaatcccaacatttttgttggagagaatattctggaagagagtgagaacctgcacaacgctgaccagccactgcgtgtccgtggctgcatcctaactctggtggaacgaatggatgaagaatttaccaaaataatgcaaaatactgaccctcactcccaagagtacgtggagcacttgaaggatgaggcccaggtgtgtgccatcatcgagcgtgtgcagcgctacctggaggagaagggcactaccgaggaggtctgccgcatctacctgctgcgcatcctgcacacctactacaagtttgattacaaggcccatcagcgacagctgaccccgcctgagggctcctcaaagtctgagcaagaccaggcagaaaatgagggcgaggactcggctgtgttgatggagagactgtgcaagtacatctacgccaaggaccgcacagaccggatccgcacatgtgccatcctctgccacatctaccaccatgctctgcactcgcgctggtaccaggcccgcgacctcatgctcatgagccacttgcaggacaacattcagcatgcagacccgccagtgcagatcctttacaaccgcaccatggtgcagctgggcatctgtgccttccgccaaggcctgaccaaggacgcacacaacgccctgctggacatccagtcgagtggccgagccaaggagcttctgggccagggcctgctgctgcgcagcctgcaggagcgcaaccaggagcaggagaaggtggagcggcgccgtcaggtccccttccacctgcacatcaacctggagctgctggagtgtgtctacctggtgtctgccatgctcctggagatcccctacatggccgcccatgagagcgatgcccgccgacgcatgatcagcaagcagttccaccaccagctgcgcgtgggcgagcgacagcccctgctgggtccccctgagtccatgcgggaacatgtggtcgctgcctccaaggccatgaagatgggtgactggaagacctgtcacagttttatcatcaatgagaagatgaatgggaaagtgtgggaccttttccccgaggctgacaaagtccgcaccatgctggttaggaagatccaggaagagtcactgaggacctacctcttcacctacagcagtgtctatgactccatcagcatggagacgctgtcagacatgtttgagctggatctgcccactgtgcactccatcatcagcaaaatgatcattaatgaggagctgatggcctccctggaccagccaacacagacagtggtgatgcaccgcactgagcccactgcccagcagaacctggctctgcagctggccgagaagctgggcagcctggtggagaacaacgaacgggtgtttgaccacaagcagggcacctacgggggctacttccgagaccagaaggacggctaccgcaaaaacgagggctacatgcgccgcggtggctaccgccagcagcagtctcagacggcctactgagctctccactctgtttcccgcctgggccatccaaccttgaagtcctaaaccacacctcagtcactaaaggtctgtttaaagtt

SEQ ID NO: 10053 - DNA, 2155 bp, Homo sapiens
  source 1..2155: mol_type = unassigned DNA
gagcttcgattgcgcggccgccaagtttcagtgatgaacgccctctttgggcgtccccggataccgcctgacgtagtgccaatcacacctctcgcgtctcggcgcctcggaggctaatgaggacgcctggcgaaacgcagtaacggatttccgggtggaccttcgctttacggctcgtgagttcttccgcccaacccagaggaagcgggagagcagtttacgacagcgccggtcgtgtttacggcggcgcccgctgcgcgcgcatgtttcctcttttcctggtttctcaagagtgctgctgctaacgcggtccccggcacgcaccatctgttgccatcccggccggccgaggccattgcagattttggaagatggcaaagttcatgacacccgtgatccaggacaacccctcaggctggggtccctgtgcggttcccgagcagtttcgggatatgccctaccagccgttcagcaaaggagatcggctaggaaaggttgcagactggacaggagccacataccaagataagaggtacacaaataagtactcctctcagtttggtggtggaagtcaatatgcttatttccatgaggaggatgaaagtagcttccagctggtggatacagcgcgcacacagaagacggcctaccagcggaatcgaatgagatttgcccagaggaacctccgcagagacaaagatcgtcggaacatgttgcagttcaacctgcagatcctgcctaagagtgccaaacagaaagagagagaacgcattcgactgcagaaaaagttccagaaacaatttggggttaggcagaaatgggatcagaaatcacagaaaccccgagactcttcagttgaagttcgtagtgattgggaagtgaaagaggaaatggattttcctcagttgatgaagatgcgctacttggaagtatcagagccacaggacattgagtgttgtggggccctagaatactacgacaaagcctttgaccgcatcaccacgaggagtgagaagccactgcggagcatcaagcgcatcttccacactgtcaccaccacagacgaccctgtcatccgcaagctggcaaaaactcaggggaatgtgtttgccactgatgccatcctggccacgctgatgagctgtacccgctcagtgtattcctgggatattgtcgtccagagagttgggtccaaactcttctttgacaagagagacaactctgactttgacctcctgacagtgagtgagactgccaatgagccccctcaagatgaaggtaattccttcaattcaccccgcaacctggccatggaggcaacctacatcaaccacaatttctcccagcagtgcttgagaatggggaaggaaagatacaacttccccaacccaaacccgtttgtggaggacgacatggataagaatgaaatcgcctctgttgcgtaccgttaccgcaggtggaagcttggagatgatattgaccttattgtccgttgtgagcacgatggcgtcatgactggagccaacggggaagtgtccttcatcaacatcaagacactcaatgagtgggattccaggcactgtaatggcgttgactggcgtcagaagctggactctcagcgaggggctgtcattgccacggagctgaagaacaacagctacaagttggcccggtggacctgctgtgctttgctggctggatctgagtacctcaagcttggttatgtgtctcggtaccacgtgaaagactcctcacgccacgtcatcctaggcacccagcagttcaagcctaatgagtttgccagccagatcaacctgagcgtggagaatgcctggggcattttacgctgcgtcattgacatctgcatgaagctggaggagggcaaatacctcatcctcaaggaccccaacaagcaggtcatccgtgtctacagcctccctgatggcaccttcagctctgatgaagatgaggaggaagaggaggaggaagaagaggaagaagaagaggaagaaacttaaaccagtgatgtggagctggagtttgtccttccaccgagactacgagggcctttgatgcttagtggaatgtgtgtctaacttgctctctgacatttagcagatgaaataaaatatatatctgtttagtctttccctca

SEQ ID NO: 10054 - DNA, 1814 bp, Homo sapiens
  source 1..1814: mol_type = unassigned DNA
agtgctgctgctaacgcggtccccggcacgcaccatctgttgccatcccggccggccgaggccattgcagattttggaagatggcaaagttcatgacacccgtgatccaggacaacccctcaggctggggtccctgtgcggttcccgagcagtttcgggatatgccctaccagccgttcagcaaaggagatcggctaggaaaggttgcagactggacaggagccacataccaagataagaggtacacaaataagtactcctctcagtttggtggtggaagtcaatatgcttatttccatgaggaggatgaaagtagcttccagctggtggatacagcgcgcacacagaagacggcctaccagcggaatcgaatgagatttgcccagaggaacctccgcagagacaaagatcgtcggaacatgttgcagttcaacctgcagatcctgcctaagagtgccaaacagaaagagagagaacgcattcgactgcagaaatcacagaaaccccgagactcttcagttgaagttcgtagtgattgggaagtgaaagaggaaatggattttcctcagttgatgaagatgcgctacttggaagtatcagagccacaggacattgagtgttgtggggccctagaatactacgacaaagcctttgaccgcatcaccacgaggagtgagaagccactgcggagcatcaagcgcatcttccacactgtcaccaccacagacgaccctgtcatccgcaagctggcaaaaactcaggggaatgtgtttgccactgatgccatcctggccacgctgatgagctgtacccgctcagtgtattcctgggatattgtcgtccagagagttgggtccaaactcttctttgacaagagagacaactctgactttgacctcctgacagtgagtgagactgccaatgagccccctcaagatgaaggtaattccttcaattcaccccgcaacctggccatggaggcaacctacatcaaccacaatttctcccagcagtgcttgagaatggggaaggaaagatacaacttccccaacccaaacccgtttgtggaggacgacatggataagaatgaaatcgcctctgttgcgtaccgttaccgcaggtggaagcttggagatgatattgaccttattgtccgttgtgagcacgatggcgtcatgactggagccaacggggaagtgtccttcatcaacatcaagacactcaatgagtgggattccaggcactgtaatggcgttgactggcgtcagaagctggactctcagcgaggggctgtcattgccacggagctgaagaacaacagctacaagttggcccggtggacctgctgtgctttgctggctggatctgagtacctcaagcttggttatgtgtctcggtaccacgtgaaagactcctcacgccacgtcatcctaggcacccagcagttcaagcctaatgagtttgccagccagatcaacctgagcgtggagaatgcctggggcattttacgctgcgtcattgacatctgcatgaagctggaggagggcaaatacctcatcctcaaggaccccaacaagcaggtcatccgtgtctacagcctccctgatggcaccttcagctctgatgaagatgaggaggaagaggaggaggaagaagaggaagaagaagaggaagaaacttaaaccagtgatgtggagctggagtttgtccttccaccgagactacgagggcctttgatgcttagtggaatgtgtgtctaacttgctctctgacatttagcagatgaaataaaatatatatctgtttagtctttc

SEQ ID NO: 10055 - DNA, 581 bp, Homo sapiens
  source 1..581: mol_type = unassigned DNA
aggaatccactttcgggggccccgcgtcccgcacgctactgaacgcgggacacgaccttgtgggtgaggtccttggccctcggccctgctcagtgcccatgagctgggtgaatttgattgtcacttaactcacctgggttaagacggaggggtaacaacaaagtctttctgaagtggccgaaaactccctgactttttgaattttggaagatggcaaagttcatgacacccgtgatccaggacaacccctcaggctggggtccctgtgcggttcccgagcagtttcgggatatgccctaccagccgttcagcaaaggagatcggctaggaaaggttgcagactggacaggagccacataccaagataagaggtacacaaataagtactcctctcagtttggtggtggaagtcaatatgcttatttccatgaggaggatgaaagtagcttccagctggtggatacagcgcgcacacagaagacggcctaccagcggaatcgaatgagatttgcccagaggaacctccgcagagacaaagatcgtcggaacatgttgcagttcaacctgcagatcctgcctaa

SEQ ID NO: 10056 - DNA, 1851 bp, Homo sapiens
  source 1..1851: mol_type = unassigned DNA
cgggacacgaccttgtgggtgaggtccttggccctcggccctgctcagtgcccatgagctgggtgaatttgattgtcacttaactcacctgggttaagacggagggattttggaagatggcaaagttcatgacacccgtgatccaggacaacccctcaggctggggtccctgtgcggttcccgagcagtttcgggatatgccctaccagccgttcagcaaaggagatcggctaggaaaggttgcagactggacaggagccacataccaagataagaggtacacaaataagtactcctctcagtttggtggtggaagtcaatatgcttatttccatgaggaggatgaaagtagcttccagctggtggatacagcgcgcacacagaagacggcctaccagcggaatcgaatgagatttgcccagaggaacctccgcagagacaaagatcgtcggaacatgttgcagttcaacctgcagatcctgcctaagagtgccaaacagaaagagagagaacgcattcgactgcagaaaaagttccagaaacaatttggggttaggcagaaatgggatcagaaatcacagaaaccccgagactcttcagttgaagttcgtagtgattgggaagtgaaagaggaaatggattttcctcagttgatgaagatgcgctacttggaagtatcagagccacaggacattgagtgttgtggggccctagaatactacgacaaagcctttgaccgcatcaccacgaggagtgagaagccactgcggagcatcaagcgcatcttccacactgtcaccaccacagacgaccctgtcatccgcaagctggcaaaaactcaggggaatgtgtttgccactgatgccatcctggccacgctgatgagctgtacccgctcagtgtattcctgggatattgtcgtccagagagttgggtccaaactcttctttgacaagagagacaactctgactttgacctcctgacagtgagtgagactgccaatgagccccctcaagatgaaggtaattccttcaattcaccccgcaacctggccatggaggcaacctacatcaaccacaatttctcccagcagtgcttgagaatggggaaggaaagatacaacttccccaacccaaacccgtttgtggaggacgacatggataagaatgaaatcgcctctgttgcgtaccgttaccgcaggtggaagcttggagatgatattgaccttattgtccgttgtgagcacgatggcgtcatgactggagccaacggggaagtgtccttcatcaacatcaagacactcaatgagtgggattccaggcactgtaatggcgttgactggcgtcagaagctggactctcagcgaggggctgtcattgccacggagctgaagaacaacagctacaagttggcccggtggacctgctgtgctttgctggctggatctgagtacctcaagcttggttatgtgtctcggtaccacgtgaaagactcctcacgccacgtcatcctaggcacccagcagttcaagcctaatgagtttgccagccagatcaacctgagcgtggagaatgcctggggcattttacgctgcgtcattgacatctgcatgaagctggaggagggcaaatacctcatcctcaaggaccccaacaagcaggtcatccgtgtctacagcctccctgatggcaccttcagctctgatgaagatgaggaggaagaggaggaggaagaagaggaagaagaagaggaagaaacttaaaccagtgatgtggagctggagtttgtccttccaccgagactacgagggcctttgatgcttagtggaatgtgtgtctaacttgctctct

SEQ ID NO: 10057 - DNA, 710 bp, Homo sapiens
  source 1..710: mol_type = unassigned DNA
caggcagcgagctcagagccccatcaagggccccaggaacctggccagggctgcaactaagcagaggtgctgggtctgactgattggccttggccttgtcaacaaagttagctctgtcttgtgacacctttgtttttgcaggggaaggaaagatacaacttccccaacccaaacccgtttgtggaggacgacatggataagaatgaaatcgcctctgttgcgtaccgttaccgcaggtggaagcttggagatgatattgaccttattgtccgttgtgagcacgatggcgtcatgactggagccaacggggaagtgtccttcatcaacatcaagacactcaatgagtgggattccaggcactgtaatggcgttgactggcgtcagaagctggactctcagcgaggggctgtcattgccacggagctgaagaacaacagctacaagttggcccggtggacctgctgtgctttgctggctggatctgagtacctcaagcttggttatgtgtctcggtaccacgtgaaagactcctcacgccacgtcatcctaggcacccagcagttcaagcctaatgagtttgccagccagatcaacctgagcgtggagaatgcctggggcattttacgctgcgtcattgacatctgcatgaagctggaggagggcaaatacctcatcctcaaggaccccaacaagcaggtcatccgtgtcta

SEQ ID NO: 10058 - DNA, 678 bp, Homo sapiens
  source 1..678: mol_type = unassigned DNA
gctgcgcgcgcatgtttcctcttttcctggtttctcaagagtgctgctgctaacgcggtccccggcacgcaccatctgttgccatcccggccggccgaggccattgcagattttggaagatggcaaagttcatgacacccgtgatccaggacaacccctcaggctggggtccctgtgcggttcccgagcagtttcgggatatgccctaccagccgttcagcaaaggagatcggctaggaaaggttgcagactggacaggagccacataccaagataagaggtacacaaataagtactcctctcagtttggtggtggaagtcaatatgcttatttccatgaggaggatgaaagtagcttccagctggtggatacagcgcgcacacagaagacggcctaccagcggaatcgaatgagatttgcccagaggaacctccgcagagacaaagatcgtcggaacatgttgcagttcaacctgcagatcctgcctaagagtgccaaacagaaagagagagaacgcattcgactgcagaaaaagttccagaaacaatttggggttaggcagaaatgggatcagaaatcacaggtaatgtatttataccagaattctgccttggaatttggttctgtttatttggttgtctttattaatagcttagatgagatatacttcacatacc

SEQ ID NO: 10059 - DNA, 996 bp, Homo sapiens
  source 1..996: mol_type = unassigned DNA
ctcttttcctggtttctcaagagtgctgctgctaacgcggtccccggcacgcaccatctgttgccatcccggccggccgaggccattgcagatggaaaagactaaggtggctggacgtggtggctcacgcctgtaatcccagcactttgggaggtcgaggcgggaggatcatttgagattttggaagatggcaaagttcatgacacccgtgatccaggacaacccctcaggctggggtccctgtgcggttcccgagcagtttcgggatatgccctaccagccgttcagcaaaggagatcggctaggaaaggttgcagactggacaggagccacataccaagataagaggtacacaaataagtactcctctcagtttggtggtggaagtcaatatgcttatttccatgaggaggatgaaagtagcttccagctggtggatacagcgcgcacacagaagacggcctaccagcggaatcgaatgagatttgcccagaggaacctccgcagagacaaagatcgtcggaacatgttgcagttcaacctgcagatcctgcctaagagtgccaaacagaaagagagagaacgcattcgactgcagaaaaagttccagaaacaatttggggttaggcagaaatgggatcagaaatcacagaaaccccgagactcttcagttgaagttcgtagtgattgggaagtgaaagaggaaatggattttcctcagttgatgaagatgcgctacttggaagtatcagagccacaggacattgagtgttgtggggccctagaatactacgacaaagcctttgaccgcatcaccacgaggagtgagaagccactgcggagcatcaagcgcatcttccacactgtcaccaccacagacgaccctgtcatccgcaagctggcaaaaactcaggggaatgtgtttgccactgatgccatcctggccacgctgatgagctgtacccgctcagtgtattcctgggatattgtcgtcca

SEQ ID NO: 10060 - DNA, 729 bp, Homo sapiens
  source 1..729: mol_type = unassigned DNA
aggtgagcggcgtgtttcataggttcctgcggccctccggagccggttcggactaggtccagccttcggggggcctcccggaagagacctctcttagtcccttcctgctgttgccgtccctccgctgggcggggcaggaatccactttcgggggccccgcgtcccgcacgctactgaacgcgggacacgaccttgtggattttggaagatggcaaagttcatgacacccgtgatccaggacaacccctcaggctggggtccctgtgcggttcccgagcagtttcgggatatgccctaccagccgttcagcaaaggagatcggctaggaaaggttgcagactggacaggagccacataccaagataagaggtacacaaataagtactcctctcagtttggtggtggaagtcaatatgcttatttccatgaggaggatgaaagtagcttccagctggtggatacagcgcgcacacagaagacggcctaccagcggaatcgaatgagatttgcccagaggaacctccgcagagacaaagatcgtcggaacatgttgcagttcaacctgcagatcctgcctaagagtgccaaacagaaagagagagaacgcattcgactgcagaaaaagttccagaaacaatttggggttaggcagaaatgggatcagaaatcacagaaaccccgagactcttcagttgaagttcgtagtgattgggaagtgaaagaggaaat

SEQ ID NO: 10061 - DNA, 883 bp, Homo sapiens
  source 1..883: mol_type = unassigned DNA
ctttgaccgcatcaccacgaggagtgagaagccactgcggagcatcaagcgcatcttccacactgtcaccaccacagacgaccctgtcatccgcaagctggcaaaaactcaggggaatgtgtttgccactgatgccatcctggccacgctgatgagctgtacccgctcagtgtattcctgggatattgtcgtccagagagttgggtccaaactcttctttgacaagagagacaactctgactttgcgctgcgcacattgtcagtgactctttgttgcatggtgagtgaccatgccacgcttttgcagacctcctgacagtgagtgagactgccaatgagccccctcaagatgaaggtaattccttcaattcaccccgcaacctggccatggaggcaacctacatcaaccacaatttctcccagcagtgcttgagaatggggaaggaaagatacaacttccccaacccaaacccgtttgtggaggacgacatggataagaatgaaatcgcctctgttgcgtaccgttaccgcaggtggaagcttggagatgatattgaccttattgtccgttgtgagcacgatggcgtcatgactggagccaacggggaagtgtccttcatcaacatcaagacactcaatgagtgggattccaggcactgtaatggcgttgactggcgtcagaagctggactctcagcgaggggctgtcattgccacggagctgaagaacaacagctacaagttggcccggtggacctgctgtgctttgctggctggatctgagtacctcaagcttggttatgtgtctcggtaccacgtgaaagactcctcacgccacgtcatcctaggcacccagcagttcaagcctaatgagtttgccagcc

SEQ ID NO: 10062 - DNA, 1731 bp, Homo sapiens
  source 1..1731: mol_type = unassigned DNA
ctcttttcctggtttctcaagagtgctgctgctaacgcggtccccggcacgcaccatctgttgccatcccggccggccgaggccattgcagattttggaagatggcaaagttcatgacacccgtgatccaggacaacccctcaggctggggtccctgtgcggttcccgagcagtttcgggatatgccctaccagccgttcagcaaaggagatcggctaggaaaggttgcagactggacaggagccacataccaagataagaggaacctccgcagagacaaagatcgtcggaacatgttgcagttcaacctgcagatcctgcctaagagtgccaaacagaaagagagagaacgcattcgactgcagaaaaagttccagaaacaatttggggttaggcagaaatgggatcagaaatcacagaaaccccgagactcttcagttgaagttcgtagtgattgggaagtgaaagaggaaatggattttcctcagttgatgaagatgcgctacttggaagtatcagagccacaggacattgagtgttgtggggccctagaatactacgacaaagcctttgaccgcatcaccacgaggagtgagaagccactgcggagcatcaagcgcatcttccacactgtcaccaccacagacgaccctgtcatccgcaagctggcaaaaactcaggggaatgtgtttgccactgatgccatcctggccacgctgatgagctgtacccgctcagtgtattcctgggatattgtcgtccagagagttgggtccaaactcttctttgacaagagagacaactctgactttgacctcctgacagtgagtgagactgccaatgagccccctcaagatgaaggtaattccttcaattcaccccgcaacctggccatggaggcaacctacatcaaccacaatttctcccagcagtgcttgagaatggggaaggaaagatacaacttccccaacccaaacccgtttgtggaggacgacatggataagaatgaaatcgcctctgttgcgtaccgttaccgcaggtggaagcttggagatgatattgaccttattgtccgttgtgagcacgatggcgtcatgactggagccaacggggaagtgtccttcatcaacatcaagacactcaatgagtgggattccaggcactgtaatggcgttgactggcgtcagaagctggactctcagcgaggggctgtcattgccacggagctgaagaacaacagctacaagttggcccggtggacctgctgtgctttgctggctggatctgagtacctcaagcttggttatgtgtctcggtaccacgtgaaagactcctcacgccacgtcatcctaggcacccagcagttcaagcctaatgagtttgccagccagatcaacctgagcgtggagaatgcctggggcattttacgctgcgtcattgacatctgcatgaagctggaggagggcaaatacctcatcctcaaggaccccaacaagcaggtcatccgtgtctacagcctccctgatggcaccttcagctctgatgaagatgaggaggaagaggaggaggaagaagaggaagaagaagaggaagaaacttaaaccagtgatgtggagctggagtttgtccttccaccgagactacgagggcctttgatgcttagtggaatgtgtgtctaacttgctctctgacatttagcagatgaaataaaatatatatctgtttagtctt

SEQ ID NO: 10063 - DNA, 1543 bp, Homo sapiens
  source 1..1543: mol_type = unassigned DNA
tgttcgtttgtcggcgctaccaataaagttttagtgagcacagactcccttttctttggcaagatggcggagtacgacttgactactcgcatcgcgcactttttggatcggcatctagtctttccgcttcttgaatttctctctgtaaaggagatatataatgaaaaggaattattacaaggtaaattggaccttcttagtgataccaacatggtagactttgctatggatgtatacaaaaacctttattctgatgatattcctcatgctttgagagagaaaagaaccacagtggttgcacaactgaaacagcttcaggcagaaacagaaccaattgtgaagatgtttgaagatccagaaactacaaggcaaatgcagtcaaccagggatggtaggatgctctttgactacctggcggacaagcatggttttaggcaggaatatttagatacactctacagatatgcaaaattccagtacgaatgtgggaattactcaggagcagcagaatatctttatttttttagagtgctggttccagcaacagatagaaatgctttaagttcactctggggaaagctggcctctgaaatcttaatgcagaattgggatgcagccatggaagaccttacacggttaaaagagaccatagataataattctgtgagttctccacttcagtctcttcagcagagaacatggctcattcactggtctctgtttgttttcttcaatcaccccaaaggtcgcgataatattattgacctcttcctttatcagccacaatatcttaatgcaattcagacaatgtgtccacacattcttcgctatttgactacagcagtcataacaaacaaggatgttcgaaaacgtcggcaggttctaaaagatctagttaaagttattcaacaggagtcttacacatataaagacccaattacagaatttgttgaatgtttatatgttaactttgactttgatggggctcagaaaaagctgagggaatgtgaatcagtgcttgtgaatgacttcttcttggtggcttgtcttgaggatttcattgaaaatgcccgtctcttcatatttgagactttctgtcgcatccaccagtgtatcagcattaacatgttggcagataaattgaacatgactccagaagaagctgaaaggtggattgtaaatttgattagaaatgcaagactggatgccaagattgattctaaattaggtcatgtggttatgggtaacaatgcagtctcaccctatcagcaagtgattgaaaagaccaaaagcctttcctttagaagccagatgttggccatgaatattgagaagaaacttaatcagaatagcaggtcagaggctcctaactgggcaactcaagattctggcttctactgaagaaccataaagaaaagatgaaaaaaaaaactatcaaagaaagatgaaataataaaactattatataaagggtgacttacattttggaaacaacatattacgtataaattttgaagaattggaataaaattgattcatttta

SEQ ID NO: 10064 - DNA, 1254 bp, Homo sapiens
  source 1..1254: mol_type = unassigned DNA
atttccgcttccgcctccttctttctcgacaagatggccacaccggcggtaccagtaagtgctcctccggccacgccaaccccagtcccggcggcggccccagcctcagttccagcgccaacgccagcaccggctgcggctccggttcccgctgcggctccagcctcatcctcagaccctgcggcagcagcggctgcaactgcggctcctggccagaccccggcctcagcgcaagctccagcgcagaccccagcgcccgctctgcctggtcctgctcttccagggcccttccccggcggccgcgtggtcaggctgcacccagtcattttggcctccattgtggacagctacgagagacgcaacgagggtgctgcccgagttatcgggaccctgttgggaactgtcgacaaacactcagtggaggtcaccaattgcttttcagtgccgcacaatgagtcagaagatgaagtggctgttgacatggaatttgctaagaatatgtatgaactgcataaaaaagtttctccaaatgagctcatcctgggctggtacgctacgggccatgacatcacagagcactctgtgctgatccacgagtactacagccgagaggcccccaaccccatccacctcactgtggacacaagtctccagaacggccgcatgagcatcaaagcctacgtcagcactttaatgggagtccctgggaggaccatgggagtgatgttcacgcctctgacagtgaaatacgcgtactacgacactgaacgcatcggagttgacctgatcatgaagacctgctttagccccaacagagtgattggactctcaagtgacttgcagcaagtaggaggggcatcagctcgcatccaggatgccctgagtacagtgttgcaatatgcagaggatgtactgtctggaaaggtgtcagctgacaatactgtgggccgcttcctgatgagcctggttaaccaagtaccgaaaatagttcccgatgactttgagaccatgctcaacagcaacatcaatgaccttttgatggtgacctacctggccaacctcacacagtcacagattgcactcaatgaaaaacttgtaaacctgtgaatggaccccaagcagtacacttgctggtctaggtattaaccccaggactcagaagtgaaggagaaatgggttttttgtggtcttgagtcacactgagatagtcagttgtgtgtgactctaataaacggagcctaccttttgtaaatt

SEQ ID NO: 10065 - DNA, 1068 bp, Homo sapiens
  source 1..1068: mol_type = unassigned DNA
tttctcgacaagatggccacaccggcggtaccagtaagtgctcctccggccacgccaaccccagtcccggcggcggccccagcctcagttccagcgccaacgccagcaccggctgcggctccggttcccgctgcggctccagcctcatcctcagaccctgcggcagcagcggctgcaactgcggctcctggccagaccccggcctcagcgcaagctccagcgcagaccccagcgcccgctctgcctggtcctgctcttccagggcccttccccggcggccgcgtggtcaggctgcacccagtcattttggcctccattgtggacagctacgagagacgcaacgagggtgctgcccgagttatcgggaccctgttgggtggctgttgacatggaatttgctaagaatatgtatgaactgcataaaaaagtttctccaaatgagctcatcctgggctggtacgctacgggccatgacatcacagagcactctgtgctgatccacgagtactacagccgagaggcccccaaccccatccacctcactgtggacacaagtctccagaacggccgcatgagcatcaaagcctacgtcagcactttaatgggagtccctgggaggaccatgggagtgatgttcacgcctctgacagtgaaatacgcgtactacgacactgaacgcatcggagttgacctgatcatgaagacctgctttagccccaacagagtgattggactctcaagtgacttgcagcaagtaggaggggcatcagctcgcatccaggatgccctgagtacagtgttgcaatatgcagaggatgtactgtctggaaaggtgtcagctgacaatactgtgggccgcttcctgatgagcctggttaaccaagtaccgaaaatagttcccgatgactttgagaccatgctcaacagcaacatcaatgaccttttgatggtgacctacctggccaacctcacacagtcacagattgcactcaatgaaaaacttgtaaacctgtgaatggaccccaagcagtacacttgctggtctaggtattaaccccaggactcaga

SEQ ID NO: 10066 - DNA, 7540 bp, Homo sapiens
  source 1..7540: mol_type = unassigned DNA
aaatcgcttctgggtgcagccacaggagtggggttgttggtccaggtggagccatggttgagggaaaaactaaaacatgacagagtttattcatcaatgggaacttttatatactgttagaaggcatgtaaattggaacagcctctttggaaaacaagtctgcattatcttcctcgagcttctgggctcaaacgatccttccgcctcggtctcccgaagtgctgagattacaggcgtgagccaccgcgcctggccttaaaatcctttttaaaggcactttgacatccattatctcatttaagtctaaaacacgaatttcgacctccgcgctgctttctggttccacctggcggcagctgcacaaagtgtttctcttcgaacgccgtcccaagttttacccggaactacttagcccagggtttcctgagtgctcctcgggccaaaagcagagcgcacaaattccagaagaaattaccaacggcgggactatttcagtgctccgagaagtatcaccagtaaccaatcagcaaaaagctctagctcacgtggtgtatattcagcctatcaagctcctgatattcatgaatgctgtcatttccgcttccgcctccttctttctcgacaagatggccacaccggcggtaccagtaagtgctcctccggccacgccaaccccagtcccggcggcggccccagcctcagttccagcgccaacgccagcaccggctgcggctccggttcccgctgcggctccagcctcatcctcagaccctgcggcagcagcggctgcaactgcggctcctggccagaccccggcctcagcgcaagctccagcgcagaccccagcgcccgctctgcctggtcctgctcttccagggcccttccccggcggccgcgtggtcaggctgcacccagtcattttggcctccattgtggacagctacgagagacgcaacgagggtgctgcccgagttatcgggaccctgttgggaactgtcgacaaacactcagtggaggtcaccaattgcttttcagtgccgcacaatgagtcagaagatgaagtggctgttgacatggaatttgctaagaatatgtatgaactgcataaaaaagtttctccaaatgagctcatcctgggctggtacgctacgggccatgacatcacagagcactctgtgctgatccacgagtactacagccgagaggcccccaaccccatccacctcactgtggacacaagtctccagaacggccgcatgagcatcaaagcctacgtcagcactttaatgggagtccctgggaggaccatgggagtgatgttcacgcctctgacagtgaaatacgcgtactacgacactgaacgcatcggagttgacctgatcatgaagacctgctttagccccaacagagtgattggactctcaagtgacttgcagcaagtaggaggggcatcagctcgcatccaggatgccctgagtacagtgttgcaatatgcagaggatgtactgtctggaaaggtgtcagctgacaatactgtgggccgcttcctgatgagcctggttaaccaagtaccgaaaatagttcccgatgactttgagaccatgctcaacagcaacatcaatgaccttttgatggtgacctacctggccaacctcacacagtcacagattgcactcaatgaaaaacttgtaaacctgtgaatggaccccaagcagtacacttgctggtctaggtattaaccccaggactcagaagtgaaggagaaatgggttttttgtggtcttgagtcacactgagatagtcagttgtgtgtgactctaataaacggagcctaccttttgtaaattaatttcatcttatgtgagtttattgccgggtggaagggaggaaaatgttttagatcacacagaaactaggaagtgaatattgtaggtagagaagttggttatgtgtttggcatgttactgttttaccaaactgttcttttggttttcaatatggaaaggtgtccattggcaaaacaaccttttcttgaggattcatgtgatttctacaggaaatgaaaataagaatccatggagaaaaaatagctaagaaaattggatgcttaatctgaactaaaagagtagagtgtgtagtcactatcttaaaatacattaatagtaagatggagctctttgccactttggttcggggaggcagaattaagatctgtgggttaaagattaaagaggtttccccaaaacttcagaaaattcttaggtgctatctgtaactcgaggatagagccttgagttatactgaggtctgccagtggctcaatttaagcaaagactagatggcatttcccagaggccttgtaggctagagtacttgcctgtgtaacttcagacatccatttcctctggtatcctggagttccgcctcgccactgtgtgtcttagaaataagtcattattcaagaactcaggaaattatacgttggagtgaaaaggtgagtgaaggcaatggggaatcaaaaaggcctggatcctagttctgaggtatgtgtagccttaggaaagataaattataagagtcataagatatggatcataaacatacatagtccattagggtattatgaggattccatgaattaataaatgtcaggttaatcaacacttgtggagaatatcacctggtatgtagtaagcacagataagtggtagatactatgatgcctaaaggtgaatagtttgaaagtaataagcaacatgaaccccagcctggaactcagttctgagatatgtacctcaggaaatataagttatgggagtcataaagtgtggatagtaatgatagataatttcttacaggtagggaaatgtaaacagatcttatcggcaaaatgataatgacaggccaaattgttaaaggtaggttaaaagtagacagcatggtgggaaggttaatcagagtcaaaatgtttcagtgttcttacatttttgggagtagccagttaatatcaacttagtctttttaagtatgcatgataaaattccgaggttaattgctagaagtatatataatctctcaatgaatagtgatgagagatggtgggataatagggaagaaacaaaattttaaatttgagaaataagcatagaaaaggtggataaaacaaaagatggcaaaacaagtccaaatagatcagtaattacaataaatgtataagtattaaactagcccaaggaaaaattgaatattaaaacaaaccccaatcatatgctgtttacaggagacacatctaaaacaaggacataaagttgtcctgcagctgtgagtaacaatataggtgaatgttaataataatgttgaatgaaaaaagctggtgtcagaagacatgtacattatgatactccagaagttcaaaaacaagtgaaacttgtttagacatgcggttggctgtctgtatatgtgggttccacatctatggactcaaccaactacaggttgaaaatattgagggggaaaattgtgtctggactaaacctgtacagacatttttccttgtcatttttccctaaacaatacaaagtattagatggtgtttatactgtattcggtattataagtaatctagagatgacttaaaagtatatgagaaggtatgcacaggttatatccaaatacttcatattagggacttgagcatcagaggatttttatatccaaggaaggttctggaaccaatcctccacggatactaaacggtgactgtgtgtgtatatatatatgtatagtctgttctcattatctatagtagttatgttttataaagtcaccatgaacactgaattagagagtactgaaccattattcccaagggaaatacagggttgggttcctatgaacctctgggcacagtttcatcaacccatcagtacataaacttgttacatgtgtttctgtttgaagacaccttagtatatatggttgacccattaacactgaacttagcccacgacacttattcctgaatgaagcttacctcagtttctccaggcggcacatcacagtcttcttgcacttaggaacacttggcactgtgcgtgggggtcactttaagcagcaaaatccacaaaaatgcaaaagacatggcactaaatagactgaaaaggatacttgtttataagaactgaaacaagaaggccttgttccacctcagctgggaacatggagagcaggcaattcaaattttttcacatgctgcatgtccgcaaatggctgcaaaagcccagcaagtactgatactggagttagaaataaattttagcaagaggtaaattcacacatacggagtctgcaaaaaatgagaattgactattatgtgtgtgtatattatatatatgataaaaaacaaaagaatgataaaaattcccaataatgtttactttggtggtgagaagaggatggcaagtaaaataagtctgtattgttatcagcaattatctagtttgaggttggacagtggtttcatcataggtattgattatattataaatagcccaacctgaactcatgaccatagtgtggtgttattacttagcgttattctagacttattagccattgtatttaaacaagaggaaatagagacattgaagataaagtggagccaggcacagtggctcatgcctgtaatcccagcactttggcaggctgagatgggttaatcaagaccagaagttcaagaccagcgtggccaacatggcaaaaccccgtctctactaaaaaaaaacaaaaaatacaaaaattagccaggcgtggtggcacgcacctgtagtcccagctacttgggaagctgaggcaggagaatctcgaacccaggaggtaggggttgcagtgagctgagatcgcaccactgcaccccagcctgggtgacagcaagatcctttctcaagaaaaaaagtgaaaaggaggagggtttttaaaaaattagtactacccagttgatacggtggaagaaaacttgaaaatgctaatgagaaacatgagatgtaatcacttgaaggcatatcatgttcttgaataagaagactcaacattattttaacaggtgttaattttccctgttaaactacatatttgtcataattacaataaaatacaaagagctattttggaactgggcaagctgtttctaaatgtatatggaaaaataaaaatgtctccaaaaaatccctgcagagggaaactagcccttccagatataaaatatattatagaactgtgtaattaaagcaatatggtactggtccataaaagaacataaaaccaaatagttcagtagactcaaaatgcaagcgttggtgagggtatggagaaaagggaacccttttacacttggtgtgaatgtaaattagtacagacattgtggaaaacagtttgtagagcttcctcaataaaaacacatatgatccagcaatcccactactgggtatatatccaaaggaaatgaaatcagtatgttgaagagatacttccacgttcactgaagcattgttcacaatcgccaagacatcaacctaagtgtccatcaacagaagatagatagggctgagcgcggtggcccacgcctgtaatcccagcactttgggaggccaaggcaggtggatcatttgaggtcagaagttcttgaccagcctggccaacatgatgaaaccccgtctctacaaaagatacaaaaattagccaggcatcttggagggcgcctgtaatcccacctactcgggctgaagtgagaatggcttgaacccaggaagtggagatttcagtgagctgagattccgccactgcagtccagcctgagcgacaagagtgagaagagtgagacttcatctcaaaaaaaaaaaaggtacatctacacaatggaatattattaaccttaaaagaaggaaataactgatttacaacaacatggatggacctggaggacactatgctagtgaaataagccatgatctcacttggatatggaatcacaaaattgaactcacaagcagagtgtagaaaggtggtttcatggactggagggaggggataaatggggagatgttggtcaagggtacaaagtttcagttaaacaggagtagtacgttccggagacctgttgtgcagcagggtgactagttaatgtatacttgaaaattgctaggagtagatctcaccaggagaaatgaatatgtgaggtgatggatgtaactagcttgattgtggtaatcaatttcgcaatgtgtacatatatcaaaacatcacattgtacaaaatacatacagtttttgtcaatttaaagatatcagaattctagaatatgataaagttgtgttttcaagcaagtaaagatagattacttaagagcgaatgagtggtaatttggaaacaatgttggattcctacttcgttacctgcaccaaaataagttgctcatggaataaaaacttgtctgaaaaaaaaaccataaatatgagggaaaaaacacagcaatgtgtttttaatgatttatgagtgaggaagaactttctaagaactgagaatccaggagttattttaaaagactgacaaatttagcaacatttttaaaatctgagtgtcaaattacacacatacacaaatagtcaatacaaatataaaactgggaaaatatttgcagttcatatcaaaaaaagggctaatattcttgtcccagaattcctacagttttttaaggccagtaatttgatacattagtgtgtaaaggatatgaccagacagctcacacacagacacacaaatgtgaaaagatgcttgatctcactgataaagcataaattaaaacgatgtcatttttaaaaatcagattcgcaaattttaaaagttgctaacactggaatggccagagtaagaggaaacgtgacacaggcacagattgctggtagacatataagttggtacagccctctctatgtaattttgtgtttgtcaaaattacaaatatgcatgcccttaacccaggaattccactcctcattatatatcctacaaataaactggtctcgttatgacacaatgtaatgaatacatagataagtactgaaatacttggttatcatagcgtaaagatggtaatcaacccaaatgactattaccagaatagaaattaaacaaagtatgatatatccataaaacacaatactatgcagctgttaagcagaatgagacagtcctctatatatcaatatggataaagagtaagtgaaaaaagccaggagagaatgttgtctataatatgctgttgttgtgtacgggaaaataaataatataaatacctagaatatttgtgaaggtacagccaagaaactactatcactgattgtcttaaggtactagatggggcacaggacaggacgaaagatttacttcttattgtttcttctgtataacttttgaattttatgctgttaatgtaatttttcaaaaaaatatataaaaatataaaaacatgaaaaacatgaaacaa

SEQ ID NO: 10067 - DNA, 1684 bp, Homo sapiens
  source 1..1684: mol_type = unassigned DNA
cattgcagcctcgagcttctgggctcaaacgatccttccgcctcggtctcccgaagtgctgagattacaggcgtgagccaccgcgcctggccttaaaatcctttttaaaggcactttgacatccattatctcatttaagtctaaaacacgaatttcgacctccgcgctgctttctggttccacctggcggcagctgcacaaagtgtttctcttcgaacgccgtcccaagttttacccggaactacttagcccagggtttcctgagtgctcctcgggccaaaagcagagcgcacaaattccagaagaaattaccaacggcgggactatttcagtgctccgagaagtatcaccagtaaccaatcagcaaaaagctctagctcacgtggtgtatattcagcctatcaagctcctgatattcatgaatgctgtcatttccgcttccgcctccttctttctcgacaagatggccacaccggcggtaccagtaagtgctcctccggccacgccaaccccagtcccggcggcggccccagcctcagttccagcgccaacgccagcaccggctgcggctccggttcccgctgcggctccagcctcatcctcagaccctgcggcagcagcggctgcaactgcggctcctggccagaccccggcctcagcgcaagctccagcgcagaccccagcgcccgctctgcctggtcctgctcttccagggcccttccccggcggccgcgtggtcaggctgcacccagtcattttggcctccattgtggacagctacgagagacgcaacgagggtgctgcccgagttatcgggaccctgttgggaactgtcgacaaacactcagtggaggtcaccaattgcttttcagtgccgcacaatgagtcagaagatgaagtggctgttgacatggaatttgctaagaatatgtatgaactgcataaaaaagtttctccaaatgagctcatcctgggctggtacgctacgggccatgacatcacagagcactctgtgctgatccacgagtactacagccgagaggcccccaaccccatccacctcactgtggacacaagtctccagaacggccgcatgagcatcaaagcctacgtcagcactttaatgggagtccctgggaggaccatgggagtgatgttcacgcctctgacagtgaaatacgcgtactacgacactgaacgcatcggagttgacctgatcatgaagacctgctttagccccaacagagtgattggactctcaagtgacttgcagcaagtaggaggggcatcagctcgcatccaggatgccctgagtacagtgttgcaatatgcagaggatgtactgtctggaaaggtgtcagctgacaatactgtgggccgcttcctgatgagcctggttaaccaagtaccgaaaatagttcccgatgactttgagaccatgctcaacagcaacatcaatgaccttttgatggtgacctacctggccaacctcacacagtcacagattgcactcaatgaaaaacttgtaaacctgtgaatggaccccaagcagtacacttgctggtctaggtattaaccccaggactcagaagtgaaggagaaatgggttttttgtggtcttgagtcacactgagatagtcagttgtgtgtgactctaataaacggagcctaccttttgtaaatt

SEQ ID NO: 10068 - DNA, 1472 bp, Homo sapiens
  source 1..1472: mol_type = unassigned DNA
cttctttctcgacaagatggccacaccggcggtaccagtaagtgctcctccggccacgccaaccccagtcccggcggcggccccagcgcccgctctgcctggtcctgctcttccagggcccttccccggcggccgcgtggtcaggctgcacccagtcattttggcctccattgtggacagctacgagagacgcaacgagggtgctgcccgagttatcgggaccctgttgggaactgtcgacaaacactcagtggaggtcaccaattgcttttcagtgccgcacaatgagtcagaagatgaagtggctgttgacatggaatttgctaagaatatgtatgaactgcataaaaaagtttctccaaatgagctcatcctgggctggtacgctacgggccatgacatcacagagcactctgtgctgatccacgagtactacagccgagaggcccccaaccccatccacctcactgtggacacaagtctccagaacggccgcatgagcatcaaagcctacgtcagcactttaatgggagtccctgggaggaccatgggagtgatgttcacgcctctgacagtgaaatacgcgtactacgacactgaacgcatcggagttgacctgatcatgaagacctgctttagccccaacagagtgattggactctcaagtgacttgcagcaagtaggaggggcatcagctcgcatccaggatgccctgagtacagtgttgcaatatgcagaggatgtactgtctggaaaggtgtcagctgacaatactgtgggccgcttcctgatgagcctggttaaccaagtaccgaaaatagttcccgatgactttgagaccatgctcaacagcaacatcaatgaccttttgatggtgacctacctggccaacctcacacagtcacagattgcactcaatgaaaaacttgtaaacctgtgaatggaccccaagcagtacacttgctggtctaggtattaaccccaggactcagaagtgaaggagaaatgggttttttgtggtcttgagtcacactgagatagtcagttgtgtgtgactctaataaacggagcctaccttttgtaaattaatttcatcttatgtgagtttattgccgggtggaagggaggaaaatgttttagatcacacagaaactaggaagtgaatattgtaggtagagaagttggttatgtgtttggcatgttactgttttaccaaactgttcttttggttttcaatatggaaaggtgtccattggcaaaacaaccttttcttgaggattcatgtgatttctacaggaaatgaaaataagaatccatggagaaaaaatagctaagaaaattggatgcttaatctgaactaaaagagtagagtgtgtagtcactatcttaaaatacattaatagtaagatggagctctttgccactttggttcggggaggcagaattaagatctgtgggttaaagattaaaga

SEQ ID NO: 10069 - DNA, 1127 bp, Homo sapiens
  source 1..1127: mol_type = unassigned DNA
gtctcgttttcgcccgcttccgctctctggccgggcttgggctgcgtggagaatactttttgcgatgcctactggagactttgattcgaagcccagttgggccgaccaggtggaggaggagggggaggacgacaaatgtgtcaccagcgagctcctcaaggggatccctctggccacaggtgacaccagcccagagccagagctactgccgggagctccactgccgcctcccaaggaggtcatcaacggaaacataaagacagtgacagagtacaagatagatgaggatggcaagaagttcaagattgtccgcaccttcaggattgagacccggaaggcttcaaaggctgtcgcaaggaggaagaactggaagaagttcgggaactcagagtttgacccccccggacccaatgtggccaccaccactgtcagtgacgatgtctctatgacgttcatcaccagcaaagaggacctgaactgccaggaggaggaggaccctatgaacaaactcaagggccagaagatcgtgtcctgccgcatctgcaagggcgaccactggaccacccgctgcccctacaaggatacgctggggcccatgcagaaggagctggccgagcagctgggcctgtctactggcgagaaggagaagctgccgggagagctagagccggtgcaggccacgcagaacaagacagggaagtatgtgccgccgagcctgcgcgacggggccagccgccgcggggagtccatgcagcccaaccgcagagccgacgacaacgccaccatccgtgtcaccaacttgtcagaggacacgcgtgagaccgacctgcaggagctcttccggcctttcggctccatctcccgcatctacctggctaaggacaagaccactggccaatccaagggctttgccttcatcagcttccaccgccgcgaggatgctgcgcgtgccattgccggggtgtccggctttggctacgaccacctcatcctcaacgtcgagtgggccaagccgtccaccaactaagccagctgccactgtgtactcggtccgggacccttggcgacagaagacagcctccgagagcgcgggctccaagggcaataaagcagctccactctctcta

SEQ ID NO: 10070 - DNA, 2041 bp, Homo sapiens
  source 1..2041: mol_type = unassigned DNA
aggcgcgtagcaagagcttctctgaaagactggcagtatagtagtagtcagtgataatattgagccttaatatgttccagacactgtcctaagtgatttaccttacattattcccctgaatgtttataattcccaagtgaaagaaggaaatgatatattggatagctatgagtggggaggtttgtactggctgctttcccataaagaaattaagcacgttcacgaagggcacgtagtttgttagtgtctggaacccagttttcgtgcctgaagttcaaatgttcttgctacaccaccatagaaactaacgtcactcaggaaccatttgtcagggcaaagggtgccaccattttgcatttcctcctgccttaggaccatcctaaatcactcgcatggagtgttttggaagaactctcaagagcttcgtttgcctagagtcagaattcctaaccttgagtcctggttttgccacaaacccaagccgtttgatcttgggcaactcccgaagaaagctgggttcaacttcctcactgtcaaactggttgtaggtctagataagtttcaagtactctttttatgtgcatggtctctgacataggaagactacatactgggccagtaacaggaaggcacaaagctgactggaggtttaaaaattacttggtcaatttgattaatgaggagaatgaatcagaaaatttcaagttctcccgtggctaactgtcgagtatccacttcaagatcattccatcggaaagaggtcgaaaatgtacagtaggcatgcacaaaggataccgcctggaaagaagatggcgtcccgcaaggaaggtaccggctctactgccacctcttccagctccaccgccggcgcagcagggaaaggcaaaggcaaaggcggctcgggagattcagccgtgaagcaagtgcagatagatggccttgtggtattaaagataatcaaacattatcaagaagaaggacaaggaactgaagttgttcaaggagtgcttttgggtctggttgtagaagatcggcttgaaattaccaactgctttcctttccctcagcacacagaggatgatgctgactttgatgaagtccaatatcagatggaaatgatgcggagccttcgccatgtaaacattgatcatcttcacgtgggctggtatcagtccacatactatggctcattcgttacccgggcactcctggactctcagtttagttaccagcatgccattgaagaatctgtcgttctcatttatgatcccataaaaactgcccaaggatctctctcactaaaggcatacagactgactcctaaactgatggaagtttgtaaagaaaaggatttttcccctgaagcattgaaaaaagcaaatatcacctttgagtacatgtttgaagaagtgccgattgtaattaaaaattcacatctgatcaatgtcctaatgtgggaacttgaaaagaagtcagctgttgcagataaacatgaattgctcagccttgccagcagcaatcatttggggaagaatctacagttgctgatggacagagtggatgaaatgagccaagatatagttaaatacaacacatacatgaggaatactagtaaacaacagcagcagaaacatcagtatcagcagcgtcgccagcaggagaatatgcagcgccagagccgaggagaacccccgctccctgaggaggacctgtccaaactcttcaaaccaccacagccgcctgccaggatggactcgctgctcattgcaggccagataaacacttactgccagaacatcaaggagttcactgcccaaaacttaggcaagctcttcatggcccaggctcttcaagaatacaacaactaagaaaaggaagtttccagaaaagaagttaacatgaactcttgaagtcacaccagggcaactcttggaagaaatatatttgcatattgaaaagcacagaggatttctttagtgtcattgccgattttggctataacagtgtctttctagccataataaaataaaacaaaatcttg

SEQ ID NO: 10071 - DNA, 3959 bp, Homo sapiens
  source 1..3959: mol_type = unassigned DNA
ctttcttcctgtctgcttggaaagatggcgtcccgcaaggaaggtaccggctctactgccacctcttccagctccaccgccggcgcagcagggaaaggcaaaggcaaaggcggctcgggagattcagccgtgaagcaagtgcagatagatggccttgtggtattaaagataatcaaacattatcaagaagaaggacaaggaactgaagttgttcaaggagtgcttttgggtctggttgtagaagatcggcttgaaattaccaactgctttcctttccctcagcacacagaggatgatgctgactttgatgaagtccaatatcagatggaaatgatgcggagccttcgccatgtaaacattgatcatcttcacgtgggctggtatcagtccacatactatggctcattcgttacccgggcactcctggactctcagtttagttaccagcatgccattgaagaatctgtcgttctcatttatgatcccataaaaactgcccaaggatctctctcactaaaggcatacagactgactcctaaactgatggaagtttgtaaagaaaaggatttttcccctgaagcattgaaaaaagcaaatatcacctttgagtacatgtttgaagaagtgccgattgtaattaaaaattcacatctgatcaatgtcctaatgtgggaacttgaaaagaagtcagctgttgcagataaacatgaattgctcagccttgccagcagcaatcatttggggaagaatctacagttgctgatggacagagtggatgaaatgagccaagatatagttaaatacaacacatacatgaggaatactagtaaacaacagcagcagaaacatcagtatcagcagcgtcgccagcaggagaatatgcagcgccagagccgaggagaacccccgctccctgaggaggacctgtccaaactcttcaaaccaccacagccgcctgccaggatggactcgctgctcattgcaggccagataaacacttactgccagaacatcaaggagttcactgcccaaaacttaggcaagctcttcatggcccaggctcttcaagaatacaacaactaagaaaaggaagtttccagaaaagaagttaacatgaactcttgaagtcacaccagggcaactcttggaagaaatatatttgcatattgaaaagcacagaggatttctttagtgtcattgccgattttggctataacagtgtctttctagccataataaaataaaacaaaatcttgactgcttgctcatttgattttagatgtattttctctggcttacttttgtttgcttatacttgtttatttctaaaagctaaaacaagccctgaccggaagtttcaccaggcagaaacctataggctccaccacttttgctgcctctcaggtgccacctttcaacccacttctcccaactacttatcccagctcctgaccccgaggccctggcatctactgtgaatattttttttttgaatttttatacttcgctgctcccaaatgagcaccccgagagaagtccaggcttcatgtacttgcccaggaattccttgtccccggacccggaatcacttggcctaattccggtcagtctgccttttcatttctgcaggtgatggtcaaccagtccccgtactcataggccatgggacacaagattattattatcatcattatttttaaagacagagtctcactttgttgcccaggctggagtgtagtggcacaatctcagctcgctgcaacctccaccttctgagttcaagcgattctcccacctcagcctcccaagtagctgggactacaggcgtgtgccatcacgcctggctaatttttgtatttttagtagagatggggtttcaccatgttggccaggctggtctgcatctcctgacctcaagtgattcacctgcttctgtctcccaaagtgctgggaatacaggcatgagccaccactcctggacaggccacagaaattttaaagaaaagaatcatgccaccacaagtaaacttcattttgtttatattatttaggacttcacatttgtcttccgaaaccatgaagtataattctgctaacagcaagtgttgtgaatgaggaattaggaattaggagaatggtagtacattgggaaaaacatattttagtaatttttatattttaaagataatcacagattttgctgtttgtgcatcaccaaaatcagtgagatctgccagctggtgggggtgtgcctatgagaatttttgattatgatcccctaggagggttatcaaaaaaggagatgggtgaaagatcaggagagtcgagaaattcattttttggacaacattgttttgaaggcactactggggctctgggatcaggcagccagattgaaacctggctcctccttttcctaagttatttaacctccctgtgcctcactttttgtcaaccagataagataagaaatgagagcaggtctgttacctcacaaggtggctgtgagtgttgaagacgtttgttgggggtttgggtgaagcatgcaaactctggttggtatgtggcagccactcagcctgtatttatgatgagggaggcattctaggcaccccttccaggatgttgggttgttggctgggttttactttaaaaagctcagggcctagaacattctagaatccaagtacttgctcacatatataattatttctttaggataatctttgatatagacttacgagtcaaagggtatgtaaaatgtcagcccttttacctgtattgccaaattgccttcaaaagtttctgctgttttgccctcctacccatagtgataaccttaaattggagtcaacacaaatttgagtgtgactgtgttagacagaagggatatattaacaggtaaaactggccatggcccctgcccttgtggagtatatgctctgttggttcatttcctctgcattctaattttctagacttgggatcttattgtggagttaaacaaagcacccttaaagtagcaagcgagcaaaataaaagcaaggaaaatcagttggaacataacttatgtattttttaggattaagagtaatttaactgagtcaattcaatatgtttttaaaggtgtgattcttaaattctttatgattgtttagatttctatatcttggtaacatgaatacacacttaatgaaagatttcagtaatttttgatttgggaattaatcatagtgggaaaaactgtttaggaaaacatgtcagtggaaattaactcgccacagtatgtagtgttagggaatagcttctgttcggcatttgatttgagtgctgtattctgacatttttcaggaacaaatacatgtgattcatcttctataaatatttgcagtttcttcaagttgaaatgagaaaagctcgtaaattgagcaccaggtctaataaatcattcacttacccaagaacagaaagacaggaaaagctagcatgttaatctaatgaaaaaatcgaatgttaaaaaaccaagaaagtagaagatatttgacattaactttctaatcattgataataatctaataatcataacattattcttaaaacctgaaagaatggattcctgctcccaatgtgtttttaatatcaacttaaactaaaataatttttttacctatttttggaagcttggaaattgagatgtagttgtctaatgttaacctaattaagagagcttggtgtgatttctcatatacagcatctaaatatttaagttttaatgtcttctaaaatattattacattcttcatactatagttttttaacatcctttagaaaacttgtatcagcttcactttcaaaccatgctggcatcgaactcaggtgtagtggtatcagaatgttatgaaataattttttattttcattataaactccatttttacaataaacacttctcaaccaaa

SEQ ID NO: 10072 - DNA, 564 bp, Homo sapiens
  source 1..564: mol_type = unassigned DNA
tgaacccgctgcaggccggcggaggcccgcttcagcagcggctgcgtgccaccccacagagcggccaccagcaccagagccaacacctgccctgaatgcagacgagggcggagacccataatccggaagtgacctcgaaaccttttccggtcttactcacgttgcggccttcctcgcgtcacagccgggatgaagccgatcctactgcagggccatgagcggtccattacgcagattaagtataaccgcgaaggagacctcctctttactgtggccaaggaccctatcgtcaatgtatggtactctgtgaatggtgagaggctgggcacctacatgggccataccggagctgtgtggtgtgtggacgctgactgggacaccaagcatgtcctcactggctcagctgacaacagctgtcgtctctgggactgtgaaacaggaaagcagctggcccttctcaagaccaattcggctgtccggacctgcggttttgactttgggggcaacatcatcatgttctccacggacaagcagatgggctaccagtgctttgtgagctttttt

SEQ ID NO: 10073 - DNA, 1458 bp, Homo sapiens
  source 1..1458: mol_type = unassigned DNA
ataatccggaagtgacctcgaaaccttttccggtcttactcacgttgcggccttcctcgcgtcacagccgggatgaagccgatcctactgcagggccatgagcggtccattacgcagattaagtataaccgcgaaggagacctcctctttactgtggccaaggaccctatcgtcaatgtatggtactctgtgaatggtgagaggctgggcacctacatgggccataccggagctgtgtggtgtgtggacgctgactgggacaccaagcatgtcctcactggctcagctgacaacagctgtcgtctctgggactgtgaaacaggaaagcagctggcccttctcaagaccaattcggctgtccggacctgcggttttgactttgggggcaacatcatcatgttctccacggacaagcagatgggctaccagtgctttgtgagcttttttgacctgcgggatccgagccagattgacaacaatgagccctacatgaagatcccttgcaatgactctaaaatcaccagtgctgtttggggacccctgggggagtgcatcatcgctggccatgagagtggagagctcaaccagtatagtgccaagtctggagaggtgttggtgaatgttaaggagcactcccggcagatcaacgacatccagttatccagggacatgaccatgtttgtgaccgcgtccaaggacaacacagccaagctttttgactccacaactcttgaacatcagaagactttccggacagaacgtcctgtcaactcagctgccctctcccccaactatgaccatgtggtcctgggcggtggtcaggaagccatggatgtaaccacaacctccaccaggattggcaagtttgaggccaggttcttccatttggcctttgaagaagagtttggaagagtcaagggtcactttggacctatcaacagtgttgccttccatcctgatggcaagagctacagcagcggcggcgaagatggttacgtccgtatccattacttcgacccacagtacttcgaatttgagtttgaggcttaagaagctggatctcctgccgggcgtggtggctcatgcctgtaatcccaccactttttttttaaggcaggcggatcacctgaggtcaggagtttaagaccagcctgaccaacatggagaaacctcgtctctactaaaaatacaaaaattagccaggcatggtggcacacgcctatagtcccagctactcaggaggctgaggcaggagaatcacttgaacccaggaggcagaggttgcagtgagctgagatcacgtcattgcactccatcctgagccacaagagcaaaactccgtctcaaaaaaaaaaaagaagaaggtggatctccaaccaggccagagaagattctcacagaaggttttgaactctaagaaataaattggtttggtaataaatggcttctggtcagata

SEQ ID NO: 10074 - DNA, 2569 bp, Homo sapiens
  source 1..2569: mol_type = unassigned DNA
ggcctcggctcggcgcacagtcagccacggtcccatcctgctccgcgccggtcaacgagagcaaacccagtgactcacctccgccgtgctaactcctcgctagctctccctctcacacacgctcacacccggctcgagatggcggcggcggcggcggcggcgggggactcggactcctgggacgccgacgctttctccgtggaagacccagtgcggaaggtggggggcggcggcactgccggcggggaccgctgggaaggcgaggacgaggacgaggacgtcaaggataactgggatgacgatgatgatgaaaaaaaagaggaagcagaagtaaaaccagaggtaaaaatttcagaaaagaaaaaaatagcagagaagataaaagagaaagaacggcaacagaagaaaaggcaagaagaaattaaaaagaggttagaagaacccgaagaacctaaagtgctaacaccagaagaacaattagcagataaactgcggctaaagaaattacaggaagagtcagacctcgaattagcaaaggaaacttttggtgttaataatgcagtttatggaatagatgctatgaacccatcttcaagagatgactttacagagtttggaaagttactaaaagataaaattacacaatatgaaaagtcactatattatgccagttttttggaagtcttagttcgagatgtgtgtatttcattggaaattgatgacttgaaaaaaattaccaattcactgactgtgctttgcagtgaaaaacagaagcaagaaaagcaaagcaaagccaaaaagaagaagaaaggtgtggttcctggagggggattaaaagccaccatgaaagatgatctggcagattatggtggttatgatggaggatatgtacaagactatgaagacttcatgtgacattttatcttttcttggtgtcatctttatgttgcccacaatcccttgaacatgtagcacaacttcctttcctttcagttctgccaaatgctacaatcagaagtgcagtatcttttgtgctggttatttaaccccttgacacttaggtgctaatgtgcaaatgagggaacttggatcttgctgccaaggggttaaaattgggaacctaagttgctactaaatcatagttcaaaacctaataatgttgtcgttgttgctatctgatttcatagcagcagtcactaaattggaaacaaaaggttgcaacgtgacaaaaaaaattgtgtagtatttaccagcaccattcagtaatacagccttaaccatacctccttgaactacttcataacttgtcaagaaaagcagtttgcagcaagggcatgtggtgtgcacctagtattaaaattgctttgtcttaaaattgaacatgaggatattaaaaatacattgtgaagaagactgcttatctcagagtgaagatactgcggctgaaaagcactagtttgatataaaattaaaatgaccaaaaccctccaactttgaagctaaagaaggtaaacctttccattattgcattacatgttgtggaatctctcgagtgcaaagactgtctagttatttatcaggctatttctactgatgaactgcttcaggtgggggagggaaacttatttttatttgcctgatttaagtgtctgagaaacaaatctttgttctcttaggctgcaatggaacaactttaccagggttttggcatttcctttcctttcctttataaaacatgctcagcaaactgcaccagttaactacagtttggtaaattgttatgttaacaattatgacatctgcaatgttttataaagcaactaatttaataaaatcactgttgtgaggacttaaattttgtgttacctcccaagagatactttttgagagtatagaacacagctcttgggagtacagttctctacgttctctactaaatcttaataaatgcttgacatagttacagctttaaaacatgagtgatttgccaggtccttatgttgtcaccatagagcaacaaaggtatagggctgccttcctcttatttatttggggacattattttgttatttagataccaaggcctaattaattaagtacctataagaactatttatttggagtaactgagcctgtaactcaggtttatggctgttaagtatagattggggaatctttattatgtcttctcctaagcagtttaaccaaatgtgtggttagtgtttttttattcccctaagacagaaagaacaaaaaatgttttaaatttctcttatataggaaataataggaacgtcaaagctctgtatacctactaagtggaaaacaagaccatcatctaagtgatttgagaaattaacaaaagtagtgactacacagcaataattacagtaaattaaataaagattcctttaaggcagacaagggctaagatttccttagcagtaataatgacatacactgaattgaaaatctattttattacagaaagatcagtttctaacaaatgaaaatgtatcacctgttccttaactgtgtaaataataattaaatttctttgaaactggaa

SEQ ID NO: 10075 - DNA, 879 bp, Homo sapiens
  source 1..879: mol_type = unassigned DNA
agtcacgtggcagccggaaagcgtggcggctgctgctagagcctttccctttaccgcacccaaggagctggagcgacaacaacgacgtcgtttccgtttccaccacctcttcctgttcccgtccttgaggacgccgtgccgggtcagtgttagcctccagccctggttgtggaaggcgacagaagtcatggcgatgtttgagcagatgagagccaacgtgggcaagttgctcaagggtatcgacaggtacaatcctgagaacctggccaccctggagcgctatgtagagacgcaggccaaggaaaatgcctatgatctggaagccaacctggctgtcctgaagctgtaccagttcaacccagccttctttcagaccacggtcaccgcccagatcctgctgaaggccctcaccaacttgccgcacacagacttcaccctgtgcaagtgcatgatcgaccaggcacatcaagaagaacggccaatccgacagattttgtacctcggggacctgctggagacctgccatttccaggccttctggcaagccctggatgaaaacatggacctcttggaaggtataactggctttgaagactctgtccgaaagtttatctgccatgttgtgggtatcacttaccagcacattgaccgctggctgctggccgagatgctcggggatctgtcggacagccagctaaaggtgtggatgagcaaatacggctggagtgccgacgagtcggggcagatcttcatctgtagccaagaagagagcattaaacccaagaacattgtggagaagattgactttgacagtgtgtccagcatcatggcctcctcccagtaacttcaggtgtttaataaagatgtgttgactcagcc

SEQ ID NO: 10076 - DNA, 966 bp, Homo sapiens
  source 1..966: mol_type = unassigned DNA
acctcttcctgttcccgtccttgaggacgccgtgccgggtcagtgttagcctccagccctggttgtggaaggcgacagaagtcatggcgatgtttgagcagatgagagccaacgtgggcaagttgctcaagggtaccagttcaacccagccttctttcagaccacggtcaccgcccagatcctgctgaaggccctcaccaacttgccgcacacagacttcaccctgtgcaagtgcatgatcgaccaggcacatcaagaagaacggccaatccgacagattttgtacctcggggacctgctggagacctgccatttccaggccttctggcaagccctggatgaaaacatggacctcttggaaggtataactggctttgaagactctgtccgaaagtttatctgccatgttgtgggtatcacttaccagcacattgaccgctggctgctggccgagatgctcggggatctgtcggacagccagctaaaggtgtggatgagcaaatacggctggagtgccgacgagtcggggcagatcttcatctgtagccaagaagagagcattaaacccaagaacattgtggagaagattgactttgacagtgagtggtgacccacggcctcgggctttggggctaagggggtgcccctcaagggaggccgaggcaggggcccagaggacctgggtagatctgctcgtgttctgggctgggaagtctgcacctgccagattccattcaccttgtgtcttggggctcccgcccaggaggaatagcggggagctgggtgatcttccctggaacttctaggccctgtgtcctgccccatagcactcagcaagacttcctggggcccagcggggcctcacagggggtctctgcacccttatttgtccctgaggcctgtctcgttggccatcttttattcttggggtgcccaagcctcatgtgcagacttggaatccggtga

SEQ ID NO: 10077 - DNA, 1027 bp, Homo sapiens
  source 1..1027: mol_type = unassigned DNA
ctgttcccgtccttgaggacgccgtgccgggtcagtgttagcctccagccctggttgtggaaggcgacagaagtcatggcgatgtttgagcagatgagagccaacgtgggcaagttgctcaagggtatcgacaggtacaatcctgagaacctggccaccctggagcgctatgtagagacgcaggccaaggaaaatgcctatgatctggaagccaacctggctgtcctgaagctgtaccagttcaacccagccttctttcagaccacggtcaccgcccagatcctgctgaaggccctcaccaacttgccgcacacagacttcaccctgtgcaagtgcatgatcgaccaggcacatcaagaagaacggccaatccgacagattttgtacctcggggacctgctggagacctgccatttccaggccttctggcaagccctggatgaaaacatggacctcttggaaggtataactggctttgaagactctgtccgaaagtttatctgccatgttgtgggtatcacttaccagcacattgaccgctggctgctggccgagatgctcggggatctgtcggacagccagctaaaggtgtggatgagcaaatacggctggagtgccgacgagtcggggcagatcttcatctgtagccaagaagagagcattaaacccaagaacattgtggagaagattgactttgacagtgagtggtgacccacggcctcgggctttggggctaagggggtgcccctcaagggaggccgaggcaggggcccagaggacctgggtagatctgctcgtgttctgggctgggaagtctgcacctgccagattccattcaccttgtgtcttggggctcccgcccaggaggaatagcggggagctgggtgatcttccctggaacttctaggccctgtgtcctgccccatagcactcagcaagacttcctggggcccagcggggcctcacagggggtctctgcacccttatttgtccctgaggcctgtctcgttggccatcttttattctt

SEQ ID NO: 10078 - DNA, 5051 bp, Homo sapiens
  source 1..5051: mol_type = unassigned DNA
agttcccttttccggtcggcgtggtcttgcgagtggagtgtccgctgtgcccgggcctgcaccatgagcgtcccggccttcatcgacatcagtgaagaagatcaggctgctgagcttcgtgcttatctgaaatctaaaggagctgagatttcagaagagaactcggaaggtggacttcatgttgatttagctcaaattattgaagcctgtgatgtgtgtctgaaggaggatgataaagatgttgaaagtgtgatgaacagtgtggtatccctactcttgatcctggaaccagacaagcaagaagctttgattgaaagcctatgtgaaaagctggtcaaatttcgcgaaggtgaacgcccgtctctgagactgcagttgttaagcaaccttttccacgggatggataagaatactcctgtaagatacacagtgtattgcagccttattaaagtggcagcatcttgtggggccatccagtacatcccaactgagctggatcaagttagaaaatggatttctgactggaatctcaccactgaaaaaaagcacacccttttaagactactttatgaggcacttgtggattgtaagaagagtgatgctgcttcaaaagtcatggtggaattgctcggaagttacacagaggacaatgcttcccaggctcgagttgatgcccacaggtgtattgtacgagcattgaaagatccaaatgcatttctttttgaccaccttcttactttaaaaccagtcaagtttttggaaggcgagcttattcatgatcttttaaccatttttgtgagtgctaaattggcatcatatgtcaagttttatcagaataataaagacttcattgattcacttggcctgttacatgaacagaatatggcaaaaatgagactacttacttttatgggaatggcagtagaaaataaggaaatttcttttgacacaatgcagcaagaacttcagattggagctgatgatgttgaagcatttgttattgacgccgtaagaactaaaatggtctactgcaaaattgatcagacccagagaaaagtagttgtcagtcatagcacacatcggacatttggaaaacagcagtggcaacaactgtatgacacacttaatgcctggaaacaaaatctgaacaaagtgaaaaacagccttttgagtctttctgatacctgagtttttatgcttataatttttgttctttgaaaaaaaagccctaaatcatagtaaaacattataaactaaaaaaatttgcctagtctggacagttattgtctcaaatttatactaaaatcacaaactccagaggatatgaagtaataaattacaaggggtcacaatgtctgtcatacaatacataaattctgttctttaaaaaaggatattgaagaagcaatgagcactttaaagaaaggataatatacagagagaagacagaagtagagtaatacaatttcttcacattagaaaaacttggaaaagcaaagacaaactgtagagctttaaatacaacagtcattttattctagtaaaaactataccagaatttcagttacataatttcactactgaaagcacttatctacattattttaatctgttgtttttttccaacgtctcttctgcttttcttttctttggctggttgtcattttctaaacttagtaaattttcacttttatttagttgattcgtaatgaggctctgccagtcatcatcaccagaagtatttttagtcgtcttgattgcctgcaaatggctttgtagtggagttgatatcagaggctttgttttcacctgggaaagataaactaattttaccttcgaaattattatacaaaagattttaaagagtctgtaaagcctctgcagttatgagtatgtggtaaaaccaccatctcttggctgatttccactaccttagtagttctggcaccagaaaagtatacaatgtgaatgtgtaggcttatgtagtagatcttcaaaatctctaatatataactgaagtaaagtgtacaaaaactgccttttactacttcatgtttcctcccatgcttcagaacaccattgttgaagaaacaggaagggcagtgagatatttggaagttggcatgttttcaagacactgtattgggtaattttaaaaatagtgtgttaaataactttttcattttaaggttcttttctgatgttaaaatacttactggaaatttagaaaatagagtaaagtagaaagaaactaaaaatcattagtaatcccttatccagagaggcttgttgacattttggtattatttgctgctagcgtttttttctatttttagcctatttgatcattctatagaattttatgtattttcctctgtgagcagtttcttaggtcattaaaaacaattgtctatggctgcaaaatactcccttttatggatgtttgatatatctcctactactgaatgtttgtttccagtttatccctaccaaaaattaattcgagttaatttcatgcaaaacaatctttgatgtttttgagagattcccagataaaattttctcttcaaaaggaatactgggccaggcactgtgactcatacctgtaatcccagcactttgggaaactgaggcgagtggattgcatgagctcaggagtcgaaaactagcctgagcaacatggcaaaaccccatctctaccaaaaattagctgggcatggtggcatgcaactgtagtcccagctcctcggagggctgaggtgcaaggatcatttgagcccaggaggtgaaggttgcaatgagccaagatcatgccattgcactccagcctggacaacagagtgagaccctctctcaaaaataaataatagataaaacaaaaggaatactgaattgttttcaaaataacaattatggtgggctttcttttaagatagggtctcaccctgtcacctaggctggagtgcagtggcacaatcacagctcattgcagccttgacctccctggattcaggtgatcctcccaccttcacctcctgagtaccttggactacaggcatgtgccaccacacccaggtaatttttgtattttttgccatgttgcccaggctggtctctcttaactcttgggctcaagtgatctgaccatctcggtctcccaaagttctaggattacaggagtgagccatactgtgttgtgttttagttgaaagggatatacacgtgtattttagaaatatgaaacaggataagaattacattaaaatcacccaagatcccaaccaccattaaagagtttgtgtaaatcttctggtctcttttctgtatacactttttaaatactggggtcatatttttattggtttatatgctatgttaaacatttttagcatttcctcctgttcttaagtctgttaagaggatagctccatcatattctgtgttctgcaaattatttctggacatttaaattgtaagaaaatggtcactgttaactaggctgcagtgattatcatttgttcataaatctttgtgaagatctttgggtactgccttacattaaaatctttttcaatttgaccagtaaaagtggcatgttagtaacattgtcattttcagtgttagattatgtagtactaagtttattttattttatttttgagacagagtcttgcactgtcgcccaggctggagtgcagtggcgccatctcagctcactgcaacctccacctcccaggttcaagcgattcttctgcctcagcctcccgagtagctgggattacaggcacccaccacgatgcccagctaattttttgtatttttagtagagacagggtttcactatgttgtccaggctggtctcgaacgcctgacctcatgatccacctgcctcggcctcccaaagtgttgggattacaggcatgagccaccctgcccgacctagtaatacttttttttttttttttttttaatgaacttaaatgtttagaatggtaagttcacggctccctaaggagtgttccttttggattgctctgtttggctccctccctgaaatcctatagtcagccactggtcccctcagagagttttacctctgatctttggggtgattctttgttcatatttatctgattggctttgttcttccaaaagtgtctgcacaggactgctaagagaacctaggcaagtcatttaatttttctgggcttcagtttactcattagcttcttttagttcccagatgctattactggaaagaataactagtaatggataaaaacctacataaatatttcctattttgccatcaaagtgctgggttcattttggtgtatttggcatccaagtacaaattaacagtttcccaaaatcctgattctttgacttttttatcttgatgatggaaaggaaggacacgtttacttgctttagtttctttccccttaactacccacttgctgagaggggtaggagcagggattggctttagagaaacaagatacagtgtagattagctaatgtttgcgcttaacaaaacttgtcctgtttaacttacctgagggttctgcagcctaccgcagtaattttagttctagctgttttcagatatattgccttgtatcttcgttctttcgtctcctatcctttttagaaatttatcacctgtttctctttcagcctgacttacaaaatctaatttttggcctaaaaatttcccctagcttggtactagtccttttatttctgcctgtgattatattttaaaattaaacttaaatgaatctaattcattggatatataaaaaaaaaagtaagtggcttgctttgcttactctggttttccatcctcattcctggatataatcaagattgcagtaggctaacaatctaatgctgaaaacaagaatgaaaaacataccatcttttcaagttactttggacccatagagagaaagtggattggtacttaataccttccctgaatttaacagaattgatgtggactgtacataaaatatgttgaaaaataaaactatttttttggctat

SEQ ID NO: 10079 - DNA, 3978 bp, Homo sapiens
  source 1..3978: mol_type = unassigned DNA
gcgcactgcggcggggctgcgccgcaaccgagctcagccctgtggctcctcctcgctgccctgcgcggattggtggcagacggcaaccgggccgctgattgggcggcgaaggagccattcggggagactctggtgggttcggctgccccaagagtgataagttcggcttcagacacgccttagcgccagcagtgagtcggagctctatggaggtggcagcgggtaccgagtggcggctgcagcagcgactcctctgagctgagtttgaggccgtccccgactccttcctcccccttccctcccccttttttttgttttccgttcccctttcccctcccttccctatccccgacgaccggatcctgaggaggcagctgcggtggcagctgctgagttctcggtgaaggtatttcatttctcctgtcccctcccctccccaccccatctattaatattattcttttgaagattcttcgttgtcaagccgccaaagtggagagtgcgattgcagaagggggtgcttctcgtttcagtgcttcttcgggcggaggaggaagtaggggtgcacctcagcactatcccaagactgctggcaacagcgagttcctggggaaaaccccagggcaaaacgctcagaaatggattcctgcacgaagcactagacgagatgacaactccgcagcaaacaactccgcaaacgaaaaagaacgacatgatgcaatcttcaggaaagtaagaggcatactaaataagcttactcctgaaaagtttgacaagctatgccttgagctcctcaatgtgggtgtagagtctaaactcatccttaaaggggtcatactgctgattgtggacaaagccctagaagagccaaagtatagctcactgtatgctcagctatgtctgcgattggcagaagatgcaccaaactttgatggcccagcagcagagggtcaaccaggacagaagcaaagcaccacattcagacgcctcctaatttccaaattacaagatgaatttgaaaaccgaactagaaatgttgatgtctatgataagcgtgaaaatcccctcctccccgaggaggaggaacagagagccattgctaagatcaagatgttgggaaacatcaaattcattggagagcttggcaagcttgatcttattcacgaatctatccttcataagtgcatcaaaacacttttggaaaagaagaagagagtccaactcaaagatatgggagaggatttggagtgcctctgtcagataatgaggacagtgggacctagattagaccatgaacgagccaagtccttaatggatcagtactttgcccgaatgtgctccttgatgttaagtaaggaattgccagcaaggattcgtttcctgctgcaggataccgtagagttgcgagaacaccattgggttcctcgcaaggcttttcttgacaatggaccaaagacgatcaatcaaattcgtcaagatgcagtaaaagatctaggggtgtttattcctgctcctatggctcaagggatgagaagtgacttctttctggagggaccgttcatgccacccaggatgaaaatggatagggacccacttggaggacttgctgatatgtttggacaaatgccaggtagcggaattggtactggtccaggagttatccaggatagattttcacccaccatgggacgtcatcgttcaaatcaactcttcaatggccatgggggacacatcatgcctcccacacaatcgcagtttggagagatgggaggcaagtttatgaaaagccaggggctaagccagctctaccataaccagagtcagggactcttatcccagctgcaaggacagtcgaaggatatgccacctcggttttctaagaaaggacagcttaatgcagatgagattagcctgaggcctgctcagtcgttcctaatgaataaaaatcaagtgccaaagcttcagccccagataactatgattcctcctagtgcacaaccaccacgcactcaaacaccacctctgggacagacacctcagcttggtctcaaaactaatccaccgcttatccaggaaaagcctgccaagaccagcaaaaagccaccaccgtcaaaggaagaactccttaaactaactgaaactgttgtgactgaatatctaaatagtggaaatgcaaatgaggctgtcaatggtgtaagagaaatgagggctcctaaacactttcttcctgagatgttaagcaaagtaatcatcctgtcactagatagaagcgatgaagataaagaaaaagcaagttctttgatcagtttactcaaacaggaagggatagccacaagtgacaacttcatgcaggctttcctgaatgtattggaccagtgtcccaaactggaggttgacatccctttggtgaaatcctatttagcacagtttgcagctcgtgccatcatttcagagctggtgagcatttcagaactagctcaaccactagaaagtggcacccattttcctctcttcctactttgtcttcagcagttagctaaattacaagatcgagaatggttaacagaactttttcaacaaagcaaggtcaatatgcagaaaatgctcccagaaattgatcagaataaggaccgcatgttggagattttggaaggaaagggactgagtttcttattcccactcctcaaattggagaaggaactgttgaagcaaataaagttggatccatcccctcaaaccatatataaatggattaaagataacatctctcccaaacttcatgtagataaaggatttgtgaacatcttaatgactagcttcttacagtacatttctagtgaagtaaacccccccagcgatgaaacagattcatcctctgctccttccaaagaacagttagagcaggaaaaacaactactactatctttcaagccagtaatgcagaaatttcttcatgatcacgttgatctacaagtcagtgccctgtatgctctccaggtgcactgctataacagcaacttcccaaaaggcatgttacttcgcttttttgtgcacttctatgacatggaaattattgaagaagaagctttcttggcttggaaagaagatataacccaagagtttccgggaaaaggcaaggctttgttccaggtgaatcagtggctaacctggttagaaactgctgaagaagaagaatcagaggaagaagctgactaaagaaccagccaaagccttaaattgtgcaaaacatactgttgctatgatgtaactgcatttgacctaaccactgcgaaaattcattccgctgtaatgttttcacaatatttaaagcagaagcacgtcagttaggatttccttctgcataaggtttttttgtagtgtaatgtcttaatcatagtctaccatcaaatattttaggagtatctttaatgtttagatagtatattagcagcatgcaataattacatcataagttctcaagcagaggcagtctattgcaaggaccttctttgctgccagttatcataggctgttttaagttagaaaactgaatagcaacactgaatactgtagaaatgcactttgctcagtaatacttgagttgttgcaatatttgattatccatttggttgttacagaaaaattcttaactgtaattgatggttgttgccgtaatagtatattgcctgtatttctacctctagtaatgggctttatgtgctagattttaatatccttgagcctgggcaagtgcacaagtctttttaaaagaaacatggtttacttgcacaaaactgatcagttttgagagatcgttaatgcccttgaagtggtttttgtgggtgtgaaacaaatggtgagaatttgaattggtccctcctattatagtattgaaattaagtctacttaatttatcaagtcatgttcatgccctgattttatatacttgtatctatcaataaacattgtgatacttga

SEQ ID NO: 10080 - DNA, 2926 bp, Homo sapiens
  source 1..2926: mol_type = unassigned DNA
gcgccagcagtgagtcggagctctatggaggtggcagcgggtaccgagtggcggctgcagcagcgactcctctgagctgagtttgaggccgtccccgactccttcctcccccttccctcccccttttttttgttttccgttcccctttcccctcccttccctatccccgacgaccggatcctgaggaggcagctgcggtggcagctgctgagttctcggtgaaggtatttcatttctcctgtcccctcccctccccaccccatctattaatattattcttttgaagattcttcgttgtcaagccgccaaagtggagagtgcgattgcagaagggggtgcttctcgtttcagtgcttcttcgggcggaggaggaagtaggggtgcacctcagcactatcccaagactgctggcaacagcgagttcctggggaaaaccccagggcaaaacgctcagaaatggattcctgcacgaagcactagacgagatgacaactccgcagcaaacaactccgcaaacgaaaaagaacgacatgatgcaatcttcaggaaagtaagaggcatactaaataagcttactcctgaaaagtttgacaagctatgccttgagctcctcaatgtgggtgtagagtctaaactcatccttaaaggggtcatactgctgattgtggacaaagccctagaagagccaaagtatagctcactgtatgctcagctatgtctgcgattggcagaagatgcaccaaactttgatggcccagcagcagagggtcaaccaggacagaagcaaagcaccacattcagacgcctcctaatttccaaattacaagatgaatttgaaaaccgaactagaaatgttgatgtctatgataagcgtgaaaatcccctcctccccgaggaggaggaacagagagccattgctaagatcaagatgttgggaaacatcaaattcattggagagcttggcaagcttgatcttattcacgaatctatccttcataagtgcatcaaaacacttttggaaaagaagaagagagtccaactcaaagatatgggagaggatttggagtgcctctgtcagataatgaggacagtgggacctagattagaccatgaacgagccaagtccttaatggatcagtactttgcccgaatgtgctccttgatgttaagtaaggaattgccagcaaggattcgtttcctgctgcaggataccgtagagttgcgagaacaccattgggttcctcgcaaggcttttcttgacaatggaccaaagacgatcaatcaaattcgtcaagatgcagtaaaagatctaggggtgtttattcctgctcctatggctcaagggatgagaagtgacttctttctggagggaccgttcatgccacccaggatgaaaatggatagggacccacttggaggacttgctgatatgtttggacaaatgccaggtagcggaattggtactggtccaggagttatccaggatagattttcacccaccatgggacgtcatcgttcaaatcaactcttcaatggccatgggggacacatcatgcctcccacacaatcgcagtttggagagatgggaggcaagtttatgaaaagccaggggctaagccagctctaccataaccagagtcagggactcttatcccagctgcaaggacagtcgaaggatatgccacctcggttttctaagaaaggacagcttaatgcagatgagattagcctgaggcctgctcagtcgttcctaatgaataaaaatcaagtgccaaagcttcagccccagataactatgattcctcctagtgcacaaccaccacgcactcaaacaccacctctgggacagacacctcagcttggtctcaaaactaatccaccgcttatccaggaaaagcctgccaagaccagcaaaaagccaccaccgtcaaaggaagaactccttaaactaactgaaactgttgtgactgaatatctaaatagtggaaatgcaaatgaggctgtcaatggtgtaagagaaatgagggctcctaaacactttcttcctgagatgttaagcaaagtaatcatcctgtcactagatagaagcgatgaagataaagaaaaagcaagttctttgatcagtttactcaaacaggaagggatagccacaagtgacaacttcatgcaggctttcctgaatgtattggaccagtgtcccaaactggaggttgacatccctttggtgaaatcctatttagcacagtttgcagctcgtgccatcatttcagagctggtgagcatttcagaactagctcaaccactagaaagtggcacccattttcctctcttcctactttgtcttcagcagttagctaaattacaagatcgagaatggttaacagaactttttcaacaaagcaaggtcaatatgcagaaaatgctcccagaaattgatcagaataaggaccgcatgttggagattttggaaggaaagggactgagtttcttattcccactcctcaaattggagaaggaactgttgaagcaaataaagttggatccatcccctcaaaccatatataaatggattaaagataacatctctcccaaacttcatgtagataaaggatttgtgaacatcttaatgactagcttcttacagtacatttctagtgaagtaaacccccccagcgatgaaacagattcatcctctgctccttccaaagaacagttagagcaggaaaaacaactactactatctttcaagccagtaatgcagaaatttcttcatgatcacgttgatctacaagtcagtgccctgtatgctctccaggtgcactgctataacagcaacttcccaaaaggcatgttactttttttgtgcacttctatgacatggaaattattgaagaagaagctttcttggcttggaaagaagatataa

SEQ ID NO: 10081 - DNA, 3346 bp, Homo sapiens
  source 1..3346: mol_type = unassigned DNA
gaaggtatttcatttctcctgtcccctcccctccccaccccatctattaatattattcttttgaagattcttcgttgtcaagccgccaaagtggagagtgcgattgcagaagggggtgcttctcgtttcagtgcttcttcgggcggaggaggaagtaggggtgcacctcagcactatcccaagactgctggcaacagcgagttcctggggaaaaccccagggcaaaacgctcagaaatggattcctgcacgaagcactagacgagatgacaactccgcagcaaacaactccgcaaacgaaaaagaacgacatgatgcaatcttcaggaaagtaagaggcatactaaataagcttactcctgaaaagtttgacaagctatgccttgagctcctcaatgtgggtgtagagtctaaactcatccttaaaggggtcatactgctgattgtggacaaagccctagaagagccaaagtatagctcactgtatgctcagctatgtctgcgattggcagaagatgcaccaaactttgatggcccagcagcagagggtcaaccaggacagaagcaaagcaccacattcagacgcctcctaatttccaaattacaagatgaatttgaaaaccgaactagaaatgttgatgtctatgataagcgtgaaaatcccctcctccccgaggaggaggaacagagagccattgctaagatcaagatgttgggaaacatcaaattcattggagagcttggcaagcttgatcttattcacgaatctatccttcataagtgcatcaaaacacttttggaaaagaagaagagagtccaactcaaagatatgggagaggatttggagtgcctctgtcagataatgaggacagtgggacctagattagaccatgaacgagccaagtccttaatggatcagtactttgcccgaatgtgctccttgatgttaagtaaggaattgccagcaaggattcgtttcctgctgcaggataccgtagagttgcgagaacaccattgggttcctcgcaaggcttttcttgacaatggaccaaagacgatcaatcaaattcgtcaagatgcagtaaaagatctaggggtgtttattcctgctcctatggctcaagggatgagaagtgacttctttctggagggaccgttcatgccacccaggatgaaaatggatagggacccacttggaggacttgctgatatgtttggacaaatgccaggtagcggaattggtactggtccaggagttatccaggatagattttcacccaccatgggacgtcatcgttcaaatcaactcttcaatggccatgggggacacatcatgcctcccacacaatcgcagtttggagagatgggaggcaagtttatgaaaagccagattagcctgaggcctgctcagtcgttcctaatgaataaaaatcaagtgccaaagcttcagccccagataactatgattcctcctagtgcacaaccaccacgcactcaaacaccacctctgggacagacacctcagcttggtctcaaaactaatccaccgcttatccaggaaaagcctgccaagaccagcaaaaagccaccaccgtcaaaggaagaactccttaaactaactgaaactgttgtgactgaatatctaaatagtggaaatgcaaatgaggctgtcaatggtgtaagagaaatgagggctcctaaacactttcttcctgagatgttaagcaaagtaatcatcctgtcactagatagaagcgatgaagataaagaaaaagcaagttctttgatcagtttactcaaacaggaagggatagccacaagtgacaacttcatgcaggctttcctgaatgtattggaccagtgtcccaaactggaggttgacatccctttggtgaaatcctatttagcacagtttgcagctcgtgccatcatttcagagctggtgagcatttcagaactagctcaaccactagaaagtggcacccattttcctctcttcctactttgtcttcagcagttagctaaattacaagatcgagaatggttaacagaactttttcaacaaagcaaggtcaatatgcagaaaatgctcccagaaattgatcagaataaggaccgcatgttggagattttggaaggaaagggactgagtttcttattcccactcctcaaattggagaaggaactgttgaagcaaataaagttggatccatcccctcaaaccatatataaatggattaaagataacatctctcccaaacttcatgtagataaaggatttgtgaacatcttaatgactagcttcttacagtacatttctagtgaagtaaacccccccagcgatgaaacagattcatcctctgctccttccaaagaacagttagagcaggaaaaacaactactactatctttcaagccagtaatgcagaaatttcttcatgatcacgttgatctacaagtcagtgccctgtatgctctccaggtgcactgctataacagcaacttcccaaaaggcatgttacttcgcttttttgtgcacttctatgacatggaaattattgaagaagaagctttcttggcttggaaagaagatataacccaagagtttccgggaaaaggcaaggctttgttccaggtgaatcagtggctaacctggttagaaactgctgaagaagaagaatcagaggaagaagctgactaaagaaccagccaaagccttaaattgtgcaaaacatactgttgctatgatgtaactgcatttgacctaaccactgcgaaaattcattccgctgtaatgttttcacaatatttaaagcagaagcacgtcagttaggatttccttctgcataaggtttttttgtagtgtaatgtcttaatcatagtctaccatcaaatattttaggagtatctttaatgtttagatagtatattagcagcatgcaataattacatcataagttctcaagcagaggcagtctattgcaaggaccttctttgctgccagttatcataggctgttttaagttagaaaactgaatagcaacactgaatactgtagaaatgcactttgctcagtaatacttgagttgttgcaatatttgattatccatttggttgttacagaaaaattcttaactgtaattgatggttgttgccgtaatagtatattgcctgtatttctacctctagtaatgggctttatgtgctagattttaatatccttgagcctgggcaagtgcacaagtctttttaaaagaaacatggtttacttgcacaaaactgatcagttttgagagatcgttaatgcccttgaagtggtttttgtgggtgtgaaacaaatggtgaga

SEQ ID NO: 10082 - DNA, 3045 bp, Homo sapiens
  source 1..3045: mol_type = unassigned DNA
agtgttggccaggccgccgtgcggtcatggccggatggccgacgcctgcagggacgaggccgtggcggaccgaggcacggctgtgctcggacggcgagggagcgtggctcggaccgctagcgccgtggcgggaggcacgcctggcctcccggcggggaggtatttcatttctcctgtcccctcccctccccaccccatctattaatattattcttttgaagattcttcgttgtcaagccgccaaagtggagagtgcgattgcagaagggggtgcttctcgtttcagtgcttcttcgggcggaggaggaagtaggggtgcacctcagcactatcccaagactgctggcaacagcgagttcctggggaaaaccccagggcaaaacgctcagaaatggattcctgcacgaagcactagacgagatgacaactccgcagcaaacaactccgcaaacgaaaaagaacgacatgatgcaatcttcaggaaagtaagaggcatactaaataagcttactcctgaaaagtttgacaagctatgccttgagctcctcaatgtgggtgtagagtctaaactcatccttaaaggggtcatactgctgattgtggacaaagccctagaagagccaaagtatagctcactgtatgctcagctatgtctgcgattggcagaagatgcaccaaactttgatggcccagcagcagagggtcaaccaggacagaagcaaagcaccacattcagacgcctcctaatttccaaattacaagatgaatttgaaaaccgaactagaaatgttgatgtctatgataagcgtgaaaatcccctcctccccgaggaggaggaacagagagccattgctaagatcaagatgttgggaaacatcaaattcattggagagcttggcaagcttgatcttattcacgaatctatccttcataagtgcatcaaaacacttttggaaaagaagaagagagtccaactcaaagatatgggagaggatttggagtgcctctgtcagataatgaggacagtgggacctagattagaccatgaacgagccaagtccttaatggatcagtactttgcccgaatgtgctccttgatgttaagtaaggaattgccagcaaggattcgtttcctgctgcaggataccgtagagttgcgagaacaccattgggttcctcgcaaggcttttcttgacaatggaccaaagacgatcaatcaaattcgtcaagatgcagtaaaagatctaggggtgtttattcctgctcctatggctcaagggatgagaagtgacttctttctggagggaccgttcatgccacccaggatgaaaatggatagggacccacttggaggacttgctgatatgtttggacaaatgccaggtagcggaattggtactggtccaggagttatccaggatagattttcacccaccatgggacgtcatcgttcaaatcaactcttcaatggccatgggggacacatcatgcctcccacacaatcgcagtttggagagatgggaggcaagtttatgaaaagccaggggctaagccagctctaccataaccagagtcagggactcttatcccagctgcaaggacagtcgaaggatatgccacctcggttttctaagaaaggacagcttaatgcagatgagattagcctgaggcctgctcagtcgttcctaatgaataaaaatcaagtgccaaagcttcagccccagataactatgattcctcctagtgcacaaccaccacgcactcaaacaccacctctgggacagacacctcagcttggtctcaaaactaatccaccgcttatccaggaaaagcctgccaagaccagcaaaaagccaccaccgtcaaaggaagaactccttaaactaactgaaactgttgtgactgaatatctaaatagtggaaatgcaaatgaggctgtcaatggtgtaagagaaatgagggctcctaaacactttcttcctgagatgttaagcaaagtaatcatcctgtcactagatagaagcgatgaagataaagaaaaagcaagttctttgatcagtttactcaaacaggaagggatagccacaagtgacaacttcatgcaggctttcctgaatgtattggaccagtgtcccaaactggaggttgacatccctttggtgaaatcctatttagcacagtttgcagctcgtgccatcatttcagagctggtgagcatttcagaactagctcaaccactagaaagtggcacccattttcctctcttcctactttgtcttcagcagttagctaaattacaagatcgagaatggttaacagaactttttcaacaaagcaaggtcaatatgcagaaaatgctcccagaaattgatcagaataaggaccgcatgttggagattttggaaggaaagggactgagtttcttattcccactcctcaaattggagaaggaactgttgaagcaaataaagttggatccatcccctcaaaccatatataaatggattaaagataacatctctcccaaacttcatgtagataaaggatttgtgaacatcttaatgactagcttcttacagtacatttctagtgaagtaaacccccccagcgatgaaacagattcatcctctgctccttccaaagaacagttagagcaggaaaaacaactactactatctttcaagccagtaatgcagaaatttcttcatgatcacgttgatctacaagtcagtgccctgtatgctctccaggtgcactgctataacagcaacttcccaaaaggcatgttacttcgcttttttgtgcacttctatgacatggaaattattgaagaagaagctttcttggcttggaaagaagatataacccaagagtttccgggaaaaggcaaggctttgttccaggtgaatcagtggctaacctggttagaaactgctgaagaagaagaatcagaggaagaagctgactaaagaaccagccaaagccttaaattgtgcaaaacatactgttgctatgatgtaactgcatttgacctaaccactgcga

SEQ ID NO: 10083 - DNA, 1286 bp, Homo sapiens
  source 1..1286: mol_type = unassigned DNA
agacacgccttagcgccagcagtgagtcggagctctatggaggtggcagcgggtaccgagtggcggctgcagcagcgactcctctgagctgagtttgaggccgtccccgactccttcctcccccttccctcccccttttttttgttttccgttcccctttcccctcccttccctatccccgacgaccggatcctgaggaggcagctgcggtggcagctgctgagttctcggtgaagaaggaaaacgtcagtgttggccaggccgccgtgcggtcatggccggatggccgacgcctgcagggacgaggccgtggcggaccgaggcacggctgtgctcggacggcgagggagcgtggctcggaccgctagcgccgtggcgggaggcacgcgggccggcagggaaggccaggccgttggcgcgggaccagggaaccgcaggcgtcccggagcctggcctcccggcggggaggtatttcatttctcctgtcccctcccctccccaccccatctattaatattattcttttgaagattcttcgttgtcaagccgccaaagtggagagtgcgattgcagaagggggtgcttctcgtttcagtgcttcttcgggcggaggaggaagtaggggtgcacctcagcactatcccaagactgctggcaacagcgagttcctggggaaaaccccagggcaaaacgctcagaaatggattcctgcacgaagcactagacgagatgacaactccgcagcaaacaactccgcaaacgaaaaagaacgacatgatgcaatcttcaggaaagtaagaggcatactaaataagcttactcctgaaaagtttgacaagctatgccttgagctcctcaatgtgggtgtagagtctaaactcatccttaaaggggtcatactgctgattgtggacaaagccctagaagagccaaagtatagctcactgtatgctcagctatgtctgcgattggcagaagatgcaccaaactttgatggcccagcagcagagggtcaaccaggacagaagcaaagcaccacattcagacgcctcctaatttccaaattacaagatgaatttgaaaaccgaactagaaatgttgatgtctatgataagcgtgaaaatcccctcctccccgaggaggaggaacagagagccattgctaagatcaagatgttgggaaacatcaaattcattggagagcttggcaagcttgatcttattcacgaatctatccttcataagtgcatcaaaacacttttggaaaagaagaagagagtccaactc

SEQ ID NO: 10084 - DNA, 3654 bp, Homo sapiens
  source 1..3654: mol_type = unassigned DNA
ctgaaatacgttgtaattgaatgaaggcttatagatctgtatgttagcagtgtctaattttggtgctctttctcgttccaggtatttcatttctcctgtcccctcccctccccaccccatctattaatattattcttttgaagattcttcgttgtcaagccgccaaagtggagagtgcgattgcagaagggggtgcttctcgtttcagtgcttcttcgggcggaggaggaagtaggggtgcacctcagcactatcccaagactgctggcaacagcgagttcctggggaaaaccccagggcaaaacgctcagaaatggattcctgcacgaagcactagacgagatgacaactccgcagcaaacaactccgcaaacgaaaaagaacgacatgatgcaatcttcaggaaagtaagaggcatactaaataagcttactcctgaaaagtttgacaagctatgccttgagctcctcaatgtgggtgtagagtctaaactcatccttaaaggggtcatactgctgattgtggacaaagccctagaagagccaaagtatagctcactgtatgctcagctatgtctgcgattggcagaagatgcaccaaactttgatggcccagcagcagagggtcaaccaggacagaagcaaagcaccacattcagacgcctcctaatttccaaattacaagatgaatttgaaaaccgaactagaaatgttgatgtctatgataagcgtgaaaatcccctcctccccgaggaggaggaacagagagccattgctaagatcaagatgttgggaaacatcaaattcattggagagcttggcaagcttgatcttattcacgaatctatccttcataagtgcatcaaaacacttttggaaaagaagaagagagtccaactcaaagatatgggagaggatttggagtgcctctgtcagataatgaggacagtgggacctagattagaccatgaacgagccaagtccttaatggatcagtactttgcccgaatgtgctccttgatgttaagtaaggaattgccagcaaggattcgtttcctgctgcaggataccgtagagttgcgagaacaccattgggttcctcgcaaggcttttcttgacaatggaccaaagacgatcaatcaaattcgtcaagatgcagtaaaagatctaggggtgtttattcctgctcctatggctcaagggatgagaagtgacttctttctggagggaccgttcatgccacccaggatgaaaatggatagggacccacttggaggacttgctgatatgtttggacaaatgccaggtagcggaattggtactggtccaggagttatccaggatagattttcacccaccatgggacgtcatcgttcaaatcaactcttcaatggccatgggggacacatcatgcctcccacacaatcgcagtttggagagatgggaggcaagtttatgaaaagccaggggctaagccagctctaccataaccagagtcagggactcttatcccagctgcaaggacagtcgaaggatatgccacctcggttttctaagaaaggacagcttaatgcagatgagattagcctgaggcctgctcagtcgttcctaatgaataaaaatcaagtgccaaagcttcagccccagataactatgattcctcctagtgcacaaccaccacgcactcaaacaccacctctgggacagacacctcagcttggtctcaaaactaatccaccgcttatccaggaaaagcctgccaagaccagcaaaaagccaccaccgtcaaaggaagaactccttaaactaactgaaactgttgtgactgaatatctaaatagtggaaatgcaaatgaggctgtcaatggtgtaagagaaatgagggctcctaaacactttcttcctgagatgttaagcaaagtaatcatcctgtcactagatagaagcgatgaagataaagaaaaagcaagttctttgatcagtttactcaaacaggaagggatagccacaagtgacaacttcatgcaggctttcctgaatgtattggaccagtgtcccaaactggaggttgacatccctttggtgaaatcctatttagcacagtttgcagctcgtgccatcatttcagagctggtgagcatttcagaactagctcaaccactagaaagtggcacccattttcctctcttcctactttgtcttcagcagttagctaaattacaagatcgagaatggttaacagaactttttcaacaaagcaaggtcaatatgcagaaaatgctcccagaaattgatcagaataaggaccgcatgttggagattttggaaggaaagggactgagtttcttattcccactcctcaaattggagaaggaactgttgaagcaaataaagttggatccatcccctcaaaccatatataaatggattaaagataacatctctcccaaacttcatgtagataaaggatttgtgaacatcttaatgactagcttcttacagtacatttctagtgaagtaaacccccccagcgatgaaacagattcatcctctgctccttccaaagaacagttagagcaggaaaaacaactactactatctttcaagccagtaatgcagaaatttcttcatgatcacgttgatctacaagtcagtgccctgtatgctctccaggtgcactgctataacagcaacttcccaaaaggcatgttacttcgcttttttgtgcacttctatgacatggaaattattgaagaagaagctttcttggcttggaaagaagatataacccaagagtttccgggaaaaggcaaggctttgttccaggtgaatcagtggctaacctggttagaaactgctgaagaagaagaatcagaggaagaagctgactaaagaaccagccaaagccttaaattgtgcaaaacatactgttgctatgatgtaactgcatttgacctaaccactgcgaaaattcattccgctgtaatgttttcacaatatttaaagcagaagcacgtcagttaggatttccttctgcataaggtttttttgtagtgtaatgtcttaatcatagtctaccatcaaatattttaggagtatctttaatgtttagatagtatattagcagcatgcaataattacatcataagttctcaagcagaggcagtctattgcaaggaccttctttgctgccagttatcataggctgttttaagttagaaaactgaatagcaacactgaatactgtagaaatgcactttgctcagtaatacttgagttgttgcaatatttgattatccatttggttgttacagaaaaattcttaactgtaattgatggttgttgccgtaatagtatattgcctgtatttctacctctagtaatgggctttatgtgctagattttaatatccttgagcctgggcaagtgcacaagtctttttaaaagaaacatggtttacttgcacaaaactgatcagttttgagagatcgttaatgcccttgaagtggtttttgtgggtgtgaaacaaatggtgagaatttgaattggtccctcctattatagtattgaaattaagtctacttaatttatcaagtcatgttcatgccctgattttatatacttgtatctatcaataaacattgtgatacttgat

SEQ ID NO: 10085 - DNA, 4001 bp, Homo sapiens
  source 1..4001: mol_type = unassigned DNA
gggaggaatgctccgctcttttgttcccaggaagggaaaaacggggcggaggttcctgctgccatgttgtggccctggtcttccgcctgcaagtgctagtcctgtacacccggccccctctcgcgcgtctttccacgagctctccacggggaggaggcgaaagggtggacaggggaaaactgctgaagagctttcggagagacctcatctagtcgctggcctcgtcaaggcagtaaaaattcctagggcagacattttccacgtgatgttgctcgtgtctgtagttagacttttctattgatctcagtgctcagttttaaagatagtagaatgtggctttttcaaaagattcgttctgagccgtttaaaatgctcttgtgttctacgaagtctctttgcatccttgaacaccggggaatttccaggtatttcatttctcctgtcccctcccctccccaccccatctattaatattattcttttgaagattcttcgttgtcaagccgccaaagtggagagtgcgattgcagaagggggtgcttctcgtttcagtgcttcttcgggcggaggaggaagtaggggtgcacctcagcactatcccaagactgctggcaacagcgagttcctggggaaaaccccagggcaaaacgctcagaaatggattcctgcacgaagcactagacgagatgacaactccgcagcaaacaactccgcaaacgaaaaagaacgacatgatgcaatcttcaggaaagtaagaggcatactaaataagcttactcctgaaaagtttgacaagctatgccttgagctcctcaatgtgggtgtagagtctaaactcatccttaaaggggtcatactgctgattgtggacaaagccctagaagagccaaagtatagctcactgtatgctcagctatgtctgcgattggcagaagatgcaccaaactttgatggcccagcagcagagggtcaaccaggacagaagcaaagcaccacattcagacgcctcctaatttccaaattacaagatgaatttgaaaaccgaactagaaatgttgatgtctatgataagcgtgaaaatcccctcctccccgaggaggaggaacagagagccattgctaagatcaagatgttgggaaacatcaaattcattggagagcttggcaagcttgatcttattcacgaatctatccttcataagtgcatcaaaacacttttggaaaagaagaagagagtccaactcaaagatatgggagaggatttggagtgcctctgtcagataatgaggacagtgggacctagattagaccatgaacgagccaagtccttaatggatcagtactttgcccgaatgtgctccttgatgttaagtaaggaattgccagcaaggattcgtttcctgctgcaggataccgtagagttgcgagaacaccattgggttcctcgcaaggcttttcttgacaatggaccaaagacgatcaatcaaattcgtcaagatgcagtaaaagatctaggggtgtttattcctgctcctatggctcaagggatgagaagtgacttctttctggagggaccgttcatgccacccaggatgaaaatggatagggacccacttggaggacttgctgatatgtttggacaaatgccaggtagcggaattggtactggtccaggagttatccaggatagattttcacccaccatgggacgtcatcgttcaaatcaactcttcaatggccatgggggacacatcatgcctcccacacaatcgcagtttggagagatgggaggcaagtttatgaaaagccaggggctaagccagctctaccataaccagagtcagggactcttatcccagctgcaaggacagtcgaaggatatgccacctcggttttctaagaaaggacagcttaatgcagatgagattagcctgaggcctgctcagtcgttcctaatgaataaaaatcaagtgccaaagcttcagccccagataactatgattcctcctagtgcacaaccaccacgcactcaaacaccacctctgggacagacacctcagcttggtctcaaaactaatccaccgcttatccaggaaaagcctgccaagaccagcaaaaagccaccaccgtcaaaggaagaactccttaaactaactgaaactgttgtgactgaatatctaaatagtggaaatgcaaatgaggctgtcaatggtgtaagagaaatgagggctcctaaacactttcttcctgagatgttaagcaaagtaatcatcctgtcactagatagaagcgatgaagataaagaaaaagcaagttctttgatcagtttactcaaacaggaagggatagccacaagtgacaacttcatgcaggctttcctgaatgtattggaccagtgtcccaaactggaggttgacatccctttggtgaaatcctatttagcacagtttgcagctcgtgccatcatttcagagctggtgagcatttcagaactagctcaaccactagaaagtggcacccattttcctctcttcctactttgtcttcagcagttagctaaattacaagatcgagaatggttaacagaactttttcaacaaagcaaggtcaatatgcagaaaatgctcccagaaattgatcagaataaggaccgcatgttggagattttggaaggaaagggactgagtttcttattcccactcctcaaattggagaaggaactgttgaagcaaataaagttggatccatcccctcaaaccatatataaatggattaaagataacatctctcccaaacttcatgtagataaaggatttgtgaacatcttaatgactagcttcttacagtacatttctagtgaagtaaacccccccagcgatgaaacagattcatcctctgctccttccaaagaacagttagagcaggaaaaacaactactactatctttcaagccagtaatgcagaaatttcttcatgatcacgttgatctacaagtcagtgccctgtatgctctccaggtgcactgctataacagcaacttcccaaaaggcatgttacttcgcttttttgtgcacttctatgacatggaaattattgaagaagaagctttcttggcttggaaagaagatataacccaagagtttccgggaaaaggcaaggctttgttccaggtgaatcagtggctaacctggttagaaactgctgaagaagaagaatcagaggaagaagctgactaaagaaccagccaaagccttaaattgtgcaaaacatactgttgctatgatgtaactgcatttgacctaaccactgcgaaaattcattccgctgtaatgttttcacaatatttaaagcagaagcacgtcagttaggatttccttctgcataaggtttttttgtagtgtaatgtcttaatcatagtctaccatcaaatattttaggagtatctttaatgtttagatagtatattagcagcatgcaataattacatcataagttctcaagcagaggcagtctattgcaaggaccttctttgctgccagttatcataggctgttttaagttagaaaactgaatagcaacactgaatactgtagaaatgcactttgctcagtaatacttgagttgttgcaatatttgattatccatttggttgttacagaaaaattcttaactgtaattgatggttgttgccgtaatagtatattgcctgtatttctacctctagtaatgggctttatgtgctagattttaatatccttgagcctgggcaagtgcacaagtctttttaaaagaaacatggtttacttgcacaaaactgatcagttttgagagatcgttaatgcccttgaagtggtttttgtgggtgtgaaacaaatggtgagaatttgaattggtccctcctattatagtattgaaattaagtctacttaatttatcaagtcatgttcatgccctgattttatatacttgtatctatcaataaacattgtgatacttgatgta

SEQ ID NO: 10086 - DNA, 581 bp, Homo sapiens
  source 1..581: mol_type = unassigned DNA
gtgagtcggagctctatggaggtggcagcgggtaccgagtggcggctgcagcagcgactcctctgagctgagtttgaggccgtccccgactccttcctcccccttccctcccccttttttttgtatttcatttctcctgtcccctcccctccccaccccatctattaatattattcttttgaagattcttcgttgtcaagccgccaaagtggagagtgcgattgcagaagggggtgcttctcgtttcagtgcttcttcgggcggaggaggaagtaggggtgcacctcagcactatcccaagactgctggcaacagcgagttcctggggaaaaccccagggcaaaacgctcagaaatggattcctgcacgaagcactagacgagatgacaactccgcagcaaacaactccgcaaacgaaaaagaacgacatgatgcaatcttcaggaaagtaagaggcatactaaataagcttactcctgaaaagtttgacaagctatgccttgagctcctcaatgtgggtgtagagtctaaactcatccttaaaggggtcatactgctgattgtggacaaagccctagaag

SEQ ID NO: 10087 - DNA, 555 bp, Homo sapiens
  source 1..555: mol_type = unassigned DNA
agtcctgtacacccggccccctctcgcgcgtctttccacgagctctccacggggaggaggcgaaagggtggacaggggaaaactgctgaagagctttcggagagacctcatctagtcgctggcctcgtcaaggtatttcatttctcctgtcccctcccctccccaccccatctattaatattattcttttgaagattcttcgttgtcaagccgccaaagtggagagtgcgattgcagaagggggtgcttctcgtttcagtgcttcttcgggcggaggaggaagtaggggtgcacctcagcactatcccaagactgctggcaacagcgagttcctggggaaaaccccagggcaaaacgctcagaaatggattcctgcacgaagcactagacgagatgacaactccgcagcaaacaactccgcaaacgaaaaagaacgacatgatgcaatcttcaggaaagtaagaggcatactaaataagcttactcctgaaaagtttgacaagctatgccttgagctcctcaatgtgggtgtagagtctaaactcatccttaaag

SEQ ID NO: 10088 - DNA, 591 bp, Homo sapiens
  source 1..591: mol_type = unassigned DNA
agcagtgagtcggagctctatggaggtggcagcgggtaccgagtggcggctgcagcagcgactcctctgagctgagtttgaggccgtccccgactccttcctcccccttccctcccccttttttttgttttccgttcccctttcccctcccttccctatccccgacgaccggatcctgaggaggcagctgcggtggcagctgctgagttctcggtgaagattcttcgttgtcaagccgccaaagtggagagtgcgattgcagaagggggtgcttctcgtttcagtgcttcttcgggcggaggaggaagtaggggtgcacctcagcactatcccaagactgctggcaacagcgagttcctggggaaaaccccagggcaaaacgctcagaaatggattcctgcacgaagcactagacgagatgacaactccgcagcaaacaactccgcaaacgaaaaagaacgacatgatgcaatcttcaggaaagtaagaggcatactaaataagcttactcctgaaaagtttgacaagctatgccttgagctcctcaatgtgggtgtagagtctaaactcatccttaaaggggtcatactg

SEQ ID NO: 10089 - DNA, 1969 bp, Homo sapiens
  source 1..1969: mol_type = unassigned DNA
aaagagctgggcgccgggctggcgggggtggcctcagctgctcctccccgtcgagcgacccgggcctcgcggggaggttgtcggaagcacttccctaacttgcgcctgggtgggaggaatgctccgctcttttgttcccaggaagggaaaaacggggcggaggttcctgctgccatgttgtggccctggtcttccgcctgcaagtgctagtcctgtacacccggccccctctcgcgcgtctttccacgagctctccacggggaggaggcgaaagggtggacaggggaaaactgctgaagagctttcggagagacctcatctagtcgctggcctcgtcaaggcagtaaaaattcctagggcagacattttccacgtgatgttgctcgtgtctgtagttagacttttctattgatctcagtgctcagttttaaagatagtagaatgtggctttttcaaaagattcgttctgagccgtttaaaatgctcttgtgttctacgaagtctctttgcatccttgaacaccggggaatttccaggtggctaaacaaaatgtatttcatttctcctgtcccctcccctccccaccccatctattaatattattcttttgaagattcttcgttgtcaagccgccaaagtggagagtgcgattgcagaagggggtgcttctcgtttcagtgcttcttcgggcggaggaggaagtaggggtgcacctcagcactatcccaagactgctggcaacagcgagttcctggggaaaaccccagggcaaaacgctcagaaatggattcctgcacgaagcactagacgagatgacaactccgcagcaaacaactccgcaaacgaaaaagaacgacatgatgcaatcttcaggaaagtaagaggcatactaaataagcttactcctgaaaagtttgacaagctatgccttgagctcctcaatgtgggtgtagagtctaaactcatccttaaaggggtcatactgctgattgtggacaaagccctagaagagccaaagtatagctcactgtatgctcagctatgtctgcgattggcagaagatgcaccaaactttgatggcccagcagcagagggtcaaccaggacagaagcaaagcaccacattcagacgcctcctaatttccaaattacaagatgaatttgaaaaccgaactagaaatgttgatgtctatgataagcgtgaaaatcccctcctccccgaggaggaggaacagagagccattgctaagatcaagatgttgggaaacatcaaattcattggagagcttggcaagcttgatcttattcacgaatctatccttcataagtgcatcaaaacacttttggaaaagaagaagagagtccaactcaaagatatgggagaggatttggagtgcctctgtcagataatgaggacagtgggacctagattagaccatgaacgagccaagtccttaatggatcagtactttgcccgaatgtgctccttgatgttaagtaaggaattgccagcaaggattcgtttcctgctgcaggataccgtagagttgcgagaacaccattgggttcctcgcaaggcttttcttgacaatggaccaaagacgatcaatcaaattcgtcaagatgcagtaaaagatctaggggtgtttattcctgctcctatggctcaagggatgagaagtgacttctttctggagggaccgttcatgccacccaggatgaaaatggatagggacccacttggaggacttgctgatatgtttggacaaatgccaggtagcggaattggtactggtccaggagttatccaggatagattttcacccaccatgggacgtcatcgttcaaatcaactcttcaatggccatgggggacacatcatgcctcccacacaatcgcagtttggagagatgggaggcaagtttatgaaaagccagattagcctgaggcctgctcagtcgttcctaatg

SEQ ID NO: 10090 - DNA, 1069 bp, Homo sapiens
  source 1..1069: mol_type = unassigned DNA
aggcgtcccggagcctggcctcccggcggggaggtgtgtaggacctggagtcggcaggggctgcccttcgtcggggaggaaagagagagtgatgatttctgccccttttgtcagcagaggaggccgtggcgaggcggtatttcatttctcctgtcccctcccctccccaccccatctattaatattattcttttgaagattcttcgttgtcaagccgccaaagtggagagtgcgattgcagaagggggtgcttctcgtttcagtgcttcttcgggcggaggaggaagtaggggtgcacctcagcactatcccaagactgctggcaacagcgagttcctggggaaaaccccagggcaaaacgctcagaaatggattcctgcacgaagcactagacgagatgacaactccgcagcaaacaactccgcaaacgaaaaagaacgacatgatgcaatcttcaggaaagtaagaggcatactaaataagcttactcctgaaaagtttgacaagctatgccttgagctcctcaatgtgggtgtagagtctaaactcatccttaaaggggtcatactgctgattgtggacaaagccctagaagagccaaagtatagctcactgtatgctcagctatgtctgcgattggcagaagatgcaccaaactttgatggcccagcagcagagggtcaaccaggacagaagcaaagcaccacattcagacgcctcctaatttccaaattacaagatgaatttgaaaaccgaactagaaatgttgatgtctatgataagcgtgaaaatcccctcctccccgaggaggaggaacagagagccattgctaagatcaagatgttgggaaacatcaaattcattggagagcttggcaagcttgatcttattcacgaatctatccttcataagtgcatcaaaacacttttggaaaagaagaagagagtccaactcaaagatatgggagaggatttggagtgcctctgtcagataatgaggacagtgggacctagattagaccatgaacgagccaagtccttaatggatcagtactttgcccgaatgtgct

SEQ ID NO: 10091 - DNA, 573 bp, Homo sapiens
  source 1..573: mol_type = unassigned DNA
agacacgccttagcgccagcagtgagtcggagctctatggaggtggcagcgggtaccgagaggcagctgcggtggcagctgctgagttctcggtgaaggtatttcatttctcctgtcccctcccctccccaccccatctattaatattattcttttgaagattcttcgttgtcaagccgccaaagtggagagtgcgattgcagaagggggtgcttctcgtttcagtgcttcttcgggcggaggaggaagtaggggtgcacctcagcactatcccaagactgctggcaacagcgagttcctggggaaaaccccagggcaaaacgctcagaaatggattcctgcacgaagcactagacgagatgacaactccgcagcaaacaactccgcaaacgaaaaagaacgacatgatgcaatcttcaggaaagtaagaggcatactaaataagcttactcctgaaaagtttgacaagctatgccttgagctcctcaatgtgggtgtagagtctaaactcatccttaaaggggtcatactgctgattgtggacaaagccctagaagagccaaagtatagctc

SEQ ID NO: 10092 - DNA, 1877 bp, Homo sapiens
  source 1..1877: mol_type = unassigned DNA
ggaactaacgtcatgccgagttgctgagcgccggcaggcggggccggggcggccaaaccaatgcgatggccggggcggagtcgggcgctctataagttgtcgataggcgggcactccgccctagtttctaaggatcatgtctgcgagccaggattcccgatccagagacaatggccccgatgggatggagcccgaaggcgtcatcgagagtaactggaatgagattgttgacagctttgatgacatgaacctctcggagtcccttctccgtggcatctacgcgtatggttttgagaagccctctgccatccagcagcgagccattctaccttgtatcaagggttatgatgtgattgctcaagcccaatctgggactgggaaaacggccacatttgccatatcgattctgcagcagattgaattagatctaaaagccacccaggccttggtcctagcacccactcgagaattggctcagcagatacagaaggtggtcatggcactaggagactacatgggcgcctcctgtcacgcctgtatcgggggcaccaacgtgcgtgctgaggtgcagaaactgcagatggaagctccccacatcatcgtgggtacccctggccgtgtgtttgatatgcttaaccggagatacctgtcccccaaatacatcaagatgtttgtactggatgaagctgacgaaatgttaagccgtggattcaaggaccagatctatgacatattccaaaagctcaacagcaacacccaggtagttttgctgtcagccacaatgccttctgatgtgcttgaggtgaccaagaagttcatgagggaccccattcggattcttgtcaagaaggaagagttgaccctggagggtatccgccagttctacatcaacgtggaacgagaggagtggaagctggacacactatgtgacttgtatgaaaccctgaccatcacccaggcagtcatcttcatcaacacccggaggaaggtggactggctcaccgagaagatgcatgctcgagatttcactgtatccgccatgcatggagatatggaccaaaaggaacgagacgtgattatgagggagtttcgttctggctctagcagagttttgattaccactgacctgctggccagaggcattgatgtgcagcaggtttctttagtcatcaactatgaccttcccaccaacagggaaaactatatccacagaatcggtcgaggtggacggtttggccgtaaaggtgtggctattaacatggtgacagaagaagacaagaggactcttcgagacattgagaccttctacaacacctccattgaggaaatgcccctcaatgttgctgacctcatctgaggggctgtcctgccacccagccccagccagggctcaatctctgggggctgaggagcagcaggaggggggagggaagggagccaagggatggacatcttgtcattttttttctttgaataaatgtcactttttgaggcaaaagaaggaaccgtgaacattttagacacccttttctttggggtaggctcttgccccaggcgccggctcttctcccaaaaaaaaaaaaaaaacactaatccatttccctaacctagtaacctccagatcccagaggctctcctcacctcagctgagctcctttgaaagtgattcaagggactatgtcactcagcctcatttgctggaccaaatctggagggagaacccctaaaacccctaagtgaggttgcccagggggttgtccccaggtggggggaagcaggggagagaaaatggtagccatttttacattgttttgtatagtatttattgattcaggaaacaaacacaaaattctgaataaaatgacttggaaactgcc

SEQ ID NO: 10093 - DNA, 909 bp, Homo sapiens
  source 1..909: mol_type = unassigned DNA
ctagtttctaaggatcatgtctgcgagccaggattcccggactgagcctaaccccgaggagcggccgcgtgaggcaccaggagcccacccggcgccgggcgggcgggtccattttgccgcacaagccgggctattggcaaactgcggatgggcaggtccaccttccttcgggggtgagcggcctgagatccagagacaatggccccgatgggatggagcccgaaggcgtcatcgagagtaactggaatgagattgttgacagctttgatgacatgaacctctcggagtcccttctccgtggcatctacgcgtatggttttgagaagccctctgccatccagcagcgagccattctaccttgtatcaagggttatgatgtgattgctcaagcccaatctgggactgggaaaacggccacatttgccatatcgattctgcagcagattgaattagatctaaaagccacccaggccttggtcctagcacccactcgagaattggctcagcaggtaagagtggcttctattccctccttcagggctgatttagggatgatgagtataatccaaggaccagagaagtcttctctgatcaccaccttgggaggaagacatgggtgccctaacactctcgagacctgctgggttaattaaaagctatttcttacccaaacgtaaccattgcttcctccacccatttcctgagtcaaatgggaaagctgttgggtgaagcctggctggctgggcaagtttgactgtgttctgaataagcaccttcactatgggctaagagatcccttggtgtgggggtgatcttacagtagtcagagcagatggacagtccttttcacccttgcttaatagccagagctgtttcatgcctggggcacacacaattctaatgctggac

SEQ ID NO: 10094 - DNA, 1169 bp, Homo sapiens
  source 1..1169: mol_type = unassigned DNA
ctagtttctaaggatcatgtctgcgagccaggattcccggttatgatgtgattgctcaagcccaatctgggactgggaaaacggccacatttgccatatcgattctgcagcagattgaattagatctaaaagccacccaggccttggtcctagcacccactcgagaattggctcagcagcccccaaatacatcaagatgtttgtactggatgaagctgacgaaatgttaagccgtggattcaaggaccagatctatgacatattccaaaagctcaacagcaacacccaggtagttttgctgtcagccacaatgccttctgatgtgcttgaggtgaccaagaagttcatgagggaccccattcggattcttgtcaagaaggaagagttgaccctggagggtatccgccagttctacatcaacgtggaacgagaggagtggaagctggacacactatgtgacttgtatgaaaccctgaccatcacccaggcagtcatcttcatcaacacccggaggaaggtggactggctcaccgagaagatgcatgctcgagatttcactgtatccgccatggtgtgtttgcccgctgccagcctgttgtgggtctgcccgtcagaagtgtcctacttgaagccagggttcctggaacccaggtgcctacctggtctgctgcatatttgttttctcttccagcatggagatatggaccaaaaggaacgagacgtgattatgagggagtttcgttctggctctagcagagttttgattaccactgacctgctggtgagtagagggaactgatagcaaaggcagaagggaggatccaaggtgattccctctccaaggggacatcagtgcctctcaggaaagtagcagcttggaatagaatctggcatgcctaaggcctttggggaactgggatgcttatttcctctgccttccttggctgcccacatggatgcctaagtgtcttccctccgggatagagtgtcctccgtgcacatgctgaagagttgtctttcttgacgtaggccagaggcattgatgtgcagcaggtttctttagtcatcaactatgaccttcccaccaacagggaaaactatatccacagaatcggtcgaggtggacggtttggccgtaaaggtgtggctattaacatggtgacagaaga

SEQ ID NO: 10095 - DNA, 1645 bp, Homo sapiens
  source 1..1645: mol_type = unassigned DNA
atgtctgcgagccaggattcccgatccagagacaatggccccgatgggatggagcccgaaggcgtcatcgagagtaactggaatgagattgttgacagctttgatgacatgaacctctcggagtcccttctccgtggcatctacgcgtatggttttgagaagccctctgccatccagcagcgagccattctaccttgtatcaagggttatgatgtgattgctcaagcccaatctgggactgggaaaacggccacatttgccatatcgattctgcagcagattgaattagatctaaaagccacccaggccttggtcctagcacccactcgagaattggctcagcagatacagaaggtggtcatggcactaggagactacatgggcgcctcctgtcacgcctgtatcgggggcaccaacgtgcgtgctgaggtgcagaaactgcagatggaagctccccacatcatcgtgggtacccctggccgtgtgtttgatatgcttaaccggagatacctgtcccccaaatacatcaagatgtttgtactggatgaagctgacgaaatgttaagccgtggattcaaggaccagatctatgacatattccaaaagctcaacagcaacacccaggtagttttgctgtcagccacaatgccttctgatgtgcttgaggtgaccaagaagttcatgagggaccccattcggattcttgtcaagaaggaagagttgaccctggagggtatccgccagttctacatcaacgtggaacgagaggagtggaagctggacacactatgtgacttgtatgaaaccctgaccatcacccaggcagtcatcttcatcaacacccggaggaaggtggactggctcaccgagaagatgcatgctcgagatttcactgtatccgccatgcatggagatatggaccaaaaggaacgagacgtgattatgagggagtttcgttctggctctagcagagttttgattaccactgacctgctgaatcggtcgaggtggacggtttggccgtaaaggtgtggctattaacatggtgacagaagaagacaagaggactcttcgagacattgagaccttctacaacacctccattgaggaaatgcccctcaatgttgctgacctcatctgaggggctgtcctgccacccagccccagccagggctcaatctctgggggctgaggagcagcaggaggggggagggaagggagccaagggatggacatcttgtcattttttttctttgaataaatgtcactttttgaggcaaaagaaggaaccgtgaacattttagacacccttttctttggggtaggctcttgccccaggcgccggctcttctcccaaaaaaaaaaaaaaaacactaatccatttccctaacctagtaacctccagatcccagaggctctcctcacctcagctgagctcctttgaaagtgattcaagggactatgtcactcagcctcatttgctggaccaaatctggagggagaacccctaaaacccctaagtgaggttgcccagggggttgtccccaggtggggggaagcaggggagagaaaatggtagccatttttacattgttttgtatagtatttattgattcaggaaacaaacacaaaattctgaataaaa

SEQ ID NO: 10096 - DNA, 1919 bp, Homo sapiens
  source 1..1919: mol_type = unassigned DNA
tataaaaaacgggtggttgggcgccgctgtcttttcagtcgggcgctgagtggtttttcggatcatgtctggtggctccgcggattataacagagaacatggcggcccagagggaatggaccccgatggtgtcatcgagagcaactggaatgagattgttgataactttgatgatatgaatttaaaggagtctctccttcgtggcatctatgcttacggttttgagaagccttccgctattcagcagagagctattattccctgtattaaagggtatgatgtgattgctcaagctcagtcaggtactggcaagacagccacatttgctatttccatcctgcaacagttggagattgagttcaaggagacccaagcactagtattggcccccaccagagaactggctcaacagatccaaaaggtaattctggcacttggagactatatgggagccacttgtcatgcctgcattggtggaacaaatgttcgaaatgaaatgcaaaaactgcaggctgaagcaccacatattgttgttggtacacccgggagagtgtttgatatgttaaacagaagatacctttctccaaaatggatcaaaatgtttgttttggatgaagcagatgaaatgttgagccgtggttttaaggatcaaatctatgagattttccaaaaactaaacacaagtattcaggttgtgttgctttctgccacaatgccaactgatgtgttggaagtgaccaaaaaattcatgagagatccaattcgaattctggtgaaaaaggaagaattgacccttgaaggaatcaaacagttttatattaatgttgagagagaggaatggaagttggatacactttgtgacttgtacgagacactgaccattacacaggctgttatttttctcaatacgaggcgcaaggtggactggctgactgagaagatgcatgccagagacttcacagtttctgctctgcatggtgacatggaccagaaggagagagatgttatcatgagggaattccggtcagggtcaagtcgtgttctgatcactactgacttgttggctcgcgggattgatgtgcaacaagtgtctttggttataaattatgatctacctaccaatcgtgaaaactatattcacagaattggcagagggggtcgatttgggaggaaaggtgtggctataaactttgttactgaagaagacaagaggattcttcgtgacattgagactttctacaatactacagtggaggagatgcccatgaatgtggctgaccttatttaattcctgggatgagagttttggatgcagtgctcgctgttgctgaataggcgatcacaacgtgcattgtgcttctttctttgggaatatttgaatcttgtctcaatgctcataacggatcagaaatacagattttgatagcaaagcgacgttagtcgtgagctcttgtgaggaaagtcattggctttatcctctttagagttagactgttggggtgggtataaaagatggggtctgtaaaatctttctttcttagaaatttatttcctagttctgtagaaatggttgtattagatgttctctatcatttaataatatacttgtggactaaaagatataagtgctgtataaaatcagccaattatgttaaactagcatatctgcctttattgtgtttgtcattagcctgagtagaaaggcctttaaaatttttttagaaagcatttgaatgcattttgtttggtattgtatttattcaataaagtatttaattagtgctaagtgtgaactggaccctgttgctaagccccagcaagcaatcctaggtagggtttaatccccagtaaaattgccatattgcacatgtcttaatgaagtttgaatgttaaataaattgtatattcactttaaaggt

SEQ ID NO: 10097 - DNA, 1726 bp, Homo sapiens
  source 1..1726: mol_type = unassigned DNA
tggtttttcggatcatgtctggtggctccgcggattataacagcagagaacatggcggcccagagggaatggaccccgatggtgtcatcgagagcaactggaatgagattgttgataactttgatgatatgaatttaaaggagtctctccttcgtggcatctatgcttacggttttgagaagccttccgctattcagcagagagctattattccctgtattaaagatccaaaaggtaattctggcacttggagactatatgggagccacttgtcatgcctgcattggtggaacaaatgttcgaaatgaaatgcaaaaactgcaggctgaagcaccacatattgttgttggtacacccgggagagtgtttgatatgttaaacagaagatacctttctccaaaatggatcaaaatgtttgttttggatgaagcagatgaaatgttgagccgtggttttaaggatcaaatctatgagattttccaaaaactaaacacaagtattcaggttgtgttgctttctgccacaatgccaactgatgtgttggaagtgaccaaaaaattcatgagagatccaattcgaattctggtgaaaaaggaagaattgacccttgaaggaatcaaacagttttatattaatgttgagagagaggaatggaagttggatacactttgtgacttgtacgagacactgaccattacacaggctgttatttttctcaatacgaggcgcaaggtggactggctgactgagaagatgcatgccagagacttcacagtttctgctctgcatggtgacatggaccagaaggagagagatgttatcatgagggaattccggtcagggtcaagtcgtgttctgatcactactgacttgttggctcgcgggattgatgtgcaacaagtgtctttggttataaattatgatctacctaccaatcgtgaaaactatattcacagaattggcagagggggtcgatttgggaggaaaggtgtggctataaactttgttactgaagaagacaagaggattcttcgtgacattgagactttctacaatactacagtggaggagatgcccatgaatgtggctgaccttatttaattcctgggatgagagttttggatgcagtgctcgctgttgctgaataggcgatcacaacgtgcattgtgcttctttctttgggaatatttgaatcttgtctcaatgctcataacggatcagaaatacagattttgatagcaaagcgacgttagtcgtgagctcttgtgaggaaagtcattggctttatcctctttagagttagactgttggggtgggtataaaagatggggtctgtaaaatctttctttcttagaaatttatttcctagttctgtagaaatggttgtattagatgttctctatcatttaataatatacttgtggactaaaagatataagtgctgtataaaatcagccaattatgttaaactagcatatctgcctttattgtgtttgtcattagcctgagtagaaaggcctttaaaatttttttagaaagcatttgaatgcattttgtttggtattgtatttattcaataaagtatttaattagtgctaagtgtgaactggaccctgttgctaagccccagcaagcaatcctaggtagggtttaatccccagtaaaattgccatattgcacatgtcttaatgaagtttgaatgttaaataaattgtatattcacttt

SEQ ID NO: 10098 - DNA, 1889 bp, Homo sapiens
  source 1..1889: mol_type = unassigned DNA
cttttcagtcgggcgctgagtggtttttcggatcatgtctggtggctccgcggattataacagcagagaacatggcggcccagagggaatggaccccgatggtgtcatcgagagcaactggaatgagattgttgataactttgatgatatgaatttaaaggagtctctccttcgtggcatctatgcttacggttttgagaagccttccgctattcagcagagagctattattccctgtattaaagggtatgatgtgattgctcaagctcagtcaggtactggcaagacagccacatttgctatttccatcctgcaacagttggagattgagttcaaggagacccaagcactagtattggcccccaccagagaactggctcaacagatccaaaaggtaattctggcacttggagactatatgggagccacttgtcatgcctgcattggtggaacaaatgttcgaaatgaaatgcaaaaactgcaggctgaagcaccacatattgttgttggtacacccgggagagtgtttgatatgttaaacagaagatacctttctccaaaatggatcaaaatgtttgttttggatgaagcagatgaaatgttgagccgtggttttaaggatcaaatctatgagattttccaaaaactaaacacaagtattcaggttgtgttgctttctgccacaatgccaactgatgtgttggaagtgaccaaaaaattcatgagagatccaattcgaattctggtgaaaaaggaagaattgacccttgaaggaatcaaacagttttatattaatgttgagagagaggaatggaagttggatacactttgtgacttgtacgagacactgaccattacacaggctgttatttttctcaatacgaggcgcaaggtggactggctgactgagaagatgcatgccagagacttcacagtttctgctctgcatggtgacatggaccagaaggagagagatgttatcatgagggaattccggtcagggtcaagtcgtgttctgatcactactgacttgttggctcgcgggattgatgtgcaacaagtgtctttggttataaattatgatctacctaccaatcgtgaaaactatattcacagaattggcagagggggtcgatttgggaggaaaggtgtggctataaactttgttactgaagaagacaagaggattcttcgtgacattgagactttctacaatactacagtggaggagatgcccatgaatgtggctgaccttatttaattcctgggatgagagttttggatgcagtgctcgctgttgctgaataggcgatcacaacgtgcattgtgcttctttctttgggaatatttgaatcttgtctcaatgctcataacggatcagaaatacagattttgatagcaaagcgacgttagtcgtgagctcttgtgaggaaagtcattggctttatcctctttagagttagactgttggggtgggtataaaagatggggtctgtaaaatctttctttcttagaaatttatttcctagttctgtagaaatggttgtattagatgttctctatcatttaataatatacttgtggactaaaagatataagtgctgtataaaatcagccaattatgttaaactagcatatctgcctttattgtgtttgtcattagcctgagtagaaaggcctttaaaatttttttagaaagcatttgaatgcattttgtttggtattgtatttattcaataaagtatttaattagtgctaagtgtgaactggaccctgttgctaagccccagcaagcaatcctaggtagggtttaatccccagtaaaattgccatattgcacatgtcttaatgaagtttgaatgttaaataaattgtatattcactttaaa

SEQ ID NO: 10099 - DNA, 480 bp, Homo sapiens
  source 1..480: mol_type = unassigned DNA
gaacagcatctccggtttccgcctccggctccggcgcggctcccccggcccgcctctgcgtcagggacgcggaaaccccgtaggagcagggcgggcggggaaagcgaggtttaactaactccgcagctatattcttccgccgcgaggattttatccgaggtaacgaccccaggatcacaattttgtagctgaccgaagcacggcgagaaaattcctccgcaagaaacgggttccggccacgagcctataaaaaacgggtggttgggcgccgctgtcttttcagtcgggcgctgagtggtttttcggatcatgtctggtggctccgcggattataacagagaacatggcggcccagagggaatggaccccgatggtgtcatcgagagcaactggaatgagattgttgataactttgatgatatgaatttaaaggagtctctccttcgtggcatctatgcttacggttttgagaagccttcc

SEQ ID NO: 10100 - DNA, 600 bp, Homo sapiens
  source 1..600: mol_type = unassigned DNA
aaagcgaggtttaactaactccgcagctatattcttccgccgcgaggtaaagagtcccaacccaaccccgggccctaggatttccagcgaccctgtaatatcgagaaattaccacatttgggtttttctaccaacttgcttaggattttatccgaggtaacgaccccaggatcacaattttgtagctgaccgaagcacggcgagaaaattcctccgcaagaaacgggttccggccacgagcctataaaaaacgggtggttgggcgccgctgtcttttcagtcgggcgctgagtggtttttcggatcatgtctggtggctccgcggattataacagagaacatggcggcccagagggaatggaccccgatggtgtcatcgagagcaactggaatgagattgttgataactttgatgatatgaatttaaaggagtctctccttcgtggcatctatgcttacggttttgagaagccttccgctattcagcagagagctattattccctgtattaaagggtatgatgtgattgctcaagctcagtcaggtactggcaagacagccacatttgctatttccatcctgcaacagttggagattgag

SEQ ID NO: 10101 - DNA, 7257 bp, Homo sapiens
  source 1..7257: mol_type = unassigned DNA
gccgagagcccgcgcccacagccatgtcctcgtcagccggcagcggccaccagcccagccagagccgcgccatccccacccgcaccgtggccatcagcgacgccgcgcagctacctcatgactattgcaccacgcccggggggacgctcttctccaccacaccgggaggaactcgaatcatttatgacagaaagtttctgttggatcgtcgcaattctcccatggctcagaccccaccctgccacctgcccaatatcccaggagtcactagccctggcaccttaattgaagactccaaagtagaagtaaacaatttgaacaacttgaacaatcacgacaggaaacatgcagttggggatgatgctcagttcgagatggacatctgactctcctgcaaggattagaagaaaagcagcaacactgatacttgtgtgcacctgatttggccaataggatcaacagtgaaaagacagaagaggcaataccagcagtccccattacagtctccacctccccgtcttcctctgggtgccaaatgatgggaagatgagcttcatctgaccatttcttctccctgtctcctgttccccttcccagttaaacaggttagattgaaggcccttgctgtatttctgtagagctaagcagcccttagaggaaaacagttcaactctgactttcctagttgtttttttattgagagccaccctcataccctgtaattttgtcccaaatcaaatatcaacctaccaacaactgcctggctgggaagtctggggaagggatacagagcttggtgggcctaacaccattcatattccttaccctctgtctctcctccctgtatcccacctatggttcagtgttgcaagagtctgggcttggggtctttaaaaccagcagggggaaatgataaaaagagagctgctttcccttttaccttgaggtattcgtccctcgggacagagcacagcttgtgcaactctggtagcgttaccctgtgacactgttttgaggtccacttcctttctttcctctgggaggaatgtcttctgtctttggtattatagttcatcttcccattcttttacttagtgcatttgtgcagatatttttaactctgtacatcagaagagagcccttggtaaccagttttgctcttcttctgccactcctccctgcttgcatctcgttgctggcagagtcctcttgtacttcaagaaagcaaagtgattttgtctgctcctagagcaggtccataccaagtaatagaggcactttagcttccacttggtgggtaaggcctgatcatagtattctgtcagataatgcctaagaatgaccgctgaagaacgttgacccatttgagtacccggtctcagtcgtcatttttaagtccagtgagcattgtggtagttgttcttagattgcagtttcttatgttttgagtttgaagttgattttcagaatgttcttagaaaagaactgcatttttttcctttgtggatctgctttgtttggctgctgggatagataagcatgggcttaaaaaatgtgttcctcccagttttcttgcctttcctgttgtactctgaatttctctccctacctccctcactttcttcctctctccttcctttccttcctttttctctaccaggccatttttcaaatttacatcaaagatacctgaagtgttggtatctgagaatatctgtcactcctcttatctgagaagtgaccttttatttttaagatgactacagacctatttttagatatgttttcagtacaattttgaacagcaactttttaattaaacatcttccagtgttaggaagttgagaaacgttcataggcaagtctgctgttctatgtcaccatcttttgtctcccctagtcccccaggagctctttcctttcccctctagttttgggtgtgcatgtttggagtttgtagtgggtggtttgtaaaactggaccattctgccttgctatgggttgttcaagaaagcctcattcttttctgtgaccctttcgcttttgcattcaccctccttcccacctacctgtcctggggctgttgagcagcataataatcccgggagaatgattcccctcatagaaagacaaaagcatccatcccctcatagttaagtagccactggtgtcctgggaatttctggttggatttggtgccctgaacttttttattaagaaatcagatcccagggtgagagtaacaggccatttggccaagaaagaaacctgtttgtttttcttttgaactatgaaaagaccctgtttgtgaatatattttagaaagagaggaaggatgtctgcagaactttgttctgttttctgccacaaaaatgtgaatagttcagagtgaaaaccttttgtgatggttgatgtctcaggaataagctggatctccaatgttttggggatgctttgagtctcaaaaaaaattgataatcagaaaagtaatttttgtttgtttgtttaatgtatccctgttctgtttttaattaaactccaagtctcattttacatattcttggaaaaacctaagttgctctgtaatttacataagaagcatgctcaggacctctttgtaccccggggagcctgattctttgggaatgaagcttttcattcttcatacactggccttggcatcctgtggaatttgacccaactagcagctagtcagtctgtcagtgagcagaagagtgaactcttcttgatctttattgctatgtgtgaaaacttggcttcctcactgaacggtgaggaatggatttaaagcatgagctttagtagtatcaagatgccattttcctttttcttgctgtcttggggagcttctgcatgtgaccccctaatcagaaggcatgtttttagtatttcttgggagtgtcagctgtataatgcagcagctgttcaatcccttacccttctctgcaaggacttccttacagcttggtgcagttctttcccagaggccaccactactagacagtctttcttttatcttatggagataaattggcatttaaaaaataatttcacaaggcatgagataaactttcaatagatgatacctttgtgtcatgcctcatggaattatttttagaacaagccagagtccattgagtggtttacctctgcatgtttggagggaacctcacagatgaaacccttaatgaataatgtgtccggggttttttagagagaaggagcactcttaagttaccactttgagacagctcttaacatcttagtgaccatttgtagttttctttttatgaggaacccatgcttctatacttgggcggacaatcgagcttaatgagaagtgacttcccttcaaattccaacagcagacatgcattgtcatgattctgtcttctttttagtgtggtttattgagttcagcagttctcatattctgtttaaataggtacagcattttcaagggcacagatacagagaagctggctttctaggtattgggcttccaagccaagagttttgtccttccacctgtattagttatctattgctgtgtaaaaaattaccctaaatttagtatgttaaaatagtaaacattatctgtcagtttctgtgggttaagaatttgggagtagtttaacatgatggttctggcccatggtatcatgaagttacagtcaagattgaacaggggctgcagtcagctggagctggagaaaccacttccaagttctctctttgtggccgttggcaggatgcctcagtttcttcccatgtgggtctctgcgtagggcagcatgagtgtcctcacaccatgacacctggcttctccctgagcagctgattccagagatcatggggcagggccaggagaaagctgcagtgccttttaagacatagtcttggaaaggacacaccgtcacttcttatcctagttgttagaagcaagccactaagttcagcctgcactcaaggagagaggaattacacatacctctaccccaatggagcagtagcaaagaatttatggacatatcttaaaagcaccacaccccaactggggatgaaagtaggtcaacagggaggtaggtttaatctagataagctgaaagatagattgctatcaaaaacagttctccaagatgtgcatagccaaactgggatagaaggcaaactccccaaagctacctgctggttttgagaggggtggtaagacatggcaattcccaggagtagtagaaaataatatgcctgactaccaacagctcaagtatgcttatttgcacatcctagacttggtgtctgtaagactcagttaccacttttattttcctgtagctaggagttagcaaaaggaactggggccttccagccgagccactaaacctgtcttatttggaatggggattgtccagcaaagggagcaaacatgaattagatgttaagctattgagctgaagaaaagaaagcagttcacatttaggtgaaatagatgatgttatcaggaagccaggttcccaccagagtcggtgcttggtacctggtctctccagtctcaacagactcaggtcaggtctctcacccaggaagcaaccactcaataaaatagagaacatctgagaattacaaatgtctatgcttgattgctcctctaaatccagtgcataggttaaccctgcatgcccatttcttcctgggcttcttgatggcaatgtgttcttaaataactggtcttgtgttcatgctaaagacaaacttacatgaagtttttcagtttaagacattctagtgaatggctgctatgtgtttctggcactcattcctaaccaagtctttagagatttcagatgaccttaaagatgcaatatctttttctttctttctttctttctttttttctgagacaagagttgcgccctgtcgcccaggctggggtgctggagtgcagtggtgcgatctcagctcactgcagcctctgcttcccaggttcaagtgtttctcctgcctcagccttccgagtagctgggattacaggcatgtaccactatgcctggctaatttttatttctatatttttagtagagatggggtttcatcatgtttgccaggctggtctcgaactcctggcctcaagtgatccgcccacctcagcctcccaaagtgctgggattacaggcgcgagccaccgcgcctggccaaagatgcaaattcttgtttggatttatgctctgcctcttcccagcattttcttatctgtagccctgcttgcttgagagtatacttggataagaagtattgctgttgagggagctataagaaaaggattcttcttccagaagtaaagaactcatctttagagtacctttaaatgaattttgtttttctttcttattttgaggtggattggtcttctctttttttgggtttccagctcactgggactctcagaccttacctttccagctcaaacaccattagttaaattccttcattctcattagaatgcagcctgctgagtatgtgggtttcactgccggagtccatcatttagccagtatacatagaggaactgcttcgaatcaaggcaactggtgaagggcttagcatgttggcagcaatatcccagagattgaatctgtttgcattttcctcatctaggataacagctgcttgaagccagggctcttagccctttgcattccccttgagcgaggaagccacactgcctttctgtgtctggttcagagctcttccttcttggcatgttttctggactacatgcacatgggcagctatagattaatctgcaaaacctagtcacttacctacccataatatctgggaaggtgtggtatttgttttaaagaaacattgtttctttgggagggcagtttctgtctggactttgaggtggacttagttatccctacagttctttaactctcagcttttaataaaagatgaaatcagatattgatgcagttgggtcacaattctttagaatgcttctaccccagggccgcttcctgttcctagtcatggttttccagtttagtagtggagtttcttgaggctaacttacagaaatttctaactgaaaactttaagagttattgatacttgttttttcagtcagtcacttacatcacctagcctactctctggaatttaaatttatttctctaggctggtcctggaagttgataaccttttggcaaagcttagatttaggagaaggcttgagtccctgttcagcgggtctgtggattctctttgcttatggctctctgcctgcagccctggcagaccatactgtatgtcatggatacccagtggaaatattactgagatgaaacacatttccaagggtatttaaactctcactctgccacctttctaagggtgggaggctggcagagatgctgcaatgcttgataatcatttggccacactgaaatttccaaagggagctcttgccggtgcttaaaaccaaaactcctggacacttagaaaattccatgaatctagcacaaaatatccattcttgcccaagtgtatcccctttctctccagcttaatcttttttttttttttttttttaaagcccaggccaagggtacttttaactggaaactggggaggagggaagaacactagcagggagctaagaggcaggttgctgggtaagccatcctgctcctacctggtgcctgtatctacattgctgagtgctgtgcgccagtgcctttccttcatctgcagatggagcccatctctttccacctgggtgaggagaccctctgctactccaggggtaaaccttaaagaaggtgtcttgaagagcccagaggacactcacgtgctaaggtgtccattttatgcatctttaaaatattttatttaaaaaaaaaaatagccctgccctgtcttagtgccactaacggcccagttccatccattctgaatggaaaagcggagactgccagcactttccttggtcttccctttgtctcccatgatgtgttgttccctcatccctcccatccatttcactgtgtgtggatggatagcagagggtaccacgcagtccttgaggcagtcctgtgtgattccatgatcagttgtttttgtattttaactattcttccaaaccagcagatgtttggaaattaaggaaaaaattaaattctcatcaatggttgctgttatagttaaatcagtaaagatcttgagtatcaa

SEQ ID NO: 10102 - DNA, 1604 bp, Homo sapiens
  source 1..1604: mol_type = unassigned DNA
tgacaatagcaacatcaaagatcactgatcatagatcaccataacagacacagaaatcatgaaaaagttttaaatattttgagaattaccaaaatgtaacacagagacaccaagtgagcacatgctgttggaaaaatggcgctgatacaattgctggactcagggctgccacaaaccctccatttgttttcagaatgccctatctgcgaagcgtaataaaacgaggtatgccatagtacagtggcgccgcgaccgacaaaggaaagcctccgggaggtcaaaagagataccagagagtgcgtcccgcactggaggaagaggaaggtttttaccaagcagcgagtccagagcccgcgccgtcaacgacgcggtgctgccttttttccgagccgctgcgggagggggccaggacacgctcccttaggagagcgggcgggtcacaaggacctggacagaggcagaactgaggccagcagccagctccgccgctgagtccagccctctgcgcagccgccctgagctggcgtcccgagatagccgcttccaaaccgggcctgcgcgccgacgttccgctgcgccccgcgcaaaaccggaagtacccgggcccaaggctgagggacccggtggagcggaagtcactccctgaggcagtggcgacagcggcggcgagaggatgaacaacaagttcgacgctttgaaagatgatgacagtggggaccatgatcagaatgaagaaaacagcacacagaaagatggtgagaaggaaaaaacggaacgagacaagaatcagagcagtagcaagagaaaggctgttgtccctggaccggcagagcatcccctgcagtacaactacactttttggtactccaggagaacccccggccgtcccacgagctcacagagctatgaacagaatatcaaacagattggcacctttgcctctgtggagcagttctggaggttttatagccacatggtacgtcctggggacctgacaggccacagtgacttccatctcttcaaagaaggaattaaacccatgtgggaggatgatgcaaataaaaatggtggcaagtggattattcggctgcggaagggcttggcctcccgttgctgggagaatctcattttggccatgctgggggaacagttcatggttggggaggagatctgtggggctgtggtgtctgtccgctttcaggaagacattatttcaatatggaataagactgccagtgaccaagcaaccacagcccgaatccgggacacacttcggcgagtgcttaacctacctcccaacaccattatggaatacaaaactcacaccgacagcatcaaaatgccaggcaggctgggcccccaaaggctcctttttcaaaacctctggaagccgcggttgaatgtgccatgaccctctccctctctggatggcaccatcattgaagctggcgtcatcggagtctcttgttctgttggcgtgctacctggaagatccttctgtcctggacaagaggaattggaagagcattttatgttttaagaacaggctgacacgcagcagctacaacaacagctgagatcacttaataaatggtgctaaacta

SEQ ID NO: 10103 - DNA, 3448 bp, Homo sapiens
  source 1..3448: mol_type = unassigned DNA
gaagtcactccctgaggcagtggcgacagcggcggcgagaggatgaacaacaagttcgacgctttgaaagatgatgacagtggggaccatgatcagaatgaagaaaacagcacacagaaagatggtgagaaggaaaaaacggaacgagacaagaatcagagcagtagcaagagaaaggctgttgtccctggaccggcagagcatcccctgcagtacaactacactttttggtactccaggagaacccccggccgtcccacgagctcacagagctatgaacagaatatcaaacagattggcacctttgcctctgtggagcagttctggaggttttatagccacatggtacgtcctggggacctgacaggccacagtgacttccatctcttcaaagaaggaattaaacccatgtgggaggatgatgcaaataaaaatggtggcaagtggattattcggctgcggaagggcttggcctcccgttgctgggagaatctcattttggccatgctgggggaacagttcatggttggggaggagatctgtggggctgtggtgtctgtccgctttcaggaagacattatttcaatatggaataagactgccagtgaccaagcaaccacagcccgaatccgggacacacttcggcgagtgcttaacctacctcccaacaccattatggaatacaaaactcacaccgacagcatcaaggacaattcaagctttcgaaatacaaaaatcacattgtgagagtacacaagctggcaataatccttttctgtatgtgtgtgtttgtccgaaatggatgggaggcctccagccagtccttccattgctcactgaagggacgtccctgagccgtgcgctctccttttgcactcattcctggaggacggattccgctagacaccctccagcatcgctgactttataaagcggaaaaacggaaaacgtgactttgtaatagacaaacattgttttttaatggggttccatgggggggcgttcagcctttctgtttgctgtgtgctgtccagatgcctcttgggcgtcctgttgttctcttcccgtgttgtacgaagggtaccgtggccacgtgtacatgccagagctgttgatgagagttaccagtattatgaatgtctgtgcatccaggaaaagtgttctgttggagagtcccaaaatagctgtaaatgctctcttctagctctgccattaaattattgggacattttgtttctttctctcccctcctccaagcccaccactttctgaagctgtgttactgatgtgatgactgtccaggattttgtatcatcccctgccttatgccctccggtctcctctcctgtgggactctctccttcttaggcacagctgcacttagaattgtaatccagtggctctcactggtttcactgaggcagcttagagggaatgccttagtaaactgaactggagcagaatctagtttgattaggagctagattataatctaggttccaagtacagaatttggagctaaggactgtgactgaaatcattttcccatatgagcagaccctgtgtgtcaggcctgtttcccatatgagcagagcctgtgtgcaagtctgtttctggcatgtccctcattgaggaagggaagcaaaagctggttattgccaggcctattaacacttaatatgcaaattctatcatcctgaaactggggcatctgaggaaaaggtgaccttgctggatggctttatttgcatggctctgcctgtctgcagtggttgagtcctcatcacctggtatgtgtatgagcaaatgtgtgctgattgtgatgcccaggcagaaacctcttgaagactgctgcaggcatgctttaaaaatgaccagtcactcatcagagaagctgggtgatctgactccagaaggactgaagtcagagaagtcacaagagcacctaggattcaaataaatagcgtcagagtcctatagcaacctccaagtagcaccgtcttacttggctcttgtgagcaaagactgcagtaccttaaattaaggcctctctttaaaacatatgtggaagactaggggatccttggccacctggtctcagagaaatcatatgagagtaacaggcatttccttattgtatttgtactacactcttcctacttttccattcctgaacaccctctaattaccactgttttggggatgctttttttctgaaagaacggggagtacaggggccaaaagggaggtgcttctattacagggcaagttagatcagataagaagatctagcagtgatttaaactccaggaatatgaagagtgcattctggtgtccagacagttgtgaagggctcggcaaatataagagcaccattggctacatggagagcaaaggctgtctttgaagaccccagggaggtcttcacttttgcctaaattcagatttgccgtgaaaattccaaagagagcagatatttggatttgccctcctttgggcatctacctgactgttgtgtgtgtgggaaagtcagtgtgtatgtgtagagtgtgcttaggagtgagtgagtggtcaggcctcctggctaggtgtgttgtccatagttttgttgttgttgttgttgttgttcagagttttgaatcttacgttttctagagctgctcatgttttcccttcctttttgtcgttgtagtatttgacagttgtcttttccatcaaaaacatactggccctaggctggttagagcaaggggttatgcctgttaggcagcatcttacgcccagtgttctcccagatattctgcctaacaggtttaagtaggagattaaatagtcagtttatctaaaccctctatttttccaaactagcttgagaggtcttttcatctatttttactccatgggcctctgatatgctgagatgtggcacggttatgattatggtatcaccgttacagaggcaaagggataaaggtctaccagggccaacgtaaccagaatgtgaggagagtgaagagtcggtctccgctttgcacagtaccagaatgtgaggttgccactggagagtggagagtcggtctccactttgcacagttggagctgttctcctctaactcctttgctgggttttctgtttgaaattggcccctactcctctccagccctttactgggttttctgtttgaaattggcccctactcctctccagtgtctgctttttgaatccttctgttcgtgtgtgtgtgtgtgtgtgtgtgtgttccctatgatactggcagtggcaataattttccacccagagagaagcttgtggtccacaatgctcgaagaatgaatttccaagtatttgccagtggaaacggagcagaggctatgacaagagtgatttagtgttgcactttcagagcaattatctactgcagtaataaattgaaaatatcagcaagaa

SEQ ID NO: 10104 - DNA, 1372 bp, Homo sapiens
  source 1..1372: mol_type = unassigned DNA
actccctgaggcagtggcgacagcggcggcgagaggatgaacaacaagttcgacgctttgaaagatgatgacagtggggaccatgatcagaatgaagaaaacagcacacagaaagatggtgagaaggaaaaaacggaacgagacaagaatcagagcagtagcaagagaaaggtggagcagttctggaggttttatagccacatggtacgtcctggggacctgacaggccacagtgacttccatctcttcaaagaaggaattaaacccatgtgggaggatgatgcaaataaaaatggtggcaagtggattattcggctgcggaagggcttggcctcccgttgctgggagaatctcattttggccatgctgggggaacagttcatggttggggaggagatctgtggggctgtggtgtctgtccgctttcaggaagacattatttcaatatggaataagactgccagtgaccaagcaaccacagcccgaatccgggacacacttcggcgagtgcttaacctacctcccaacaccattatggaatacaaaactcacaccgacagcatcaagtacgtgttggggggttatgggaggacgtgtccctaagcttagtataagtagatctgtagttgggcccagaggaatatggccggacaggagacttacttgtggagaagggacagaccaggccttccctctagggcttctggctacttgctgcagttctttgtcagcgaggctccctgccacctatactaccaggtgctttgtagcagagagagcccatctgcagaaacccagttgtactacctgggcttgcttaatttctacaggctgtcttgtctttcatatgctaaccactatcttaaaatgaaagacaagtgcttttctttttcttgctgttttttaagataatttcaccctgcccaccctcaccccacttctgcatgtctttttaacttgttagcttcagtctattttctttgtcctgggatactgactacttatcaggaatgactccatttccttgtgtatagagctgactcttagaagaagggggatagtgtgtgtgtgagagagcagaatcaaagggaagcatgaaggccacagggaaaataagcttggcaatctccctaggactcagggaaatagagctctctgtccacagtgagaatcactgttaggcttgctcctcagtgattgagtgtcagaagtaagctcaggctattgtgaaaaagtgtggggagtggctgtcagattgtctcaaagctggagggagagctagccagctaagagttaggactcttaggtttagttctctcatatggccccataccaatatgtgcctttgacaagtgtctttgcaactttgctt

SEQ ID NO: 10105 - DNA, 2764 bp, Homo sapiens
  source 1..2764: mol_type = unassigned DNA
gcgcgcagcgcggccgccgccgccagccccgccgaggcatcccgcaccgcctgggcccggctgggctgggggcgcctccgcagcagccgcggggtcgggaggcggccgggagggaggcagggcccaggacgcaaggtggcgacaagtcgcgtttggccccaggggctgtggggtcaccttctcttcctctcttctgccaccccaagtcgtctgtgttgcgtgtcatgcagtgggacagcacgttggtccggacctcaagctacccacgttctagtcccgcctctgtcatttcctagagctgtggcctcggatccctccctggtgccacagcagctgagtgcgcatcaaatctgaagaaaatctacacagtacagacagtacagatattttggagtgtatacaataatatccctcctgtgactagcctgcctttgagatgtagttatcatttaatgagaggagagaggcgaccactttgggaagaggagagtaatgcaaagggtggcgtatggaagatgaaagtccccaaggacagcacgtccacagtttggaaagagttgctgttagcaaccatcggggaacagttcacagactgtgccgcagcagatgatgaagtaataggagttagtgtcagtgttcgggaccgagaagacgtcgtccaagtctggaatgtaaatgcctctttagtgggtgaagcgactgttttagaaaagatctatgaacttctgccccacataacttttaaagcagtattttataaaccccatgaagagcatcatgcttttgaaggtggacgtggaaaacactaattgcactctgtaaagaattctttgtcctttgctgattggttttggaaacggtcttaacaggagggagagtgaagagaagacttgccgaagccgatgctggtcaatttagagtgggtttctgtccttgcagatgggcaattaggactcaaagtggcaggtggggtggggggagattgtgtgggtttctaccgtcacattacttgctttttaaaaaaaacacacacaaaaaactttttttttggctttctaaattctctgttcttttcactctgatttttttttttttttgccgtttaaaattccttattcagcctaattattgttttctacactcccctttcattgaggcacaagaaatgggtttccctttaagtagctctgctgtacctagttaatgagaatatgcataatcgtgacaatactgcttttgaataccacactgtacaaggaggaacactagcttggagaaatctgtcttctgattatttgttgtgacacattcctatgtactgtgagctgggcattgtttttttctgtcccagggaaaagaaaaaccatacttaatgtgattttgcactgacagcacacaaatctttaattttcctttttaaaacatttttttttagtgataaaaggaaaataatagttggattgcataacatgaaaactataatcacaattcagtatcaggatataaatcaagctctaagtctttggaccctctgtggaaacatttctaacccgaattttaatttggccttttcaaccaaaggcttagagtggtagcaagggatttcttccaataggaaacctgatgtttctgatttaaagagaaggtgatattttaattgtttgaattaagctccttgcaaagttcgggtgtgtttacccacttagggctttctttcccagtcaacgctaacacattttgttaaatgatccctttccctgctcacattgtgtgtcatttctcatcatcagtagtcctccagcctgggcagctgtccccaccctttttcatgtaggtgcaggaagttaaatctcatttccaggatgcatgtgaacatttacaaagttgaactttgagtgcattctgctcatatgaattattgggattgttgatatatattgtattatgctaccaaagaaatattggttttattagaaggaaatggtcatcctctggaccatggagactagctcagaatacgctgatttccctctcctgactttgccaagcctttggctgcttttgcctgataaagggcagggccatctgaagacacttcccccagtcggctttggagtcacgggagctagtgcctgctcacacatttttcaaaagggcagtgcactcagaacttcactgtacctgggatttttaattcctcttgcagtgttgaccagcagagagacttgaggctactttaagcctccactatgtgtttgtagataaaattctccattcaaacattttaaaggactttgaacattatctgcttatggaagttgtgcccttcacttggttagtaaccacctcagccataatacttaccatcataggtttcttaaaatgctttttttttttccctaaacttgagtttccttagtgatttcaaaatgaagtataagaatatcagatccagttagcaaaagcctaggacttgtttctccaaacattgtactaacattcaacttgttttaaaattatgactcaagaattttaaaaaattattctggacatgaattaaaacttttttataatataagtatttttctgattgaaaaaaggatataattgacttcactctaattgtcatgtatatttccataagtaaatggattttgaagtatttttattttttgaactttatttaaagcatttgtgatgacatgttcaacttttgcatgtatgtagcctttgaagtaaaaataaataggaatgttaggctcac

SEQ ID NO: 10106 - DNA, 6083 bp, Homo sapiens
  source 1..6083: mol_type = unassigned DNA
gctgatgggattaccagctcctgctaattgcatatgagtgctcaggggctgtggggtcaccttctcttcctctcttctgccaccccaagtcgtctgtgttgcgtgtcatgcagtgggacagcacgttggtccggacctcaagctacccacgttctagtcccgcctctgtcatttcctagagctgtggcctcggatccctccctggtgccacagcagctgagtgcgcatcaaatctgaagaaaatctacacagtacagacagtacagatattttggagtgtatacaataatatccctcctgtgactagcctgcctttgagatgtagttatcatttaatgagaggagagaggcgaccactttgggaagaggagagtaatgcaaagggtggcgtatggaagatgaaagtccccaaggacagcacgtccacagtttggaaagagttgctgttagcaaccatcggggaacagttcacagactgtgccgcagcagatgatgaagtaataggagttagtgtcagtgttcgggaccgagaagacgtcgtccaagtctggaatgtaaatgcctctttagtgggtgaagcgactgttttagaaaagatctatgaacttctgccccacataacttttaaagcagtattttataaaccccatgaagagcatcatgcttttgaaggtggacgtggaaaacactaattgcactctgtaaagaattctttgtcctttgctgattggttttggaaacggtcttaacaggagggagagtgaagagaagacttgccgaagccgatgctggtcaatttagagtgggtttctgtccttgcagatgggcaattaggactcaaagtggcaggtggggtggggggagattgtgtgggtttctaccgtcacattacttgctttttaaaaaaaacacacacaaaaaactttttttttggctttctaaattctctgttcttttcactctgatttttttttttttttgccgtttaaaattccttattcagcctaattattgttttctacactcccctttcattgaggcacaagaaatgggtttccctttaagtagctctgctgtacctagttaatgagaatatgcataatcgtgacaatactgcttttgaataccacactgtacaaggaggaacactagcttggagaaatctgtcttctgattatttgttgtgacacattcctatgtactgtgagctgggcattgtttttttctgtcccagggaaaagaaaaaccatacttaatgtgattttgcactgacagcacacaaatctttaattttcctttttaaaacatttttttttagtgataaaaggaaaataatagttggattgcataacatgaaaactataatcacaattcagtatcaggatataaatcaagctctaagtctttggaccctctgtggaaacatttctaacccgaattttaatttggccttttcaaccaaaggcttagagtggtagcaagggatttcttccaataggaaacctgatgtttctgatttaaagagaaggtgatattttaattgtttgaattaagctccttgcaaagttcgggtgtgtttacccacttagggctttctttcccagtcaacgctaacacattttgttaaatgatccctttccctgctcacattgtgtgtcatttctcatcatcagtagtcctccagcctgggcagctgtccccaccctttttcatgtaggtgcaggaagttaaatctcatttccaggatgcatgtgaacatttacaaagttgaactttgagtgcattctgctcatatgaattattgggattgttgatatatattgtattatgctaccaaagaaatattggttttattagaaggaaatggtcatcctctggaccatggagactagctcagaatacgctgatttccctctcctgactttgccaagcctttggctgcttttgcctgataaagggcagggccatctgaagacacttcccccagtcggctttggagtcacgggagctagtgcctgctcacacatttttcaaaagggcagtgcactcagaacttcactgtacctgggatttttaattcctcttgcagtgttgaccagcagagagacttgaggctactttaagcctccactatgtgtttgtagataaaattctccattcaaacattttaaaggactttgaacattatctgcttatggaagttgtgcccttcacttggttagtaaccacctcagccataatacttaccatcataggtttcttaaaatgctttttttttttccctaaacttgagtttccttagtgatttcaaaatgaagtataagaatatcagatccagttagcaaaagcctaggacttgtttctccaaacattgtactaacattcaacttgttttaaaattatgactcaagaattttaaaaaattattctggacatgaattaaaacttttttataatataagtatttttctgattgaaaaaaggatataattgacttcactctaattgtcatgtatatttccataagtaaatggattttgaagtatttttattttttgaactttatttaaagcatttgtgatgacatgttcaacttttgcatgtatgtagcctttgaagtaaaaataaataggaatgttaggctcacgttaatatttctagtttctgtttatgatcatggaacatgactagcacacaaagtagatttttgccccagtgaacttctgcaactgtttctgaccctttagaaaataccaactgtgagaaggatttaatttgcctaatgttaaaaacctatcatctaaattactttcagagaggattttgtcagattttggtttggaaattgttttaattgaatatttaatcataatagactttgtatgaactaagctgatttaatcagtttaaaaacctctcattaccttcttagattaaagaagctaatactgttttgagatagaaggaaatattttgtggggcatgtgacttttgtgttaaggcagtttacccatcttggctgatgtggggaaagtgcaaacttccagtagaatcccggtcttttcatccaagtgcttgcaggggcagccttgtagtctgcaaagaaccatgcagaaaccaaagagcttgcttttttgtctttgtaattccttagggtctgtgatatatgccaggaaatctgattgaaactaatatgctttttattctcccattattccctaaattgttatatcacaggcacttgcctacattgggaaagtaaggacaaataatacccatttaaagtaacttgcctatattttgactgtctttcgtaagcacttgctgaactgctgacttaactcagttttaagatttcctctttccccccaacttttccacatttcttaaatgagggtgtaatttactgcaaacatgtacatttaatataatattgctgttagattcgtggtacactttatgaagcaaaaacatgaaaaggaaaccacaactctaataaactttaaattaaagattaagatgactctttctcacccctcttcttgagtttagcccatgtctacaccatgcacacagtcacaagactttatagcttagaaactttaggtataattgggtcctatagacataatatacaatccaccaactgagccttggccgaacttgtcccttgttaaagacgtagggctagccagccacagagctgggtattgaagtcggcaagttgtatcccggtgcaggcgtccttaaatggagagtactcagaatctgccagccttaacctgcccactagccaccctaatcaagcattaaatatctgatccaatctggccactggtgtaactccgtaatcagacatcctgtttgtaaacagctcctccttctctccctctccctctcagagacagaagtggtgctggggtttggagtttgaaaataaccttcctatgacaggaagtgggcttttgctattagttgcccaactcttagaggatcccagcttgtgtctttagacaaaactgacagcctttggaacgatcgcatggtggcgctgccttccagccaacagttctggctcagcagcagaatttatccagctatgtttgtagaatttttttaagatcctactgcattttgctcttaagcttttataaaaatttgacgagaaaatgtaaaaatgatacttggcaataagacatttagttttcatgcacctaataaaaatgtgtcaaagctagatcgctccagatgtgcttaaaatatctcaaatcctaggctctcattggccttataagtgattgggaagaaaaagaataaaataaactcacatataggagatatggaaaatatttcatcaaatattatgcccaaagagagaaaattaggagttgattttttttagcactctgaatatggaacttccttttaaaaatgtaattctacccttcacctttcctacattgtatgtttctgtgagattttactcattacaagtgaaagtagaggactgcctgtgaattgttcacttctgaaaagaatatattgagatcagttaaaattactcaagagtttggtgactcaggattgtaaaaagcctggatctcaacagctgggaggagtcagagggtgaagtgggaaaaaatagggactgagaggcaacgaaaagtccctttgaacctgtggtcatttatagcaattagagtgggttgcccctctacttctcccaagaagaaatcccaaatagattcctttcatgtcagattatactgttctgattttattttctattatttttacatatacatccaaatctaagaatacttattcagattggcccactcaggccaaaagtcactgtcttgtgttctagaaattctttcatgttgctgacataaatccatttttaaaagaacattcagggactcttagaattttagagtggaagggacctttgagatcatctaccagtgcttctcaccccttagcatgcagcaaaatcactcagatacttacttattattcacatttcttgaccccagcactagaaatctgggaggatatctgcatttttaacaagtgccctagtgattctaatgctgatggtgctcagatcgctcttggagaacccctgattttatccaactcccacatatgacaaatgaggaaagcctcccaaccctaagctctgtcaggtgacctgattccaatgtatgataccaacaatcttatgaaggctggagaaaaccattaatactgagacttgagtagatgatgctcgtgaataagaactttatggctgggaccacagcagtcatgggagcccatccctggaagtccataatataaagcctttaatacagagtggtggtttttctcttttctaaataccatttcagtctgttaagagaaaagaaattagtgttcagaaaagtagttactccatatgtgcagtaactacttttctataatgtcttatggcatctggggttcagcatcattgaacaagattaaatgaacgttatagagctataaaattgcatgtaaaataacacaaaactgttcaaatgactatcaaagtagcctgggaatgaatttccactaaaattaattgtcactttcaaaacgtagcttagcaaagctgttactaaactggagagatcctttaatacatagaaatgtcaaaaaaatcaaataagtattccctaaacgatgtgagtgataagcaaaagtcattgcaaagtcagtatttttttgttcatcattgctactgaaattcagagttccattgtatatgtgtgtcttgagtgtaccttattagaatatccaatacaatagcttttggatattctatgcttttgtgtccttcagaaatcatgagattgaaggaatctgtgttaaatgtttttgttttggttgctgcctgaaaaaagttaccaactcatttagtgaaatgcaagatttctttatgaaaatttcaatttctaatatcgaagtcagataatttttcttgaacttttattttggaacagatgtttatttcggatctattaaagtgtcaactttgcattatagaactgaacatg

SEQ ID NO: 10107 - DNA, 777 bp, Homo sapiens
  source 1..777: mol_type = unassigned DNA
agttggcggccgcctggccggtggcgcccgggccgtggaaggtccagtcgtggctgacggcgggcaccaggcgcgcgggccgcatcttgcggcggtcgtggatgaagaagagcaggcggaggtagacgaggggctgtggggtcaccttctcttcctctcttctgccaccccaagtcgtctgtgttgcgtgtcatgcagtgggacagcacgttggtccggacctcaagctacccacgttctagtcccgcctctgtcatttcctagagctgtggcctcggatccctccctggtgccacagcagctgagtgcgcatcaaatctgaagaaaatctacacagtacagacagtacagatattttggagtgtatacaataatatccctcctgtgactagcctgcctttgagatgtagttatcatttaatgagaggagagaggcgaccactttgggaagaggagagtaatgcaaagggtggcgtatggaagatgaaagtccccaaggacagcacgtccacagtttggaaagagttgctgttagcaaccatcggggaacagttcacagactgtgccgcagcagatgatgaagtaataggagttagtgtcagtgttcgggaccgagaagacgtcgtccaagtctggaatgtaaatgcctctttagtgggtgaagcgactgttttagaaaagatctatgaacttctgccccacataacttttaaagcagtattttataaaccccatgaagagcatcatgcttttgaaggtggacgtggaaaacactaa

SEQ ID NO: 10108 - DNA, 6076 bp, Homo sapiens
  source 1..6076: mol_type = unassigned DNA
cggagaaaatggcgctgcccccggccgccgcgccccccgccggggcccgggagccgccggggtcccgcgccgccgccgctgccgccgcccccgagccgccgctcggcctgcagcagctgtcggcgctgcagcctgagccgggcggggtcccgctgcactcgtcctggaccttctggctcgacagatccctccctggtgccacagcagctgagtgcgcatcaaatctgaagaaaatctacacagtacagacagtacagatattttggagtgtatacaataatatccctcctgtgactagcctgcctttgagatgtagttatcatttaatgagaggagagaggcgaccactttgggaagaggagagtaatgcaaagggtggcgtatggaagatgaaagtccccaaggacagcacgtccacagtttggaaagagttgctgttagcaaccatcggggaacagttcacagactgtgccgcagcagatgatgaagtaataggagttagtgtcagtgttcgggaccgagaagacgtcgtccaagtctggaatgtaaatgcctctttagtgggtgaagcgactgttttagaaaagatctatgaacttctgccccacataacttttaaagcagtattttataaaccccatgaagagcatcatgcttttgaaggtggacgtggaaaacactaattgcactctgtaaagaattctttgtcctttgctgattggttttggaaacggtcttaacaggagggagagtgaagagaagacttgccgaagccgatgctggtcaatttagagtgggtttctgtccttgcagatgggcaattaggactcaaagtggcaggtggggtggggggagattgtgtgggtttctaccgtcacattacttgctttttaaaaaaaacacacacaaaaaactttttttttggctttctaaattctctgttcttttcactctgatttttttttttttttgccgtttaaaattccttattcagcctaattattgttttctacactcccctttcattgaggcacaagaaatgggtttccctttaagtagctctgctgtacctagttaatgagaatatgcataatcgtgacaatactgcttttgaataccacactgtacaaggaggaacactagcttggagaaatctgtcttctgattatttgttgtgacacattcctatgtactgtgagctgggcattgtttttttctgtcccagggaaaagaaaaaccatacttaatgtgattttgcactgacagcacacaaatctttaattttcctttttaaaacatttttttttagtgataaaaggaaaataatagttggattgcataacatgaaaactataatcacaattcagtatcaggatataaatcaagctctaagtctttggaccctctgtggaaacatttctaacccgaattttaatttggccttttcaaccaaaggcttagagtggtagcaagggatttcttccaataggaaacctgatgtttctgatttaaagagaaggtgatattttaattgtttgaattaagctccttgcaaagttcgggtgtgtttacccacttagggctttctttcccagtcaacgctaacacattttgttaaatgatccctttccctgctcacattgtgtgtcatttctcatcatcagtagtcctccagcctgggcagctgtccccaccctttttcatgtaggtgcaggaagttaaatctcatttccaggatgcatgtgaacatttacaaagttgaactttgagtgcattctgctcatatgaattattgggattgttgatatatattgtattatgctaccaaagaaatattggttttattagaaggaaatggtcatcctctggaccatggagactagctcagaatacgctgatttccctctcctgactttgccaagcctttggctgcttttgcctgataaagggcagggccatctgaagacacttcccccagtcggctttggagtcacgggagctagtgcctgctcacacatttttcaaaagggcagtgcactcagaacttcactgtacctgggatttttaattcctcttgcagtgttgaccagcagagagacttgaggctactttaagcctccactatgtgtttgtagataaaattctccattcaaacattttaaaggactttgaacattatctgcttatggaagttgtgcccttcacttggttagtaaccacctcagccataatacttaccatcataggtttcttaaaatgctttttttttttccctaaacttgagtttccttagtgatttcaaaatgaagtataagaatatcagatccagttagcaaaagcctaggacttgtttctccaaacattgtactaacattcaacttgttttaaaattatgactcaagaattttaaaaaattattctggacatgaattaaaacttttttataatataagtatttttctgattgaaaaaaggatataattgacttcactctaattgtcatgtatatttccataagtaaatggattttgaagtatttttattttttgaactttatttaaagcatttgtgatgacatgttcaacttttgcatgtatgtagcctttgaagtaaaaataaataggaatgttaggctcacgttaatatttctagtttctgtttatgatcatggaacatgactagcacacaaagtagatttttgccccagtgaacttctgcaactgtttctgaccctttagaaaataccaactgtgagaaggatttaatttgcctaatgttaaaaacctatcatctaaattactttcagagaggattttgtcagattttggtttggaaattgttttaattgaatatttaatcataatagactttgtatgaactaagctgatttaatcagtttaaaaacctctcattaccttcttagattaaagaagctaatactgttttgagatagaaggaaatattttgtggggcatgtgacttttgtgttaaggcagtttacccatcttggctgatgtggggaaagtgcaaacttccagtagaatcccggtcttttcatccaagtgcttgcaggggcagccttgtagtctgcaaagaaccatgcagaaaccaaagagcttgcttttttgtctttgtaattccttagggtctgtgatatatgccaggaaatctgattgaaactaatatgctttttattctcccattattccctaaattgttatatcacaggcacttgcctacattgggaaagtaaggacaaataatacccatttaaagtaacttgcctatattttgactgtctttcgtaagcacttgctgaactgctgacttaactcagttttaagatttcctctttccccccaacttttccacatttcttaaatgagggtgtaatttactgcaaacatgtacatttaatataatattgctgttagattcgtggtacactttatgaagcaaaaacatgaaaaggaaaccacaactctaataaactttaaattaaagattaagatgactctttctcacccctcttcttgagtttagcccatgtctacaccatgcacacagtcacaagactttatagcttagaaactttaggtataattgggtcctatagacataatatacaatccaccaactgagccttggccgaacttgtcccttgttaaagacgtagggctagccagccacagagctgggtattgaagtcggcaagttgtatcccggtgcaggcgtccttaaatggagagtactcagaatctgccagccttaacctgcccactagccaccctaatcaagcattaaatatctgatccaatctggccactggtgtaactccgtaatcagacatcctgtttgtaaacagctcctccttctctccctctccctctcagagacagaagtggtgctggggtttggagtttgaaaataaccttcctatgacaggaagtgggcttttgctattagttgcccaactcttagaggatcccagcttgtgtctttagacaaaactgacagcctttggaacgatcgcatggtggcgctgccttccagccaacagttctggctcagcagcagaatttatccagctatgtttgtagaatttttttaagatcctactgcattttgctcttaagcttttataaaaatttgacgagaaaatgtaaaaatgatacttggcaataagacatttagttttcatgcacctaataaaaatgtgtcaaagctagatcgctccagatgtgcttaaaatatctcaaatcctaggctctcattggccttataagtgattgggaagaaaaagaataaaataaactcacatataggagatatggaaaatatttcatcaaatattatgcccaaagagagaaaattaggagttgattttttttagcactctgaatatggaacttccttttaaaaatgtaattctacccttcacctttcctacattgtatgtttctgtgagattttactcattacaagtgaaagtagaggactgcctgtgaattgttcacttctgaaaagaatatattgagatcagttaaaattactcaagagtttggtgactcaggattgtaaaaagcctggatctcaacagctgggaggagtcagagggtgaagtgggaaaaaatagggactgagaggcaacgaaaagtccctttgaacctgtggtcatttatagcaattagagtgggttgcccctctacttctcccaagaagaaatcccaaatagattcctttcatgtcagattatactgttctgattttattttctattatttttacatatacatccaaatctaagaatacttattcagattggcccactcaggccaaaagtcactgtcttgtgttctagaaattctttcatgttgctgacataaatccatttttaaaagaacattcagggactcttagaattttagagtggaagggacctttgagatcatctaccagtgcttctcaccccttagcatgcagcaaaatcactcagatacttacttattattcacatttcttgaccccagcactagaaatctgggaggatatctgcatttttaacaagtgccctagtgattctaatgctgatggtgctcagatcgctcttggagaacccctgattttatccaactcccacatatgacaaatgaggaaagcctcccaaccctaagctctgtcaggtgacctgattccaatgtatgataccaacaatcttatgaaggctggagaaaaccattaatactgagacttgagtagatgatgctcgtgaataagaactttatggctgggaccacagcagtcatgggagcccatccctggaagtccataatataaagcctttaatacagagtggtggtttttctcttttctaaataccatttcagtctgttaagagaaaagaaattagtgttcagaaaagtagttactccatatgtgcagtaactacttttctataatgtcttatggcatctggggttcagcatcattgaacaagattaaatgaacgttatagagctataaaattgcatgtaaaataacacaaaactgttcaaatgactatcaaagtagcctgggaatgaatttccactaaaattaattgtcactttcaaaacgtagcttagcaaagctgttactaaactggagagatcctttaatacatagaaatgtcaaaaaaatcaaataagtattccctaaacgatgtgagtgataagcaaaagtcattgcaaagtcagtatttttttgttcatcattgctactgaaattcagagttccattgtatatgtgtgtcttgagtgtaccttattagaatatccaatacaatagcttttggatattctatgcttttgtgtccttcagaaatcatgagattgaaggaatctgtgttaaatgtttttgttttggttgctgcctgaaaaaagttaccaactcatttagtgaaatgcaagatttctttatgaaaatttcaatttctaatatcgaagtcagataatttttcttgaacttttattttggaacagatgtttatttcggatctattaaagtgtcaactttgcattatagaactgaacatgaa

SEQ ID NO: 10109 - DNA, 6205 bp, Homo sapiens
  source 1..6205: mol_type = unassigned DNA
aaggcggcgtggaagcagaagagcgcggccaggaaggcgagcagcttgcagcccagcgcgcccggcggcgcccccgccgcggccgccgcacgccgcgccgccagcatgacggccgggaggcaggcgagcgcgcgcagcccgtcggccaggcacaggtcgagcagcaggggctgtggggtcaccttctcttcctctcttctgccaccccaagtcgtctgtgttgcgtgtcatgcagtgggacagcacgttggtccggacctcaagctacccacgttctagtcccgcctctgtcatttcctagagctgtggcctcggatccctccctggtgccacagcagctgagtgcgcatcaaatctgaagaaaatctacacagtacagacagtacagatattttggagtgtatacaataatatccctcctgtgactagcctgcctttgagatgtagttatcatttaatgagaggagagaggcgaccactttgggaagaggagagtaatgcaaagggtggcgtatggaagatgaaagtccccaaggacagcacgtccacagtttggaaagagttgctgttagcaaccatcggggaacagttcacagactgtgccgcagcagatgatgaagtaataggagttagtgtcagtgttcgggaccgagaagacgtcgtccaagtctggaatgtaaatgcctctttagtgggtgaagcgactgttttagaaaagatctatgaacttctgccccacataacttttaaagcagtattttataaaccccatgaagagcatcatgcttttgaaggtggacgtggaaaacactaattgcactctgtaaagaattctttgtcctttgctgattggttttggaaacggtcttaacaggagggagagtgaagagaagacttgccgaagccgatgctggtcaatttagagtgggtttctgtccttgcagatgggcaattaggactcaaagtggcaggtggggtggggggagattgtgtgggtttctaccgtcacattacttgctttttaaaaaaaacacacacaaaaaactttttttttggctttctaaattctctgttcttttcactctgatttttttttttttttgccgtttaaaattccttattcagcctaattattgttttctacactcccctttcattgaggcacaagaaatgggtttccctttaagtagctctgctgtacctagttaatgagaatatgcataatcgtgacaatactgcttttgaataccacactgtacaaggaggaacactagcttggagaaatctgtcttctgattatttgttgtgacacattcctatgtactgtgagctgggcattgtttttttctgtcccagggaaaagaaaaaccatacttaatgtgattttgcactgacagcacacaaatctttaattttcctttttaaaacatttttttttagtgataaaaggaaaataatagttggattgcataacatgaaaactataatcacaattcagtatcaggatataaatcaagctctaagtctttggaccctctgtggaaacatttctaacccgaattttaatttggccttttcaaccaaaggcttagagtggtagcaagggatttcttccaataggaaacctgatgtttctgatttaaagagaaggtgatattttaattgtttgaattaagctccttgcaaagttcgggtgtgtttacccacttagggctttctttcccagtcaacgctaacacattttgttaaatgatccctttccctgctcacattgtgtgtcatttctcatcatcagtagtcctccagcctgggcagctgtccccaccctttttcatgtaggtgcaggaagttaaatctcatttccaggatgcatgtgaacatttacaaagttgaactttgagtgcattctgctcatatgaattattgggattgttgatatatattgtattatgctaccaaagaaatattggttttattagaaggaaatggtcatcctctggaccatggagactagctcagaatacgctgatttccctctcctgactttgccaagcctttggctgcttttgcctgataaagggcagggccatctgaagacacttcccccagtcggctttggagtcacgggagctagtgcctgctcacacatttttcaaaagggcagtgcactcagaacttcactgtacctgggatttttaattcctcttgcagtgttgaccagcagagagacttgaggctactttaagcctccactatgtgtttgtagataaaattctccattcaaacattttaaaggactttgaacattatctgcttatggaagttgtgcccttcacttggttagtaaccacctcagccataatacttaccatcataggtttcttaaaatgctttttttttttccctaaacttgagtttccttagtgatttcaaaatgaagtataagaatatcagatccagttagcaaaagcctaggacttgtttctccaaacattgtactaacattcaacttgttttaaaattatgactcaagaattttaaaaaattattctggacatgaattaaaacttttttataatataagtatttttctgattgaaaaaaggatataattgacttcactctaattgtcatgtatatttccataagtaaatggattttgaagtatttttattttttgaactttatttaaagcatttgtgatgacatgttcaacttttgcatgtatgtagcctttgaagtaaaaataaataggaatgttaggctcacgttaatatttctagtttctgtttatgatcatggaacatgactagcacacaaagtagatttttgccccagtgaacttctgcaactgtttctgaccctttagaaaataccaactgtgagaaggatttaatttgcctaatgttaaaaacctatcatctaaattactttcagagaggattttgtcagattttggtttggaaattgttttaattgaatatttaatcataatagactttgtatgaactaagctgatttaatcagtttaaaaacctctcattaccttcttagattaaagaagctaatactgttttgagatagaaggaaatattttgtggggcatgtgacttttgtgttaaggcagtttacccatcttggctgatgtggggaaagtgcaaacttccagtagaatcccggtcttttcatccaagtgcttgcaggggcagccttgtagtctgcaaagaaccatgcagaaaccaaagagcttgcttttttgtctttgtaattccttagggtctgtgatatatgccaggaaatctgattgaaactaatatgctttttattctcccattattccctaaattgttatatcacaggcacttgcctacattgggaaagtaaggacaaataatacccatttaaagtaacttgcctatattttgactgtctttcgtaagcacttgctgaactgctgacttaactcagttttaagatttcctctttccccccaacttttccacatttcttaaatgagggtgtaatttactgcaaacatgtacatttaatataatattgctgttagattcgtggtacactttatgaagcaaaaacatgaaaaggaaaccacaactctaataaactttaaattaaagattaagatgactctttctcacccctcttcttgagtttagcccatgtctacaccatgcacacagtcacaagactttatagcttagaaactttaggtataattgggtcctatagacataatatacaatccaccaactgagccttggccgaacttgtcccttgttaaagacgtagggctagccagccacagagctgggtattgaagtcggcaagttgtatcccggtgcaggcgtccttaaatggagagtactcagaatctgccagccttaacctgcccactagccaccctaatcaagcattaaatatctgatccaatctggccactggtgtaactccgtaatcagacatcctgtttgtaaacagctcctccttctctccctctccctctcagagacagaagtggtgctggggtttggagtttgaaaataaccttcctatgacaggaagtgggcttttgctattagttgcccaactcttagaggatcccagcttgtgtctttagacaaaactgacagcctttggaacgatcgcatggtggcgctgccttccagccaacagttctggctcagcagcagaatttatccagctatgtttgtagaatttttttaagatcctactgcattttgctcttaagcttttataaaaatttgacgagaaaatgtaaaaatgatacttggcaataagacatttagttttcatgcacctaataaaaatgtgtcaaagctagatcgctccagatgtgcttaaaatatctcaaatcctaggctctcattggccttataagtgattgggaagaaaaagaataaaataaactcacatataggagatatggaaaatatttcatcaaatattatgcccaaagagagaaaattaggagttgattttttttagcactctgaatatggaacttccttttaaaaatgtaattctacccttcacctttcctacattgtatgtttctgtgagattttactcattacaagtgaaagtagaggactgcctgtgaattgttcacttctgaaaagaatatattgagatcagttaaaattactcaagagtttggtgactcaggattgtaaaaagcctggatctcaacagctgggaggagtcagagggtgaagtgggaaaaaatagggactgagaggcaacgaaaagtccctttgaacctgtggtcatttatagcaattagagtgggttgcccctctacttctcccaagaagaaatcccaaatagattcctttcatgtcagattatactgttctgattttattttctattatttttacatatacatccaaatctaagaatacttattcagattggcccactcaggccaaaagtcactgtcttgtgttctagaaattctttcatgttgctgacataaatccatttttaaaagaacattcagggactcttagaattttagagtggaagggacctttgagatcatctaccagtgcttctcaccccttagcatgcagcaaaatcactcagatacttacttattattcacatttcttgaccccagcactagaaatctgggaggatatctgcatttttaacaagtgccctagtgattctaatgctgatggtgctcagatcgctcttggagaacccctgattttatccaactcccacatatgacaaatgaggaaagcctcccaaccctaagctctgtcaggtgacctgattccaatgtatgataccaacaatcttatgaaggctggagaaaaccattaatactgagacttgagtagatgatgctcgtgaataagaactttatggctgggaccacagcagtcatgggagcccatccctggaagtccataatataaagcctttaatacagagtggtggtttttctcttttctaaataccatttcagtctgttaagagaaaagaaattagtgttcagaaaagtagttactccatatgtgcagtaactacttttctataatgtcttatggcatctggggttcagcatcattgaacaagattaaatgaacgttatagagctataaaattgcatgtaaaataacacaaaactgttcaaatgactatcaaagtagcctgggaatgaatttccactaaaattaattgtcactttcaaaacgtagcttagcaaagctgttactaaactggagagatcctttaatacatagaaatgtcaaaaaaatcaaataagtattccctaaacgatgtgagtgataagcaaaagtcattgcaaagtcagtatttttttgttcatcattgctactgaaattcagagttccattgtatatgtgtgtcttgagtgtaccttattagaatatccaatacaatagcttttggatattctatgcttttgtgtccttcagaaatcatgagattgaaggaatctgtgttaaatgtttttgttttggttgctgcctgaaaaaagttaccaactcatttagtgaaatgcaagatttctttatgaaaatttcaatttctaatatcgaagtcagataatttttcttgaacttttattttggaacagatgtttatttcggatctattaaagtgtcaactttgcattatagaactgaacatg

SEQ ID NO: 10110 - DNA, 519 bp, Homo sapiens
  source 1..519: mol_type = unassigned DNA
ggtgactggatgctggaggggaggggagtagctgctgcagctaattgcttaattatttatgagtgcctcaagtccttcttgttgtttttgttgctaggggctgtggggtcaccttctcttcctctcttctgccaccccaagtcgtctgtgttgcgtgtcatgcagtgggacagcacgttggtccggacctcaagctacccacgttctagtcccgcctctgtcatttcctagagctgtggcctcggatccctccctggtgccacagcagctgagtgcgcatcaaatctgaagaaaatctacacagtacagacagtacagatattttggagtgtatacaataatatccctcctgtgactagcctgcctttgagatgtagttatcatttaatgagaggagagaggcgaccactttgggaagaggagagtaatgcaaagggtggcgtatggaagatgaaagtccccaaggacagcacgtccacagtttggaaagagttgctgttagcaaccatcggggaacag

SEQ ID NO: 10111 - DNA, 613 bp, Homo sapiens
  source 1..613: mol_type = unassigned DNA
ggaaggcggcgtggaagcagaagagcgcggccaggaaggcgagcagcttgcagcccagcgcgcccggcggcgcccccgccgcggccgccgcacgccgcgccgccagcatgacggccgggaggcaggcgagcgcgcgcagcccgtcggccaggcacaggtcgagcagcaggggctgtggggtcaccttctcttcctctcttctgccaccccaagtcgtctgtgttgcgtgtcatgcagtgggacagcacgttggtccggacctcaagctacccacgttctagtcccgcctctgtcatttcctagagctgtggcctcggatccctccctggtgccacagcagctgagtgcgcatcaaatctgaagaaaatctacacagtacagacagtacagatattttggagtgtatacaataatatccctcctgtgactagcctgcctttgagatgtagttatcatttaatgagaggagagaggcgaccactttgggaagaggagagtaatgcaaagggtggcgtatggaagatgaaagtccccaaggacagcacgtccacagtttggaaagagttgctgttagcaaccatcggggaacagttcacagactgtgccgcagcag

SEQ ID NO: 10112 - DNA, 693 bp, Homo sapiens
  source 1..693: mol_type = unassigned DNA
gtagaagagagaggaccacttgttgctaggcaaccagcacccacctcacccatgttgccatggtgatgatgaaagttgggctgatgggattaccagctcctgctaattgcatatgagtgctcaggggctgtggggtcaccttctcttcctctcttctgccaccccaagtcgtctgtgttgcgtgtcatgcagtgggacagcacgttggtccggacctcaagctacccacgttctagtcccgcctctgtcatttcctagagctgtggcctcggatccctccctggtgccacagcagctgagtgcgcatcaaatctgaagaaaatctacacagtacagacagtacagatattttggagtgtatacaataatatccctcctgtgactagcctgcctttgagatgtagttatcatttaatgagaggagagaggcgaccactttgggaagaggagagtaatgcaaagggtggcgtatggaagatgaaagtccccaaggacagcacgtccacagtttggaaagagttgctgttagcaaccatcggggaacagttcacagactgtgccgcagcagatgatgaagtaataggagttagtgtcagtgttcgggaccgagaagacgtcgtccaagtctggaatgtaaatgcctctttagtgggtgaagcgactgttttagaaaagatctatgaacttctgccc

SEQ ID NO: 10113 - DNA, 3544 bp, Homo sapiens
  source 1..3544: mol_type = unassigned DNA
ggggagcggcggccgaggcaaagggccgccgagcggcggaggcaccgagtgcagagcattgtagaccaaggagccatggataggagaagtatgggtgaaacagaaagtggagatgctttccttgacctgaagaagcctcctgcctccaaatgcccccatcgctatacaaaagaagaactcttggatataaaagaactcccccattccaaacagaggccttcatgcctttctgaaaaatatgacagtgatggtgtctgggaccctgagaagtggcatgcctctctctacccagcttcagggcggagctcaccagtggaaagtctgaagaaagagttggatacagaccggccttccctggtgcgcaggatagtagatccacgagagcgtgtgaaagaagatgacttagatgttgttctcagccctcagagacggagctttggagggggctgccacgtgacagccgctgttagctcccggcgctcaggaagtccattagagaaagatagtgatgggcttcgtctgcttggtggacgtaggattggcagtgggaggataatctctgcccggacctttgagaaggatcaccgtcttagcgataaggacctgcgggacttgagagacagagaccgagagagggacttcaaggacaagcgtttcaggagagagtttggagatagtaagcgtgtctttggtgagcgtagaagaaatgattcttacacagaagaagaaccagagtggttctctgctggacccacaagtcagtctgaaaccatcgaactgactggctttgatgataagatactagaagaagatcacaaagggagaaaaagaacaaggcgacggacagcctctgtgaaggaaggtatagtagagtgcaatggaggagtggccgaagaggatgaagtggaggtcatccttgcacaggagcctgcggctgatcaggaagtgccaagggatgctgtcttgcctgagcagtccccaggagactttgactttaatgagttctttaaccttgataaggtgccatgcttggcttcgatgatagaagatgttttgggagaagggtcagtctctgccagtcggttcagtaggtggttctctaacccgagcagatcaggaagccgatccagcagtcttgggtcaacaccacatgaagagctagagagacttgcaggtctggagcaagccatcctctctcctggacagaactcggggaattactttgctcctataccattggaagaccatgctgaaaataaagtggatattttagaaatgctacagaaagccaaagtggatttgaaacctcttctttccagcctttctgcaaataaagaaaaacttaaagaaagctcacattcaggggttgtgctttcagtggaggaggtagaagcaggtctgaagggcttgaaggttgaccagcaagtgaagaattcaactcccttcatggcagaacacctagaagagaccttgagtgccgtaaccaacaatcgacaactgaagaaagacggagacatgactgcgttcaacaagctagtgagcacaatgaaggcaagtgggactttgccttctcagcccaaagtcagccgaaaccttgaaagccatttgatgtcccctgctgagattccaggccagcctgtccctaagaacatcctgcaggaacttctgggtcaaccagttcagagacctgcttcttccaatcttctgagtggccttatggggagcttggagcctacaacatctttactgggccaaagagcaccctctcctcccttgtcacaggtgtttcaaactcgagcagcctcagctgactaccttcgcccaagaataccatcaccaattggtttcacaccaggaccacagcagctactcggagatccattccaaggcatgcgcaaacccatgagccccatcacagcccagatgagccagctggagttgcaacaggcagctttagaagggctggccttgccacatgaccttgctgtacaggcagcaaacttctaccagcctggttttggcaaaccacaggtggacagaaccagagatggattcagaaacaggcaacagcgagtgaccaagtcaccagcacccgtgcatcgagggaattcctcttcccctgcccctgctgcctccatcacaagcatgctttctccttcctttacccctacctcagtgattcgtaagatgtacgagagcaaagagaaaagcaaggaggagccagcatctggaaaagcagctcttggtgacagtaaagaggatactcagaaggccagtgaagaaaacctcctgtcatccagctctgtacccagtgccgatcgagactcttctcccactacaaattccaaactgtcagcattacagaggtcttcgtgttccaccccactgtcccaggccaaccgttacaccaaagaacaagattatcgacctaaagcaactgggagaaaaacacccaccttggcatccccagttcctacaacaccttttctccgccctgtccaccaagttccccttgtcccccatgtccctatggttaggcctgctcaccagcttcacccagggttggtacagaggatgctggcccagggagtacatccacagcatcttccaagtttgctccaaactggtgtgcttcctcctgggatggacttgagtcatttacagggaatatctggccccatcctgggtcagcccttttaccctttacctgctgctagtcaccctctcttaaaccctcgtcctggaacacctctgcatctggcaatggtgcaacagcagctacagcgctcagttctgcatcctccaggctctggttcccatgcagcagctgtcagcgttcagacaacccctcagaacgtgcccagccggtcaggcctgccccacatgcactcccagctggagcatcgccccagccagaggagcagctcccctgtgggccttgccaaatggtttggctcagatgtgctacagcaacccctgccctccatgcccgccaaagttatcagtgtagatgaattggaataccgacagtgagcagggcaggcagactcaactaagcccggacctgtggtggcacactgggcaggaccctgcttcatctcgggttggtttatgggcttttactttggagcactctgtgtgaagctgtttggtggaacccatgcatctggtgtggtccgcattatgatggaaggatcttaaccagtcgagtggagtgtacattgtctgaatacaggatgcacaatgttgtcaatcctggaaatggtctttcttttttgtaagatatgtgaatgaagtgttggtgtcctcaccaagaggtggcacctaagggttctgaggaaataaatgtatagacccttatgtacagacctgtgtataaacaacttttgtatatacatataggatagcttttttgaactatacagctgtacataaaagtagctgatattagttaggcctgtgtcaacagtttggatttttttcacttgtacatttgggattttcttttggttgattaaaattgcatatgctaagtgtgtgaatg

SEQ ID NO: 10114 - DNA, 3111 bp, Homo sapiens
  source 1..3111: mol_type = unassigned DNA
gagacagcccaagccggtcggggtgggggcgcgagagcgaaggctgcggggagcggcgctgggaccggtgcgggcagcggggaggggagcggcggccgaggcaaagggccgccgagcggcggaggcaccgagtgcagagcattgtagaccaaggagccatggataggagaagtatgggtgaaacagaaagtggagatgctttccttgacctgaagaagcctcctgcctccaaatgcccccatcgctatacaaaagaagaactcttggatataaaagaactcccccattccaaacagaggccttcatgcctttctgaaaaatatgacagtgatggtgtctgggaccctgagaagtggcatgcctctctctacccagcttcagggcggagctcaccagtggaaagtctgaagaaagagttggatacagaccggccttccctggtgcgcaggatagtaggtatagtagagtgcaatggaggagtggccgaagaggatgaagtggaggtcatccttgcacaggagcctgcggctgatcaggaagtgccaagggatgctgtcttgcctgagcagtccccaggagactttgactttaatgagttctttaaccttgataaggtgccatgcttggcttcgatgatagaagatgttttgggagaagggtcagtctctgccagtcggttcagtaggtggttctctaacccgagcagatcaggaagccgatccagcagtcttgggtcaacaccacatgaagagctagagagacttgcaggtctggagcaagccatcctctctcctggacagaactcggggaattactttgctcctataccattggaagaccatgctgaaaataaagtggatattttagaaatgctacagaaagccaaagtggatttgaaacctcttctttccagcctttctgcaaataaagaaaaacttaaagaaagctcacattcaggggttgtgctttcagtggaggaggtagaagcaggtctgaagggcttgaaggttgaccagcaagtgaagaattcaactcccttcatggcagaacacctagaagagaccttgagtgccgtaaccaacaatcgacaactgaagaaagacggagacatgactgcgttcaacaagctagtgagcacaatgaagcgaaaccttgaaagccatttgatgtcccctgctgagattccaggccagcctgtccctaagaacatcctgcaggaacttctgggtcaaccagttcagagacctgcttcttccaatcttctgagtggccttatggggagcttggagcctacaacatctttactgggccaaagagcaccctctcctcccttgtcacaggtgtttcaaactcgagcagcctcagctgactaccttcgcccaagaataccatcaccaattggtttcacaccaggaccacagcagctactcggagatccattccaaggcatgcgcaaacccatgagccccatcacagcccagcagatgagccagctggagttgcaacaggcagctttagaagggctggccttgccacatgaccttgctgtacaggcagcaaacttctaccagcctggttttggcaaaccacaggtggacagaaccagagatggattcagaaacaggcaacagcgagtgaccaagtcaccagcacccgtgcatcgagggaattcctcttcccctgcccctgctgcctccatcacaagcatgctttctccttcctttacccctacctcagtgattcgtaagatgtacgagagcaaagagaaaagcaaggaggagccagcatctggaaaagcagctcttggtgacagtaaagaggatactcagaaggccagtgaagaaaacctcctgtcatccagctctgtacccagtgccgatcgagactcttctcccactacaaattccaaactgtcagcattacagaggtcttcgtgttccaccccactgtcccaggccaaccgttacaccaaagaacaagattatcgacctaaagcaactgggagaaaaacacccaccttggcatccccagttcctacaacaccttttctccgccctgtccaccaagttccccttgtcccccatgtccctatggttaggcctgctcaccagcttcacccagggttggtacagaggatgctggcccagggagtacatccacagcatcttccaagtttgctccaaactggtgtgcttcctcctgggatggacttgagtcatttacagggaatatctggccccatcctgggtcagcccttttaccctttacctgctgctagtcaccctctcttaaaccctcgtcctggaacacctctgcatctggcaatggtgcaacagcagctacagcgctcagttctgcatcctccaggctctggttcccatgcagcagctgtcagcgttcagacaacccctcagaacgtgcccagccggtcaggcctgccccacatgcactcccagctggagcatcgccccagccagaggagcagctcccctgtgggccttgccaaatggtttggctcagatgtgctacagcaacccctgccctccatgcccgccaaagttatcagtgtagatgaattggaataccgacagtgagcagggcaggcagactcaactaagcccggacctgtggtggcacactgggcaggaccctgcttcatctcgggttggtttatgggcttttactttggagcactctgtgtgaagctgtttggtggaacccatgcatctggtgtggtccgcattatgatggaaggatcttaaccagtcgagtggagtgtacattgtctgaatacaggatgcacaatgttgtcaatcctggaaatggtctttcttttttgtaagatatgtgaatgaagtgttggtgtcctcaccaagaggtggcacctaagggttctgaggaaataaatgtatagacccttatgtacagacctgtgtataaacaacttttgtatatacatataggatagcttttttgaactatacagctgtacataaaagtagctgatattagttaggcctgtgtcaacagtttggatttttttcacttgtacatttgggattttcttttggttgattaaaattgcatatgctaagtgtgtgaatgaagtaa

SEQ ID NO: 10115 - DNA, 2151 bp, Homo sapiens
  source 1..2151: mol_type = unassigned DNA
ttttcttcagatgatagaagatgttttgggagaagggtcagtctctgccagtcggttcagtaggtggttctctaacccgagcagatcaggaagccgatccagcagtcttgggtcaacaccacatgaagagctagagagacttgcaggtctggagcaagccatcctctctcctggacagaactcggggaattactttgctcctataccattggaagaccatgctgaaaataaagtggatattttagaaatgctacagaaagccaaagtggatttgaaacctcttctttccagcctttctgcaaataaagaaaaacttaaagaaagctcacattcaggggttgtgctttcagtggaggaggtagaagcaggtctgaagggcttgaaggttgaccagcaagtgaagaattcaactcccttcatggcagaacacctagaagagaccttgagtgccgtaaccaacaatcgacaactgaagaaagacggagacatgactgcgttcaacaagctagtgagcacaatgaaggcaagtgggactttgccttctcagcccaaagtcagcgaacttctgggtcaaccagttcagagacctgcttcttccaatcttctgagtggccttatggggagcttggagcctacaacatctttactgggccaaagagcaccctctcctcccttgtcacaggtgtttcaaactcgagcagcctcagctgactaccttcgcccaagaataccatcaccaattggtttcacaccaggaccacagcagctactcggagatccattccaaggcatgcgcaaacccatgagccccatcacagcccagatgagccagctggagttgcaacaggcagctttagaagggctggccttgccacatgaccttgctgtacaggcagcaaacttctaccagcctggttttggcaaaccacaggtggacagaaccagagatggattcagaaacaggcaacagcgagtgaccaagtcaccagcacccgtgcatcgagggaattcctcttcccctgcccctgctgcctccatcacaagcatgctttctccttcctttacccctacctcagtgattcgtaagatgtacgagagcaaagagaaaagcaaggaggagccagcatctggaaaagcagctcttggtgacagtaaagaggatactcagaaggccagtgaagaaaacctcctgtcatccagctctgtacccagtgccgatcgagactcttctcccactacaaattccaaactgtcagcattacagaggtcttcgtgttccaccccactgtcccaggccaaccgttacaccaaagaacaagattatcgacctaaagcaactgggagaaaaacacccaccttggcatccccagttcctacaacaccttttctccgccctgtccaccaagttccccttgtcccccatgtccctatggttaggcctgctcaccagcttcacccagggttggtacagaggatgctggcccagggagtacatccacagcatcttccaagtttgctccaaactggtgtgcttcctcctgggatggacttgagtcatttacagggaatatctggccccatcctgggtcagcccttttaccctttacctgctgctagtcaccctctcttaaaccctcgtcctggaacacctctgcatctggcaatggtgcaacagcagctacagcgctcagttctgcatcctccaggctctggttcccatgcagcagctgtcagcgttcagacaacccctcagaacgtgcccagccggtcaggcctgccccacatgcactcccagctggagcatcgccccagccagaggagcagctcccctgtgggccttgccaaatggtttggctcagatgtgctacagcaacccctgccctccatgcccgccaaagttatcagtgtagatgaattggaataccgacagtgagcagggcaggcagactcaactaagcccggacctgtggtggcacactgggcaggaccctgcttcatctcgggttggtttatgggcttttactttggagcactctgtgtgaagctgtttggtggaacccatgcatctggtgtggtccgcattatgatggaaggatcttaaccagtcgagtggagtgtacattgtctgaatacaggatgcacaatgttgtc

SEQ ID NO: 10116 - DNA, 251 bp, Homo sapiens
  source 1..251: mol_type = unassigned DNA
gcgcgcggcggggaaggcggcgccggggccagggtgcagagcattgtagaccaaggagccatggataggagaagtatgggtgaaacagaaagtggagatgctttccttgacctgaagaagcctcctgcctccaaatgcccccatcgctatacaaaagaagaactcttggatataaaagaactcccccattccaaacagaggccttcatgcctttctgaaaaatatgacagtgatggtgtctgggaccctga

SEQ ID NO: 10117 - DNA, 374 bp, Homo sapiens
  source 1..374: mol_type = unassigned DNA
gttcacagggagtggaaaccggaacccgtggagtatgacccgcccatgcgtggacccggcaggttgctacaacttgcacttggaggggagaggtcccaaggcccccgaattagaaatgccaggctcatctctttttgtaacccttcattttaaaatgtgcagagcattgtagaccaaggagccatggataggagaagtatgggtgaaacagaaagtggagatgctttccttgacctgaagaagcctcctgcctccaaatgcccccatcgctatacaaaagaagaactcttggatataaaagaactcccccattccaaacagaggccttcatgcctttctgaaaaatatgacagtgatggtgtctgggaccctga

SEQ ID NO: 10118 - DNA, 3420 bp, Homo sapiens
  source 1..3420: mol_type = unassigned DNA
gtgcagagcattgtagaccaaggagccatggataggagaagtatgggtgaaacagaaagtggagatgctttccttgacctgaagaagcctcctgcctccaaatgcccccatcgctatacaaaagaagaactcttggatataaaagaactcccccattccaaacagaggccttcatgcctttctgaaaaatatgacagtgatggtgtctgggaccctgagaagtggcatgcctctctctacccagcttcagggcggagctcaccagtggaaagtctgaagaaagagttggatacagaccggccttccctggtgcgcaggatagtagatccacgagagcgtgtgaaagaagatgacttagatgttgttctcagccctcagagacggagctttggagggggctgccacgtgacagccgctgttagctcccggcgctcaggaagtccattagagaaagatagtgatgggcttcgtctgcttggtggacgtaggattggcagtgggaggataatctctgcccggacctttgagaaggatcaccgtcttagcgataaggacctgcgggacttgagagacagagaccgagagagggacttcaaggacaagcgtttcaggagagagtttggagatagtaagcgtgtctttggtgagcgtagaagaaatgattcttacacagaagaagaaccagagtggttctctgctggacccacaagtcagtctgaaaccatcgaactgactggctttgatgataagatactagaagaagatcacaaagggagaaaaagaacaaggcgacggacagcctctgtgaaggaaggtatagtagagtgcaatggaggagtggccgaagaggatgaagtggaggtcatccttgcacaggagcctgcggctgatcaggaagtgccaagggatgctgtcttgcctgagcagtccccaggagactttgactttaatgagttctttaaccttgataaggtgccatgcttggcttcgatgatagaagatgttttgggagaagggtcagtctctgccagtcggttcagtaggtggttctctaacccgagcagatcaggaagccgatccagcagtcttgggtcaacaccacatgaagagctagagagacttgcaggtctggagcaagccatcctctctcctggacagaactcggggaattactttgctcctataccattggaagaccatgctgaaaataaagtggatattttagaaatgctacagaaagccaaagtggatttgaaacctcttctttccagcctttctgcaaataaagaaaaacttaaagaaagctcacattcaggggttgtgctttcagtggaggaggtagaagcaggtctgaagggcttgaaggttgaccagcaagtgaagaattcaactcccttcatggcagaacacctagaagagaccttgagtgccgtaaccaacaatcgacaactgaagaaagacggagacatgactgcgttcaacaagctagtgagcacaatgaaggcaagtgggactttgccttctcagcccaaagtcagcgaacttctgggtcaaccagttcagagacctgcttcttccaatcttctgagtggccttatggggagcttggagcctacaacatctttactgggccaaagagcaccctctcctcccttgtcacaggtgtttcaaactcgagcagcctcagctgactaccttcgcccaagaataccatcaccaattggtttcacaccaggaccacagcagctactcggagatccattccaaggcatgcgcaaacccatgagccccatcacagcccagatgagccagctggagttgcaacaggcagctttagaagggctggccttgccacatgaccttgctgtacaggcagcaaacttctaccagcctggttttggcaaaccacaggtggacagaaccagagatggattcagaaacaggcaacagcgagtgaccaagtcaccagcacccgtgcatcgagggaattcctcttcccctgcccctgctgcctccatcacaagcatgctttctccttcctttacccctacctcagtgattcgtaagatgtacgagagcaaagagaaaagcaaggaggagccagcatctggaaaagcagctcttggtgacagtaaagaggatactcagaaggccagtgaagaaaacctcctgtcatccagctctgtacccagtgccgatcgagactcttctcccactacaaattccaaactgtcagcattacagaggtcttcgtgttccaccccactgtcccaggccaaccgttacaccaaagaacaagattatcgacctaaagcaactgggagaaaaacacccaccttggcatccccagttcctacaacaccttttctccgccctgtccaccaagttccccttgtcccccatgtccctatggttaggcctgctcaccagcttcacccagggttggtacagaggatgctggcccagggagtacatccacagcatcttccaagtttgctccaaactggtgtgcttcctcctgggatggacttgagtcatttacagggaatatctggccccatcctgggtcagcccttttaccctttacctgctgctagtcaccctctcttaaaccctcgtcctggaacacctctgcatctggcaatggtgcaacagcagctacagcgctcagttctgcatcctccaggctctggttcccatgcagcagctgtcagcgttcagacaacccctcagaacgtgcccagccggtcaggcctgccccacatgcactcccagctggagcatcgccccagccagaggagcagctcccctgtgggccttgccaaatggtttggctcagatgtgctacagcaacccctgccctccatgcccgccaaagttatcagtgtagatgaattggaataccgacagtgagcagggcaggcagactcaactaagcccggacctgtggtggcacactgggcaggaccctgcttcatctcgggttggtttatgggcttttactttggagcactctgtgtgaagctgtttggtggaacccatgcatctggtgtggtccgcattatgatggaaggatcttaaccagtcgagtggagtgtacattgtctgaatacaggatgcacaatgttgtcaatcctggaaatggtctttcttttttgtaagatatgtgaatgaagtgttggtgtcctcaccaagaggtggcacctaagggttctgaggaaataaatgtatagacccttatgtacagacctgtgtataaacaacttttgtatatacatataggatagcttttttgaactatacagctgtacataaaagtagctgatattagttaggcctgtgtcaacagtttggatttttttcacttgtacatttgggattttcttttggttgattaaaattgcatatgctaagtgtgtg

SEQ ID NO: 10119 - DNA, 3695 bp, Homo sapiens
  source 1..3695: mol_type = unassigned DNA
gcgggcgccggggcgcccgcagggggtgggcaggggcgcgaggcccgcaaggcggccggcgggtagccggcgggctggctggcggggaccgagccgccgggccggggaggacggctgcgggcctgcgctagctccagcttgaagcgcccgggccgggagattcggcctccctcctccctgcggccggccgcccctcagtgcagagcattgtagaccaaggagccatggataggagaagtatgggtgaaacagaaagtggagatgctttccttgacctgaagaagcctcctgcctccaaatgcccccatcgctatacaaaagaagaactcttggatataaaagaactcccccattccaaacagaggccttcatgcctttctgaaaaatatgacagtgatggtgtctgggaccctgagaagtggcatgcctctctctacccagcttcagggcggagctcaccagtggaaagtctgaagaaagagttggatacagaccggccttccctggtgcgcaggatagtagatccacgagagcgtgtgaaagaagatgacttagatgttgttctcagccctcagagacggagctttggagggggctgccacgtgacagccgctgttagctcccggcgctcaggaagtccattagagaaagatagtgatgggcttcgtctgcttggtggacgtaggattggcagtgggaggataatctctgcccggacctttgagaaggatcaccgtcttagcgataaggacctgcgggacttgagagacagagaccgagagagggacttcaaggacaagcgtttcaggagagagtttggagatagtaagcgtgtctttggtgagcgtagaagaaatgattcttacacagaagaagaaccagagtggttctctgctggacccacaagtcagtctgaaaccatcgaactgactggctttgatgataagatactagaagaagatcacaaagggagaaaaagaacaaggcgacggacagcctctgtgaaggaaggtatagtagagtgcaatggaggagtggccgaagaggatgaagtggaggtcatccttgcacaggagcctgcggctgatcaggaagtgccaagggatgctgtcttgcctgagcagtccccaggagactttgactttaatgagttctttaaccttgataaggtgccatgcttggcttcgatgatagaagatgttttgggagaagggtcagtctctgccagtcggttcagtaggtggttctctaacccgagcagatcaggaagccgatccagcagtcttgggtcaacaccacatgaagagctagagagacttgcaggtctggagcaagccatcctctctcctggacagaactcggggaattactttgctcctataccattggaagaccatgctgaaaataaagtggatattttagaaatgctacagaaagccaaagtggatttgaaacctcttctttccagcctttctgcaaataaagaaaaacttaaagaaagctcacattcaggggttgtgctttcagtggaggaggtagaagcaggtctgaagggcttgaaggttgaccagcaagtgaagaattcaactcccttcatggcagaacacctagaagagaccttgagtgccgtaaccaacaatcgacaactgaagaaagacggagacatgactgcgttcaacaagctagtgagcacaatgaaggcaagtgggactttgccttctcagcccaaagtcagccgaaaccttgaaagccatttgatgtcccctgctgagattccaggccagcctgtccctaagaacatcctgcaggaacttctgggtcaaccagttcagagacctgcttcttccaatcttctgagtggccttatggggagcttggagcctacaacatctttactgggccaaagagcaccctctcctcccttgtcacaggtgtttcaaactcgagcagcctcagctgactaccttcgcccaagaataccatcaccaattggtttcacaccaggaccacagcagctactcggagatccattccaaggcatgcgcaaacccatgagccccatcacagcccagatgagccagctggagttgcaacaggcagctttagaagggctggccttgccacatgaccttgctgtacaggcagcaaacttctaccagcctggttttggcaaaccacaggtggacagaaccagagatggattcagaaacaggcaacagcgagtgaccaagtcaccagcacccgtgcatcgagggaattcctcttcccctgcccctgctgcctccatcacaagcatgctttctccttcctttacccctacctcagtgattcgtaagatgtacgagagcaaagagaaaagcaaggaggagccagcatctggaaaagcagctcttggtgacagtaaagaggatactcagaaggccagtgaagaaaacctcctgtcatccagctctgtacccagtgccgatcgagactcttctcccactacaaattccaaactgtcagcattacagaggtcttcgtgttccaccccactgtcccaggccaaccgttacaccaaagaacaagattatcgacctaaagcaactgggagaaaaacacccaccttggcatccccagttcctacaacaccttttctccgccctgtccaccaagttccccttgtcccccatgtccctatggttaggcctgctcaccagcttcacccagggttggtacagaggatgctggcccagggagtacatccacagcatcttccaagtttgctccaaactggtgtgcttcctcctgggatggacttgagtcatttacagggaatatctggccccatcctgggtcagcccttttaccctttacctgctgctagtcaccctctcttaaaccctcgtcctggaacacctctgcatctggcaatggtgcaacagcagctacagcgctcagttctgcatcctccaggctctggttcccatgcagcagctgtcagcgttcagacaacccctcagaacgtgcccagccggtcaggcctgccccacatgcactcccagctggagcatcgccccagccagaggagcagctcccctgtgggccttgccaaatggtttggctcagatgtgctacagcaacccctgccctccatgcccgccaaagttatcagtgtagatgaattggaataccgacagtgagcagggcaggcagactcaactaagcccggacctgtggtggcacactgggcaggaccctgcttcatctcgggttggtttatgggcttttactttggagcactctgtgtgaagctgtttggtggaacccatgcatctggtgtggtccgcattatgatggaaggatcttaaccagtcgagtggagtgtacattgtctgaatacaggatgcacaatgttgtcaatcctggaaatggtctttcttttttgtaagatatgtgaatgaagtgttggtgtcctcaccaagaggtggcacctaagggttctgaggaaataaatgtatagacccttatgtacagacctgtgtataaacaacttttgtatatacatataggatagcttttttgaactatacagctgtacataaaagtagctgatattagttaggcctgtgtcaacagtttggatttttttcacttgtacatttgggattttcttttggttgattaaaattgcatatgctaagtgtgtgaatgaa

SEQ ID NO: 10120 - DNA, 1530 bp, Homo sapiens
  source 1..1530: mol_type = unassigned DNA
attaagggggagggggccgaagaggaggggcggagggccgggctgcagttacggcggctgaagagagacagcccaagccggtcggggtgggggcgcgagagcgaaggctgcggggagcggcgctgggaccggtgcgggcagcggggaggggagcggcggccgaggcaaagggccgccgagcggcggaggcaccgagtgcagagcattgtagaccaaggagccatggataggagaagtatgggtgaaacagaaagtggagatgctttccttgacctgaagaagcctcctgcctccaaatgcccccatcgctatacaaaagaagaactcttggatataaaagaactcccccattccaaacagaggccttcatgcctttctgaaaaatatgacagtgatggtgtctgggaccctgagaagtggcatgcctctctctacccagcttcagggcggagctcaccagtggaaagtctgaagaaagagttggatacagaccggccttccctggtgcgcaggatagtagatccacgagagcgtgtgaaagaagatgacttagatgttgttctcagccctcagagacggagctttggagggggctgccacgtgacagccgctgttagctcccggcgctcaggaagtccattagagaaagatagtgatgggcttcgtctgcttggtggacgtaggattggcagtgggaggataatctctgcccggacctttgagaaggatcaccgtcttagcgataaggacctgcgggacttgagagacagagaccgagagagggacttcaaggacaagcgtttcaggagagagtttggagatagtaagcgtgtctttggtgagcgtagaagaaatgattcttacacagaagaagaaccagagtggttctctgctggacccacaagtcagtctgaaaccatcgaactgactggctttgatgataagatactagaagaagatcacaaagggagaaaaagaacaaggcgacggacagcctctgtgaaggaaggtatagtagagtgcaatggaggagtggccgaagaggatgaagtggaggtcatccttgcacaggagcctgcggctgatcaggaagtgccaagggatgctgtcttgcctgagcagtccccaggagactttgactttaatgagttctttaaccttgataaggtgccatgcttggcttcgatgatagaagatgttttgggagaagggtcagtctctgccagtcggttcagtaggtggttctctaacccgagcagatcaggaagccgatccagcagtcttgggtcaacaccacatgaagagctagagagacttgcaggtctggagcaagccatcctctctcctggacagaactcggggaattactttgctcctataccattggaagaccatgctgaaaataaagtggatattttagaaatgctacagaaagccaaagtggatttgaaacctcttctttccagcctttctgcaaataaagaaaaacttaaagaaagcttgagactgtctccaaaaaaaaaaaaaaaa

SEQ ID NO: 10121 - DNA, 688 bp, Homo sapiens
  source 1..688: mol_type = unassigned DNA
tggccacaggtgcggctggcctggcgaggggcgctcgggccccgtccccagtccctgatcgccggataacaaggggcagctggcgccgtccattggtgcagagcattgtagaccaaggagccatggataggagaagtatgggtgaaacagaaagtggagatgctttccttgacctgaagaagcctcctgcctccaaatgcccccatcgctatacaaaagaagaactcttggatataaaagaactcccccattccaaacagaggccttcatgcctttctgaaaaatatgacagtgatggtgtctgggaccctgagaagtggcatgcctctctctacccagcttcagggcggagctcaccagtggaaagtctgaagaaagagttggatacagaccggccttccctggtgcgcaggatagtagatccacgagagcgtgtgaaagaagatgacttagatgttgttctcagccctcagagacggagctttggagggggctgccacgtgacagccgctgttagctcccggcgctcaggaagtccattagagaaagatagtgatgggcttcgtctgcttggtggacgtaggattggcagtgggaggataatctctgcccggacctttgagaaggatcaccgtcttagcgataaggacctgcgggacttgagagacagagaccgagagagggactt

SEQ ID NO: 10122 - DNA, 2679 bp, Homo sapiens
  source 1..2679: mol_type = unassigned DNA
gcgcgcgcgtgcgcgtgcctgcgtccaagggatttgcgatcaggcggcgcggcggacagccccggcggcggggcggggggagttatattgcggggtccttcctcgctcaccctggttcctctcggagcggagacggcaaatggcggacttcgacacctacgacgatcgggcctacagcagcttcggcggcggcagagggtcccgcggcagtgctggtggccatggttcccgtagccagaaggagttgcccacagagcccccctacacagcatacgtaggaaatctacctttcaatacggttcagggcgacatagatgctatctttaaggatctcagcataaggagtgtacggctagtcagagacaaagacacagataaatttaaaggattctgctatgtagaattcgatgaagtggattcccttaaggaagccttgacatacgatggtgcactgttgggcgatcggtcacttcgtgtggacattgcagaaggcagaaaacaagataaaggtggctttggattcagaaaaggtggaccagatgacagaggaatgggtagctctcgagaatctagaggtggatgggattcccgggatgacttcaattctggcttcagggatgacttcttagggggcaggggaggtagtcgcccaggcgaccggcgaacaggcccccccatgggcagccgcttcagagatggccctcccctccgtggatccaacatggatttcagagaacccacagaagaggaaagagcacagagaccacgactccagcttaaacctcgaacagtcgcgacgcccctcaatcaagtagccaatcccaactctgctatcttcgggggtgccaggcctagagaggaagtcgttcaaaaggagcaagaatgagcctgcggttgggagggaatggggcgtggggggttagagcaggaccacagcctggtgagtccccgggcagccgtcctgcagccgccactcctgcgcctgccattggcctcctcacagcggaaacacagcttgtgagtgcatgtcagctgttaacaagtggtttttagtacattctgggctttgctgtatctatctagtgcctgtttgtgcgtttttttctttcttccgctgcttccccattttccttctgtcctttttctcctgctccttgttttcccagcagcacatggggttcctcggaggagcagaggtggccgccgtgggggggcgtttgggctgcggtgctgcgtcatttttcctttgctttctctttactttagacactggcccaactccaggcgtttcctttcattccctcagtgcttctcttctgacctgcatgttgagttctgtattgctggggcttccaacaaaaaccagagtcactgacagagggaacagcagagaccttgttggtattcagctgtgatggatatagagaatcagaggcaccttgttttcacaactaggataaaaatatctgcagggtcctttccattcctatttagagggagtcctggctccatgaccccctcccgagtggactgtccaagcagataggctcacacgagaaacagtgaggctgaaagggggggctatggaagagcggtagggagtccacggagaagatgcagtgaatgcttgcatgcattcacacgtgtgtgtgtcccagctagttcactcctttcgccgtgcgtggtggaggctggcctctctggctgggtgcagtgaatggccagcgggtttcttttctgctgggccaaggcgctttgggggtggagggggtggtgctggtgctgcactgggctgactgcggcgctgacgcagcgtttccccccatccctgttgcctgtgtgttgtgtggatctgttcctagtataggcaacataatgagatactgtgcttcccacctccccttcagttcagagccaaaatgggtctagaatctggcactttactcatttcctttgataaattgtactatgcagagctgtcaggaaccttcagatagcagtagaggactgcagctgtctaggtctgcggccacatcttggggacacactggactgttcccatgtgcagggttcagcagttatgtgggagtgctaggggttaggcttttgagcttgaacgcctgcgtgtgaacagatgaaaaatccttcagtacccaagtcccagtctgtcctatggggagcagtttgggggcggccggcagcaggagcctgggaaagaggccctcgccaggtgatggcagggccagggtggcctggggcacccagcggaatgtgcttagtatttggtcaccagccgtcatcctgggcttttcctactgtgtcttgttacaaggcctcagcaatccacagaactctctctccttccttccacctgtcagcttctctgcttctgagataagaaccatttgtgtaacaccaacacttaacttcagaaagacatgcattatgtggtgtaatcaaacccgatgctttcagatgacctacttacatcttcaatgtggataagataaagaacaaaacacatgcatctaaactgctgggcaatccagttgacttttaaatgtaagaatggaattccaaacacttaacacattcagctatatgacagaaagtaaatctatggatatggtattttgtgaatgatcttttaaataaaagaaaaccttacgtaatatttaa

SEQ ID NO: 10123 - DNA, 2503 bp, Homo sapiens
  source 1..2503: mol_type = unassigned DNA
ctggttcctctcggagcggagacggcaaatggcggacttcgacacctacgacgatcgggcctacagcagcttcggcggcggcagagggtcccgcggcagtgctggtggccatggttcccgtagccagaaggagttgcccacagagcccccctacacagcatacgtaggaaatctacctttcaatacggttcagggcgacatagatgctatctttaaggatctcagcataaggagtgtacggctagtcagagacaaagacacagataaatttaaaggattctgctatgtagaattcgatgaagtggattcccttaaggaagccttgacatacgatggtgcactgttgggcgatcggtcacttcgtgtggacattgcagaaggcagaaaacaagataaaggtggctttggattcagaaaaggtggaccagatgacagaggcttcagggatgacttcttagggggcaggggaggtagtcgcccaggcgaccggcgaacaggcccccccatgggcagccgcttcagagatggccctcccctccgtggatccaacatggatttcagagaacccacagaagaggaaagagcacagagaccacgactccagcttaaacctcgaacagtcgcgacgcccctcaatcaagtagccaatcccaactctgctatcttcgggggtgccaggcctagagaggaagtcgttcaaaaggagcaagaatgagcctgcggttgggagggaatggggcgtggggggttagagcaggaccacagcctggtgagtccccgggcagccgtcctgcagccgccactcctgcgcctgccattggcctcctcacagcggaaacacagcttgtgagtgcatgtcagctgttaacaagtggtttttagtacattctgggctttgctgtatctatctagtgcctgtttgtgcgtttttttctttcttccgctgcttccccattttccttctgtcctttttctcctgctccttgttttcccagcagcacatggggttcctcggaggagcagaggtggccgccgtgggggggcgtttgggctgcggtgctgcgtcatttttcctttgctttctctttactttagacactggcccaactccaggcgtttcctttcattccctcagtgcttctcttctgacctgcatgttgagttctgtattgctggggcttccaacaaaaaccagagtcactgacagagggaacagcagagaccttgttggtattcagctgtgatggatatagagaatcagaggcaccttgttttcacaactaggataaaaatatctgcagggtcctttccattcctatttagagggagtcctggctccatgaccccctcccgagtggactgtccaagcagataggctcacacgagaaacagtgaggctgaaagggggggctatggaagagcggtagggagtccacggagaagatgcagtgaatgcttgcatgcattcacacgtgtgtgtgtcccagctagttcactcctttcgccgtgcgtggtggaggctggcctctctggctgggtgcagtgaatggccagcgggtttcttttctgctgggccaaggcgctttgggggtggagggggtggtgctggtgctgcactgggctgactgcggcgctgacgcagcgtttccccccatccctgttgcctgtgtgttgtgtggatctgttcctagtataggcaacataatgagatactgtgcttcccacctccccttcagttcagagccaaaatgggtctagaatctggcactttactcatttcctttgataaattgtactatgcagagctgtcaggaaccttcagatagcagtagaggactgcagctgtctaggtctgcggccacatcttggggacacactggactgttcccatgtgcagggttcagcagttatgtgggagtgctaggggttaggcttttgagcttgaacgcctgcgtgtgaacagatgaaaaatccttcagtacccaagtcccagtctgtcctatggggagcagtttgggggcggccggcagcaggagcctgggaaagaggccctcgccaggtgatggcagggccagggtggcctggggcacccagcggaatgtgcttagtatttggtcaccagccgtcatcctgggcttttcctactgtgtcttgttacaaggcctcagcaatccacagaactctctctccttccttccacctgtcagcttctctgcttctgagataagaaccatttgtgtaacaccaacacttaacttcagaaagacatgcattatgtggtgtaatcaaacccgatgctttcagatgacctacttacatcttcaatgtggataagataaagaacaaaacacatgcatctaaactgctgggcaatccagttgacttttaaatgtaagaatggaattccaaacacttaacacattcagctatatgacagaaagtaaatctatggatatggtattttgtgaatgatcttttaaataaaagaaaaccttacgtaata

SEQ ID NO: 10124 - DNA, 5945 bp, Homo sapiens
  source 1..5945: mol_type = unassigned DNA
tctgggaaaggcggggggaggggagaggaaggaagcgagaccggggctggaggcgggccgaggccgcgagttgagcctcaggaagcagaaggggcgcggaaagatgcgattgacgtcgcaagcgaaccaatgacgagcgagctgtggcaggcctccagccaatgggcagtgaggcctgacgcggggggcggacgctggggccgagggtagcttgagcgcggcggcggcgttgttcagtcagagcgagaacattccagaggtcgcccagctccggcgctgacgggtgtggaccgcggacgtcgctgggacagcccctccccgctgctcggcggcggcacctggcccggccgctcctcgctgcgcttcgcctccgcctcctcggactcggactcgggtttatatcgcgcctcacttcatcccagtcccgggcgagcagcgttgggtttatgtctttatttgacgaaaacgagctgttgcgcagccattggtacctgtattggggaaacatagcatacaagcaagaagcttacagcctcagtggcgaaaattttttcatgtcagagaccgagaactcttgcagtcgtttatgtcatcccttcttctccagacagaagataccaaaaagttgcaatcaaagatctcttcatcttattgataaagccactaataagccaaaatgtctgtcaatgtcaaccgcagcgtgtcagaccagttctatcgctacaagatgccccgtctgattgccaaggttgagggcaaaggcaatggaatcaagacagttatagtcaacatggttgacgttgcaaaggcgcttaatcggcctccaacgtatcccaccaaatattttggttgtgagctgggagcacagacccagtttgatgttaagaatgaccgttacattgtcaatggatctcatgaggcgaataagctgcaagacatgttggatggattcattaaaaaatttgttctctgtcctgaatgtgagaatcctgaaacagatttgcatgtcaatccaaagaagcaaacaataggtaattcttgtaaagcctgtggctatcgaggcatgcttgacacacatcataaactctgcacattcattctcaaaaacccacctgagaatagtgacagtggtacaggaaagaaagaaaaagaaaagaaaaacagaaagggcaaagacaaggaaaatggctccgtatccagcagtgagacaccaccaccaccaccaccaccaaatgaaattaatcctcctccacatacaatggaagaagaggaggatgatgactggggagaagatacaactgaggaagctcaaaggcgtcgaatggatgaaatcagtgaccatgcaaaagttctgacactcagtgatgatttggaaagaacaattgaggagagggtcaatatcctctttgattttgttaagaaaaagaaagaagagggtgttattgattcatctgacaaagaaatcgttgctgaagcagaaagactggatgtaaaagccatgggccctcttgttctaactgaagttctttttaatgagaagattagagaacagattaagaaatacaggcgccatttcctacgattttgtcacaacaacaaaaaagcccaacggtaccttcttcatggtttggagtgtgtggtagcaatgcatcaagctcagcttatctccaagattccacatatcttgaaggagatgtacgatgcagaccttttagaagaagaggtcatcatcagctggtcggaaaaggcctctaagaaatatgtctccaaagaacttgccaaagagattcgtgtcaaagcagaaccatttataaaatggttgaaggaggcagaggaagaatcttctggtggcgaagaagaagatgaagatgagaacattgaggtggtgtattcgaaggctgccagtgtaccgaaagttgagactgtaaagtcagacaacaaggatgacgacatcgatattgatgccatttaaagggatggatgcaacctagcttaacagtataatgctgcaaattttcctccattatcagccagaagtgcaacatgtatgtgcaaaagctaaaatggcttaacatcatgctacactttacactaaaaatctattactgtgagtggtctgttattaagcccaatgagacatctagggagtccatacacatcagtgagcagatgtagtttgcttatttatagcatgtttctttttgaaaaactagtggtggacacatttggatcacatttatacagttataaaaataaaggtttgattttggtcgttcttcagatgtttggctctgaatgacttaagctgaagtaactggctccttactttaaatgttctgccatcatttcacctgatgagcattcttggagcctgccagatattgttaggtcctggggctgcaaagaggtcctcaacaggatgtaaagcaaacttaattgtaattaatttattcagcccattaagaaagtactaaagttttatctctgtagttcctcaaattggcatctggtaatgtacattgtgaggtagactgataatgaaatgacagtgtaacatcttaaccaagaagtaaatatgacctcagtgtcctataaataatgtaagagcaggatttgaaacttggagagctgttttctcatttcatgtacacttgccccaaattgtctttgaagtcgtgtgcattgcacgttggatgagccagggaaattattacattaacaagcattttgtgtgtacgtagtagttactttgtactgagagaacttgctttggggtgcaattaataaactgattttatttgggagaaacaaggaagggtgcacttaactagcaacctaagcatgatttttcagcttttgcccttagggtttaaattacaattccaaaatgttagacatactgtattttttcgttcagtgtggctttaattttcccctcttgcagtttgttctgtaatgccttttacatttggacacatagtttatgctttttagattttggttgctttcttgccaaaataagtgttaactgtgtttcaaacttgattttctttcctttttcttttttttttcttccagaatgtcttatttaaaaagaaagctaaaagcatacttctaagtcagagcctctattttggtgtaagacttgggatattttttacttcacattgaatatagccaggcacccaagaagtctgatggccacctgagtgcaggtgacaaggacctgacagagcccatgcagggctttagatttggacacacaagagttgataacttcctcatgaactccttgcctgatctaaactcatattatgggttctgactgtttgagtaatcatcttcaaggttaaacctcttggcagttacccttttcacaaagtgcacagtgggaatcgagaatcgatagggttaattttggagcagtggcttataccattcacctctgtttttttgtgattatttcacagataatgagaccttaataacaaataggcgtaaaaaaattttcacattgaaatgatagaaacatttgatgtaataaaacttggttggcttgatattttaaggaattgaaacctagcaatcttattggagagacaagaattggtctccagctgcctttgatcaagattcgggtgcaagtggagcaggagccatatacctggagggaatgtgctttgtcacaccaaagaggatttttttttcttcaaacttgtatgttgcctaggtttcaaattctttgccgcaaggctgatctgctttcattaactggaattctgtaggagatactggtgacctaagctaagttgcactcagcatactcagtgtcaagctaatgaggttctattataaaggttctacttttaatctgagggaaaacatgttcagggcttctagaacactaaaaaatttggcttaaaccagtgttcagtctggtgccaaacttcgaatggaatacaaattcacataatctgaactttgttcacaggttatcctaatagagtaattcttcactttgctctattgaactgtcttaaggatttgtttaaacagctaagttacttgattaaaataatgataaaattgtattttgtctttgctttaatattaaagttaacaagttttcattttataatgagatcaaagcattggaatctgccctgttttgtagccgttgctttggatttgtgttggatgtatcctgcagttacacttgccagccccactcacaaaagttgttcatttcattgggtcactggctttatttgctagtcttgtctgtgaactgagcatctgcctcagttttattacttgaaatcttggcaggtgcttaatagggaacatacatacagctatgtaactgtgaataattgtatatatctctagttaagaatgagggaatggggaggtttgctttctaaacaagtgcattctgaaattgacttaaaaatttttagtgtgggtcctaaagtttagagatgggcaaggaggtctctaatccaccgcttcccgcttgagaagggaggggtatcaaaattgagccccaagctgtttgttccagtgtaccaagcactgactttatgcctttggcctggagatggcagaagtgaaagctggccatctgcaaaaagcagataagtgagtttgaaccttttgcattttgttagctcagtcagtcctcatcgtggtcctgaggcataggtactgttgtaccaaggtcacttatctaacaaaataacccttcatgtattttaaatttatttgacaagtctgcagacaatccttatctaaccagctattttcttaattgctacagcttgacctaccagtattccggagtaaccagcaaatgcaaagttgaccttgttcctgcatcatctttttgatggttcaaatttcagcctccctgactactacaaagccagagcagtcttagtaccagaaacagtgttgcactttcgttgcatgtgctgtgtgaccccaaggggacagggagtcactttggtcatctctgtccccagtacagatcttgattcatagtgacattccataagtggggtgacagcaaatgacttgcaggtagtctcattgtaggtttgtgcaccagagtgaccctgtgagcctttgttaataggttgggagctcagggtgtttatgtccacctgtctggtctagccaaacagtttttttctgggaatcaaatttctgtggtttttatggccagaaattttaaggacttgtgtgtgctgggatatgagaatagaagctacagagttcttttcttgggacctagactgggaggtgcaatgtcaggacctccaggtgaatggtaggatctgagttgaccctgcagttcggttatgcagtcaattatttctttttaagaggaggaggattcacttgggtgttgggatcaaatttggattctgtcccaggccttactgtaaaactaggggattgcctttccatatctgctgggggtggagacccttatgtgcagcactcaatcccactggaagcctaatgctgcagtcagaagcaatgcctggctggggcagtaggggaaattccacccaattttgctatgagcctaaaacctctttaaaaacggtcagttaactaaaaaataaaaatcaagtctttaggagagtagaaaacacaattaactaaaaagcagggacatctgaaagagacgtattaagttaacatttttaaaaatccaaatgaaagtaaatggaataaatgtatcaggtaaaggacaagttgtaagcttggatttttaggtctagcaatacactgtttacaagagcatcacctaaaatgtgacaaaagatgttgaaaggatgaaaaaaggtatagtagacatacactaaccaaaaatgtagctctttgaatctcagaaaaaagtagattttaataaagtgtgaaagttgtcaatcaaa

SEQ ID NO: 10125 - DNA, 3417 bp, Homo sapiens
  source 1..3417: mol_type = unassigned DNA
gggggcggcccgatcccggcacccctcggccgtgtgtcgcttcccggctgtgcaccctccggggccgccggctctcgggggacgcgctggggatggggccagacgccccggtcgcgcgcccccctccttcgcggagctgcccggttcgccagcccccgcggaaacgcctcggagcgcggtagccatggggaccagggcgaaggttaaccgagtatttgaatagcgaggaaaagggaggccggggcgagcctggcgttcgctcgcgctctcttgcttaatggcaaattgtgggcgagcgctgcgtttaaggaagtgctgctttgaaagctgttgcgcagccattggtacctgtattggggaaacatagcatacaagcaagaagcttacagcctcagtggcgaaaattttttcatgtcagagaccgagaactcttgcagtcgtttatgtcatcccttcttctccagacagaagataccaaaaagttgcaatcaaagatctcttcatcttattgataaagccactaataagccaaaatgtctgtcaatgtcaaccgcagcgtgtcagaccagttctatcgctacaagatgccccgtctgattgccaaggttgagggcaaaggcaatggaatcaagacagttatagtcaacatggttgacgttgcaaaggcgcttaatcggcctccaacgtatcccaccaaatattttggttgtgagctgggagcacagacccagtttgatgttaagaatgaccgttacattgtcaatggatctcatgaggcgaataagctgcaagacatgttggatggattcattaaaaaatttgttctctgtcctgaatgtgagaatcctgaaacagatttgcatgtcaatccaaagaagcaaacaataggtaattcttgtaaagcctgtggctatcgaggcatgcttgacacacatcataaactctgcacattcattctcaaaaacccacctgagaatagtgacagtggtacaggaaagaaagaaaaagaaaagaaaaacagaaagggcaaagacaaggaaaatggctccgtatccagcagtgagacaccaccaccaccaccaccaccaaatgaaattaatcctcctccacatacaatggaagaagaggaggatgatgactggggagaagatacaactgaggaagctcaaaggcgtcgaatggatgaaatcagtgaccatgcaaaagttctgacactcagtgatgatttggaaagaacaattgaggagagggtcaatatcctctttgattttgttaagaaaaagaaagaagagggtgttattgattcatctgacaaagaaatcgttgctgaagcagaaagactggatgtaaaagccatgggccctcttgttctaactgaagttctttttaatgagaagattagagaacagattaagaaatacaggcgccatttcctacgattttgtcacaacaacaaaaaagcccaacggtaccttcttcatggtttggagtgtgtggtagcaatgcatcaagctcagcttatctccaagattccacatatcttgaaggagatgtacgatgcagaccttttagaagaagaggtcatcatcagctggtcggaaaaggcctctaagaaatatgtctccaaagaacttgccaaagagattcgtgtcaaagcagaaccatttataaaatggttgaaggaggcagaggaagaatcttctggtggcgaagaagaagatgaagatgagaacattgaggtggtgtattcgaaggctgccagtgtaccgaaagttgagactgtaaagtcagacaacaaggatgacgacatcgatattgatgccatttaaagggatggatgcaacctagcttaacagtataatgctgcaaattttcctccattatcagccagaagtgcaacatgtatgtgcaaaagctaaaatggcttaacatcatgctacactttacactaaaaatctattactgtgagtggtctgttattaagcccaatgagacatctagggagtccatacacatcagtgagcagatgtagtttgcttatttatagcatgtttctttttgaaaaactagtggtggacacatttggatcacatttatacagttataaaaataaaggtttgattttggtcgttcttcagatgtttggctctgaatgacttaagctgaagtaactggctccttactttaaatgttctgccatcatttcacctgatgagcattcttggagcctgccagatattgttaggtcctggggctgcaaagaggtcctcaacaggatgtaaagcaaacttaattgtaattaatttattcagcccattaagaaagtactaaagttttatctctgtagttcctcaaattggcatctggtaatgtacattgtgaggtagactgataatgaaatgacagtgtaacatcttaaccaagaagtaaatatgacctcagtgtcctataaataatgtaagagcaggatttgaaacttggagagctgttttctcatttcatgtacacttgccccaaattgtctttgaagtcgtgtgcattgcacgttggatgagccagggaaattattacattaacaagcattttgtgtgtacgtagtagttactttgtactgagagaacttgctttggggtgcaattaataaactgattttatttgggagaaacaaggaagggtgcacttaactagcaacctaagcatgatttttcagcttttgcccttagggtttaaattacaattccaaaatgttagacatactgtattttttcgttcagtgtggctttaattttcccctcttgcagtttgttctgtaatgccttttacatttggacacatagtttatgctttttagattttggttgctttcttgccaaaataagtgttaactgtgtttcaaacttgattttctttcctttttcttttttttttcttccagaatgtcttatttaaaaagaaagctaaaagcatacttctaagtcagagcctctattttggtgtaagacttgggatattttttacttcacattgaatatagccaggcacccaagaagtctgatggccacctgagtgcaggtgacaaggacctgacagagcccatgcagggctttagatttggacacacaagagttgataacttcctcatgaactccttgcctgatctaaactcatattatgggttctgactgtttgagtaatcatcttcaaggttaaacctcttggcagttacccttttcacaaagtgcacagtgggaatcgagaatcgatagggttaattttggagcagtggcttataccattcacctctgtttttttgtgattatttcacagataatgagaccttaataacaaataggcgtaaaaaaattttcacattgaaatgatagaaacatttgatgtaataaaacttggttggcttga

SEQ ID NO: 10126 - DNA, 872 bp, Homo sapiens
  source 1..872: mol_type = unassigned DNA
gcccagctccggcgctgacgggtgtggaccgcggacgtcgctgggacagcccctccccgctgctcggcggcggcacctggcccggccgctcctcgctgcgcttcgcctccgcctcctcggactcggactcgggtttatatcgcgcctcacttcatcccagtcccgggcgagcagcgttgggtttatgtctttatttgacgaaaacgaagataccaaaaagttgcaatcaaagatctcttcatcttattgataaagccactaataagccaaaatgtctgtcaatgtcaaccgcagcgtgtcagaccagttctatcgctacaagatgccccgtctgattgccaaggttgagggcaaaggcaatggaatcaagacagttatagtcaacatggttgacgttgcaaaggcgcttaatcggcctccaacgtatcccaccaaatattttggttgtgagctgggagcacagacccagtttgatgttaagaatgaccgttacattgtcaatggatctcatgaggcgaataagctgcaagacatgttggatggattcattaaaaaatttgttctctgtcctgaatgtgagaatcctgaaacagatttgcatgtcaatccaaagaagcaaacaataggtaattcttgtaaagcctgtggctatcgaggcatgcttgacacacatcataaactctgcacattcattctcaaaaacccacctgagaatagtgacagtggtacaggaaagaaagaaaaagaaaagaaaaacagaaagggcaaagacaaggaaaatggctccgtatccagcagtgagacaccaccaccaccaccaccaccaaatgaaattaatcctcctccacatacaatggaagaagaggaggatg

SEQ ID NO: 10127 - DNA, 719 bp, Homo sapiens
  source 1..719: mol_type = unassigned DNA
aggtcgcccagctccggcgctgacgggtgtggaccgcggacgtcgctgggacagcccctccccgctgctcggcggcggcacctggcccggccgctcctcgctgcgcttcgcctccgcctcctcggactcggactcgggtttatatcgcgcctcacttcatcccagtcccgggcgagcagcgttgggtttatgtctttatttgacgaaaacgacagaagataccaaaaagttgcaatcaaagatctcttcatcttattgataaagccactaataagccaaaatgtctgtcaatgtcaaccgcagcgtgtcagaccagttctatcgctacaagatgccccgtctgattgccaaggttgagggcaaaggcaatggaatcaagacagttatagtcaacatggttgacgttgcaaaggcgcttaatcggcctccaacgtatcccaccaaatattttggttgtgagctgggagcacagacccagtttgatgttaagaatgaccgttacattgtcaatggatctcatgaggcgaataagctgcaagacatgttggatggattcattaaaaaatttgttctctgtcctgaatgtgagaatcctgaaacagatttgcatgtcaatccaaagaagcaaacaataggtaattcttgtaaagcctgtggctatcgaggcatgcttgacacacatcataaactctgcacattcattctcaaaaacccacctg

SEQ ID NO: 10128 - DNA, 4384 bp, Homo sapiens
  source 1..4384: mol_type = unassigned DNA
ggggatggggccagacgccccggtcgcgcgcccccctccttcgcggagctgcccggttcgccagcccccgcggaaacgcctcggagcgcggtagccatggggaccagggcgaaggttaaccgagtatttgaatagcgaggaaaagggaggccggggcgagcctggcgttcgctcgcgctctcttgcttaatggcaaattgtgggcgagcgctgcgtttaaggaagtgctgctttgaagtaagccatggttgccgaagcaacgattagttgtagagaacagttccctaggttgcccttaaaaatgaagacgaacgggggtgtgcctgagaagtttgcttatccaggcggggtgggcggcggagagggctcgggttcgttcttcagcacttccaggatggccgcagaggcaaacctgctgattgccctcggtctgatggaatctcacggcggctgaggcagcacagcttgtgttttcttgtcaggcatttccctaccagtcacagcttagtcgaaatggaggcctttttatgttcccgcagattgtactgtgttacatgagaatggctgtttgcatgtgatctcagatgctttttaaggtggagttaagcagaagcataactaggatgtaaaaaggaggcgtttccatccagcgatgatgttaaacctggggggatttttgtgtgttctttccctttttctttcagagctgttgcgcagccattggtacctgtattggggaaacatagcatacaagcaagaagcttacagcctcagtggcgaaaattttttcatgtcagagaccgagaactcttgcagtcgtttatgtcatcccttcttctccagacagaagataccaaaaagttgcaatcaaagatctcttcatcttattgataaagccactaataagccaaaatgtctgtcaatgtcaaccgcagcgtgtcagaccagttctatcgctacaagatgccccgtctgattgccaaggttgagggcaaaggcaatggaatcaagacagttatagtcaacatggttgacgttgcaaaggcgcttaatcggcctccaacgtatcccaccaaatattttggttgtgagctgggagcacagacccagtttgatgttaagaatgaccgttacattgtcaatggatctcatgaggcgaataagctgcaagacatgttggatggattcattaaaaaatttgttctctgtcctgaatgtgagaatcctgaaacagatttgcatgtcaatccaaagaagcaaacaataggtaattcttgtaaagcctgtggctatcgaggcatgcttgacacacatcataaactctgcacattcattctcaaaaacccacctgagaatagtgacagtggtacaggaaagaaagaaaaagaaaagaaaaacagaaagggcaaagacaaggaaaatggctccgtatccagcagtgagacaccaccaccaccaccaccaccaaatgaaattaatcctcctccacatacaatggaagaagaggaggatgatgactggggagaagatacaactgaggaagctcaaaggcgtcgaatggatgaaatcagtgaccatgcaaaagttctgacactcagtgatgatttggaaagaacaattgaggagagggtcaatatcctctttgattttgttaagaaaaagaaagaagagggtgttattgattcatctgacaaagaaatcgttgctgaagcagaaagactggatgtaaaagccatgggccctcttgttctaactgaagttctttttaatgagaagattagagaacagattaagaaatacaggcgccatttcctacgattttgtcacaacaacaaaaaagcccaacggtaccttcttcatggtttggagtgtgtggtagcaatgcatcaagctcagcttatctccaagattccacatatcttgaaggagatgtacgatgcagaccttttagaagaagaggtcatcatcagctggtcggaaaaggcctctaagaaatatgtctccaaagaacttgccaaagagattcgtgtcaaagcagaaccatttataaaatggttgaaggaggcagaggaagaatcttctggtggcgaagaagaagatgaagatgagaacattgaggtggtgtattcgaaggctgccagtgtaccgaaagttgagactgtaaagtcagacaacaaggatgacgacatcgatattgatgccatttaaagggatggatgcaacctagcttaacagtataatgctgcaaattttcctccattatcagccagaagtgcaacatgtatgtgcaaaagctaaaatggcttaacatcatgctacactttacactaaaaatctattactgtgagtggtctgttattaagcccaatgagacatctagggagtccatacacatcagtgagcagatgtagtttgcttatttatagcatgtttctttttgaaaaactagtggtggacacatttggatcacatttatacagttataaaaataaaggtttgattttggtcgttcttcagatgtttggctctgaatgacttaagctgaagtaactggctccttactttaaatgttctgccatcatttcacctgatgagcattcttggagcctgccagatattgttaggtcctggggctgcaaagaggtcctcaacaggatgtaaagcaaacttaattgtaattaatttattcagcccattaagaaagtactaaagttttatctctgtagttcctcaaattggcatctggtaatgtacattgtgaggtagactgataatgaaatgacagtgtaacatcttaaccaagaagtaaatatgacctcagtgtcctataaataatgtaagagcaggatttgaaacttggagagctgttttctcatttcatgtacacttgccccaaattgtctttgaagtcgtgtgcattgcacgttggatgagccagggaaattattacattaacaagcattttgtgtgtacgtagtagttactttgtactgagagaacttgctttggggtgcaattaataaactgattttatttgggagaaacaaggaagggtgcacttaactagcaacctaagcatgatttttcagcttttgcccttagggtttaaattacaattccaaaatgttagacatactgtattttttcgttcagtgtggctttaattttcccctcttgcagtttgttctgtaatgccttttacatttggacacatagtttatgctttttagattttggttgctttcttgccaaaataagtgttaactgtgtttcaaacttgattttctttcctttttcttttttttttcttccagaatgtcttatttaaaaagaaagctaaaagcatacttctaagtcagagcctctattttggtgtaagacttgggatattttttacttcacattgaatatagccaggcacccaagaagtctgatggccacctgagtgcaggtgacaaggacctgacagagcccatgcagggctttagatttggacacacaagagttgataacttcctcatgaactccttgcctgatctaaactcatattatgggttctgactgtttgagtaatcatcttcaaggttaaacctcttggcagttacccttttcacaaagtgcacagtgggaatcgagaatcgatagggttaattttggagcagtggcttataccattcacctctgtttttttgtgattatttcacagataatgagaccttaataacaaataggcgtaaaaaaattttcacattgaaatgatagaaacatttgatgtaataaaacttggttggcttgatattttaaggaattgaaacctagcaatcttattggagagacaagaattggtctccagctgcctttgatcaagattcgggtgcaagtggagcaggagccatatacctggagggaatgtgctttgtcacaccaaagaggatttttttttcttcaaacttgtatgttgcctaggtttcaaattctttgccgcaaggctgatctgctttcattaactggaattctgtaggagatactggtgacctaagctaagttgcactcagcatactcagtgtcaagctaatgaggttctattataaaggttctacttttaatctgagggaaaacatgttcagggcttctagaacactaaaaaatttggcttaaaccagtgttcagtctggtgccaaacttcgaatggaatacaaattcacataatctgaactttgttcacaggttatcctaatagagtaattcttcactttgctctattgaactgtcttaaggatttgtttaaacagctaagttacttgattaaaataatgataaaattgtattttgtctttgctttaatattaaagttaacaagttttcattttataatgagatcaaa

SEQ ID NO: 10129 - DNA, 583 bp, Homo sapiens
  source 1..583: mol_type = unassigned DNA
gtgtcgcttcccggctgtgcaccctccggggccgccggctctcgggggacgcgctggggatggggccagacgccccggtcgcgcgcccccctccttcgcggagctgcccggttcgccagcccccgcggaaacgcctcggagcgcggtagccatggggaccagggcgaagagctgttgcgcagccattggtacctgtattggggaaacatagcatacaagcaagaagcttacagcctcagtggcgaaaattttttcatgtcagagaccgagaactcttgcagtcgtttatgtcatcccttcttctccagacagaagataccaaaaagttgcaatcaaagatctcttcatcttattgataaagccactaataagccaaaatgtctgtcaatgtcaaccgcagcgtgtcagaccagttctatcgctacaagatgccccgtctgattgccaaggttgagggcaaaggcaatggaatcaagacagttatagtcaacatggttgacgttgcaaaggcgcttaatcggcctccaacgtatcccaccaaatattttggttgtgagctgggagcacagacccagtttgatgt

SEQ ID NO: 10130 - DNA, 678 bp, Homo sapiens
  source 1..678: mol_type = unassigned DNA
gtcgcttcccggctgtgcaccctccggggccgccggctctcgggggacgcgctggggatggggccagacgccccggtcgcgcgcccccctccttcgcggagctgcccggttcgccagcccccgcggaaacgcctcggagcgcgagctgttgcgcagccattggtacctgtattggggaaacatagcatacaagcaagaagcttacagcctcagtggcgaaaattttttcatgtcagagaccgagaactcttgcagtcgtttatgtcatcccttcttctccagacagaagataccaaaaagttgcaatcaaagatctcttcatcttattgataaagccactaataagccaaaatgtctgtcaatgtcaaccgcagcgtgtcagaccagttctatcgctacaagatgccccgtctgattgccaaggttgagggcaaaggcaatggaatcaagacagttatagtcaacatggttgacgttgcaaaggcgcttaatcggcctccaacgtatcccaccaaatattttggttgtgagctgggagcacagacccagtttgatgttaagaatgaccgttacattgtcaatggatctcatgaggcgaataagctgcaagacatgttggatggattcattaaaaaatttgttctctgtcctgaatgtgagaatcctgaaacagatttg

SEQ ID NO: 10131 - DNA, 580 bp, Homo sapiens
  source 1..580: mol_type = unassigned DNA
gacgctggggccgagggtagcttgagcgcggcggcggcgttgttcagtcagagcgagaacattccagagagctgttgcgcagccattggtacctgtattggggaaacatagcatacaagcaagaagcttacagcctcagtggcgaaaattttttcatgtcagagaccgagaactcttgcagtcgtttatgtcatcccttcttctccagacagaagataccaaaaagttgcaatcaaagatctcttcatcttattgataaagccactaataagccaaaatgtctgtcaatgtcaaccgcagcgtgtcagaccagttctatcgctacaagatgccccgtctgattgccaaggttgagggcaaaggcaatggaatcaagacagttatagtcaacatggttgacgttgcaaaggcgcttaatcggcctccaacgtatcccaccaaatattttggttgtgagctgggagcacagacccagtttgatgttaagaatgaccgttacattgtcaatggatctcatgaggcgaataagctgcaagacatgttggatggattcattaaaaaatttgttctctgtcctgaa

SEQ ID NO: 10132 - DNA, 723 bp, Homo sapiens
  source 1..723: mol_type = unassigned DNA
agtcagagcgagaacattccagaggtgagtccggtgaaggggcggccccctgcccggtgcttcccgccccctcgacccctcgggccgctggctggcggggaaggtgcactccccgaccgcccacggctcacggcgccgtctctccgcgccaggtcgcccagctccggcgctgacgggtgtggaccgcggacgtcgctgggacagcccctccccgctgctcggcggcggcacctggcccggccgctcctcgctgcgcttcgcctccgcctcctcggactcggactcgggtttatatcgcgcctcacttcatcccagtcccgggcgagcagcgttgggtttatgtctttatttgacgaaaacgagctgttgcgcagccattggtacctgtattggggaaacatagcatacaagcaagaagcttacagcctcagtggcgaaaattttttcatgtcagagaccgagaactcttgcagtcgtttatgtcatcccttcttctccagacagaagataccaaaaagttgcaatcaaagatctcttcatcttattgataaagccactaataagccaaaatgtctgtcaatgtcaaccgcagcgtgtcagaccagttctatcgctacaagatgccccgtctgattgccaaggttgagggcaaaggcaatggaatcaagacagttatagtcaacatggttgacgttgcaaaggcgcttaatcggcctccaacgt

SEQ ID NO: 10133 - DNA, 569 bp, Homo sapiens
  source 1..569: mol_type = unassigned DNA
gctcgggctgactcaggcttcagctgctgcatttagctgttgcgcagccattggtacctgtattggggaaacatagcatacaagcaagaagcttacagcctcagtggcgaaaattttttcatgtcagagaccgagaactcttgcagtcgtttatgtcatcccttcttctccagacagaagataccaaaaagttgcaatcaaagatctcttcatcttattgataaagccactaataagccaaaatgtctgtcaatgtcaaccgcagcgtgtcagaccagttctatcgctacaagatgccccgtctgattgccaaggttgagggcaaaggcaatggaatcaagacagttatagtcaacatggttgacgttgcaaaggcgcttaatcggcctccaacgtatcccaccaaatattttggttgtgagctgggagcacagacccagtttgatgttaagaatgaccgttacattgtcaatggatctcatgaggcgaataagctgcaagacatgttggatggattcattaaaaaatttgttctctgtcctgaatgtgagaatcctgaaacagatttg

SEQ ID NO: 10134 - DNA, 1256 bp, Homo sapiens
  source 1..1256: mol_type = unassigned DNA
accacactagcgcgctagaagagtggggcggaaagacatctcccgcgcatgtgtggaactggggggactgattccaagacaaggcgcccaccccacagagcaagttttctgaaacgtttggaatcgaagcctcttaaaatggcagatgacttggacttcgagacaggagatgcaggggcctcagccaccttcccaatgcagtgctcagcattacgtaagaatggctttgtggtgctcaaaggccggccatgtaagatcgtcgagatgtctacttcgaagactggcaagcacggccacgccaaggtccatctggttggtattgacatctttactgggaagaaatatgaagatatctgcccgtcaactcataatatggatgtccccaacatcaaaaggaatgacttccagctgattggcatccaggatgggtacctatcactgctccaggacagcggggaggtacgagaggaccttcgtctccctgagggagaccttggcaaggagattgagcagaagtacgactgtggagaagagatcctgatcacggtgctgtctgccatgacagaggaggcagctgttgcaatcaaggccatggcaaaataactggctcccagggtggcggtggtggcagcagtgatcctctgaacctgcagaggccccctccccgagcctggcctggctctggcccggtcctaagctggactcctcctacacaatttatttgacgttttattttggttttccccaccccctcaatctgtcggggagcccctgcccttcacctagctcccttggccaggagcgagcgaagctgtggccttggtgaagctgccctcctcttctcccctcacactacagccctggtgggggagaagggggtgggtgctgcttgtggtttagtcttttttttttttttttttttaattcaatctggaatcagaaagcggtggattctggcaaatggtccttgtgccctccccactcatccctggtctggtcccctgttgcctatagccctttaccctgagcaccaccccaacagactggggaccagccccctcgcctgcctgtgtctctccccaaacccctttagatggggagggaagaggaggagaggggaggggacctgccccctcctcaggcatctgggagggccctgcccccatgggctttacccttccctgcgggctctctccccgacacatttgttaaaatcaaacctgaataaaactacaagtttaatatgaagcccccaa

SEQ ID NO: 10135 - DNA, 1519 bp, Homo sapiens
  source 1..1519: mol_type = unassigned DNA
gggagggaagatgaggttgaagagattaaaaaaccgggtgcgcctgcgcgttgcagattagttgaaaacgctcagggtttgtgaggggcggggtcacgtatgcgcgtcattggacgggtcggtgggagggagggtggagatgggtagggtgtgtgcgcttgcgcagtgcgggggtggagggcggaggagatagatagcacgcttgcgcggctgtcatagggctgcttggttggtcagtggggagtcggcgcctgcgtactaagacccgtgtgcagcagcggcggcggcggtagaggcggcggcggcggcggcagcgggctcggaggcagcggttgggctcgcggcgagcggacggggtcgagtcagtgcgttcgcgcgagttggaatcgaagcctcttaaaatggcagatgacttggacttcgagacaggagatgcaggggcctcagccaccttcccaatgcagtgctcagcattacgtaagaatggctttgtggtgctcaaaggccggccatgtaagatcgtcgagatgtctacttcgaagactggcaagcacggccacgccaaggtccatctggttggtattgacatctttactgggaagaaatatgaagatatctgcccgtcaactcataatatggatgtccccaacatcaaaaggaatgacttccagctgattggcatccaggatgggtacctatcactgctccaggacagcggggaggtacgagaggaccttcgtctccctgagggagaccttggcaaggagattgagcagaagtacgactgtggagaagagatcctgatcacggtgctgtctgccatgacagaggaggcagctgttgcaatcaaggccatggcaaaataactggctcccagggtggcggtggtggcagcagtgatcctctgaacctgcagaggccccctccccgagcctggcctggctctggcccggtcctaagctggactcctcctacacaatttatttgacgttttattttggttttccccaccccctcaatctgtcggggagcccctgcccttcacctagctcccttggccaggagcgagcgaagctgtggccttggtgaagctgccctcctcttctcccctcacactacagccctggtgggggagaagggggtgggtgctgcttgtggtttagtcttttttttttttttttttttaattcaatctggaatcagaaagcggtggattctggcaaatggtccttgtgccctccccactcatccctggtctggtcccctgttgcctatagccctttaccctgagcaccaccccaacagactggggaccagccccctcgcctgcctgtgtctctccccaaacccctttagatggggagggaagaggaggagaggggaggggacctgccccctcctcaggcatctgggagggccctgcccccatgggctttacccttccctgcgggctctctccccgacacatttgttaaaatcaaacctgaataaaactacaagtttaatatgaagcccccaa

SEQ ID NO: 10136 - DNA, 923 bp, Homo sapiens
  source 1..923: mol_type = unassigned DNA
attgcgcaggcgcaaggactgcccggtaggacgagcggtctatcaaggggagggaagatgaggttgaagagattaaaaaaccggttggaatcgaagcctcttaaaatggcagatgacttggacttcgagacaggagatgcaggggcctcagccaccttcccaatgcagtgctcagcattacgtaagaatggctttgtggtgctcaaaggccggccatgtaagatcgtcgagatgtctacttcgaagactggcaagcacggccacgccaaggttagaatttcacctccgcatcttgccttccccatgcctccagtatctttggcgctcccagcagcaagctgccaacagtgctgactttcctttaactctgcttttactgtctgattgtttttgtttagcgctcagccttcatacccattcagacaactacacctgctccccagtcttcagcctcttctgtggttacccttctgtccccgcatcattctctggcagtccctccgtttctccagctttgtgccaatctcttcaattcataggcctttatgctctagctattcagttgctccttccttattcttggttttcactttttctttcttcccttgagccgttgttaagtggttgcttccatcacgttgcccagggtttctccaattctacgccttcccctggagggactcctgcgtcaattctgagctttcaggtcaccttgctgcttcgttccccagttctagctttccctttggaactctgacgcaggatcaaactgcccctacctgccccatcccactctccttgggttccttgagcctccatgctttcatgggttttaacattcttgctagcacttccctcatcacctcagacttttcctgtctctttagaatttcaacctgattcgttcttgttgaatttcttgt

SEQ ID NO: 10137 - DNA, 1340 bp, Homo sapiens
  source 1..1340: mol_type = unassigned DNA
gagccggcagcccctagcgcggggagctagtcctcgcgggggttccgagggggcctgagattttgaggagtggaagccggaggctcgggtcctaatcaccccggagggcctgctgcaggcatatgttagcgcttcccaacctcaagggccccaggagctttcctgaaaaaccctcctgtgaagtgtggcggtcagccaggtttggaatcgaagcctcttaaaatggcagatgacttggacttcgagacaggagatgcaggggcctcagccaccttcccaatgcagtgctcagcattacgtaagaatggctttgtggtgctcaaaggccggccatgtaagatcgtcgagatgtctacttcgaagactggcaagcacggccacgccaaggtccatctggttggtattgacatctttactgggaagaaatatgaagatatctgcccgtcaactcataatatggatgtccccaacatcaaaaggaatgacttccagctgattggcatccaggatgggtacctatcactgctccaggacagcggggaggtacgagaggaccttcgtctccctgagggagaccttggcaaggagattgagcagaagtacgactgtggagaagagatcctgatcacggtgctgtctgccatgacagaggaggcagctgttgcaatcaaggccatggcaaaataactggctcccagggtggcggtggtggcagcagtgatcctctgaacctgcagaggccccctccccgagcctggcctggctctggcccggtcctaagctggactcctcctacacaatttatttgacgttttattttggttttccccaccccctcaatctgtcggggagcccctgcccttcacctagctcccttggccaggagcgagcgaagctgtggccttggtgaagctgccctcctcttctcccctcacactacagccctggtgggggagaagggggtgggtgctgcttgtggtttagtcttttttttttttttttttttaattcaatctggaatcagaaagcggtggattctggcaaatggtccttgtgccctccccactcatccctggtctggtcccctgttgcctatagccctttaccctgagcaccaccccaacagactggggaccagccccctcgcctgcctgtgtctctccccaaacccctttagatggggagggaagaggaggagaggggaggggacctgccccctcctcaggcatctgggagggccctgcccccatgggctttacccttccctgcgggctctctccccgacacatttgttaaaatcaaacctgaataaaactacaagtttaatatgaagcccccaa

SEQ ID NO: 10138 - DNA, 1284 bp, Homo sapiens
  source 1..1284: mol_type = unassigned DNA
agggcgggggacggcgagccgcgaggcagccacgcgggagaggccgccaggcggccacgccggggcgagggccaggggccagatcggcccaccggggcaagggtacctgggccgttgaggacccggctcagcgcggccacgtgagttggaatcgaagcctcttaaaatggcagatgacttggacttcgagacaggagatgcaggggcctcagccaccttcccaatgcagtgctcagcattacgtaagaatggctttgtggtgctcaaaggccggccatgtaagatcgtcgagatgtctacttcgaagactggcaagcacggccacgccaaggtccatctggttggtattgacatctttactgggaagaaatatgaagatatctgcccgtcaactcataatatggatgtccccaacatcaaaaggaatgacttccagctgattggcatccaggatgggtacctatcactgctccaggacagcggggaggtacgagaggaccttcgtctccctgagggagaccttggcaaggagattgagcagaagtacgactgtggagaagagatcctgatcacggtgctgtctgccatgacagaggaggcagctgttgcaatcaaggccatggcaaaataactggctcccagggtggcggtggtggcagcagtgatcctctgaacctgcagaggccccctccccgagcctggcctggctctggcccggtcctaagctggactcctcctacacaatttatttgacgttttattttggttttccccaccccctcaatctgtcggggagcccctgcccttcacctagctcccttggccaggagcgagcgaagctgtggccttggtgaagctgccctcctcttctcccctcacactacagccctggtgggggagaagggggtgggtgctgcttgtggtttagtcttttttttttttttttttttaattcaatctggaatcagaaagcggtggattctggcaaatggtccttgtgccctccccactcatccctggtctggtcccctgttgcctatagccctttaccctgagcaccaccccaacagactggggaccagccccctcgcctgcctgtgtctctccccaaacccctttagatggggagggaagaggaggagaggggaggggacctgccccctcctcaggcatctgggagggccctgcccccatgggctttacccttccctgcgggctctctccccgacacatttgttaaaatcaaacctgaataaaactacaagtttaatatgaagcccccaa

SEQ ID NO: 10139 - DNA, 5593 bp, Homo sapiens
  source 1..5593: mol_type = unassigned DNA
gggtaagggcggggaggctggggtgtggaaagtgtggcggccccgccccgtctcttggaactgccgcggccgccaccgccgctgccggcgccgctgctgtaggggaccagcgcgggtgcgcagacgaaaggcgctctttgccagctgaaagttcccacggaaaaactaccatctcccctgcccaccatggcagacgaaattgatttcactactggagatgccggggcttccagcacttaccctatgcagtgctcggccttgcgcaaaaacggcttcgtggtgctcaaaggacgaccatgcaaaatagtggagatgtcaacttccaaaactggaaagcatggtcatgccaaggttcaccttgttggaattgatattttcacgggcaaaaaatatgaagatatttgtccttctactcacaacatggatgttccaaatattaagagaaatgattatcaactgatatgcattcaagatggttacctttccctgctgacagaaactggtgaagttcgtgaggatcttaaactgccagaaggtgaactaggcaaagaaatagagggaaaatacaatgcaggtgaagatgtacaggtgtctgtcatgtgtgcaatgagtgaagaatatgctgtagccataaaaccctgcaaataaacggaaacatcaggcatgaacactgtttatgtctgaatcaactgcagatctaatttggttctaagttgtcaccaaagctatagccttcataagcaacctcatttctttttttaattgttttcagattgtgctgggttagttttgcaagcaattgataatttttaaaaaattatcaatatgtataattttttttgaattttgtagatatgtttcctataatattcctgtggttttcagtatgtcagtccaagaaacaaacaagatagcttcagcagatgtgatttgtctgagcaaatcattcctgtgttttagttagatgataaaccagggttttaaatcaaacaatgtagcataaagtggtattgaagtaccatatttaagttgaactgctctgcattaattacagatttaatataaaatgaactgattatatattggaattgttgcactttcagcctgtgtagggcaaacacaaatccttaaacaaaaatcatgttatcaaaaactgtcagttattttggtggccacatgcaaccatgtgattactttggtcatactatttaccaaattgttggcaaacttgatgtaaccttatatggtggttttagtcccttcttatggttggcagaagggcactgaactgttgggtgaaagttagttagcaagtaagattataaggaagacacaaaagacagtggcaaagagggttgattaaatctataagtttttatgtgaggactttgtaagtcagcataaaaatgaaaagttgtttctcagttgtttttgcttttaactttgcccccaacgtttaaagggagtgatctgctttacatgatactatgcaatgcttgttttccaactatgttgaataaatagtaatatttatcagtaaatactcctttccaacttccttttttttttttttttttttgagactgagtctcactccatcagccaggctggagtgcagtggtgcaatctcggctcactgcaacctctgcctcccgagttcaagcaattctcctgcctcagcctcccaagtagctgggactacaggtgcatgccaccacgcccagctacttttttgtgtattttagtagagatggggtttcaccatgttgtctaggctggtcttgaactcctgacctcaggtgatccacctgcctcagcctcccaaagtgctgggattacaggcatgagccaccacacccagcccctttccaaccatttctaagtagattttttgacattaatgtatttattaaacaaaaactgagaattccttaaattgatttggaatttttgttaattttatgtcctttttttcctaaagtgaattaaagtgaatcatggaagcagcattactttatatgaatattattatttaagttaagttattttaagtatatgcattttttctgattgttgtgtgacttaattcagttgctggtgtgaactataactagcaaataattctataaactgaattattttaaaaggtattttaggtgacaccactgcatttctatttcatcttttgagtcatatgtatattatttccagaattttagacattattacagggtttgtgaggacctttgactcagtgacaatcatcatattggagcaaaacatagaacaaaatcactatctcagaaataccttaattctctaagactggctcttagacctctcccatcatgccttgacctctaaaaagccctttgttcctatcttctaaaggaaagtatatcatatatgatgatgtaactgatctaatcagtgactggaaatagcattagtaacagaagatcccaagttttagttgcttaatttgtacacacttttaaatattgtcttagcctcggcaaaccaatttggggaagaagcaagatactttaagagaaatacaaaggaaatttctaaagcacaagaaatagtgaggtagtagttagtcgtctttcctacaacattttagcttttgcccatctaaagcacaattaaaattaggctacattctttccagtattctatttaagtacctactacatactgctctagtttcttagtactctgtaatgtgtatcttaattgctactggttggcattgtaactcataggaattccagaaaattattaatccgtgctgcttgcagttcattcatatggcccctcttaaccatgctggtgttatgattcagtattaactctcaattagcatgcccctgttcttcctaacttgtaaaatttcacataaatatattttcaattgtgtacaaattaagggtgtacaaattataataatgcatctctatcttcatactttgaatggcaaacgctatttatgcataaatattttcattttaagtaatatatgaagtgtaaatactcgatatataagtatagattttaaagatatgggactttattttcacataagtcaatagatgtttctctagaacaaaatatttagtaaagctttataaattatattaaaaggaagcggggaacatgtattttttaacatagaacagaagtgacttcattctttttagacatcagaaatgttaaagttgattcccaatatttgttgtacttttttgtagcaaatgttaaaaatcacgagttaccatgtatagaatgtggactgtcatgttgatatcattgtacagtgataagccatttttatctgtatacatttcaccaatttattaacaggttgaatatttgtttctttttagaacattttatttatactgtgaagactttgttataccttatttgctacaacatagatcatatcattgctactttgacttagcatttgcatcataaacataattatgatgtttttttcatgctcccttccaggggctcagtcacttgaagaaactgttgctaaccaagctcttgactctgtttcccttaatgatacaagtctctgtaccagcgctttatgttaattaccaaaactctcctgcatcagagcatgatatctataataggagatactgcaataaaatgattaggctgtaaaatttggagacacaatttttcattacaatgcaatttgcatgtgcacatgtgcgcacataactttatatgttagttcttttttccaaactcccaactcttaaaagtattgtagtctgttggtgcctcaactgttggtaactttttttttttaaatttacaactttccacaacttgtttttgtactttaaggtttctcaattagaatatttctagttgagctgtaatttgaatgcattgttctcagggctatttgtgctaaaagctgaaatttcattattttaaagctaattgcctgaaaatatattggcagaattttcccaaattgtaataactgtgatacatgcatataaaaaaatccttaatgtcaacacacttaaactacatgctaaatagtcaagaaaaaaatggaaacagtagcatccatactggaatcttgccatatttttttcattttagaatagattttggcagtctcatcttagaatcctatccttaggatacatctgaaagcattcctttggcatggaccccagagatagttttggagccaggcattgatgtagaggttcaccaaacatatttagggataatagataaattcataatgcttttttgggtacactgaaatgtttacatactgaattctgtaatatgaactaggaacgcatttactatgagaaaatatggctcttaagcagtgtaagagtgaaaatataagcatatttccattaacagtatattgtactgatcagcagctctcattttaacatcagttaggcataatatttcatagttttcaagccttttttttctgctaacattcagacaagtaacaggcaacaaagatttaagaaaaatttatggtggaaaaccttaaaaattgagacaattcaatctatttaatctattaaattttttctctgaattgggtatatggcatcattatttgattttagcagggaacatttggatttagcttatgaaacacagatgttctatgggaacatggcttgaagccaatatgtaatttaatgtttttccattaaacaaacatctgaacaccaacttagctaccaagtgaggtcaagtgcctgaaaagtactgtatacatctaataagcatgttttccttatgtaaaagatgcactttatggcaatgcataccaggctttcacctgctagaaacatacttgttgccaactttgccatctaccactattctcctccttagaacaggtagaaacctattttacaaaaaaaaaaaaaaaaaaaaaaagacaggttattgtatttatatgaagtccctaaaactgtttcttggtattgatagacttaagtttatcttagttcaagattgcactttttaaaaaactctggactattttcagcaatgaccgaacagcttgtcacacatcatagttgtgatcttttttgaggagttatttattgtggttaatatctactataaataagcattcttgtgcttgttacaaagcataatgcaaattactagttctatactagtataatgaaaatgactagttctatactgttatgtacttttgtcttcctccccaaaaaggaaacagtttagcattgtctaaattcagtggcacttttttagtaatacatttttttttcttagatacaggagaactattgcttttacctgcagaaactcaaatgttttcgctaaaactttaaaattctaaaatacgtagtatgggtattactaattgtacattttacatttcaaaaatagttaaaattcaaatgttaagtctttgacttaaaaaacctttaaatatagataataccttaacaattataactttgtgatattattaaaatatatttgtctgttaacttcatcagttgtattaaataaaaatagttaacagcttgcacta

SEQ ID NO: 10140 - DNA, 1252 bp, Homo sapiens
  source 1..1252: mol_type = unassigned DNA
gtgaggggaacctgggagggtcagctccggtcctgggtcgggaggggtgggggccagaggattcagggccggaggttctggtgggggcccagtgggcgggacccgaggacggaggggccgggaggccgagaggggcggggtcgcggcggggcctgagggacggaggccgggatacttgggaaaggatccgccggccttgaactcccgcctccgccgcccctaggcctcatggcggtccgagcttcgttcgagaacaactgtgagatcggctgctttgccaagctcaccaacacctactgtctggtagcgatcggaggctcagagaacttctacagtgtgttcgagggcgagctctccgataccatccccgtggtgcacgcgtctatcgccggctgccgcatcatcgggcgcatgtgtgtggggaacaggcacggtctcctggtacccaacaataccaccgaccaggagctgcaacacattcgcaacagcctcccagacacagtgcagattaggcgggtggaggagcggctctcagccttgggcaatgtcaccacctgcaatgactacgtggccttggtccacccagacttggacagggagacagaagaaattctggcagatgtgctcaaggtggaagtcttcagacagacagtggccgaccaggtgctagtaggaagctactgtgtcttcagcaatcagggagggctggtgcatcccaagacttcaattgaagaccaggatgagctgtcctctcttcttcaagtcccccttgtggcggggactgtgaaccgaggcagtgaggtgattgctgctgggatggtggtgaatgactggtgtgccttctgtggcctggacacaaccagcacagagctgtcagtggtggagagtgtcttcaagctgaatgaagcccagcctagcaccattgccaccagcatgcgggattccctcattgacagcctcacctgagtcaccttccaagttgttccatgggctcctggctctggactgtggccaaccttctccacattccgcccaatctgtaccggatgctggcagggaggtggcagagagctcactgggactgaggggctgggcacccaacccttttccacctgtgcttatcgcctggatctatcattactgcaaaaacctgctctgttgtgctggctggcaggccctgtggctgctggctgagggttctgctgtcctgtgccaccccattaaagtgcagttccctccgggccattctgaa

SEQ ID NO: 10141 - DNA, 1017 bp, Homo sapiens
  source 1..1017: mol_type = unassigned DNA
tccaaggtacagtcgccgcgtgcggagcttgttactggttacttggcctcatggcggtccgagcttcgttcgagaacaactgtgagatcggctgctttgccaagctcaccaacacctactgtctggtagcgatcggaggctcagagaacttctacaggtgcggcgggagccccggggcttacggtggcggggaggcgtgcgcaggagtcaagagctccggcagtgggagggtgccggcccctctgccccgccaccaccgagtccatgtccctacagtgtgttcgagggcgagctctccgataccatccccgtggtgcacgcgtctatcgccggctgccgcatcatcgggcgcatgtgtgtgggagacagaagaaattctggcagatgtgctcaaggtggaagtcttcagacagacagtggccgaccaggtgctagtaggaagctactgtgtcttcagcaatcagggagggctggtgcatcccaagacttcaattgaagaccaggatgagctgtcctctcttcttcaagtcccccttgtggcggggactgtgaaccgaggcagtgaggtgattgctgctgggatggtggtgaatgactggtgtgccttctgtggcctggacacaaccagcacagagctgtcagtggtggagagtgtcttcaagctgaatgaagcccagcctagcaccattgccaccagcatgcgggattccctcattgacagcctcacctgagtcaccttccaagttgttccatgggctcctggctctggactgtggccaaccttctccacattccgcccaatctgtaccggatgctggcagggaggtggcagagagctcactgggactgaggggctgggcacccaacccttttccacctgtgcttatcgcctggatctatcattactgcaaaaacctgctctgttgtgctggctggcaggccctgtggctgctggctgagggttctgctgtcctgtgccaccccattaaagtgcagttccctccgggccattctgaa

SEQ ID NO: 10142 - DNA, 1289 bp, Homo sapiens
  source 1..1289: mol_type = unassigned DNA
gtcgatgacagctcctaaaaagctcctgaatgaataatgaatgaatgaacgcgagcaggctaggcgtggggccaggcggggtcgcgcccagaccgctcgcgaccatagagtccgccggaggccggaggtagaggggctggatgcgtggcggggagcgccgggctctcccggaagtctccctggacggaagtggaaacggaaacctttttagggagtccaaggtacagtcgccgcgtgcggagcttgttactggttacttggcctcatggcggtccgagcttcgttcgagaacaactgtgagatcggctgctttgccaagctcaccaacacctactgtctggtagcgatcggaggctcagagaacttctacagtgtgttcgagggcgagctctccgataccatccccgtggtgcacgcgtctatcgccggctgccgcatcatcgggcgcatgtgtgtggggaacaggcacggtctcctggtacccaacaataccaccgaccaggagctgcaacacattcgcaacagcctcccagacacagtgcagattaggcgggtggaggagcggctctcagccttgggcaatgtcaccacctgcaatgactacgtggccttggtccacccagacttggacagggagacagaagaaattctggcagatgtgctcaaggtggaagtcttcagacagacagtggccgaccaggtgctagtaggaagctactgtgtcttcagcaatcagggagggctggtgcatcccaagacttcaattgaagaccaggatgagctgtcctctcttcttcaagtcccccttgtggcggggactgtgaaccgaggcagtgaggtgattgctgctgggatggtggtgaatgactggtgtgccttctgtggcctggacacaaccagcacagagctgtcagtggtggagagtgtcttcaagctgaatgaagcccagcctagcaccattgccaccagcatgcgggattccctcattgacagcctcacctgagtcaccttccaagttgttccatgggctcctggctctggactgtggccaaccttctccacattccgcccaatctgtaccggatgctggcagggaggtggcagagagctcactgggactgaggggctgggcacccaacccttttccacctgtgcttatcgcctggatctatcattactgcaaaaacctgctctgttgtgctggctggcaggccctgtggctgctggctgagggttctgctgtcctgtgccaccccattaaagtgcagttccctccgggccattctgaa

SEQ ID NO: 10143 - DNA, 551 bp, Homo sapiens
  source 1..551: mol_type = unassigned DNA
gtcgatgacagctcctaaaaagctcctgaatgaataatgaatgaatgaacgcgagcaggctaggcgtggggccaggcggggtcgcgcccagaccgctcgcgaccatagagtccgccggaggccggaggtagaggggctggatgcgtggcggggagcgccgggctctcccggaagtctccctggacggaagtggaaacggaaacctttttagggagtccaaggcctcatggcggtccgagcttcgttcgagaacaactgtgagatcggctgctttgccaagctcaccaacacctactgtctggtagcgatcggaggctcagagaacttctacagtgtgttcgagggcgagctctccgataccatccccgtggtgcacgcgtctatcgccggctgccgcatcatcgggcgcatgtgtgtggggaacaggcacggtctcctggtacccaacaataccaccgaccaggagctgcaacacattcgcaacagcctcccagacacagtgcagattaggcgggtggaggagcggctctcagccttgggcaatgtcacca

SEQ ID NO: 10144 - DNA, 3742 bp, Homo sapiens
  source 1..3742: mol_type = unassigned DNA
actcgcaccggccccctcccttccgcctgccgccttccactccgcccctggcggaggaagtgatgtcacaggccccatgtgagcggattgcaacacatgcagctgcctggagagagggagccggtgtcctacgtcagagccgccgccgccgcggagccgccgccggggaggagcagccgctgccgcccaggactgggcccttagggaggaggaggcgagaagatggcggacgaccccagtgctgccgacaggaacgtggagatctggaagatcaagaagctcattaagagcttggaggcggcccgcggcaatggcaccagcatgatatcattgatcattcctcccaaagaccagatttcacgagtggcaaaaatgttagcggatgagtttggaactgcatctaacattaagtcacgagtaaaccgcctttcagtcctgggagccattacatctgtacaacaaagactcaaactttataacaaagtacctccaaatggtctggttgtatactgtggaacaattgtaacagaagaaggaaaggaaaagaaagtcaacattgactttgaacctttcaaaccaattaatacgtcattgtatttgtgtgacaacaaattccatacagaggctcttacagcactactttcagatgatagcaagtttggattcattgtaatagatggtagtggtgcactttttggcacactccaaggaaacacaagagaagtcctgcacaaattcactgtggatctcccaaagaaacacggtagaggaggtcagtcagccttgcgttttgcccgtttaagaatggaaaagcgacataactatgttcggaaagtagcagagactgctgtgcagctgtttatttctggggacaaagtgaatgtggctggtctagttttagctggatccgctgactttaaaactgaactaagtcaatctgatatgtttgatcagaggttacaatcaaaagttttaaaattagttgatatatcctatggtggtgaaaatggattcaaccaagctattgagttatctactgaagtcctctccaacgtgaaattcattcaagagaagaaattaataggacgatactttgatgaaatcagccaggacacgggcaagtactgttttggcgttgaagatacactaaaggctttggaaatgggagctgtagaaattctaatagtctatgaaaatctggatataatgagatatgttcttcattgccaaggcacagaagaggagaaaattctctatctaactccagagcaagaaaaggataaatctcatttcacagacaaagagaccggacaggaacatgagcttatcgagagcatgcccctgttggaatggtttgctaacaactataaaaaatttggagctacgttggaaattgtcacagataaatcacaagaagggtctcagtttgtgaaaggatttggtggaattggaggtatcttgcggtaccgagtagatttccagggaatggaataccaaggaggagacgatgaattttttgaccttgatgactactaggtagtcgacatgggtccggcaaaacgtgcctcaccctccagcatccaacccaaggagcatacccatggtggaatccaaacagatccctgccttacaattggaacatttccagaacttaatccatgagcattggatattgaaaagaaaaccgaaacaaaaccagacccagccctacactttggtttgtcatggtgtcagcgcagcagcctacaactaagttcctaaacgccactttggactaatttaaaaaagaatcccagtttttacttttactggatggtgaaattggttgctcttgtattttatgaaaaaaaatgatttttttaaccttcatacatagaagcaaaaatactttaactgctgtaaaccttcaaaagttaatagaagtgagatcatactggtttgtttcttattttgattggagaaaaattaaattgctgcatttcgcagtgacccatttacatggcattctcagcttagactgcgtaagaagaaatatatgtggtgaaatgttggaaccatttctctcttggtctctgtttaatgttgaaagggtgagctaataggaggcactttcaacttcactccctcacgctaccccgtccccctccagactggcagtttcaaggatgcaaattgcattgcaaaatcaaactgactcatgaagcatttgggccagtgcactgtttacttccatctgtttgcagacacatttgtgcccggcgtttgggagccctttgtatcaatgttctgacaagggtccctataaccttaacctactcgaaaccggtttgggatggatatgatggggcttctgtgctattgctgggattgggagaaataaaacatgcaatttaagtggaagcgaagaaatttaaagaggattttattttgcttgggtcaatccttgttaaaagggaggtggatgtgttttccttgtgttggatggcatgagattatgtgaatgttttgatttattaaaatgaactgcaaggtttttcacaggaacgacagacatgtatgactgcatgtaattataaactcctgacctcctggtggggttggagcatctgtttcaaatgtgggacttacaagcacttctcacatgagaaattaggggcgggtgggaagggatgggacacagcttctggcaccatggatttaagaccatgttggatccaaaagttggcctgaaaccctgaagcttatgcttcacagctgggctgtaagtcagacttgaacccagctgatatgcaaggtcatggcgtgcccagggtggtgacagttgaacaaagtgtatagtacgtgcccagtggtagcgatggaaaaaagtataccaaatggactttgaaggaccaaaggttttaaaagtcaattggtatcacctccacactgactagggtagtggggtgcatttggttttcaaattgggtacttttaacactttagtgcctgactgctgttctttactgacttgattcagtcactcgtagctttattggtctgaaccagctccttgttcccaggttacagacctgcctatcgttccaataatcctgtttcacttgaatgaagggagtatgtcttaaatgtaaagtttctggttctcacactgtactctgaggtccaaatactgtctgtcaatgtgtaacctgatgtctcaaccccctgtgagaagagtccattatttggtgttcaccaacgtgggagacttcaccggaacaggcttttttgctttgggctctgctatttgtttgcagaacacccaagagcgagcaaacatgctctcttcacagcagtaccttagggttttgccattgtaaatgggtctgatgtgatatgacaagaccagagaaattggatgtaaatttacatttttgaatatgcttgttgtttcacatgatacatttagggtatgcagctccttttgtagtttttatttttactatttaagtttggaaatgatgccaaatttttgtatttctttaatcaatgtgttctcttcggtgatatatattgcattatatattgatgtgtgtatcaatatatattgatatgtattacacttacacatacaaacacatataagagggggtgaaaaccgtagcctttgcattctctatagcctctgcagagagatactaagcagcaaaatcttggtgttgtgatgtacagaaatggagaagagtattaaaccatatttaag

SEQ ID NO: 10145 - DNA, 3874 bp, Homo sapiens
  source 1..3874: mol_type = unassigned DNA
gccccatgtgagcggattgcaacacatgcagctgcctggagagagggagccggtgtcctacgtcagagccgccgccgccgcggagccgccgccggggaggagcagccgctgccgcccaggactgggcccttagggaggaggaggcgagaagatggcggacgaccccagtgctgccgacaggaacgtggagatctggaagatcaagaagctcattaagagcttggaggcggcccgcgggtgagcgccgcgtccggcaccctccgtgccctcttggttcccggacccctcaggatggacgcccccgcgccgcatggccggatgaggagaaccaggcactagccaactcccgccttctggatctctgggtagtagcccctgacccaggggcgagggtcggcgcggttggcccgagaaggggtcctttccccgcatggggcaatggcaccagcatgatatcattgatcattcctcccaaagaccagatttcacgagtggcaaaaatgttagcggatgagtttggaactgcatctaacattaagtcacgagtaaaccgcctttcagtcctgggagccattacatctgtacaacaaagactcaaactttataacaaagtacctccaaatggtctggttgtatactgtggaacaattgtaacagaagaaggaaaggaaaagaaagtcaacattgactttgaacctttcaaaccaattaatacgtcattgtatttgtgtgacaacaaattccatacagaggctcttacagcactactttcagatgatagcaagtttggattcattgtaatagatggtagtggtgcactttttggcacactccaaggaaacacaagagaagtcctgcacaaattcactgtggatctcccaaagaaacacggtagaggaggtcagtcagccttgcgttttgcccgtttaagaatggaaaagcgacataactatgttcggaaagtagcagagactgctgtgcagctgtttatttctggggacaaagtgaatgtggctggtctagttttagctggatccgctgactttaaaactgaactaagtcaatctgatatgtttgatcagaggttacaatcaaaagttttaaaattagttgatatatcctatggtggtgaaaatggattcaaccaagctattgagttatctactgaagtcctctccaacgtgaaattcattcaagagaagaaattaataggacgatactttgatgaaatcagccaggacacgggcaagtactgttttggcgttgaagatacactaaaggctttggaaatgggagctgtagaaattctaatagtctatgaaaatctggatataatgagatatgttcttcattgccaaggcacagaagaggagaaaattctctatctaactccagagcaagaaaaggataaatctcatttcacagacaaagagaccggacaggaacatgagcttatcgagagcatgcccctgttggaatggtttgctaacaactataaaaaatttggagctacgttggaaattgtcacagataaatcacaagaagggtctcagtttgtgaaaggatttggtggaattggaggtatcttgcggtaccgagtagatttccagggaatggaataccaaggaggagacgatgaattttttgaccttgatgactactaggtagtcgacatgggtccggcaaaacgtgcctcaccctccagcatccaacccaaggagcatacccatggtggaatccaaacagatccctgccttacaattggaacatttccagaacttaatccatgagcattggatattgaaaagaaaaccgaaacaaaaccagacccagccctacactttggtttgtcatggtgtcagcgcagcagcctacaactaagttcctaaacgccactttggactaatttaaaaaagaatcccagtttttacttttactggatggtgaaattggttgctcttgtattttatgaaaaaaaatgatttttttaaccttcatacatagaagcaaaaatactttaactgctgtaaaccttcaaaagttaatagaagtgagatcatactggtttgtttcttattttgattggagaaaaattaaattgctgcatttcgcagtgacccatttacatggcattctcagcttagactgcgtaagaagaaatatatgtggtgaaatgttggaaccatttctctcttggtctctgtttaatgttgaaagggtgagctaataggaggcactttcaacttcactccctcacgctaccccgtccccctccagactggcagtttcaaggatgcaaattgcattgcaaaatcaaactgactcatgaagcatttgggccagtgcactgtttacttccatctgtttgcagacacatttgtgcccggcgtttgggagccctttgtatcaatgttctgacaagggtccctataaccttaacctactcgaaaccggtttgggatggatatgatggggcttctgtgctattgctgggattgggagaaataaaacatgcaatttaagtggaagcgaagaaatttaaagaggattttattttgcttgggtcaatccttgttaaaagggaggtggatgtgttttccttgtgttggatggcatgagattatgtgaatgttttgatttattaaaatgaactgcaaggtttttcacaggaacgacagacatgtatgactgcatgtaattataaactcctgacctcctggtggggttggagcatctgtttcaaatgtgggacttacaagcacttctcacatgagaaattaggggcgggtgggaagggatgggacacagcttctggcaccatggatttaagaccatgttggatccaaaagttggcctgaaaccctgaagcttatgcttcacagctgggctgtaagtcagacttgaacccagctgatatgcaaggtcatggcgtgcccagggtggtgacagttgaacaaagtgtatagtacgtgcccagtggtagcgatggaaaaaagtataccaaatggactttgaaggaccaaaggttttaaaagtcaattggtatcacctccacactgactagggtagtggggtgcatttggttttcaaattgggtacttttaacactttagtgcctgactgctgttctttactgacttgattcagtcactcgtagctttattggtctgaaccagctccttgttcccaggttacagacctgcctatcgttccaataatcctgtttcacttgaatgaagggagtatgtcttaaatgtaaagtttctggttctcacactgtactctgaggtccaaatactgtctgtcaatgtgtaacctgatgtctcaaccccctgtgagaagagtccattatttggtgttcaccaacgtgggagacttcaccggaacaggcttttttgctttgggctctgctatttgtttgcagaacacccaagagcgagcaaacatgctctcttcacagcagtaccttagggttttgccattgtaaatgggtctgatgtgatatgacaagaccagagaaattggatgtaaatttacatttttgaatatgcttgttgtttcacatgatacatttagggtatgcagctccttttgtagtttttatttttactatttaagtttggaaatgatgccaaatttttgtatttctttaatcaatgtgttctcttcggtgatatatattgcattatatattgatgtgtgtatcaatatatattgatatgtattacacttacacatacaaacacatataagagggggtgaaaaccgtagcctttgcattctctatagcctctgcagagagatactaagcagcaaaatcttggtgttgtgatgtacagaaatggagaagagtattaaaccatatttaagaata

SEQ ID NO: 10146 - DNA, 1736 bp, Homo sapiens
  source 1..1736: mol_type = unassigned DNA
atagtagaatggcctgcctcaggccatgtgaaaagttgatttcagcacaagaatttgacattctggtttccagcccaggattgtcatttatgggtagatttgcaattttagaatgacagcccctccaagctcttcattattactgttatatgaaacaggatgtgcttaattgtactgaaggcccaattcacagcaatggcaccagcatgatatcattgatcattcctcccaaagaccagatttcacgagtggcaaaaatgttagcggatgagtttggaactgcatctaacattaagtcacgagtaaaccgcctttcagtcctgggagccattacatctgtacaacaaagactcaaactttataacaaagtacctccaaatggtctggttgtatactgtggaacaattgtaacagaagaaggaaaggaaaagaaagtcaacattgactttgaacctttcaaaccaattaatacgtcattgtatttgtgtgacaacaaattccatacagaggctcttacagcactactttcagatgatagcaagtttggattcattgtaatagatggtagtggtgcactttttggcacactccaaggaaacacaagagaagtcctgcacaaattcactgtggatctcccaaagaaacacggtagaggaggtcagtcagccttgcgttttgcccgtttaagaatggaaaagcgacataactatgttcggaaagtagcagagactgctgtgcagctgtttatttctggggacaaagtgaatgtggctggtctagttttagctggatccgctgactttaaaactgaactaagtcaatctgatatgtttgatcagaggttacaatcaaaagttttaaaattagttgatatatcctatggtggtgaaaatggattcaaccaagctattgagttatctactgaagtcctctccaacgtgaaattcattcaagagaagaaattaataggacgatactttgatgaaatcagccaggacacgggcaagtactgttttggcgttgaagatacactaaaggctttggaaatgggagctgtagaaattctaatagtctatgaaaatctggatataatgagatatgttcttcattgccaaggcacagaagaggagaaaattctctatctaactccagagcaagaaaaggataaatctcatttcacagacaaagagaccggacaggaacatgagcttatcgagagcatgcccctgttggaatggtttgctaacaactataaaaaatttggagctacgttggaaattgtcacagataaatcacaagaagggtctcagtttgtgaaaggatttggtggaattggaggtatcttgcggtaccgagtagatttccagggaatggaataccaaggaggagacgatgaattttttgaccttgatgactactaggtagtcgacatgggtccggcaaaacgtgcctcaccctccagcatccaacccaaggagcatacccatggtggaatccaaacagatccctgccttacaattggaacatttccagaacttaatccatgagcattggatattgaaaagaaaaccgaaacaaaaccagacccagccctacactttggtttgtcatggtgtcagcgcagcagcctacaactaagttcctaaacgccactttggactaatttaaaaaagaatcccagtttttacttttactggatggtgaaattggttgctcttgtattttatgaaaaaaaa

SEQ ID NO: 10147 - DNA, 2713 bp, Homo sapiens
  source 1..2713: mol_type = unassigned DNA
ctctgcctgggtgtctccctctctcagtgtgtgtgtctctctgtctgttttcacactctcctccccaatcgagcgaggcccacacctggcgcatcactgccgagccattagctgcgggtttcctttcatcttcgctgtggcagacgtttctatttatccacttgcgctcgccgagtggcgtcaccagcggtactgtaatgacgattgcagcaggaggatgacagcttagaaagaagagggcaatggggcttcctcccagaggcggtgcggcacagaggagcgctcgcttcacaaggtgaccctagctcccaccgccaccgccgcggtcgcggtccagaccgcgctccagcagctccgcgccctcccaggcacccggcctttctttctccctcttgcaaccaagatccgtccggccgctggagacccagggagccggggttaggaactcacttggggctttcccctcccccaccggagagccccgggatggagagccgaaaggacatggttgtgtttctggatgggggtcagcttggcactctggttggcaagagagtctcaaatttgtccgaagccgtgggcagcccgctgccggagccgcccgagaaaatggtgccccgtggttgcctgagccctcgggccgtccctccggccacccgggagcgcggcgggggaggcccggaggaggagccggtagatggactcgcaggcagcgcggcggggccgggcgccgagccccaggtagctggggcggccatgctcggcccaggacccccggccccctcagtcgacagcctctccggacaggggcaacccagtagctcggacaccgagtcggatttctatgaagaaatcgaggtgagctgcaccccggactgcgccaccgggaacgccgagtaccagcacagcaaagggtccggctccgaggcgctggtcggcagtccgaacggagggagcgagacccccaagagcaacggcggcagtggtgggggcggctcgcaaggcaccctggcgtgcagcgccagtgaccagatgcgtcgttaccgcaccgccttcacccgagagcagattgcgcggctggagaaggaattctaccgggagaactacgtatccaggccgcggagatgtgagctggcggccgccctaaacctgccggaaaccaccatcaaggtgtggttccagaaccggcgcatgaaggacaagcggcagcgcctggccatgacgtggccgcacccggcggaccccgccttctacacttacatgatgagccatgcggcggccgcgggcggcctgccctaccccttcccatcgcacctgcccctgccctactactcgccggtgggcctgggcgccgcatccgccgcctccgccgccgcctcgcccttcagcggctcgctgcgcccgctcgacacgttccgcgtgctgtcgcagccctacccgcggcccgaactgctgtgcgccttccgccacccgccgctctaccccgggcccgcgcacggactgggcgcctctgccggcggcccctgctcctgcctcgcctgtcacagcggcccggccaacgggctggcgccccgggctgccgccgcctcggacttcacctgtgcctccacctcccgctcggactccttcctcaccttcgcgccctcggtgctcagcaaggcctcctccgtcgcgctggaccagagggaggaggtgcccctcactagataaggggccgccggctggctgccggctccatgacgcccgtggggtcaccccccggccccgggactcagccagcctcgctcctcgctcctcgctcctcgcccctaggacgccaagggggaaaggagagggcggaaaaggaccagcgggatccggccgcaagaattggaaagcctaggaagtggcggtggctggcgcgtttggggagcaggagtggggatagggaagcagagcttgagagaccttcctccggggcagcctccggacccaccgccccccaccagggtcgaggctgtagctccaaagctaaacaaaacttagcagcaacagcaaccaatatccagtccctcggcccctcggcccctcaccctccacctcacactcccttctcaccgggccccctctccccagccaaggcccaagcactggaaagggaaattgctgtctctctgaacaaaatgctgtgtatgcagagcaggtagagattaatctttgccagcttttccaaggcatgacaaggggctggtggatggcaacataccagtcatttggaggagagagtgagagatgatttactaccagggagaatccagccccttggcatgggacctggagcctcgactacacagcatcttctgggtctggcgtctgccagcacctgatctctttcctcattcccagctttgtgacacttctcaacttgcggctccatctctccctgcccccacttttttgttggccagggaggctgcagatgccccaggagccctttgccgcttctatgaggccaagccttttttccctgggcccagcacacaccctgattagcaagtgatgtgtgcgaggagggtttgtgaatgttgaatgtgtaataatgatcaccatggagctggccactgaccccagagctgagctgttaacaaggcgcccagggaagagcttagggagtgggaacttcacctccctctctcggtatctggcggtaaattagaggcaattttcatccttt

SEQ ID NO: 10148 - DNA, 1635 bp, Homo sapiens
  source 1..1635: mol_type = unassigned DNA
cggacaccgagtcggatttctatgaagaaatcgagcctccttcccataaccctcagaacaacctggactccactcacatatactaagggtccggctccgaggcgctggtcggcagtccgaacggagggagcgagacccccaagagcaacggcggcagtggtgggggcggctcgcaaggcaccctggcgtgcagcgccagtgaccagatgcgtcgttaccgcaccgccttcacccgagagcagattgcgcggctggagaaggaattctaccgggagaactacgtatccaggccgcggagatgtgagctggcggccgccctaaacctgccggaaaccaccatcaaggtgtggttccagaaccggcgcatgaaggacaagcggcagcgcctggccatgacgtggccgcacccggcggaccccgccttctacacttacatgatgagccatgcggcggccgcgggcggcctgccctaccccttcccatcgcacctgcccctgccctactactcgccggtgggcctgggcgccgcatccgccgcctccgccgccgcctcgcccttcagcggctcgctgcgcccgctcgacacgttccgcgtgctgtcgcagccctacccgcggcccgaactgctgtgcgccttccgccacccgccgctctaccccgggcccgcgcacggactgggcgcctctgccggcggcccctgctcctgcctcgcctgtcacagcggcccggccaacgggctggcgccccgggctgccgccgcctcggacttcacctgtgcctccacctcccgctcggactccttcctcaccttcgcgccctcggtgctcagcaaggcctcctccgtcgcgctggaccagagggaggaggtgcccctcactagataaggggccgccggctggctgccggctccatgacgcccgtggggtcaccccccggccccgggactcagccagcctcgctcctcgctcctcgctcctcgcccctaggacgccaagggggaaaggagagggcggaaaaggaccagcgggatccggccgcaagaattggaaagcctaggaagtggcggtggctggcgcgtttggggagcaggagtggggatagggaagcagagcttgagagaccttcctccggggcagcctccggacccaccgccccccaccagggtcgaggctgtagctccaaagctaaacaaaacttagcagcaacagcaaccaatatccagtccctcggcccctcggcccctcaccctccacctcacactcccttctcaccgggccccctctccccagccaaggcccaagcactggaaagggaaattgctgtctctctgaacaaaatgctgtgtatgcagagcaggtagagattaatctttgccagcttttccaaggcatgacaaggggctggtggatggcaacataccagtcatttggaggagagagtgagagatgatttactaccagggagaatccagccccttggcatgggacctggagcctcgactacacagcatcttctgggtctggcgtctgccagcacctgatctctttcctcattcccagctttgtgacacttctcaacttgcggctccatctctccctgcccccacttttttgttggccagggaggctgcagatg

SEQ ID NO: 10149 - DNA, 4203 bp, Homo sapiens
  source 1..4203: mol_type = unassigned DNA
caatttttccgcctccctccgaaagcgataataatatttagaggcgttcgctggggctgaatgagaattagccctaggcgcagcctatcattaggacgggacagcagggccactgtgacatttttaagaaagctgagatgatggaaagaataagaaaagagatgattctgatggagagagggctgcacagccctacggcgggcaagagattctccaatttgtccaactcggctggcaatgctgtgctcgaggccctggaaaattcgcagcacccggctcgcctaagcccgcgcctgccgtctgcccccctgcacagcgctctgggagaactccccgccaagggcaaattcgaaatagacactttgttcaacctgcagcacacgggcagcgaaagcaccgtctcctccgaaatctcctccgccgccgagagccgcaagaagccgggccattattcagaggcggccgctgaggccgacatgagcagcgacgtggaggtgggctgctccgcgcttcgctcccccgggggcctcggcgccgctcagcttaaggaaaacaatggcaaagggtacgcagagagcggctcggctgccggcaccacgacgtcggcgtcgggctcaggcctcggaagcctgcatggaggcagcggaggcagcggcgggagcgcggcgctgggtggctccggctctggcgcggatcaagtgcggcgctaccgtacggcgttcacccgcgagcagatcgcgcgcctggagaaggagttctaccgggagaactatgtgtcgcggccccgccggtgcgagctggccgcggcactcaacctgcccgaaaccaccatcaaggtgtggttccagaaccggcgcatgaaggacaagcggcagcgcctggccatgtcctggccgcacccagccgaccccagcttctacacctacatgatgacgcacgcggccgccaccggaagcctgccctaccccttccactcgcacgtgccgctgcactactacccgcacgtgggcgtcacggcggcggcggccgcggctgcagcctcaggcgcggcggccgcggcttcgtcgcccttcgctacttccatccggccactggacaccttccgcgccctctcgcacccctactctcggccggagctgctgtgtagcttccgccaccctggtctctaccaggctcccgcggccgccgcggggctcaacagcgcggcctctgccgcggcagccgcggcagccgcagcggctgcggcctcctcggcggcggcggccggcgcgccccccagcggcggctctgcaccctgctcgtgcctcagttgccacagcagtcagtcggcggcggcagccgcggcagcagctgccgcagccctgggttcccggggtggcggtggcggcggcggtggtggtggtggcggcggcggcgggggcgccggggccgggggaggctcggacttcggctgcagcgcggcggcgccgcgttccgagagcggcttcctgccctactcggccgcggtgcttagtaagacggccgtgagcccgccggaccagagggacgaggctccgctcaccagataactacgtcgccaccgccagggggccgcgcccgcctctctgagtgtgcccgggagtcccctgtgcgccccctgagccctccgcgcgttgcccgctgctgccgctgccgccagggggcgccccggggcgcgggaggccgaagggaacctgctccgaattgggggagaaggagcaggcgcaaaagcctggcgggcatccccctaaattatttctatttttgtatttgccacccagccgtctgcccttctctctcttttctggctcccgggacccactttccacctctgtcctgagcgcttggtttcccaaagaccaacccctcgccccctaagctagtcctggctgtgcactctcaggtccgggttgcttggctgaacggcgtggcccgaagcaacggagaaccacaacaaagacagagggggatgctgtgcgctggtgcttgggggcgggggaggagtcgccccggaggtttctcgctgctgctgtttttcttccttttctttcaacgagggtgggggaggtggcaaacgttctttcagcctgagcttattagggaccctgcccgaagagtgcgggagaacggaggtctgataaggccgggaggacggatggagagcgtgggcagcggtggttgtttgtgagattgtttactacgttcaggagcaaggcgggtagggatgtggccgccttccccgggaaggacaaagccgaggtgctggaaggggtggccgttgcgccgcctccttttcggtccaacacctttctctcttttggtctttggtttcagtgctgatggaatggaagcatcttgcatattttatgcaaaaagtgatggcaaaagaggttgccacggccagggaagggaaaggaagggagttggggtaggggtaagactgatagatcgctgtagtatttggagaggcgttttcagctcagttttccaactaccgggttccactcgatctgggaaatacttgaatctctagatatattaatattatcctaaagcatttccttagacacttttctaagttagaactctctatgtccctcgtccccttctctcctcgctttccttttcctcgggtgaaatggttcttggcatatttctcacgcatgtctattgcgccttcgcctctgcaaagccaccgctgggttgctgagacccgctctgccaacccggctactggaggggtttccttgaacttgaagaaaggtacatcaaaacccactagtgttaactgccacgtcaagtttgatgctaataatgtgcagattatgacgaaaattgccaatcatgctctctgatggacctcctttgaatgtggaattggagaaaagttccccgcacggagacctgctgtcaagtactaacaacccgctaagggaagtcattaggagagacggataagagactcggtacataaaacattgttcttggtgcatagaatgtatgttatttaatgttatctctgttacctgaagtgatttcgcagaagaaagccacgttcttatcatctcaattgccgattttcattttggtaacttggacgccctgggtagacttttctctgttaagttgatattccaccagtgtgaacagcctcattaaatcaagcccagatatttccataatgctccccgcagagccacttggctcctcacataatgagattttctgaagagttgaagccctaaaataacttgctagtgcatgtttagacccagcgaagtgggtatgtgtgtgtacgtgtattaaaatgtaggtaggctacctacatgtgtttgtgtatgtgtatatatatgtatatgtatgtatatgcatatatatatccgtgctcttaaatacatatgtaagagatacacacatattcatgtatacatacacattggcactattttctgtggtttatttcagatttgtgtcctgccatcatattgttattttaaagacactggattttaaaatatcatttcctaaatataggctttcagtaaacttttgaaagaattagttttccaggagaaattatttccatcaaatggaaaatacataaaggggaaacagtatttcgaaattcctggggtctattaaaatattaccataaaatattagagaactttccaatgaaatagcaatgatctaaaacttaagtttttgtttttgtttttaaaaacatgagactacttatgtaaaatattgattataccagctcttattcactgagtttacatttttaaaaatattaatatataatttaaggctaaataaaataaaccaaaatatggtaccctttatcagctttacctatttagattgttaaagtcctttgttatgatcagctaacagatgtatataaggtactttaggcagtaatgtttacatttcccccaaaaaatatatatgattgatgagaacgctggttggtaaaattaacataaattcatcatttgttgggtccattggatctggttattatattgaaataaaattgtaaataaagtcttcgtgctttaaatattgctggatgtatgaactcactgtaagatattttacaaatgtgcaataattataaagccttgtatattacgttatttattgtgtttggtcatgtaaaataaatgttatttaaatcaa

SEQ ID NO: 10150 - DNA, 3418 bp, Homo sapiens
  source 1..3418: mol_type = unassigned DNA
cttgcgcgcgccccaccgaccaaaatggcggctgccgttggtgcggggtgcggtttgtagtgctgttgccctactcatccctttgcaaaatgtgaaagaagaagcggctggtggaggcgggccataggcaatgagtcggcgaaggaaacatgatgacagccctagcccgaagaaaacgccgcacaaaacagtggcggcggaggaatgcggctcggtggtcgagccagggaggaggcggctgagatcggcccgcggttcgtggccctgcggggctagagaggggcctcccgggccagtgcggcagcgagagcagcctccgaccgccgccctgtgcagtaaaagtaaccccgaggaaaggtatgaaacaccaaagagagcgctgaaaatggactcactgtcatcttccttcagttctcctaatgatccagatggacagaatgatatcttttgggatcagaattctccattgacaaagcagttaggtaaaggaagaaaaaaacagatttacaccacagatagtgatgagatttcacatattgttaatcgtattgctcctcaggatgaaaaaccaacaacaaattctatgctggacatgtggattggtgaaactgctattccttgtactcccagtgtagcaaaaggaaaatcaagagcaaaaatcagctgcacaaagttaaaaacacaaagtcaagaagaagaacttatgaaactggctaaacaatttgataaaaatatggaagagctagatgtgattcaagagcaaaacaagaggaattatgattttacccagatgatttcagaaacagagattttaagtaattataaagataatatacagatgtggtcattacataatatagttcccgaaatagataatgctacaaaaaagccaatcaaaggaaacaccaagatatctgtggcaaataatcaaaatagcagtcagaagccatttgaccaaattgctgaagcagcctttaatgctatttttgatggttctactcagaaatgtagcggacagttaagccaagaactgccagaggctttttggagcaccagtaatactacctttgtaaagacaaatgctttgaaagaggagaaaatcattactaatgaaactctggtcattgaaaaactgtcaaataaaaccccacgatcactttcttctcaagtagatacacccataatgacaaaatcatgtgtgacttcctgtactaaggagccagaaacttctaataagtacattgatgcatttactacaagtgattttgaggatgattgggaaaacttactaggtagtgaaccttttgctatgcaaaatatcgacatgcctgaactctttccttctaaaacagcccatgttactgatcaaaaggaaatttgtacctttaatagtaaaactgttaaaaatacgtcaagagcaaatacaagtccagatgccaggttaggagattcaaaagtattacaagatctttcttcaaagacatatgacagagaattaatagatgcagaatatagattttcaccaaattcaaataaatcaaacaaattatccactggaaataaaatgaaatttgagaactcttccaataaaattgttattcaagacgaaattcaaaattgtatagttacatctaatctgacaaaaataaaggaagatattcttactaactctactgaagcttctgaaaggaagtcagctttgaacacaaggtattctaatgaacagaaaaataagtgcattttaaatcagtctattaaagcccctgttaatactgatctttttggctctgcaaatctaggcagtaaaaccagtgttagtaacccaaatcagactagtgcatcaaaagtaggttctttctttgatgattggaatgatccctcatttgccaatgaaattattaaagcatgtcatcaattagataatacctgggaagcagatgatgtagatgatgatttgttgtaccaagcatgtgatgatattgaaagactaactcagcaacaagacattagaaaggacagtaagacatcagaaagtatatgtgagatcaataataattccgaacatggagccaaactaactcagcaacaagacattagaaaggacagtaagacatcagaaagtatatgtgagatcaataataattccgaacatggagccaaaaacatgtttgctatatctaaacaaggaagtaatttggtacaatcaaagcatttgaatccaggcagcatttcagtgcagacatctttgacaaatagctcacaaatagataagccaatgaagatggagaaaggggaaatgtatggaaattctccaagatttttaggtgccacaaatttgactatgtattctaagatctcaaactgtcagataaataatctgcatgtgtcttatactaacactgatgttccaatacaagtgaatagttccaaattggttcttccaggaagttcaagtttgaatgtaacttcagatcatatgaatacagaaattactacttataagaagaaattgagtactaatcagccatgccataagactgtaacagatgaagctcagagcaaccttaacacaacagttggattttcaaagtttacatttacaaggatgaaaaattctcagattctttctcagtttaatcaaaattgtataactggaagtatgtctgataccaaaattacacagggtgtggagaaaaagaaaggtgtcaacccattactggaggaagctgttggacagcaatctttggtgaaactttctgaatctttgaaacaatcttcaaaagaggaagaagagaaaaatagaaagtgttctcctgaagaaattcagagaaaaagacaagaagcactggttcggagaatggctaaagcacgagcctcatctgtaaatgcagctcccacttcatttctttaatgaaatattagttggaagacttcacgaagactgctgataactatctgtgattgataggaaattttttttcttgatttctctgtgagaaatgtaatgctgacttttataaagcctggacttctactttatttaataaatcaatgtttgcaatggtaaatgaaacatttccttggacatgtatttgaaagtcattaaatacaaaagttttggaaattcaggaaagttagcaattatgtacggatattatacagaggaaagtagttatatttttaaatgctattattgcagaggatcatcaaaaaagaggtaatctacgttatttcctattctaatgtcttttcctaataaaaaacttcaactttctaagttagtagagactgtttttgtagttttactttcattaactgttgcttaaggtttttatacacttccagattttaattaatactttcatatttctaggaacatggttgatatgaaataaaggactttttatttgtaaggaaa

SEQ ID NO: 10151 - DNA, 2750 bp, Homo sapiens
  source 1..2750: mol_type = unassigned DNA
gggagcttccggattgagccggaagtccccccagagcggatgccgcggcgggcctgtgggagcggggtcatcttctctctgctgctgtagctgccatgggcaaaagagaccgagcggaccgcgacaagaagaaatccaggaagcggcactatgaggatgaagaggatgatgaagaggacgccccggggaacgaccctcaggaagcggttccctcggcggcggggaagcaggtggatgagtcaggcaccaaagtggatgaatatggagccaaggactacaggctgcaaatgccgctgaaggacgaccacacctccaggcccctctgggtggctcccgatggccatatcttcttggaagccttctctccagtttacaaatatgcccaagacttcttggtggctattgcagagccagtgtgccgaccaacccatgtgcatgagtacaaactaactgcctactccttgtatgcagctgtcagcgttgggctgcaaaccagtgacatcaccgagtacctcaggaagctcagcaagactggagtccctgatggaattatgcagtttattaagttgtgtactgtcagctatggaaaagtcaagctggtcttgaagcacaacagatacttcgttgaaagttgccaccctgatgtaatccagcatcttctccaggaccccgtgatccgagaatgccgcttaagaaactctgaaggggaggccactgagctcatcacagagactttcacaagcaaatctgccatttctaagactgctgaaagcagtggtgggccctccacttcccgagtgacagatccacagggtaaatctgacatccccatggacctgtttgacttctatgagcaaatggacaaggatgaagaagaagaagaagagacacagacagtgtcttttgaagtcaagcaggaaatgattgaggaactccagaaacgttgcatccacctggagtaccctctgttggcagaatatgacttccggaatgattctgtcaaccctgatatcaacattgacctaaagcccacagctgtcctcagaccctatcaggagaagagcttgcgaaagatgtttggaaacgggcgtgcacgttcgggggtcattgttcttccctgcggtgctggaaagtccctggttggtgtgactgctgcatgcactgtcagaaaacgctgtctggtgctgggcaactcagctgtttctgtggagcagtggaaagcccagttcaagatgtggtccaccattgacgacagccagatctgccggttcacctccgatgccaaggacaagcccatcggctgctccgttgccattagcacctactccatgctgggccacaccaccaaaaggtcctgggaggccgagcgagtcatggagtggctcaagacccaggagtggggcctcatgatcctggatgaagtgcacaccataccagccaagatgttccgaagggtgctcaccatcgtgcaggcccactgtaagctgggtttgactgcgaccctcgtccgcgaagatgacaaaattgtggatttaaattttctgattgggcctaagctctacgaagccaactggatggagctgcagaataatggctacatcgccaaagtccagtgtgctgaggtctggtgccctatgtctcctgaattttaccgggaatatgtggcaatcaaaaccaagaaacgaatcttgctgtacaccatgaaccccaacaaatttagagcttgccagtttctgatcaagtttcatgaaaggaggaatgacaagattattgtctttgctgacaatgtgtttgccctaaaggaatatgccattcgactgaacaaaccctatatctacggacctacgtctcagggggaaaggatgcaaattctccagaatttcaagcacaaccccaaaattaacaccatcttcatatccaaggtaggtgacacttcgtttgatctgccggaagcaaatgtcctcattcagatctcatcccatggtggctccaggcgtcaggaagcccaaaggctagggcgggtgcttcgagctaaaaaagggatggttgcagaagagtacaatgcctttttctactcactggtatcccaggacacacaggaaatggcttactcaaccaagcggcagagattcttggtagatcaaggttatagcttcaaggtgatcacgaaactcgctggcatggaggaggaagacttggcgttttcgacaaaagaagagcaacagcagctcttacagaaagtcctggcagccactgacctggatgccgaggaggaggtggtggctggggaatttggctccagatccagccaggcatctcggcgctttggcaccatgagttctatgtctggggccgacgacactgtgtacatggagtaccactcatcgcggagcaaggcgcccagcaaacatgtacacccgctcttcaagcgctttaggaaatgatgcttaggcagggtacttcgttcaagaccggcgcttggcacccttgttggaaagggattttcagcataacattttccttccacctctttgaccttccctccagcgttggccaaattgtgctgaggaagatgcatcaagggcttggctgtgccttcataggtcatctagggttttataaaggaggaggagacaatattttttcaaactttttggggagtggggtcatttctgtatataaaaaatgttaatatttaaggtgtatttatgttaccgttctgaataaacagaatggaccattgaaccagt

SEQ ID NO: 10152 - DNA, 2920 bp, Homo sapiens
  source 1..2920: mol_type = unassigned DNA
tgctgtagctgccatgggcaaaagagaccgagcggaccgcggtgagacgttgcgcgggcacgctcagccacgactgcccttgccggccctgccccccgctctgcctcggagctgctccgggcctctgcgccggccgaccctgctggccctcccgcgcgcaccccgttgggacaggcctttgggcgggagagatgctggacctgggcgcagcccagcgaactcggcctaggggagacgggtgaggggcgcaacgcctgcgggatgcaggtggctcttagctaggagtttgcggcggcgcagacaagaagaaatccaggaagcggcactatgaggatgaagaggatgatgaagaggacgccccggggaacgaccctcaggaagcggttccctcggcggcggggaagcaggtggatgagtcaggcaccaaagtggatgaatatggagccaaggactacaggctgcaaatgccgctgaaggacgaccacacctccaggcccctctgggtggctcccgatggccatatcttcttggaagccttctctccagtttacaaatatgcccaagacttcttggtggctattgcagagccagtgtgccgaccaacccatgtgcatgagtacaaactaactgcctactccttgtatgcagctgtcagcgttgggctgcaaaccagtgacatcaccgagtacctcaggaagctcagcaagactggagtccctgatggaattatgcagtttattaagttgtgtactgtcagctatggaaaagtcaagctggtcttgaagcacaacagatacttcgttgaaagttgccaccctgatgtaatccagcatcttctccaggaccccgtgatccgagaatgccgcttaagaaactctgaaggggaggccactgagctcatcacagagactttcacaagcaaatctgccatttctaagactgctgaaagcagtggtgggccctccacttcccgagtgacagatccacagggtaaatctgacatccccatggacctgtttgacttctatgagcaaatggacaaggatgaagaagaagaagaagagacacagacagtgtcttttgaagtcaagcaggaaatgattgaggaactccagaaacgttgcatccacctggagtaccctctgttggcagaatatgacttccggaatgattctgtcaaccctgatatcaacattgacctaaagcccacagctgtcctcagaccctatcaggagaagagcttgcgaaagatgtttggaaacgggcgtgcacgttcgggggtcattgttcttccctgcggtgctggaaagtccctggttggtgtgactgctgcatgcactgtcagaaaacgctgtctggtgctgggcaactcagctgtttctgtggagcagtggaaagcccagttcaagatgtggtccaccattgacgacagccagatctgccggttcacctccgatgccaaggacaagcccatcggctgctccgttgccattagcacctactccatgctgggccacaccaccaaaaggtcctgggaggccgagcgagtcatggagtggctcaagacccaggagtggggcctcatgatcctggatgaagtgcacaccataccagccaagatgttccgaagggtgctcaccatcgtgcaggcccactgtaagctgggtttgactgcgaccctcgtccgcgaagatgacaaaattgtggatttaaattttctgattgggcctaagctctacgaagccaactggatggagctgcagaataatggctacatcgccaaagtccagtgtgctgaggtctggtgccctatgtctcctgaattttaccgggaatatgtggcaatcaaaaccaagaaacgaatcttgctgtacaccatgaaccccaacaaatttagagcttgccagtttctgatcaagtttcatgaaaggaggaatgacaagattattgtctttgctgacaatgtgtttgccctaaaggaatatgccattcgactgaacaaaccctatatctacggacctacgtctcagggggaaaggatgcaaattctccagaatttcaagcacaaccccaaaattaacaccatcttcatatccaaggtaggtgacacttcgtttgatctgccggaagcaaatgtcctcattcagatctcatcccatggtggctccaggcgtcaggaagcccaaaggctagggcgggtgcttcgagctaaaaaagggatggttgcagaagagtacaatgcctttttctactcactggtatcccaggacacacaggaaatggcttactcaaccaagcggcagagattcttggtagatcaaggttatagcttcaaggtgatcacgaaactcgctggcatggaggaggaagacttggcgttttcgacaaaagaagagcaacagcagctcttacagaaagtcctggcagccactgacctggatgccgaggaggaggtggtggctggggaatttggctccagatccagccaggcatctcggcgctttggcaccatgagttctatgtctggggccgacgacactgtgtacatggagtaccactcatcgcggagcaaggcgcccagcaaacatgtacacccgctcttcaagcgctttaggaaatgatgcttaggcagggtacttcgttcaagaccggcgcttggcacccttgttggaaagggattttcagcataacattttccttccacctctttgaccttccctccagcgttggccaaattgtgctgaggaagatgcatcaagggcttggctgtgccttcataggtcatctagggttttataaaggaggaggagacaatattttttcaaactttttggggagtggggtcatttctgtatataaaaaatgttaatatttaaggtgtatttatgttaccgttctgaataaacagaatggaccattg

SEQ ID NO: 10153 - DNA, 4243 bp, Homo sapiens
  source 1..4243: mol_type = unassigned DNA
ctctccacggcgcacagagcatgcgcggggcgggagtgagcgaaattcaagctccaaactctaagctccaagctccaagctccaagctccaagctccaaactcccgccggggtaactggaacccaatccgagggtcatggaggcatcccgaaggtttccggaagccgaggccttgagcccagagcaggctgctcattacctaagatatgtgaaagaggccaaagaagcaactaagaatggagacctggaagaagcatttaaacttttcaatttggcaaaggacatttttcccaatgaaaaagtgctgagcagaatccaaaaaatacaggaagccttggaggagttggcagaacagggagatgatgaatttacagatgtgtgcaactctggcttgctactttatcgagaactgcacaaccaactctttgagcaccagaaggaaggcatagctttcctctatagcctgtatagggatggaagaaaaggtggtatattggctgatgatatgggattagggaagactgttcaaatcattgctttcctttccggtatgtttgatgcatcacttgtgaatcatgtgctgctgatcatgccaaccaatcttattaacacatgggtaaaagaattcatcaagtggactccaggaatgagagtcaaaacctttcatggtcctagcaaggatgaacggaccagaaacctcaatcggattcagcaaaggaatggtgttattatcactacataccaaatgttaatcaataactggcagcaactttcaagctttaggggccaagagtttgtgtgggactatgtcatcctcgatgaagcacataaaataaaaacctcatctactaagtcagcaatatgtgctcgtgctattcctgcaagtaatcgcctcctcctcacaggaaccccaatccagaataatttacaagaactatggtccctatttgattttgcttgtcaagggtccctgctgggaacattaaaaacttttaagatggagtatgaaaatcctattactagagcaagagagaaggatgctaccccaggagaaaaagccttgggatttaaaatatctgaaaacttaatggcaatcataaaaccctattttctcaggaggactaaagaagacgtacagaagaaaaagtcaagcaacccagaggccagacttaatgaaaagaatccagatgttgatgccatttgtgaaatgccttccctttccaggaaaaatgatttaattatttggatacgacttgtgcctttacaagaagaaatatacaggaaatttgtgtctttagatcatatcaaggagttgctaatggagacgcgctcacctttggctgagctaggtgtcttaaagaagctgtgtgatcatcctaggctgctgtctgcacgggcttgttgtttgctaaatcttgggacattctctgctcaagatggaaatgagggggaagattccccagatgtggaccatattgatcaagtaactgatgacacattgatggaagaatctggaaaaatgatattcctaatggacctacttaagaggctgcgagatgagggacatcaaactctggtgttttctcaatcgaggcaaattctaaacatcattgaacgcctcttaaagaataggcactttaagacattgcgaatcgatgggacagttactcatcttttggaacgagaaaaaagaattaacttattccagcaaaataaagattactctgtttttctgcttaccactcaagtaggtggtgtcggtttaacattaactgcagcaactagagtggtcatttttgaccctagctggaatcctgcaactgatgctcaagctgtggatagagtttaccgaattggacaaaaagagaatgttgtggtttataggctaatcacttgtgggactgtagaggaaaaaatatacagaagacaggttttcaaggactcattaataagacaaactactggtgaaaaaaagaaccctttccgatattttagtaaacaagaattaagagagctctttacaatcgaggatcttcagaactctgtaacccagctgcagcttcagtctttgcatgctgctcagaggaaatctgatataaaactagatgaacatattgcctacctgcagtctttggggatagctggaatctcagaccatgatttgatgtacacatgtgatctgtctgttaaagaagagcttgatgtggtagaagaatctcactatattcaacaaagggttcagaaagctcaattcctcgttgaattcgagtctcaaaataaagagttcctgatggaacaacaaagaactagaaatgagggggcctggctaagagaacctgtatttccttcttcaacaaagaagaaatgccctaaattgaataaaccacagcctcagccttcacctcttctaagtactcatcatactcaggaagaagatatcagttccaaaatggcaagtgtagtcattgatgatctgcccaaagagggtgagaaacaagatctctccagtataaaggtgaatgttaccaccttgcaagatggtaaaggtacaggtagtgctgactctatagctactttaccaaaggggtttggaagtgtagaagaactttgtactaactcttcattgggaatggaaaaaagctttgcaactaaaaatgaagctgtacaaaaagagacattacaagaggggcctaagcaagaggcactgcaagaggatcctctggaaagttttaattatgtacttagcaaatcaaccaaagctgatattgggccaaatttagatcaactaaaggatgatgagattttacgtcattgcaatccttggcccattatttccataacaaatgaaagtcaaaatgcagaatcaaatgtatccattattgaaatagctgatgacctttcagcatcccatagtgcactgcaggatgctcaagcaagtgaggccaagttggaagaggaaccttcagcatcttcaccacagtatgcatgtgatttcaatcttttcttggaagactcagcagacaacagacaaaatttttccagtcagtctttagagcatgttgagaaagaaaatagcttgtgtggctctgcacctaattccagagcagggtttgtgcatagcaaaacatgtctcagttgggagttttctgagaaagacgatgaaccagaagaagtagtagttaaagcaaaaatcagaagtaaagctagaaggattgtttcagatggcgaagatgaagatgattcttttaaagatacctcaagcataaatccattcaacacatctctctttcaattctcatctgtgaaacaatttgatgcttcaactcccaaaaatgacatcagtccaccaggaaggttcttttcatctcaaatacccagtagtgtaaataagtctatgaactctagaagatctctggcttctaggaggtctcttattaatatggttttagaccacgtggaggacatggaggaaagacttgacgacagcagtgaagcaaagggtcctgaagattatccagaagaaggggtggaggaaagcagtggcgaagcctccaagtatacagaagaggatccttccggagaaacactgtcttcagaaaacaagtccagctggttaatgacgtctaagcctagtgctctagctcaagagacctctcttggtgcccctgagcctttgtctggtgaacagttggttggttctccccaggataaggcggcagaggctacaaatgactatgagactcttgtaaagcgtggaaaagaactaaaagagtgtggaaaaatccaggaggccctaaactgcttagttaaagcgcttgacataaaaagtgcagatcctgaagttatgctcttgactttaagtttgtataagcaacttaataacaattgagaatgtaacctgtttattgtattttaaagtgaaactgaatatgagggaatttttgttcccataattggattctttgggaacatgaagcattcaggcttaaggcaagaaagatctcaaaaagcaacttctgccctgcaacgccccccactccatagtctggtattctgagcactagcttaatatttcttcacttgaatattcttatattttaggcatattctataaatttaactgtgttgtttcttggaaagttttgtaaaattattctggtcattcttaattttactctgaaagtgatcatctttgtatataacagttcagataagaaaattaaagttacttttctcaagtgtt

SEQ ID NO: 10154 - DNA, 3357 bp, Homo sapiens
  source 1..3357: mol_type = unassigned DNA
agtgttgggggaacggccgcttcccgttcaacgctttattgaggggcgtatcctagtggcccccatccggtctccgttttggaagacccgcctcggcacagccaggctcagtccggccttgcgctgagaaaagatgacagcaatcaagcatgcattacaaagagacatttttacaccaaatgatgaacgcctgctgagcattgtgaatgtctgcaaagcaggaaaaaagaaaaagaactgttttttatgtgccacagtgacaactgaacgccctgtgcaggttaaggtggtcaaagtcaagaaatccgataagggagatttctacaaaaggcagattgcatgggcccttcgagatcttgctgtggtagatgccaaagatgctatcaaagaaaatcctgaatttgatttacactttgaaaaaatatataaatgggttgccagcagcactgctgaaaagaatgcatttatttcatgcatttggaaattgaatcagcgatatctccggaagaaaattgattttgtcaatgttagctcacagcttttggaagaatctgttccaagtggagaaaatcagagtgtgacaggaggtgatgaagaagtagtagatgaataccaagagttaaatgcaagagaagaacaggatatcgaaataatgatggaaggctgtgaatatgcaatctcgaatgcggaagcctttgcagaaaaattgtccagagagctgcaggtgctagatggggctaacatccagtcaatcatggcatctgaaaaacaagtcaacatcctgatgaaattgctagatgaggctctaaaggaggtagatcagattgaattgaaactgagcagttatgaggaaatgctccaaagtgtaaaagaacaaatggatcagatctctgaaagcaaccacctaattcatcttagtaacactaataatgtaaaactcctatctgagatagagttccttgtgaaccacatggacttggccaaaggtcatataaaggcccttcaggaaggagatcttgcttcttccagaggcattgaggcctgcaccaatgctgctgatgcccttctgcagtgcatgaatgtagctcttcgaccaggccatgacttgcttctggcagtcaaacagcaacagcagcgattcagtgatttgcgagagctttttgcccggagactggccagtcacctcaacaatgtttttgttcaacagggtcatgatcagagttcgactcttgcccaacactctgttgaactgactttacccaatcatcatccatttcatagagatttgctccgatatgccaagctgatggagtggctaaagagtacagattatggaaaatatgaaggactaacaaagaattacatggattatttatcccgactatatgaaagagaaatcaaagatttctttgaagttgcaaagatcaagatgactggcacaactaaagaaagcaagaagtttgctacactgcctcgaaaagaaagtgctgtcaaacaggaaacagagagtcttcatggaagttcggggaaattaactggatctacttctagtctaaataagctcagtgttcagagttcagggaatcgcagatctcagtcatcttccctgttggatatgggaaacatgtctgcctctgatctcgatgttgctgacaggaccaaatttgataagatctttgaacaggtactaagtgaactggagcccctatgtctggcagaacaggacttcataagtaaatttttcaaactacagcaacatcaaagtatgcctggaactatggctgaagcagaggacctggatggaggaacattatcacggcaacataattgtggcacaccactgcctgtttcatctgagaaagatatgatccgccaaatgatgattaaaatatttcgctgcattgagccagagctgaacaacctaattgcattaggagacaaaattgatagctttaactctctttatatgttagtcaaaatgagtcatcatgtgtggactgcacaaaatgtggaccctgcttctttcctaagtactacattgggaaatgttttggtgactgtcaaaaggaactttgacaaatgcattagtaaccaaataaggcaaatggaagaagtaaagatctcaaaaaagagtaaagttggaattcttccatttgttgctgaatttgaagaatttgctggacttgcagaatcaatcttcaaaaatgctgagcgtcgtggagacctggataaagcatacaccaaacttatcagaggagtatttgttaatgtggagaaagtagcaaatgaaagccagaagacccccagggatgtggttatgatggaaaactttcaccatatttttgcaactctttctcgattgaaaatctcatgtctagaagcagaaaaaaaagaagccaaacaaaaatacacagatcaccttcagtcttatgtcatttactctttaggacaacctcttgaaaaactaaatcatttctttgaaggtgttgaagctcgcgtggcacagggcataagggaggaggaagtaagttaccaacttgcatttaacaaacaagaacttcgtaaagtcattaaggagtaccctggaaaggaagtaaaaaaaggtctagataacctctacaagaaagttgataaacatttatgtgaagaagagaacttacttcaggtggtgtggcactccatgcaagatgaatttatacgccagtataagcactttgaaggtttgatagctcgctgttatcctggatctggtgttacaatggaattcactattcaggacattctggattattgttccagcattgcacagtcccactaaaccttgtgaaagaagaaaagataactgaatgaagcatttgagtataacagacactataccaaaataccaagcaactgttttgagaacccagacttaaaattttatgtattattaaatgttagataaatgggtagtaccatactacaaatatttaaatgcaaaattaccaacctatatagcagttttatttgccctataggttgcatactaacttaagcattcatgtcaccataaaatgcctttagcatttctcaatgactggatgggaaattttcctttattgcctagctgcttgtgtttgagtggttgtcctatgagcaatgcatttggagttcttcagctttcactacttctctgttgcttgctaatcatgtaactactaaaatactgtacaaaattgttttttcacactaacaaatgtgtatatggagaagagggctcatgtgatgatcatttgtgaacttagatttttgaggattatgtgactagtaataaatgtgaaataaattttcaaaaaagttgacatttgataatatttt

SEQ ID NO: 10155 - DNA, 3248 bp, Homo sapiens
  source 1..3248: mol_type = unassigned DNA
atccggtctccgttttggaagacccgcctcggcacagccaggctcagtccggccttgcgctgagaaaagatgacagcaatcaagcatgcattacaaagagacatttttacaccaaatgatgaacgcctgctgagcattgtgaatgtctgcaaagcaggaaaaaagaaaaagaactgttttttatgtgccacagtgacaactgaacgccctgtgcaggttaaggtggtcaaagtcaagaaatccgataagggagatttctacaaaaggcagattgcatgggcccttcgagatcttgctgtggtagatgccaaagatgctatcaaagaaaatcctgaatttgatttacactttgaaaaaatatataaatgggttgccagcagcactgctgaaaagaatgcatttatttcatgcatttggaaattgaatcagcgatatctccggaagaaaattgattttgtcaatgttagctcacagcttttggaagaatctgttccaagtggagaaaatcagagtgtgacaggaggtgatgaagaagtagtagatgaataccaagagttaaatgcaagagaagaacaggatatcgaaataatgatggaaggctgtgaatatgcaatctcgaatgcggaagcctttgcagaaaaattgtccagagagctgcaggtgctagatggggctaacatccagtcaatcatggcatctgaaaaacaagtcaacatcctgatgaaattgctagatgaggctctaaaggaggtagatcagattgaattgaaactgagcagttatgaggaaatgctccaaagtgtaaaagaacaaatggatcagatctctgaaagcaaccacctaattcatcttagtaacactaataatgtaaaactcctatctgagatagagttccttgtgaaccacatggacttggccaaaggtcatataaaggcccttcaggaaggagatcttgcttcttccagaggcattgaggcctgcaccaatgctgctgatgcccttctgcagtgcatgaatgtagctcttcgaccaggccatgacttgcttctggcagtcaaacagcaacagcagcgattcagtgatttgcgagagctttttgcccggagactggccagtcacctcaacaatgtttttgttcaacagggtcatgatcagagttcgactcttgcccaacactctgttgaactgactttacccaatcatcatccatttcatagagatttgctccgatatgccaagctgatggagtggctaaagagtacagattatggaaaatatgaaggactaacaaagaattacatggattatttatcccgactatatgaaagagaaatcaaagatttctttgaagttgcaaagatcaagatgactggcacaactaaagaaagcaagaagtttggtcttcatggaagttcggggaaattaactggatctacttctagtctaaataagctcagtgttcagagttcagggaatcgcagatctcagtcatcttccctgttggatatgggaaacatgtctgcctctgatctcgatgttgctgacaggaccaaatttgataagatctttgaacaggtactaagtgaactggagcccctatgtctggcagaacaggacttcataagtaaatttttcaaactacagcaacatcaaagtatgcctggaactatggctgaagcagaggacctggatggaggaacattatcacggcaacataattgtggcacaccactgcctgtttcatctgagaaagatatgatccgccaaatgatgattaaaatatttcgctgcattgagccagagctgaacaacctaattgcattaggagacaaaattgatagctttaactctctttatatgttagtcaaaatgagtcatcatgtgtggactgcacaaaatgtggaccctgcttctttcctaagtactacattgggaaatgttttggtgactgtcaaaaggaactttgacaaatgcattagtaaccaaataaggcaaatggaagaagtaaagatctcaaaaaagagtaaagttggaattcttccatttgttgctgaatttgaagaatttgctggacttgcagaatcaatcttcaaaaatgctgagcgtcgtggagacctggataaagcatacaccaaacttatcagaggagtatttgttaatgtggagaaagtagcaaatgaaagccagaagacccccagggatgtggttatgatggaaaactttcaccatatttttgcaactctttctcgattgaaaatctcatgtctagaagcagaaaaaaaagaagccaaacaaaaatacacagatcaccttcagtcttatgtcatttactctttaggacaacctcttgaaaaactaaatcatttctttgaaggtgttgaagctcgcgtggcacagggcataagggaggaggaagtaagttaccaacttgcatttaacaaacaagaacttcgtaaagtcattaaggagtaccctggaaaggaagtaaaaaaaggtctagataacctctacaagaaagttgataaacatttatgtgaagaagagaacttacttcaggtggtgtggcactccatgcaagatgaatttatacgccagtataagcactttgaaggtttgatagctcgctgttatcctggatctggtgttacaatggaattcactattcaggacattctggattattgttccagcattgcacagtcccactaaaccttgtgaaagaagaaaagataactgaatgaagcatttgagtataacagacactataccaaaataccaagcaactgttttgagaacccagacttaaaattttatgtattattaaatgttagataaatgggtagtaccatactacaaatatttaaatgcaaaattaccaacctatatagcagttttatttgccctataggttgcatactaacttaagcattcatgtcaccataaaatgcctttagcatttctcaatgactggatgggaaattttcctttattgcctagctgcttgtgtttgagtggttgtcctatgagcaatgcatttggagttcttcagctttcactacttctctgttgcttgctaatcatgtaactactaaaatactgtacaaaattgttttttcacactaacaaatgtgtatatggagaagagggctcatgtgatgatcatttgtgaacttagatttttgaggattatgtgactagtaataaatgtgaaataaattttcaaaaaagttgacatttgataatatttt

SEQ ID NO: 10156 - DNA, 3551 bp, Homo sapiens
  source 1..3551: mol_type = unassigned DNA
cttccttctctacgcggtcaacttccggcgcggagtttgtcacgtgcccggatataggaagtgttgggggaacggccgcttcccgttcaacgctttattgaggggcgtatcctagtggcccccatccggtctccgttttggaagacccgcctcggcacagccaggctcagtccggccttgcggtaagccttcggccgcggctgcccggtagtcccggcggcggcggacagacgagctgacaggcaccagggtctaaggcggctcctcagtccggctgctgtctccacgcctggggtcgggcaccgctccttctgaccttcctttccccgtttgtcccgctgagaaaagatgacagcaatcaagcatgcattacaaagagacatttttacaccaaatgatgaacgcctgctgagcattgtgaatgtctgcaaagcaggaaaaaagaaaaagaactgttttttatgtgccacagtgacaactgaacgccctgtgcaggttaaggtggtcaaagtcaagaaatccgataagggagatttctacaaaaggcagattgcatgggcccttcgagatcttgctgtggtagatgccaaagatgctatcaaagaaaatcctgaatttgatttacactttgaaaaaatatataaatgggttgccagcagcactgctgaaaagaatgcatttatttcatgcatttggaaattgaatcagcgatatctccggaagaaaattgattttgtcaatgttagctcacagcttttggaagaatctgttccaagtggagaaaatcagagtgtgacaggaggtgatgaagaagtagtagatgaataccaagagttaaatgcaagagaagaacaggatatcgaaataatgatggaaggctgtgaatatgcaatctcgaatgcggaagcctttgcagaaaaattgtccagagagctgcaggtgctagatggggctaacatccagtcaatcatggcatctgaaaaacaagtcaacatcctgatgaaattgctagatgaggctctaaaggaggtagatcagattgaattgaaactgagcagttatgaggaaatgctccaaagtgtaaaagaacaaatggatcagatctctgaaagcaaccacctaattcatcttagtaacactaataatgtaaaactcctatctgagatagagttccttgtgaaccacatggacttggccaaaggtcatataaaggcccttcaggaaggagatcttgcttcttccagaggcattgaggcctgcaccaatgctgctgatgcccttctgcagtgcatgaatgtagctcttcgaccaggccatgacttgcttctggcagtcaaacagcaacagcagcgattcagtgatttgcgagagctttttgcccggagactggccagtcacctcaacaatgtttttgttcaacagggtcatgatcagagttcgactcttgcccaacactctgttgaactgactttacccaatcatcatccatttcatagagatttgctccgatatgccaagctgatggagtggctaaagagtacagattatggaaaatatgaaggactaacaaagaattacatggattatttatcccgactatatgaaagagaaatcaaagatttctttgaagttgcaaagatcaagatgactggcacaactaaagaaagcaagaagtttgctacactgcctcgaaaagaaagtgctgtcaaacaggaaacagagagtcttcatggaagttcggggaaattaactggatctacttctagtctaaataagctcagtgttcagagttcagggaatcgcagatctcagtcatcttccctgttggatatgggaaacatgtctgcctctgatctcgatgttgctgacaggaccaaatttgataagatctttgaacaggtactaagtgaactggagcccctatgtctggcagaacaggacttcataagtaaatttttcaaactacagcaacatcaaagtatgcctggaactatggctgaagcagaggacctggatggaggaacattatcacggcaacataattgtggcacaccactgcctgtttcatctgagaaagatatgatccgccaaatgatgattaaaatatttcgctgcattgagccagagctgaacaacctaattgcattaggagacaaaattgatagctttaactctctttatatgttagtcaaaatgagtcatcatgtgtggactgcacaaaatgtggaccctgcttctttcctaagtactacattgggaaatgttttggtgactgtcaaaaggaactttgacaaatgcattagtaaccaaataaggcaaatggaagaagtaaagatctcaaaaaagagtaaagttggaattcttccatttgttgctgaatttgaagaatttgctggacttgcagaatcaatcttcaaaaatgctgagcgtcgtggagacctggataaagcatacaccaaacttatcagaggagtatttgttaatgtggagaaagtagcaaatgaaagccagaagacccccagggatgtggttatgatggaaaactttcaccatatttttgcaactctttctcgattgaaaatctcatgtctagaagcagaaaaaaaagaagccaaacaaaaatacacagatcaccttcagtcttatgtcatttactctttaggacaacctcttgaaaaactaaatcatttctttgaaggtgttgaagctcgcgtggcacagggcataagggaggaggaagtaagttaccaacttgcatttaacaaacaagaacttcgtaaagtcattaaggagtaccctggaaaggaagtaaaaaaaggtctagataacctctacaagaaagttgataaacatttatgtgaagaagagaacttacttcaggtggtgtggcactccatgcaagatgaatttatacgccagtataagcactttgaaggtttgatagctcgctgttatcctggatctggtgttacaatggaattcactattcaggacattctggattattgttccagcattgcacagtcccactaaaccttgtgaaagaagaaaagataactgaatgaagcatttgagtataacagacactataccaaaataccaagcaactgttttgagaacccagacttaaaattttatgtattattaaatgttagataaatgggtagtaccatactacaaatatttaaatgcaaaattaccaacctatatagcagttttatttgccctataggttgcatactaacttaagcattcatgtcaccataaaatgcctttagcatttctcaatgactggatgggaaattttcctttattgcctagctgcttgtgtttgagtggttgtcctatgagcaatgcatttggagttcttcagctttcactacttctctgttgcttgctaatcatgtaactactaaaatactgtacaaaattgttttttcacactaacaaatgtgtatatggagaagagggctcatgtgatgatcatttgtgaacttagatttttgaggattatgtgactagtaataaatgtgaaataaattttcaaaaaa

SEQ ID NO: 10157 - DNA, 2680 bp, Homo sapiens
  source 1..2680: mol_type = unassigned DNA
gtgcacagagaacacccctagcatgaacagtgtgaggattccaccagctttttcaccatgaaggagacagaccgggaggccgttgcgacagcagtgcaaagggttgctgggatgctccagcgcccggaccagctggacaaggtggagcagtatcgcaggagagaagcgcggaagaaggcctccgtggaggccagattgaaggccgccatccagtcacagttggacggggtgcgcacaggcctcagccagctccacaacgccctgaatgacgtcaaagacatccagcagtcgctggcagacgtcagcaaggactggaggcagagcatcaacaccattgagagcctcaaggacgtcaaagacgccgtggtgcagcacagccagctcgccgcagccgtggagaacctcaagaacatcttctcagtgcctgagattgtgagggagacccaggacctaattgaacaaggggcactcctgcaagcccaccggaagctgatggacctggagtgctcccgggacgggctgatgtacgagcagtaccgcatggacagtgggaacacgcgtgacatgaccctcatccatggctactttggcagcacgcaggggctctctgatgagctggctaagcagctgtggatggtgctgcagaggtcactggtcactgtccgccgtgaccccaccttgctggtctcagttgtcaggatcattgaaagggaagagaaaattgacaggcgcatacttgaccggaaaaagcaaactggctttgttcctcctgggaggcccaagaattggaaggagaaaatgttcaccatcttggagaggactgtgaccaccagaattgagggcacacaggcagataccagagagtctgacaagatgtggcttgtccgccacctggaaattataaggaagtacgtcctggatgacctcattgtcgccaaaaacctgatggttcagtgctttcctccccactatgagatctttaagaacctcctgaacatgtaccaccaagccctgagcacgcggatgcaggacctcgcatcggaagacctggaagccaatgagatcgtgagcctcttgacgtgggtcttaaacacctacacaagtactgagatgatgaggaacgtggagctggccccggaagtggatgtcggcaccctggagccattgctttctccacacgtggtctctgagctgcttgacacgtacatgtccacgctcacttcaaacatcatcgcctggctgcggaaagcgctggagacagacaagaaagactgggtcaaagagacagagccagaagccgaccaggacgggtactaccagaccacactccctgccattgtcttccagatgtttgaacagaatcttcaagttgctgctcagataagtgaagatttgaaaacaaaggtactagttttatgtcttcagcagatgaattctttcctaagcagatataaagatgaagcgcagctgtataaagaagagcacctgaggaatcggcagcaccctcactgctacgttcagtacatgatcgccatcatcaacaactgccagaccttcaaggaatccatagtcagtttaaaaagaaagtatttaaagaatgaagtggaagagggtgtgtctccgagccagcccagcatggacgggattttagacgccatcgcgaaggagggctgcagcggtttgctggaggaggtcttcctggacctggagcaacatctgaatgaattgatgacgaagaagtggctattagggtcaaacgctgtagacattatctgtgtcaccgtggaagactatttcaacgattttgccaaaattaaaaagccgtataagaagaggatgacggccgaggcgcaccggcgcgtggtggtggagtacctgcgggcggtcatgcagaagcgcatttccttccggagcccggaggagcgcaaggagggtgccgagaagatggttagggaggcagagcagctgcgcttcctgttccggaagctggcgtccggtttcggggaagacgtggacggatactgcgacaccatcgtggctgtggccgaagtgatcaagctgacagacccttctctgctctacctggaggtctccactctggtcagcaagtatccagacatcagggatgaccacatcggtgcgctgctggctgtgcgtggggacgccagccgtgacatgaagcagaccatcatggagaccctggagcagggcccagcacaggccagccccagctacgtgcccctcttcaaggacattgtggtgcccagcctgaacgtggccaagctgctcaagtagcctccgccggcctgccctgctcgcccctccacagcctcggtccctgcctttagaaacgcgggacagctgattgctctccttggccacacgtgctccttttagctgcacggcctgtctttaggtgccagtgtgatgcaccgggtgtgcgtcgagtgagcgtcccgaggccacgtgcggaggcccctcactgtgctgtcaaaggcctgtgggtgcagggctctgccgcacagcctctcttgggtgcttgtttgttgcagtggttgaaagtgtgtggggcacagaggacgtgcacctccctgccctcctcctccctgggccttcaccgcaccccatctgcttaagtgctcggaaccccgtcacctaattaaagtttctcggcttcctc

SEQ ID NO: 10158 - DNA, 2310 bp, Homo sapiens
  source 1..2310: mol_type = unassigned DNA
cagtgtgaggattccaccagctttttcaccatgaaggagacagaccgggaggccgttgcgacagcagtgcaaagggttgctgggatgctccagcgcccggaccagctggacaaggtggagcagtatcgcaggagagaagcgcggaagaaggcctccgtggaggccagattgaaggccgccatccagtcacagttggacggggtgcgcacaggcctcagccagctccacaacgccctgaatgacgtcaaagacatccagcagtcgctggcagacgtcagcaaggactggaggcagagcatcaacaccattgagagcctcaaggacgtcaaagacgccgtggtgcagcacagccagctcgccgcagccgtggagaacctcaagaacatcttctcagtgcctgagattgtgagggagacccaggacctaattgaacaaggggcactcctgcaagcccaccggaagctgatggacctggagtgctcccgggacgggctgatgtacgagcagtaccgcatggacagtgggaacacgcgtgacatgaccctcatccatggctactttggcagcacgcaggggctctctgatgagctggctaagcagctgtggatggtgctgcagaggtcactggtcactgtccgccgtgaccccaccttgctggtctcagttgtcaggatcattgaaagggaagagaaaattgacaggcgcatacttgaccggaaaaagcaaactggctttgttcctcctgggaggcccaagaattggaaggagaaaatgttcaccatcttggagaggactgtgaccaccagaattgagggcacacaggcagataccagagagtctgacaagatgtggcttgtccgccacctggaaattataaggaagtacgtcctggatgacctcattgtcgccaaaaacctgatggttcagtgctttcctccccactatgagatctttaagaacctcctgaacatgtaccaccaagccctgagcacgcggatgcaggacctcgcatcggaagacctggaagccaatgagatcgtgagcctcttgacgtgggtcttaaacacctacacaagatataaagatgaagcgcagctgtataaagaagagcacctgaggaatcggcagcaccctcactgctacgttcagtacatgatcgccatcatcaacaactgccagaccttcaaggaatccatagtcagtttaaaaagaaagtatttaaagaatgaagtggaagagggtgtgtctccgagccagcccagcatggacgggattttagacgccatcgcgaaggagggctgcagcggtttgctggaggaggtcttcctggacctggagcaacatctgaatgaattgatgacgaagaagtggctattagggtcaaacgctgtagacattatctgtgtcaccgtggaagactatttcaacgattttgccaaaattaaaaagccgtataagaagaggatgacggccgaggcgcaccggcgcgtggtggtggagtacctgcgggcggtcatgcagaagcgcatttccttccggagcccggaggagcgcaaggagggtgccgagaagatggttagggaggcagagcagctgcgcttcctgttccggaagctggcgtccggtttcggggaagacgtggacggatactgcgacaccatcgtggctgtggccgaagtgatcaagctgacagacccttctctgctctacctggaggtctccactctggtcagcaagtatccagacatcagggatgaccacatcggtgcgctgctggctgtgcgtggggacgccagccgtgacatgaagcagaccatcatggagaccctggagcagggcccagcacaggccagccccagctacgtgcccctcttcaaggacattgtggtgcccagcctgaacgtggccaagctgctcaagtagcctccgccggcctgccctgctcgcccctccacagcctcggtccctgcctttagaaacgcgggacagctgattgctctccttggccacacgtgctccttttagctgcacggcctgtctttaggtgccagtgtgatgcaccgggtgtgcgtcgagtgagcgtcccgaggccacgtgcggaggcccctcactgtgctgtcaaaggcctgtgggtgcagggctctgccgcacagcctctcttgggtgcttgtttgttgcagtggttgaaagtgtgtggggcacagaggacgtgcacctccctgccctcctcctccctgggccttcaccgcaccccatctgcttaagtgctcggaaccccgtcacctaattaaagtttctcggcttcctcag

SEQ ID NO: 10159 - DNA, 424 bp, Homo sapiens
  source 1..424: mol_type = unassigned DNA
cggcggcggcgtagccgtagaggattttctacgttggtatgccaaatttcataatcagaaaataaagagaaaggaaaggttgcaatgtaggtccagatgaaaaaggagaagagaggtgtctgaaagcatgtgggcatggagaatgaaaaattccaggagaagtgcacagagaacacccctagcatgaacagtgtgaggattccaccagctttttcaccatgaaggagacagaccgggaggccgttgcgacagcagtgcaaagggttgctgggatgctccagcgcccggaccagctggacaaggtggagcagtatcgcaggagagaagcgcggaagaaggcctccgtggaggccagattgaaggccgccatccagtcacagttggacggggtgcgcacaggcctcagccagctccacaacgccct

SEQ ID NO: 10160 - DNA, 2825 bp, Homo sapiens
  source 1..2825: mol_type = unassigned DNA
agtgcccgcgcgctgtccacttccggccgggaccccggaggcggaggcagcgaaggcggagggggcggcgggggcggcggcggcggcggcggcggcggcggcggcggcggcggcggcggcgtagccgtagaggtgcacagagaacacccctagcatgaacagtgtgaggattccaccagctttttcaccatgaaggagacagaccgggaggccgttgcgacagcagtgcaaagggttgctgggatgctccagcgcccggaccagctggacaaggtggagcagtatcgcaggagagaagcgcggaagaaggcctccgtggaggccagattgaaggccgccatccagtcacagttggacggggtgcgcacaggcctcagccagctccacaacgccctgaatgacgtcaaagacatccagcagtcgctggcagacgtcagcaaggactggaggcagagcatcaacaccattgagagcctcaaggacgtcaaagacgccgtggtgcagcacagccagctcgccgcagccgtggagaacctcaagaacatcttctcagtgcctgagattgtgagggagacccaggacctaattgaacaaggggcactcctgcaagcccaccggaagctgatggacctggagtgctcccgggacgggctgatgtacgagcagtaccgcatggacagtgggaacacgcgtgacatgaccctcatccatggctactttggcagcacgcaggggctctctgatgagctggctaagcagctgtggatggtgctgcagaggtcactggtcactgtccgccgtgaccccaccttgctggtctcagttgtcaggatcattgaaagggaagagaaaattgacaggcgcatacttgaccggaaaaagcaaactggctttgttcctcctgggaggcccaagaattggaaggagaaaatgttcaccatcttggagaggactgtgaccaccagaattgagggcacacaggcagataccagagagtctgacaagatgtggcttgtccgccacctggaaattataaggaagtacgtcctggatgacctcattgtcgccaaaaacctgatggttcagtgctttcctccccactatgagatctttaagaacctcctgaacatgtaccaccaagccctgagcacgcggatgcaggacctcgcatcggaagacctggaagccaatgagatcgtgagcctcttgacgtgggtcttaaacacctacacaagtactgagatgatgaggaacgtggagctggccccggaagtggatgtcggcaccctggagccattgctttctccacacgtggtctctgagctgcttgacacgtacatgtccacgctcacttcaaacatcatcgcctggctgcggaaagcgctggagacagacaagaaagactgggtcaaagagacagagccagaagccgaccaggacgggtactaccagaccacactccctgccattgtcttccagatgtttgaacagaatcttcaagttgctgctcagataagtgaagatttgaaaacaaaggtactagttttatgtcttcagcagatgaattctttcctaagcagatataaagatgaagcgcagctgtataaagaagagcacctgaggaatcggcagcaccctcactgctacgttcagtacatgatcgccatcatcaacaactgccagaccttcaaggaatccatagtcagtttaaaaagaaagtatttaaagaatgaagtggaagagggtgtgtctccgagccagcccagcatggacgggattttagacgccatcgcgaaggagggctgcagcggtttgctggaggaggtcttcctggacctggagcaacatctgaatgaattgatgacgaagaagtggctattagggtcaaacgctgtagacattatctgtgtcaccgtggaagactatttcaacgattttgccaaaattaaaaagccgtataagaagaggatgacggccgaggcgcaccggcgcgtggtggtggagtacctgcgggcggtcatgcagaagcgcatttccttccggagcccggaggagcgcaaggagggtgccgagaagatggttagggaggcagagcagctgcgcttcctgttccggaagctggcgtccggtttcggggaagacgtggacggatactgcgacaccatcgtggctgtggccgaagtgatcaagctgacagacccttctctgctctacctggaggtctccactctggtcagcaagtatccagacatcagggatgaccacatcggtgcgctgctggctgtgcgtggggacgccagccgtgacatgaagcagaccatcatggagaccctggagcagggcccagcacaggccagccccagctacgtgcccctcttcaaggacattgtggtgcccagcctgaacgtggccaagctgctcaagtagcctccgccggcctgccctgctcgcccctccacagcctcggtccctgcctttagaaacgcgggacagctgattgctctccttggccacacgtgctccttttagctgcacggcctgtctttaggtgccagtgtgatgcaccgggtgtgcgtcgagtgagcgtcccgaggccacgtgcggaggcccctcactgtgctgtcaaaggcctgtgggtgcagggctctgccgcacagcctctcttgggtgcttgtttgttgcagtggttgaaagtgtgtggggcacagaggacgtgcacctccctgccctcctcctccctgggccttcaccgcaccccatctgcttaagtgctcggaaccccgtcacctaattaaagtttctcggcttcctcagagaaatgaaaa

SEQ ID NO: 10161 - DNA, 2247 bp, Homo sapiens
  source 1..2247: mol_type = unassigned DNA
gagcctcggtgggaagaaggggcttctgggtggggagtgggagagagacttccttggggagaggaattcagctgcacgctggagtcagctggagttgcccaggccctgtgagcaagtggcaggcgtgcccagctgcattggggagagggctgttctcaaggccaaggtcatttttggagggagaactggacgcctgatcaaatctggcccacaatggactcagcagccaaggatgagatgcagccggcgttgtcccctggctcttccttcccaggacctgagtggccagagcaggagcgggcagagcagctggcccggggtgcagcgctcaagtgggcctcaggcatcttctaccggccggagcagctggccaggctaggccagtaccgcagccgcgaggtgcagcgtacctgctccctggaatcgcgcctcaagtcagtgatgcagtcatacctggaaggcgtgcagactgtgccggctgcagtgtcccacacacagactctgattgatggccaacagttcttggaggcatatgtgagccttcgggagctggagcagctgcgagaggatacgtgggcacccctggggggcctggagttgccagtcttccaggggctggaccttctgttcgaggcactgggccaggctgtggaagcagctgcaggggccgcagggaagctggcacgggaggacccagccctgttggtggctgctgtgcgtgtggcggaggtggagactggacgaacaacccccctgggccaggtcccccgggactggcgtcagcgctgtctgagggcactacaggagggcctggagcaggcccactttgggtcacctctgctgcctgcaccaggggccctaccagggtggctggaggctctgcgagtggccctgccagtcgagttggccacagctgaggcactagtagcgccttgctgcccgccacagtacaacgtggtccagctatgggcccacacgctgcatagtggtttgcgccgcagcctgcagaacctccttgcagggcctgagctagaagctgcggatgccttcgccttgctgcactgggcactgcatgtgtacctggggcaggaaatgatggggagcctggagttggggcctgaggctgatgtgtcccagctggagccccttctgaccttggagaacattgagcagctggaggcaacatttgtggccaacatccagatcctggaagagaacattcgtgtggccagcctggtcagtgagtcactgcaacagcgagtgcatggcatggcactgtcagaactgggcacattcttgaggagcttcagtgatgctctgatccgattctcccgagaccacttcagggggaaatcaatggcccctcattacgtgccctacctactggccgccctcaaccacaagtcagcactcagctcctcagtgtctgtcctgcagctggacggggcgccttcaggggccttggctccagtggaagctgcgctggacgagttgcagaggaggatctaccgcttggtgttggaggcgctgcaggcggagctccagcccctgttcgcggatctgccctcgcgccaatggctgtcgagccctgagctcctgcaaagtgtgtgtgaacggacggggcgcttctgccgggacttctggcgcgtgcggaaccccacggttcagctgctgctggctgaggccgagcgtgccgtggtgctccagtacctgagcgcgctgatgcaaggccgcctggtgtgccgcggagccgacgagaggacccaggcggccgagcgcctgcggcacgatgctgcccagcttcagcagcttttcctcagtttggtgagagcttcttgggcgggcagacgggcgagagtctcagtggctgggtgggagagagggctggcgcgagaccctaccccgacgtgctcagggcctggaggagaacgcgcactgcgcgccggtgctgctcgccctgagggagctgctaaacctccgcgaccccgcgctgctgggcctggaggtggctggcctgcggcaacaatttcccgacgtgagcgaggaccacgtctccgccctcttgggcctgcgcggggacttgtcccgggagcagcacctggccgcgctcagctccctgcaggctgcgctgccgccgtcgccccgcgcgagccgccgcgtcctcttcagcctagtgcccgcgcccgcgctccggcctcctgcctgccctcggggtcctgcgcccgagccctgctgctcgcagaataa

SEQ ID NO: 10162 - DNA, 2497 bp, Homo sapiens
  source 1..2497: mol_type = unassigned DNA
ctttctgttgatggccttggggagggaggagcctcggtgggaagaaggggcttctgggtggggagtgggagagagacttccttggggagaggaattcagctgcacgctggagtcagctggagttgcccaggccctgtgagcaagtggcaggcgtgcccagctgcattggggagagggctgttctcaaggccaaggtcatttttggagggagaactggacgcctgatcaaatctggcccacaatggactcagcagccaaggatgagatgcagccggcgttgtcccctggacctgagtggccagagcaggagcgggcagagcagctggcccggggtgcagcgctcaagtgggcctcaggcatcttctaccggccggagcagctggccaggctaggccagtaccgcagccgcgaggtgcagcgtacctgctccctggaatcgcgcctcaagtcagtgatgcagtcatacctggaaggcgtgcagactggtgtgtggcagctggcccaggccattgaggtggtgcagggaacccgggaggccctgagccaggcccgtgggttgctccagggcatgtcccaggccttacagactctagagcccctacgggagcgggttgcccagcacaagcaactgcaggccctgtctcacctgctgcctcggctgcgggcagtgccggctgcagtgtcccacacacagactctgattgatggccaacagttcttggaggcatatgtgagccttcgggagctggagcagctgcgagaggatacgtgggcacccctggggggcctggagttgccagtcttccaggggctggaccttctgttcgaggcactgggccaggctgtggaagcagctgcaggggccgcagggaagctggcacgggaggacccagccctgttggtggctgctgtgcgtgtggcggaggtggagactggacgaacaacccccctgggccaggtcccccgggactggcgtcagcgctgtctgagggcactacaggagggcctggagcaggcccactttgggtcacctctgctgcctgcaccaggggccctaccagggtggctggaggctctgcgagtggccctgccagtcgagttggccacagctgaggcactagtagcgccttgctgcccgccacagtacaacgtggtccagctatgggcccacacgctgcatagtggtttgcgccgcagcctgcagaacctccttgcagggcctgagctagaagctgcggatgccttcgccttgctgcactgggcactgcatgtgtacctggggcaggaaatgatggggagcctggagttggggcctgaggctgatgtgtcccagctggagccccttctgaccttggagaacattgagcagctggaggcaacatttgtggccaacatccaggcaagtgtgtctcagtggctgcagaatgcactggatggggaggtagctgagtggggccgggagcatgggcccaacacagacccgtctggctcctattactcaccaatgccagccattgtgctgcagatcctggaagagaacattcgtgtggccagcctggtcagtgagtcactgcaacagcgagtgcatggcatggcactgtcagaactgggcacattcttgaggagcttcagtgatgctctgatccgattctcccgagaccacttcagggggaaatcaatggcccctcattacgtgccctacctactggccgccctcaaccacaagtcagcactcagctcctcagtgtctgtcctgcagctggacggggcgccttcaggggccttggctccagtggaagctgcgctggacgagttgcagaggaggatctaccgcttggtgttggaggcgctgcaggcggagctccagcccctgttcgcggatctgccctcgcgccaatggctgtcgagccctgagctcctgcaaagtgtgtgtgaacggacggggcgcttctgccgggacttctggcgcgtgcggaaccccacggttcagctgctgctggctgaggccgagcgtgccgtggtgctccagtacctgagcgcgctgatgcaaggccgcctggtgtgccgcggagccgacgagaggacccaggcggccgagcgcctgcggcacgatgctgcccagcttcagcagcttttcctcagtttgggcctggaggagaacgcgcactgcgcgccggtgctgctcgccctgagggagctgctaaacctccgcgaccccgcgctgctgggcctggaggtggctggcctgcggcaacaatttcccgacgtgagcgaggaccacgtctccgccctcttgggcctgcgcggggacttgtcccgggagcagcacctggccgcgctcagctccctgcaggctgcgctgccgccgtcgccccgcgcgagccgccgcgtcctcttcagcctagtgcccgcgcccgcgctcgcgccggcctcctgcctgccctcggggtcctgcgcccgagccctgctgctcgcagaataaaccacggctgccgga

SEQ ID NO: 10163 - DNA, 2278 bp, Homo sapiens
  source 1..2278: mol_type = unassigned DNA
ctttctgttgatggccttggggagggaggagcctcggtgggaagaaggggcttctgggtggggagtgggagagagacttccttggggagaggaattcagctgcacgctggagtcagctggagttgcccaggccctgtgagcaagtggcaggcgtgcccagctgcattggggagagggctgttctcaaggccaaggtcatttttggagggagaactggacgcctgatcaaatctggcccacaatggactcagcagccaaggatgagatgcagccggcgttgtcccctggacctgagtggccagagcaggagcgggcagagcagctggcccggggtgcagcgctcaagtgggcctcaggcatcttctaccggccggagcagctggccaggctaggccagtaccgcagccgcgaggtgcagcgtacctgctccctggaatcgcgcctcaagtcagtgatgcagtcatacctggaaggcgtgcagactgtgccggctgcagtgtcccacacacagactctgattgatggccaacagttcttggaggcatatgtgagccttcgggagctggagcagctgcgagaggatacgtgggcacccctggggggcctggagttgccagtcttccaggggctggaccttctgttcgaggcactgggccaggctgtggaagcagctgcaggggccgcagggaagctggcacgggaggacccagccctgttggtggctgctgtgcgtgtggcggaggtggagactggacgaacaacccccctgggccaggtcccccgggactggcgtcagcgctgtctgagggcactacaggagggcctggagcaggcccactttgggtcacctctgctgcctgcaccaggggccctaccagggtggctggaggctctgcgagtggccctgccagtcgagttggccacagctgaggcactagtagcgccttgctgcccgccacagtacaacgtggtccagctatgggcccacacgctgcatagtggtttgcgccgcagcctgcagaacctccttgcagggcctgagctagaagctgcggatgccttcgccttgctgcactgggcactgcatgtgtacctggggcaggaaatgatggggagcctggagttggggcctgaggctgatgtgtcccagctggagccccttctgaccttggagaacattgagcagctggaggcaacatttgtggccaacatccagatcctggaagagaacattcgtgtggccagcctggtcagtgagtcactgcaacagcgagtgcatggcatggcactgtcagaactgggcacattcttgaggagcttcagtgatgctctgatccgattctcccgagaccacttcagggggaaatcaatggcccctcattacgtgccctacctactggccgccctcaaccacaagtcagcactcagctcctcagtgtctgtcctgcagctggacggggcgccttcaggggccttggctccagtggaagctgcgctggacgagttgcagaggaggatctaccgcttggtgttggaggcgctgcaggcggagctccagcccctgttcgcggatctgccctcgcgccaatggctgtcgagccctgagctcctgcaaagtgtgtgtgaacggacggggcgcttctgccgggacttctggcgcgtgcggaaccccacggttcagctgctgctggctgaggccgagcgtgccgtggtgctccagtacctgagcgcgctgatgcaaggccgcctggtgtgccgcggagccgacgagaggacccaggcggccgagcgcctgcggcacgatgctgcccagcttcagcagcttttcctcagtttggtgagagcttcttgggcgggcagacgggcgagagtctcagtggctgggtgggagagagggctggcgcgagaccctaccccgacgtgctcagggcctggaggagaacgcgcactgcgcgccggtgctgctcgccctgagggagctgctaaacctccgcgaccccgcgctgctgggcctggaggtggctggcctgcggcaacaatttcccgacgtgagcgaggaccacgtctccgccctcttgggcctgcgcggggacttgtcccgggagcagcacctggccgcgctcagctccctgcaggctgcgctgccgccgtcgccccgcgcgagccgccgcgtcctcttcagcctagtgcccgcgcccgcgctcgcgccggcctcctgcctgccctcggggtcctgcgcccgagccctgctgctcgcagaataaaccacggctgccgg

SEQ ID NO: 10164 - DNA, 4185 bp, Homo sapiens
  source 1..4185: mol_type = unassigned DNA
ggagcctagcggctctccccgcgtccaagatggcggcagaagcagctggtgggaaatacagaagcacagtcagcaaaagcaaagacccctcggggctgctcatctctgtgatcaggactctgtctactagtgacgatgtcgaagacagggaaaatgaaaagggtcgccttgaagaagcctacgagaaatgtgaccgtgacctggatgaattgattgtacagcactacacagaattgacgacagccattcgcacataccagagcatcacagagcgcatcactaactcccgaaataaaataaagcaggtaaaagagaacctgctttcatgcaagatgctgctgcactgcaaacgggatgagcttcggaaactgtggattgaaggaattgagcataagcatgtcctgaacttgttggatgaaattgagaatatcaagcaagtgcctcaaaagctggaacagtgcatggccagcaagcactatctcagtgccactgacatgttggtgtcagcagttgagtctttggagggccccctgctccaggtggaaggactgagtgaccttcgactagagcttcacagcaagaagatgaaccttcacttggttctcatagatgaactacaccggcacctgtacatcaaatcgactagccgagttgtgcagcgtaacaaggaaaaagggaaaatcagctccctcgtgaaagatgcttctgttcctctgattgatgttacaaacctccctactcctcgaaaattccttgatacctctcactattctactgctggaagctcaagtgtgagggagataaatctgcaggacatcaaggaagatttagaattggatccagaggaaaacagcaccctgtttatgggtatcctcattaagggcttggcgaaactgaagaagatcccagaaacagttaaggcaatcatagagcgcttggagcaggagttgaagcaaattgtgaagaggtctacaacccaggtggcagacagtggctatcagcggggggagaacgttactgtggagaaccaaccaaggttgcttctagaactgctggagttactgtttgacaagtttaatgctgtagccgctgcacactctgtggtcctgggatacctgcaggacactgtagtgactccactgactcagcaggaagatatcaaactgtatgatatggcagatgtatgggtgaagatccaagatgttctacagatgctattaactgagtacttggatatgaaaaatactcgtacggcctctgaaccatcagctcaactaagctatgccagcactggacgagagtttgcagccttttttgccaagaagaaacctcaaaggccaaaaaattctcttttcaagttcgaatcgtcctcccatgccatcagtatgagcgcctatctgcgagaacagagaagggagctctatagtcggagtggagaactgcaagggggtcctgatgacaacttaattgaaggtggaggaacaaaatttgtctgcaaacctggagccagaaacattaccgtcatattccacccattactaagatttattcaggagattgagcatgctctgggtcttggcccagccaaacagtgtcctcttcgagagtttctcaccgtgtacatcaaaaacatctttctcaatcaagtcttggctgagatcaacaaggagattgaaggagtcactaaaacatctgaccctttgaagattctggccaacgcagacaccatgaaggtgctgggagtgcagcggcctctcctacagagcacaatcattgtggagaagacagttcaagacctcctgaacctgatgcatgacttgagtgcatattcagatcaattcctcaacatggtgtgcgtgaagctccaggagtacaaggacacctgcactgcagcttacaggggtattgtccagtcagaagaaaaacttgtcatcagtgcatcctgggcaaaagatgatgatatcagcagactcttgaaatctctaccaaactggatgaatatggctcaacccaaacagctgaggccaaaaagagaggaggaagaagatttcataagggcagcttttggcaaggagtctgaagttcttattgggaacctgggtgataaattaatccctccacaagacatccttcgtgacgtcagtgacctcaaagccttggccaacatgcatgaaagcctggaatggttggcaagtcgaacaaagtcagctttctccaatctttctacatcccagatgctttctcctgctcaagacagccacacgaacacggatctccccccagtgtcagagcagatcatgcagactctcagtgaacttgccaaatcgttccaggatatggctgaccgctgcttgcttgtcttacatctggaagtgagggttcactgtttccactatcttatccctcttgcaaaggaggggaactatgccattgtggctaatgtggaaagtatggattatgaccccctggtggtcaagctcaacaaagatatcagcgccattgaagaggccatgagcgccagccttcagcagcacaagttccagtatatcttcgaaggcctgggccacctgatctcctgcatcctcattaatggtgcccagtacttcaggcgcatcagtgagtctggcatcaagaaaatgtgtaggaacatttttgttcttcagcagaatttgaccaacatcaccatgtcgcgggaggcagacctggactttgcaaggcagtactacgagatgctttacaacacagctgacgagctcctgaacctggtggtggaccagggtgtgaagtacacggagctggagtacatccacgctctgaccctgctgcaccgcagccagactggggtgggggaactgaccacccagaacacgaggctgcagaggctcaaagagatcatctgcgagcaggctgccatcaagcaagccaccaaggacaagaagataactaccgtttagcagggcgtactgcggttggtgacgggggtcccctcagtcacactcacttttttccttggtatgttattgagtatattctgagcttagttttctctacagtgatactttagtggagaggaggtgtaaggattctttctctctggttttggcttttcatataaatgctaaaggaaggcgacagtacagagtgttttggttgaacaactactttaatgcagtcaaatctaacgggactagggtgggatagggaggaaggtggtatcaaattgttggactctgaaaaacaagtggatggattactaatatttgatttattactcaatatatatataattccagccttggaaagtaggaaagtaggctgctacctaacttttagtcccttccaaaaccatttagtagggttctattacataaacagtagggtttttcctctcctgaccttatccgtttacagttcaatgaaataagtgtatgtgcattgctgtctgtctctattgccaaaatcaaataaatggcttctcagctgctgtttacaacaaacttccctaaccaaaacagaacctctaatttagggctaggaatagaagtcttttgatcccagtccctgggacagttttgtatgctgtatcttgtacacaggttgtaggttggtttattgccattttgttttatttctgctgtataaaaaccaagagccagacaattagacaactatggaggaatgaaaggcaattcaaacatctgcttgattcccgccccgccacccctaatttctgagagaataatggttagagaacattgcatctcacttgaaacatcctttgggggtaaatgattcttaggtgctcacttggtctgagctcagctgaatgcagggaagatgggacagagtgacatttctcctctgtgcggcctccagctgagcctgtctctgaattgttccctcccccgcaatgtgggcacttaccatgttcctggcacactggacctcaccatgtcccccggtcaccagtcctcttgctgcccatggttcataggtcatagaaggcagcaatgcactgactgggccacatcttgaaaactcgtggaaagggaaaggggaggagatgggactttgaccacacacagtgatgcctcacaccctgaaggtgggggattttgtacctgtttgtacaactttggtcttgatgggaaaaatggagaattaaaaagtgttttgagaagctta

SEQ ID NO: 10165 - DNA, 1604 bp, Homo sapiens
  source 1..1604: mol_type = unassigned DNA
ggagcctagcggctctccccgcgtccaagatggcggcagaagcagctggtgggaaatacagaagcacagtcagcaaaagcaaagacccctcggggctgctcatctctgtgatcaggactctgtctactagtgacgatgtcgaagacagggaaaatgaaaagggtcgccttgaagaagcctacgagaaatgtgaccgtgacctggatgaattgattgtacagcactacacagaattgacgacagccattcgcacataccagagcatcacagagcgcatcactaactcccgaaataaaataaagcaggtaaaagagaacctgctttcatgcaagatgctgctgcactgcaaacgggatgagcttcggaaactgtggattgaaggaattgagcataagcatgtcctgaacttgttggatgaaattgagaatatcaagcaagtgcctcaaaagctggaacagtgcatggccagcaagcactatctcagtgccactgacatgttggtgtcagcagttgagtctttggagggccccctgctccaggtggaaggactgagtgaccttcgactagagcttcacagcaagaagatgaaccttcacttggttctcatagatgaactacaccggcacctgtacatcaaatcgactagccgagttgtgcagcgtaacaaggaaaaagggaaaatcagctccctcgtgaaagatgcttctgttcctctgattgatgttacaaacctccctactcctcgaaaattccttgatacctctcactattctactgctggaagctcaagtgtgagggagataaatctgcaggacatcaaggaagatttagaattggatccagaggaaaacagcaccctgtttatgggtatcctcattaagggcttggcgaaactgaagaagatcccagaaacagttaaggcaatcatagagcgcttggagcaggagttgaagcaaattgtgaagaggtctacaacccaggtggcagacagtggctatcagcggggggagaacgttactgtggagaaccaaccaaggttgcttctagaactgctggagttactgtttgacaagtttaatgctgtagccgctgcacactctgtggtcctgggatacctgcaggacactgtagtgactccactgactcagcaggaagatatcaaactgtatgatatggcagatgtatgggtgaagatccaagatgttctacagatgctattaactgagtacttggatatgaaaaatactcgtacggcctctgaaccatcagctcaactaagctatgccagcactggacgagagtttgcagccttttttgccaagaagaaacctcaaaggccaaaaaattctcttttcaagttcgaatcgtcctcccatgccatcagtatgagcgcctatctgcgagaacagagaagggagctctatagtcggagtggagaactgcaagggtagcggcgaagaaatccaccagaaagacaatcaaagtaacattaaaaagctcaaattttacaaaagttaagttcctgccaacattttcaatttatcatacaattagaaatgtgactcagtctaacaacacccaagaggataaaaggattaaaaaaa

SEQ ID NO: 10166 - DNA, 3020 bp, Homo sapiens
  source 1..3020: mol_type = unassigned DNA
ggggttagctatagagagaggagccccgcctcagtcttttctttaggggcagcaccttctattacagtctcgggaccccaaagcacgctatttgggtttggtagagaaaaccaggtgtaaaggactctgtctactagtgacgatgtcgaagacagggaaaatgaaaagggtcgccttgaagaagcctacgagaaatgtgaccgtgacctggatgaattgattgtacagcactacacagaattgacgacagccattcgcacataccagagcatcacagagcgcatcactaactcccgaaataaaataaagcaggtaaaagagaacctgctttcatgcaagatgctgctgcactgcaaacgggatgagcttcggaaactgtggattgaaggaattgagcataagcatgtcctgaacttgttggatgaaattgagaatatcaagcaagtgcctcaaaagctggaacagtgcatggccagcaagcactatctcagtgccactgacatgttggtgtcagcagttgagtctttggagggccccctgctccaggtggaaggactgagtgaccttcgactagagcttcacagcaagaagatgaaccttcacttggttctcatagatgaactacaccggcacctgtacatcaaatcgactagccgagttgtgcagcgtaacaaggaaaaagggaaaatcagctccctcgtgaaagatgcttctgttcctctgattgatgttacaaacctccctactcctcgaaaattccttgatacctctcactattctactgctggaagctcaagtgtgagggagataaatctgcaggacatcaaggaagatttagaattggatccagaggaaaacagcaccctgtttatgggtatcctcattaagggcttggcgaaactgaagaagatcccagaaacagttaaggcaatcatagagcgcttggagcaggagttgaagcaaattgtgaagaggtctacaacccaggtggcagacagtggctatcagcggggggagaacgttactgtggagaaccaaccaaggttgcttctagaactgctggagttactgtttgacaagtttaatgctgtagccgctgcacactctgtggtcctgggatacctgcaggacactgtagtgactccactgactcagcaggaagatatcaaactgtatgatatggcagatgtatgggtgaagatccaagatgttctacagatgctattaactgagtacttggatatgaaaaatactcgtacggcctctgaaccatcagctcaactaagctatgccagcactggacgagagtttgcagccttttttgccaagaagaaacctcaaaggccaaaaaattctcttttcaagttcgaatcgtcctcccatgccatcagtatgagcgcctatctgcgagaacagagaagggagctctatagtcggagtggagaactgcaagggggtcctgatgacaacttaattgaaggtggaggaacaaaatttgtctgcaaacctggagccagaaacattaccgtcatattccacccattactaagatttattcaggagattgagcatgctctgggtcttggcccagccaaacagtgtcctcttcgagagtttctcaccgtgtacatcaaaaacatctttctcaatcaagtcttggctgagatcaacaaggagattgaaggagtcactaaaacatctgaccctttgaagattctggccaacgcagacaccatgaaggtgctgggagtgcagcggcctctcctacagagcacaatcattgtggagaagacagttcaagacctcctgaacctgatgcatgacttgagtgcatattcagatcaattcctcaacatggtgtgcgtgaagctccaggagtacaaggacacctgcactgcagcttacaggggtattgtccagtcagaagaaaaacttgtcatcagtgcatcctgggcaaaagatgatgatatcagcagactcttgaaatctctaccaaactggatgaatatggctcaacccaaacagctgaggccaaaaagagaggaggaagaagatttcataagggcagcttttggcaaggagtctgaagttcttattgggaacctgggtgataaattaatccctccacaagacatccttcgtgacgtcagtgacctcaaagccttggccaacatgcatgaaagcctggaatggttggcaagtcgaacaaagtcagctttctccaatctttctacatcccagatgctttctcctgctcaagacagccacacgaacacggatctccccccagtgtcagagcagatcatgcagactctcagtgaacttgccaaatcgttccaggatatggctgaccgctgcttgcttgtcttacatctggaagtgagggttcactgtttccactatcttatccctcttgcaaaggaggggaactatgccattgtggctaatgtggaaagtatggattatgaccccctggtggtcaagctcaacaaagatatcagcgccattgaagaggccatgagcgccagccttcagcagcacaagttccagtatatcttcgaaggcctgggccacctgatctcctgcatcctcattaatggtgcccagtacttcaggcgcatcagtgagtctggcatcaagaaaatgtgtaggaacatttttgttcttcagcagaatttgaccaacatcaccatgtcgcgggaggcagacctggactttgcaaggcagtactacgagatgctttacaacacagctgacgagctcctgaacctggtggtggaccagggtgtgaagtacacggagctggagtacatccacgctctgaccctgctgcaccgcagccagactggggtgggggaactgaccacccagaacacgaggctgcagaggctcaaagagatcatctgcgagcaggctgccatcaagcaagccaccaaggacaagaagataactaccgtttagcagggcgtactgcggttggtgacgggggtcccctcagtcacactcacttttttccttgg

SEQ ID NO: 10167 - DNA, 1333 bp, Homo sapiens
  source 1..1333: mol_type = unassigned DNA
aaagtaacatgctgctttgcagttagctttttgcttagtttctagtatcagttttcatggaattttttcattgtctttacccactgatacatcagtgtactcttctgcttggtaccaaaaacggggatacaaaacgtggagaaaccctgggactgagccttgggttcctgccctctgtgccactaactccccgtgtatcccctcctcctctgcacctccagctcttcctctgtaaacgacaacctggcagcttttggcaaggagtctgaagttcttattgggaacctgggtgataaattaatccctccacaagacatccttcgtgacgtcagtgacctcaaagccttggccaacatgcatgaaagcctggaatggttggcaagtcgaacaaagtcagctttctccaatctttctacatcccagatgctttctcctgctcaagacagccacacgaacacggatctccccccagtgtcagagcagatcatgcagactctcagtgaacttgccaaatcgttccaggatatggctgaccgctgcttgcttgtcttacatctggaagtgagggttcactgtttccactatcttatccctcttgcaaaggaggggaactatgccattgtggctaatgtggaaagtatggattatgaccccctggtggtcaagctcaacaaagatatcagcgccattgaagaggccatgagcgccagccttcagcagcacaagttccagtatatcttcgaaggcctgggccacctgatctcctgcatcctcattaatggtgcccagtacttcaggcgcatcagtgagtctggcatcaagaaaatgtgtaggaacatttttgttcttcagcagaatttgaccaacatcaccatgtcgcgggaggcagacctggactttgcaaggcagtactacgagatgctttacaacacagctgacgagctcctgaacctggtggtggaccagggtgtgaagtacacggagctggagtacatccacgctctgaccctgctgcaccgcagccagactggggtgggggaactgaccacccagaacacgaggctgcagaggctcaaagagatcatctgcgagcaggctgccatcaagcaagccaccaaggacaagaagataactaccgtttagcagggcgtactgcggttggtgacgggggtcccctcagtcacactcacttttttccttggtatgttattgagtatattctgagcttagttttctctacagtgatactttagtggagaggaggtgtaaggattctttctctctggttttggcttttcatataaatgctaaaggaaggcgacagtacagagtg

SEQ ID NO: 10168 - DNA, 3038 bp, Homo sapiens
  source 1..3038: mol_type = unassigned DNA
tttatagagggcatctgtcggttgcatttgatttatttaaaacgttttcttacatggccaatttagtaacagcaagcaaaaccaaaatgagcaaaggagaggatcccaataatcccagatctataaagcggatttctcaagggggtagagataaccacctagctattgctaaatgtgatctcactcagttgaaaaagaaacaatcagaagtgagcaatgggagccgtgaaaccatctcaatgaagacttgttgccaacatggagatagaggatattggtctacagggtactattggagagggggtcctgatgacaacttaattgaaggtggaggaacaaaatttgtctgcaaacctggagccagaaacattaccgtcatattccacccattactaagatttattcaggagattgagcatgctctgggtcttggcccagccaaacagtgtcctcttcgagagtttctcaccgtgtacatcaaaaacatctttctcaatcaagtcttggctgagatcaacaaggagattgaaggagtcactaaaacatctgaccctttgaagattctggccaacgcagacaccatgaaggtgctgggagtgcagcggcctctcctacagagcacaatcattgtggagaagacagttcaagacctcctgaacctgatgcatgacttgagtgcatattcagatcaattcctcaacatggtgtgcgtgaagctccaggagtacaaggacacctgcactgcagcttacaggggtattgtccagtcagaagaaaaacttgtcatcagtgcatcctgggcaaaagatgatgatatcagcagactcttgaaatctctaccaaactggatgaatatggctcaacccaaacagctgaggccaaaaagagaggaggaagaagatttcataagggcagcttttggcaaggagtctgaagttcttattgggaacctgggtgataaattaatccctccacaagacatccttcgtgacgtcagtgacctcaaagccttggccaacatgcatgaaagcctggaatggttggcaagtcgaacaaagtcagctttctccaatctttctacatcccagatgctttctcctgctcaagacagccacacgaacacggatctccccccagtgtcagagcagatcatgcagactctcagtgaacttgccaaatcgttccaggatatggctgaccgctgcttgcttgtcttacatctggaagtgagggttcactgtttccactatcttatccctcttgcaaaggaggggaactatgccattgtggctaatgtggaaagtatggattatgaccccctggtggtcaagctcaacaaagatatcagcgccattgaagaggccatgagcgccagccttcagcagcacaagttccagtatatcttcgaaggcctgggccacctgatctcctgcatcctcattaatggtgcccagtacttcaggcgcatcagtgagtctggcatcaagaaaatgtgtaggaacatttttgttcttcagcagaatttgaccaacatcaccatgtcgcgggaggcagacctggactttgcaaggcagtactacgagatgctttacaacacagctgacgagctcctgaacctggtggtggaccagggtgtgaagtacacggagctggagtacatccacgctctgaccctgctgcaccgcagccagactggggtgggggaactgaccacccagaacacgaggctgcagaggctcaaagagatcatctgcgagcaggctgccatcaagcaagccaccaaggacaagaagataactaccgtttagcagggcgtactgcggttggtgacgggggtcccctcagtcacactcacttttttccttggtatgttattgagtatattctgagcttagttttctctacagtgatactttagtggagaggaggtgtaaggattctttctctctggttttggcttttcatataaatgctaaaggaaggcgacagtacagagtgttttggttgaacaactactttaatgcagtcaaatctaacgggactagggtgggatagggaggaaggtggtatcaaattgttggactctgaaaaacaagtggatggattactaatatttgatttattactcaatatatatataattccagccttggaaagtaggaaagtaggctgctacctaacttttagtcccttccaaaaccatttagtagggttctattacataaacagtagggtttttcctctcctgaccttatccgtttacagttcaatgaaataagtgtatgtgcattgctgtctgtctctattgccaaaatcaaataaatggcttctcagctgctgtttacaacaaacttccctaaccaaaacagaacctctaatttagggctaggaatagaagtcttttgatcccagtccctgggacagttttgtatgctgtatcttgtacacaggttgtaggttggtttattgccattttgttttatttctgctgtataaaaaccaagagccagacaattagacaactatggaggaatgaaaggcaattcaaacatctgcttgattcccgccccgccacccctaatttctgagagaataatggttagagaacattgcatctcacttgaaacatcctttgggggtaaatgattcttaggtgctcacttggtctgagctcagctgaatgcagggaagatgggacagagtgacatttctcctctgtgcggcctccagctgagcctgtctctgaattgttccctcccccgcaatgtgggcacttaccatgttcctggcacactggacctcaccatgtcccccggtcaccagtcctcttgctgcccatggttcataggtcatagaaggcagcaatgcactgactgggccacatcttgaaaactcgtggaaagggaaaggggaggagatgggactttgaccacacacagtgatgcctcacaccctgaaggtgggggattttgtacctgtttgtacaactttggtcttgatgggaaaaatggagaattaaaaagtgttttgagaagctt

SEQ ID NO: 10169 - DNA, 2263 bp, Homo sapiens
  source 1..2263: mol_type = unassigned DNA
ctagcggctctccccgcgtccaagatggcggcagaagcagctggagttactgtttgacaagtttaatgctgtagccgctgcacactctgtggtcctgggatacctgcaggacactgtagtgactccactgactcagcaggaagatatcaaactgtatgatatggcagatgtatgggtgaagatccaagatgttctacagatgctattaactgagtacttggatatgaaaaatactcgtacggcctctgaaccatcagctcaactaagctatgccagcactggacgagagtttgcagccttttttgccaagaagaaacctcaaaggccaaaaaattctcttttcaagttcgaatcgtcctcccatgccatcagtatgagcgcctatctgcgagaacagagaagggagctctatagtcggagtggagaactgcaagggggtcctgatgacaacttaattgaaggtggaggaacaaaatttgtctgcaaacctggagccagaaacattaccgtcatattccacccattactaagatttattcaggagattgagcatgctctgggtcttggcccagccaaacagtgtcctcttcgagagtttctcaccgtgtacatcaaaaacatctttctcaatcaagtcttggctgagatcaacaaggagattgaaggagtcactaaaacatctgaccctttgaagattctggccaacgcagacaccatgaaggtgctgggagtgcagcggcctctcctacagagcacaatcattgtggagaagacagttcaagacctcctgaacctgatgcatgacttgagtgcatattcagatcaattcctcaacatggtgtgcgtgaagctccaggagtacaaggacacctgcactgcagcttacaggggtattgtccagtcagaagaaaaacttgtcatcagtgcatcctgggcaaaagatgatgatatcagcagactcttgaaatctctaccaaactggatgaatatggctcaacccaaacagctgaggccaaaaagagaggaggaagaagatttcataagggcagcttttggcaaggagtctgaagttcttattgggaacctgggtgataaattaatccctccacaagacatccttcgtgacgtcagtgacctcaaagccttggccaacatgcatgaaagcctggaatggttggcaagtcgaacaaagtcagctttctccaatctttctacatcccagatgctttctcctgctcaagacagccacacgaacacggatctccccccagtgtcagagcagatcatgcagactctcagtgaacttgccaaatcgttccaggatatggctgaccgctgcttgcttgtcttacatctggaagtgagggttcactgtttccactatcttatccctcttgcaaaggaggggaactatgccattgtggctaatgtggaaagtatggattatgaccccctggtggtcaagctcaacaaagatatcagcgccattgaagaggccatgagcgccagccttcagcagcacaagttccagtatatcttcgaaggcctgggccacctgatctcctgcatcctcattaatggtgcccagtacttcaggcgcatcagtgagtctggcatcaagaaaatgtgtaggaacatttttgttcttcagcagaatttgaccaacatcaccatgtcgcgggaggcagacctggactttgcaaggcagtactacgagatgctttacaacacagctgacgagctcctgaacctggtggtggaccagggtgtgaagtacacggagctggagtacatccacgctctgaccctgctgcaccgcagccagactggggtgggggaactgaccacccagaacacgaggctgcagaggctcaaagagatcatctgcgagcaggctgccatcaagcaagccaccaaggacaagaagataactaccgtttagcagggcgtactgcggttggtgacgggggtcccctcagtcacactcacttttttccttggtatgttattgagtatattctgagcttagttttctctacagtgatactttagtggagaggaggtgtaaggattctttctctctggttttggcttttcatataaatgctaaaggaaggcgacagtacagagtgttttggttgaacaactactttaatgcagtcaaatctaacgggactagggtgggatagggaggaaggtggtatcaaattgttggactctgaaaaacaagtggatggattactaatatttgatttattactca

SEQ ID NO: 10170 - DNA, 2632 bp, Homo sapiens
  source 1..2632: mol_type = unassigned DNA
acttccggcgtatgaggcggtgacaatgggagcagcgcgggcggcgccgggaggcagctgacaagcgtttgcggcttcgcttcatggccgctctcccgcccctcctgggatctgtggggagctggggagcccgcagcggcccggagccggagctggcgagccgagcggagacctgtgcgccgcgcctctgaggcgcagcatgtgaagcggagacggcatccagtggggggcgagcctctcagccggccgggatggctaccacggccgagctcttcgaggagccttttgtggcagatgaatatattgaacgtcttgtatggagaaccccaggaggaggctctagaggtggacctgaagcttttgatcctaaaagattattagaagaatttgtaaatcatattcaggaactccagataatggatgaaaggattcagaggaaagtagagaaactagagcaacaatgtcagaaagaagccaaggaatttgccaagaaggtacaagagctgcagaaaagcaatcagataaaggaagcagcagacatcattcagaagttgcacctaattgcccaagagttaccttttgatagattttcagaagttaaatccaaaattgcaagtaaataccatgatttagaatgccagctgattcaggagtttaccagtgctcaaagaagaggtgaaatctccagaatgagagaagtagcagcagttttacttcattttaagggttattcccattgtgttgatgtttatataaagcagtgccaggagggtgcttatttgagaaatgatatatttgaagacgctggaatactctgtcaaagagtgaacaaacaagttggagatatcttcagtaatccagaaacagtcctggctaaacttattcaaaatgtatttgaaatcaaactacagagttttgtgaaagagcagttagaagaatgtaggaagtccgatgcagagcaatatctcaaaaatctctatgatctgtatacaagaaccaccaatctttccagcaagctgatggagtttaatttaggtactgataaacagactttcttgtctaagcttatcaaatccattttcatttcctatttggagaactatattgaggtggagactggatatttgaaaagcagaagtgctatgatcctacagcgctattatgattcgaaaaaccatcaaaagagatccattggcacaggaggtattcaagatttgaaggaaagaattagacagcgtaccaacttaccacttgggccaagtatcgatactcatggggagacttttctatcccaagaagtggtggttaatcttttacaagaaaccaaacaagcctttgaaagatgtcataggctctctgatccttctgacttaccaaggaatgccttcagaatttttaccattcttgtggaatttttatgtattgagcatattgattatgctttggaaacaggacttgctggaattccctcttcagattctaggaatgcaaatctttattttttggacgttgtgcaacaggccaatactatttttcatctttttgacaaacagtttaatgatcaccttatgccactaataagctcttctcctaagttatctgaatgccttcagaagaaaaaagaaataattgaacaaatggagatgaaattggatactggcattgataggacattaaattgtatgattggacagatgaagcatattttggctgcagaacagaagaaaacagattttaagccagaagatgaaaacaatgttttgattcaatatactaatgcctgtgtaaaagtctgtgcttacgtaagaaaacaagtggagaagattaaaaattccatggatgggaagaatgtggatacagttttgatggaacttggagtacgttttcatcgacttatctatgagcatcttcaacaatattcctacagttgtatgggtggcatgttggccatttgtgatgtagccgaatataggaagtgtgccaaagacttcaagattccaatggtattacatctttttgatactctgcatgctctttgcaatcttctggtagttgccccagataatttaaagcaagtctgctcaggagaacaacttgctaatctggacaagaatatacttcactccttcgtacaacttcgtgctgattatagatctgcccgccttgctcgacacttcagctgagattgaatttacaaaggaattcagtgtcagttcctttacagaggaatgtcttatacttcagcagccctcggttgatagaaagcacaggagataccttatgacacagccaacattttgtgaaacaatgactggaacaaaacagcagccatacttacctttgaggttttatttaaagtttggataccactagctatattttgcttttttcccctcacattgaattttaattccattcttgaatgtagaaatttcagattctctaaaactacatgtcactgtttttatcctagaaaatgttgctgtcagaaggcaaaggaaatgttaccagtgttttcggttcttgtacttttaacatattccatttagaaattttgccattctgttttccattaataataggtgaaatacaggaaaactacatttgttattcctcagtttttaatgacctt

SEQ ID NO: 10171 - DNA, 7296 bp, Homo sapiens
  source 1..7296: mol_type = unassigned DNA
aaggatcaaagttcctcatacacggtagcgtcgagccttttttcggttctttcgccgctcgttttattcgccggcccctcccgacaacctccctggcgcgcgcagttccacttccggcgtatgaggcggtgacaatgggagcagcgcgggcggcgccgggaggcagctgacaagcgtttgcggcttcgcttcatggccgctctcccgcccctcctgggatctgtggggagctggggagcccgcagcggcccggagccggagctggcgagccgagcggagacctgtgcgccgcgcctctgaggcgcagcatgtgaagcggagacggcatccagtggggggcgagcctctcagccggccgggatggctaccacggccgagctcttcgaggagccttttgtggcagatgaatatattgaacgtcttgtatggagaaccccaggaggaggctctagaggtggacctgaagcttttgatcctaaaagattattagaagaatttgtaaatcatattcaggaactccagataatggatgaaaggattcagaggaaagtagagaaactagagcaacaatgtcagaaagaagccaaggaatttgccaagaaggtacaagagctgcagaaaagcaatcaggttgccttccaacatttccaagaactagatgagcacattagctatgtagcaactaaagtctgtcaccttggagaccagttagagggggtaaacacacccagacaacgggcagtggaggctcagaaattgatgaaatactttaatgagtttctagatggagaattgaaatctgatgtttttacaaattctgaaaagataaaggaagcagcagacatcattcagaagttgcacctaattgcccaagagttaccttttgatagattttcagaagttaaatccaaaattgcaagtaaataccatgatttagaatgccagctgattcaggagtttaccagtgctcaaagaagaggtgaaatctccagaatgagagaagtagcagcagttttacttcattttaagggttattcccattgtgttgatgtttatataaagcagtgccaggagggtgcttatttgagaaatgatatatttgaagacgctggaatactctgtcaaagagtgaacaaacaagttggagatatcttcagtaatccagaaacagtcctggctaaacttattcaaaatgtatttgaaatcaaactacagagttttgtgaaagagcagttagaagaatgtaggaagtccgatgcagagcaatatctcaaaaatctctatgatctgtatacaagaaccaccaatctttccagcaagctgatggagtttaatttaggtactgataaacagactttcttgtctaagcttatcaaatccattttcatttcctatttggagaactatattgaggtggagactggatatttgaaaagcagaagtgctatgatcctacagcgctattatgattcgaaaaaccatcaaaagagatccattggcacaggaggtattcaagatttgaaggaaagaattagacagcgtaccaacttaccacttgggccaagtatcgatactcatggggagacttttctatcccaagaagtggtggttaatcttttacaagaaaccaaacaagcctttgaaagatgtcataggctctctgatccttctgacttaccaaggaatgccttcagaatttttaccattcttgtggaatttttatgtattgagcatattgattatgctttggaaacaggacttgctggaattccctcttcagattctaggaatgcaaatctttattttttggacgttgtgcaacaggccaatactatttttcatctttttgacaaacagtttaatgatcaccttatgccactaataagctcttctcctaagttatctgaatgccttcagaagaaaaaagaaataattgaacaaatggagatgaaattggatactggcattgataggacattaaattgtatgattggacagatgaagcatattttggctgcagaacagaagaaaacagattttaagccagaagatgaaaacaatgttttgattcaatatactaatgcctgtgtaaaagtctgtgcttacgtaagaaaacaagtggagaagattaaaaattccatggatgggaagaatgtggatacagttttgatggaacttggagtacgttttcatcgacttatctatgagcatcttcaacaatattcctacagttgtatgggtggcatgttggccatttgtgatgtagccgaatataggaagtgtgccaaagacttcaagattccaatggtattacatctttttgatactctgcatgctctttgcaatcttctggtagttgccccagataatttaaagcaagtctgctcaggagaacaacttgctaatctggacaagaatatacttcactccttcgtacaacttcgtgctgattatagatctgcccgccttgctcgacacttcagctgagattgaatttacaaaggaattcagtgtcagttcctttacagaggaatgtcttatacttcagcagccctcggttgatagaaagcacaggagataccttatgacacagccaacattttgtgaaacaatgactggaacaaaacagcagccatacttacctttgaggttttatttaaagtttggataccactagctatattttgcttttttcccctcacattgaattttaattccattcttgaatgtagaaatttcagattctctaaaactacatgtcactgtttttatcctagaaaatgttgctgtcagaaggcaaaggaaatgttaccagtgttttcggttcttgtacttttaacatattccatttagaaattttgccattctgttttccattaataataggtgaaatacaggaaaactacatttgttattcctcagtttttaatgaccttttcagcatcaattgttaatcagattattttaggttttcgtaaataatttttttgcctctttcaaaaggttaacaattaagcatactttctgcagttggttgattggatttttttctgaggtacagcattaatactagtccaaaaaatgtcataaactgaactaaaatgatgaactattttatgtagacattaggagtggatcggaatacttctgctttctgggtaaaacttaaaagtttactatttcttatttggtaaatagattttaagccaattctagtaagaaattaataaaactaccttattttgtatttcacttaaggtggaggaccttaactaaaggaccatatttattcattattttaatattataagggaagtaaaaaaaagtgaggtatagtctaaatggtgcatataggaaatactgacagtgtttagcaacatgcagccctttgagatttctgtcgtaatgctaaacttgaataagatggaatggctgaacatgtggttagtcttttattttaagaagaattgagaattgatagatttggagatgagctttgcaaaggctgtttgcttttcatgtctataggtctgtcattgtcctttttcaaagcatttctgaagttattcctacttggatatagttaatggaattggcttaatttgatgacataataaatcacttataaaattttaaatatcaagtgaaaatttagaaaggccattactattctataaaccttataaacttgctctgggagaatgcattctaaattatatatagtgtttcagctcccattgtggtgttcatagtcttctaggaacagataaacttaagtattcaattcactcttggcattttttctttaatataggctttttagcctatttttggaaaactgcttttcttctgagaaccttattctgaatgtcatcaactttaccaaaccttctaagtccagagctaacttagtactgtttaagttactattgactgaattttcttcattttctgtttagtccagtgttaccaaggtaagctggggaatgaagtataccaacttctttcagagcattttaggacattatggcagctttagaaggctgtcttgtttctagccaagggagagccagcgcaggttttggatactagagaaagtcatttgcttgtactattgccattttagaaagctctgatgtgaattcaaattttacctctgttacttaaagccaacaattttaaggcagtagttttactggccatttaagctctttgtacagtgtcaatttgtaaaaaagaaaaaacgaaaaaaaatctcaaataaaacatgagataacattttaagacttccaaatcagagaagtgcttcaaattattttgtttggattaatttttaaaatgtaaagcatatacttgttgcttagttattttgtttattattttcatgtttgagttctgtgcaatattttctattatgtccgttgataggacagtgacaaaattcgtaagtgaatacttaatttaaaagtgttaacattaatgctcaataaacaaattccctgcagttgttttttttatttcactctttttatattttagagccatccatcctgaattttataaatgattttttatttaaaaatttgagatttttaaaatttttcacagcacaggtcttctcattttcttttttagcaaaaaatacttgactatataaacaagactagaaatttatcctaaacagatggtctttctctgagggaaaaaaaaaaatgtgtcatgtgaggcaatatgcattctttgtattctgattttttaagtgttttcatatttatagccatcacaaaattttgcccaaagtgtatggctcagaagagatgatcaataactaaaatgtttttcgttttgcacatggtaaaattttaggtagagagtggagctttgtataattggtaactttaaccaacatttacgtaagtacggtctttgcagtattacacaataccgcatgagctaatatgcagtatttaggtaatgcattgaatgaagttgaaaatatgctcttaacacactgtgcattgtttttctaaaattgagaaatatctgaaatacagaatacgaatttaataaaggaagcctaccttatgtaaattatgatgttgaaaatgacagtcaaccagagtagatgaagtgtccttatgaagaattattaaatagtagctggatggatctttagatggatgaccacctgaccattccaggacaatttttggtcccattttgaggattgccatagttgcaagtccttaggatcttccttgttttaaaaaactatcaaagtaggttaaattaaaatctaatttaaattaggttaatttatattacattgtagatcattcttttttcccccctctttcacttctaaatattttgctttctaaatactagccttctggttcacagtgaaataatttaattatcaatcagtagattgattccaagtggagaattcactgcttccctaaaatgcgtttttcttacctgtaatggtgaatatttacaaggatctggataaagagattttgatttttgaaatgccacaaaaccccttaaagtggtcaagtacctaaggtagtggctaaggcatgcttgaactgtgtttgagagacagcagttcagtcagtacataatttgttggtgactaacaaagctcacatctgggagattaactttttttaacgcaaaaatattctgcacattacccatatattgttgaattttacatacaaagcattttgtgctttcattcaattagtttaactatattcagtttctgtattatttctctctgatctatcctgtaattattctatactttagaagaaaagatcagttcatattgttagactgaataattctacatgaagttaaaagttagcaatttaaaaaattttgctgcataataaagataattatagttacatgtattgatttaagtctcacacactgtgctaataagtcctttgcacatattattggattctagagcaaccctaggatttgggtactattatttccatttgacagatgaaaaacctaatgcatagaaagataagtagaccagtcaaggtctacagctagtaaaatgctcagattgaaacctaaatcttttctcactcacttttaggttctatatgctattctccttacgtaacgttaaatagatcctttagtttgataggttcattagttttgcttaatcgttgcttccaatatgattcttattgtagtatttatattacaaagttggcatacagggtcaatatctaatttactgttgtgtttttcttaatatgttcaatgtatggtcatactttttaaatttgattttttaaatattataagtggtcatgaaattttaatgttaagtttgtacctaatagaaatatgtctatcacaaatctttattggtattattttatatacttttccagcttgataattttcacaatagaaagagaccaaatattttgtactatattttgtgacatagaagtaaatgacaactctaccttggaagatatgaagaaatcagtgtttttatgttcaaaaactattttaaatgtcataggcttgccaattgtgttaactatttagtacattggtagtttttaaatgactaatgctggagtgaaaatgtaaggcaaaatatttagtatattaacagtagatagtcattttcatgtaatcagaattgcatgttaagggttttaaaagctgtcataactcttaccttttatttctaccagtgatcaatcatttctctttacaaatttagggaggaaacaactgttcaaatgtataggggacagaaacctgacatttagagaacagaaattttaattgccaaattaaagcagctaggctgcccctgggcttaacaaaattcctatttttgaactagacccgaggtattttatcattattatttgataggtaccattaacctttgttttgtgattatcgacttttggggggaaagatgagtaattaaacacactcgcccattttctaagtggtttagaaggttgcagtctgcctcaccatacaaagccagtttaaataggaatatatcacatcatacttcacatagcagtcaacctcagaggaaagtcatttattcagaaggcatagattttgctagacagcagtgatgcattacaaatatataattatttgcactaatatttgagcaggtggaatggattagaacatggtcaacatcatgctgctgataacatgtatttttctatattaatatgtactgtgcaacatgtattaaaattgtcaataatt

SEQ ID NO: 10172 - DNA, 3564 bp, Homo sapiens
  source 1..3564: mol_type = unassigned DNA
agcttccagccaaaatggcggagaacagcgagagtctgggcaccgtccccgagcacgagcggatcttgcaggagatcgagagcaccgacaccgcctgtgtggggcccaccctccggtctgtgtatgatgaccaaccaaatgcgcacaagaagtttatggaaaagttagatgcttgtatccgtaatcatgacaaggaaattgaaaagatgtgtaattttcatcatcagggttttgtagatgctattacagaactccttaaagtaaggactgatgcagaaaaactgaaggtgcaagttactgataccaaccgaaggtttcaagatgctggaaaagaggtgatagtccacacagaagatatcattcgatgtagaattcagcagagaaatattacaactgtagtagaaaaattgcagttatgccttcctgtgctagaaatgtacagtaagctgaaagaacagatgagtgccaaaaggtactattctgccctaaaaactatggaacaattagagaatgtgtactttccctgggttagtcaataccggttttgtcagctcatgatagaaaatcttcccaaactccgtgaggatattaaagaaatctccatgtctgatctcaaagactttttggaaagtattcgaaaacattctgacaaaataggtgaaacagcaatgaaacaggcacagcatcagaaaaccttcagtgtttctctgcagaaacaaaataaaatgaaatttgggaaaaatatgtatataaatcgtgatagaattccagaggaaaggaatgaaactgtattgaaacattcacttgaagaagaggatgagaatgaagaagagatcttaactgttcaggatcttgttgatttttcccctgtttatcgatgtttgcacatttattctgttttgggtgacgaggaaacatttgaaaactattatcgaaaacaaagaaagaaacaagcaagactggtattgcaaccccagtcgaatatgcatgaaacagttgatggctatagaagatatttcactcaaattgtagggttctttgtggtagaagatcacattttacatgtgacccaaggattagtaaccagggcatacactgatgaactttggaacatggccctctcaaagataattgctgtccttagagctcattcatcctattgcactgatcctgatcttgttctggagctgaagaatcttactgtaatatttgcagatactttacagggttatggttttccagtgaaccgactttttgaccttttatttgaaataagagaccaatacaatgaaacactgcttaagaaatgggctggagttttcagggacatttttgaagaagataattacagccccatccctgttgtcaatgaagaagaatataaaattgtcatcagcaaatttccctttcaagatccagaccttgaaaagcagtctttcccaaagaaattccccatgtctcagtcagtgcctcatatttacattcaagttaaagaatttatttatgccagccttaaattttcagagtcactacaccggagctcaacagaaatagacgatatgcttagaaaatcaacaaatctgctgctgaccagaactttgagtagctgtttactgaaccttattagaaaacctcatataggtttgacagagctggtacaaatcatcataaacacaacacacctggagcaagcttgtaaatatcttgaggactttataactaacattacaaatatttcccaagaaactgttcatactacaagactttatggactttctactttcaaggatgctcgacatgcagcagaaggagaaatatataccaaactgaatcaaaaaattgatgaatttgttcagcttgctgattatgactggacaatgtctgagccagatggaagagctagtggttatttaatggaccttataaattttttgagaagcatctttcaagtgtttactcatttgcctgggaaagttgctcagacagcttgcatgtcagcctgccagcatctgtcaacatccttaatgcagatgctactggacagtgagttaaaacaaataagcatgggagctgttcagcagtttaacttagatgtcatacagtgtgaattgtttgccagctctgagcctgtgccaggattccagggggataccctgcagctagcattcattgacctcagacaactccttgacctgtttatggtttgggattggtctacttacctagctgattatgggcagccagcttctaagtaccttcgggtgaatccaaacacagcccttactcttttggagaagatgaaggatactagcaaaaagaacaatatatttgctcagttcaggaagaatgatcgagacaaacagaagttgatagagacagtcgtgaaacagctgagaagtttggtgaatggtatgtcccagcacatgtagacctcacatggcttgcactcagtgacaccaaatccatgattcaatgttgatcttgagcaagtattggtcatgatacagtaatttgtttacagaatccaaaaatacaatagagaagatacatgagggcttaaacaagaaatagtaataaatatcatttgtatggatttttaaataatcgaatactattttatatatggaaaaaaatgaccattttttcacttttaggggaaaatgcaaaagtgtaatacataaattgtcacaaattatacatgaaattgattacaaatacatttgaaaaacatatgcctctactcataagtatttttttctatttagacttgaatgataatctgttttttgatcagtatatggctttggaattcaatcatgtctgatatggtagtatttcactaccattttctgacttttagcttttattttcacctcaatgtgatttaagcagaccaaaatttctaattctgctaattctgaaggggaaatagacaaatcttaaaagctgcctgaaatcaaacttgatttaactcagtaagaatgtgaattatttgttctacttgggtggtttaatttaatcgttctgaatatgaacaaaaggttttggattttctaaagatgcagtgttgtttctgttcatcagggttaatatttctaactatattgcttgtaggtgaccccattctggatttgtttggtttggtttggttccagttaaaagagaggacaggaactaaatggggctaaccacttcaggtgcagcttgtgcgagggtagatggttcctgcacacagaagttaccacaggggtcaggttactttcttcaaatagcagatttcagtactttatcctcattgtggaaacaagccaaaccaaatgaactctggaaaacctaaaacaaatgtacattttcctttgtgtatgtttccgtggtccaaatggcaatataaatccagtctttattctccctttgttgtatttatgctgaatcttccctttgccttttcaggatttaggcctgtaagaaactatgcctgattctgtaaaataagtgtaaagaattatatgtacatctctggattttgtgatgaaatattaaaaatattgagcaagttgttgaaaa

SEQ ID NO: 10173 - DNA, 2714 bp, Homo sapiens
  source 1..2714: mol_type = unassigned DNA
gtcgttcccgcggcgccgcgcctcgctggctcctcagcttccagccaaaatggcggagaacagcgagagtctgggcaccgtccccgagcacgagcggatcttgcaggagatcgagagcaccgacaccgcctgtgtggggcccaccctccggtctgtgtatgatgaccaaccaaatgcgcacaagaagtttatggaaaagttagatgcttgtatccgtaatcatgacaaggaaattgaaaagatgtgtaattttcatcatcagggttttgtagatgctattacagaactccttaaagtaaggactgatgcagaaaaactgaaggtgcaagttactgataccaaccgaaggtttcaagatgctggaaaagaggtgatagtccacacagaagatatcattcgatgtagaattcagcagagaaatattacaactgtagtagaaaaattgcagttatgccttcctgtgctagaaatgtacagtaagctgaaagaacagatgagtgccaaaaggtgagttggtttttttcctattgttttaaataagaatttttttctattattgaaaggacagatacatttactataaatcatagtgaatcatgagttttgctttcttcattacactaacctttgtacttaaaatttgcgcatcaggataatccactaaagcaaatcttagccttttattaataaatcattgtcctttataaatgatatcaaggattggtaatgttgatcaagtacaaatagccgaacaggaatgaaaatattgattagcttaccaacatactaatattgcatgtaactaagggctaagtgcatattgtggaaggaaaagagtgtaggcagttatattttgacagtctgggtgaatgtagtagttcacattctgttttataactcaaatgcatatatgacagttgaaaaagaaagtaatttaaagtagtttattgattgccataggagcattggatatagtgatgtttaaaatattttaaagacgaacagttttggccaggtgtcatggctcatgcttgtaatcccggcactttgggagtctgaggcaaggggatcacttgaacccaggagtttgagaccagcgtgggcaatatagggagacctcatttcacctccccacccccttccccccaaaaaacaaaagaaaaaaaacaaatgattcaaaagtaacatagaaaaaccagaataaattagacaatttggactagggaaaaaatgatttcttcttggttagtaactacttaattatcagaacacatcttatacagacctatagtaaaagatgtgtgtatgtcctgcttcattgtgctacatgttgaatttcattaggctttaccagttaatacaatttagtagaatgattttttccctgtaataaacaagccaaaaactattctgaaagtcttattttctttcacgtatgtattaataatatattctctttttaaatcaatgttatatatcctcacattttaaagattcaaataattttcctacgcgtttgctgccaaaaaaaaaaaaaacagatatcacctttcctatttcccattcaccattccttctttataggagcaaaaacttttacctcttttaatggattattttggtatttatatttatgtctttaaataactaacttttaattattaccatattattttccagtttggggcattatcggtttttcagtaatataatctaatatttatactcacattttctcaactatccccaaaatgtcttacgtctttttccctccctgaaaacattgatttgtatgtgttcttttgtcccttttaatctagaacagtcctcctgttctttgtttttttcatggaagagtgcaggtcagttctcttgtagaccagggcattttggatttatctagttgtttcttcatgtttagattcaagttaaaaggttttggcaagagtatagcataagtgatacctcacattgcatgacatcaggaggcttataaagtcatgttgtccttaggttatgctaaatttgatcatttggttaaggggaagtctaccagatgtcttttgaaaaggtatatttttctctttgcaattaataagtaatatgtgggtcctgtttcctaacaggttttcacccagtagttttatcattcttgccttaatccgttattatattggatttacaagatgttgatttaaaaaattctattatttcttaaacatttattaactggctgttttatatataaagaagagctttttattccccaccaccaccttttttctttttttccgattatggctgtgaacttacgcatttttaaaataaatatattataatttattattgtcattattcattttgatgcacaaattgtttcaaatttaacaagagaaacttctcaagccaattcctgtgtctttgtctttgagtatttttgtgtttattgtatcgtaagatgttccaagctctcattgtgccttttttttttttttttgcctcagatctggaagcagccattctccagggtaccctagctccttttagtattaatggtatttagaaactaagatgtatgggttgggagcagtggctcacacctgtaatctcagcactttgggaggctaaggcaggtggatcgcttaagctcaagagtttgagaccagcctggcccgtatggtaaaaccccatctctactgaaaaaaaaaaaaaaa

SEQ ID NO: 10174 - DNA, 2841 bp, Homo sapiens
  source 1..2841: mol_type = unassigned DNA
agcaggactgagaggagcagaagacagtggggtgggagtagagggagggtggggagagctgaggagcagagggaagcaactgggccaccaggacagaagaccttgaatctccaggctgagccggctgtaccggaagaggatgaatgtgctgtgtaggaggagcggggtcatgcagtgacactggaaaattaggggcctgtcgagcgatgttggaagaagaaacagatcaaacctatgagaatgtcctggctgagattcagtctttcgaactgcctgttgaagctactttaaggtctgtgtatgatgaccaaccaaatgcgcacaagaagtttatggaaaagttagatgcttgtatccgtaatcatgacaaggaaattgaaaagatgtgtaattttcatcatcagggttttgtagatgctattacagaactccttaaagtaaggactgatgcagaaaaactgaaggtgcaagttactgataccaaccgaaggtttcaagatgctggaaaagaggtgatagtccacacagaagatatcattcgatgtagaattcagcagagaaatattacaactgtagtagaaaaattgcagttatgccttcctgtgctagaaatgtacagtaagctgaaagaacagatgagtgccaaaaggtactattctgccctaaaaactatggaacaattagagaatgtgtactttccctgggttagtcaataccggttttgtcagctcatgatagaaaatcttcccaaactccgtgaggatattaaagaaatctccatgtctgatctcaaagactttttggaaagtattcgaaaacattctgacaaaataggtgaaacagcaatgaaacaggcacagcatcagaaaaccttcagtgtttctctgcagaaacaaaataaaatgaaatttgggaaaaatatgtatataaatcgtgatagaattccagaggaaaggaatgaaactgtattgaaacattcacttgaagaagaggatgagaatgaagaagagatcttaactgttcaggatcttgttgatttttcccctgtttatcgatgtttgcacatttattctgttttgggtgacgaggaaacatttgaaaactattatcgaaaacaaagaaagaaacaagcaagactggtattgcaaccccagtcgaatatgcatgaaacagttgatggctatagaagatatttcactcaaattgtagggttctttgtggtagaagatcacattttacatgtgacccaaggattagtaaccagggcatacactgatgaactttggaacatggccctctcaaagataattgctgtccttagagctcattcatcctattgcactgatcctgatcttgttctggagctgaagaatcttactgtaatatttgcagatactttacagggttatggttttccagtgaaccgactttttgaccttttatttgaaataagagaccaatacaatgaaacactgcttaagaaatgggctggagttttcagggacatttttgaagaagataattacagccccatccctgttgtcaatgaagaagaatataaaattgtcatcagcaaatttccctttcaagatccagaccttgaaaagcagtctttcccaaagaaattccccatgtctcagtcagtgcctcatatttacattcaagttaaagaatttatttatgccagccttaaattttcagagtcactacaccggagctcaacagaaatagacgatatgcttagaaaatcaacaaatctgctgctgaccagaactttgagtagctgtttactgaaccttattagaaaacctcatataggtttgacagagctggtacaaatcatcataaacacaacacacctggagcaagcttgtaaatatcttgaggactttataactaacattacaaatatttcccaagaaactgttcatactacaagactttatggactttctactttcaaggatgctcgacatgcagcagaaggagaaatatataccaaactgaatcaaaaaattgatgaatttgttcagcttgctgattatgactggacaatgtctgagccagatggaagagctagtggttatttaatggaccttataaattttttgagaagcatctttcaagtgtttactcatttgcctgggaaagttgctcagacagcttgcatgtcagcctgccagcatctgtcaacatccttaatgcagatgctactggacagtgagttaaaacaaataagcatgggagctgttcagcagtttaacttagatgtcatacagtgtgaattgtttgccagctctgagcctgtgccaggattccagggggataccctgcagctagcattcattgacctcagacaactccttgacctgtttatggtttgggattggtctacttacctagctgattatgggcagccagcttctaagtaccttcgggtgaatccaaacacagcccttactcttttggagaagatgaaggatactagcaaaaagaacaatatatttgctcagttcaggaagaatgatcgagacaaacagaagttgatagagacagtcgtgaaacagctgagaagtttggtgaatggtatgtcccagcacatgtagacctcacatggcttgcactcagtgacaccaaatccatgattcaatgttgatcttgagcaagtattggtcatgatacagtaatttgtttacagaatccaaaaatacaatagagaagatacatgagggcttaaacaagaaatagtaataaatatcatttgtatggatttttaaataatcgaatactattttatatatggaaaaaaatgaccattttttcacttttaggggaaaatgc

SEQ ID NO: 10175 - DNA, 3567 bp, Homo sapiens
  source 1..3567: mol_type = unassigned DNA
cagctggaaaattaggggcctgtcgagcgatgttggaagaagaaacagatcaaacctatgagaatgtcctggctgagattcagtctttcgaactgcctgttgaagctactttaaggtctgtgtatgatgaccaaccaaatgcgcacaagaagtttatggaaaagttagatgcttgtatccgtaatcatgacaaggaaattgaaaagatgtgtaattttcatcatcagggttttgtagatgctattacagaactccttaaagtaaggactgatgcagaaaaactgaaggtgcaagttactgataccaaccgaaggtttcaagatgctggaaaagaggtgatagtccacacagaagatatcattcgatgtagaattcagcagagaaatattacaactgtagtagaaaaattgcagttatgccttcctgtgctagaaatgtacagtaagctgaaagaacagatgagtgccaaaaggtactattctgccctaaaaactatggaacaattagagaatgtgtactttccctgggttagtcaataccggttttgtcagctcatgatagaaaatcttcccaaactccgtgaggatattaaagaaatctccatgtctgatctcaaagactttttggaaagtattcgaaaacattctgacaaaataggtgaaacagcaatgaaacaggcacagcatcagaaaaccttcagtgtttctctgcagaaacaaaataaaatgaaatttgggaaaaatatgtatataaatcgtgatagaattccagaggaaaggaatgaaactgtattgaaacattcacttgaagaagaggatgagaatgaagaagagatcttaactgttcaggatcttgttgatttttcccctgtttatcgatgtttgcacatttattctgttttgggtgacgaggaaacatttgaaaactattatcgaaaacaaagaaagaaacaagcaagactggtattgcaaccccagtcgaatatgcatgaaacagttgatggctatagaagatatttcactcaaattgtagggttctttgtggtagaagatcacattttacatgtgacccaaggattagtaaccagggcatacactgatgaactttggaacatggccctctcaaagataattgctgtccttagagctcattcatcctattgcactgatcctgatcttgttctggagctgaagaatcttactgtaatatttgcagatactttacagggttatggttttccagtgaaccgactttttgaccttttatttgaaataagagaccaatacaatgaaacactgcttaagaaatgggctggagttttcagggacatttttgaagaagataattacagccccatccctgttgtcaatgaagaagaatataaaattgtcatcagcaaatttccctttcaagatccagaccttgaaaagcagtctttcccaaagaaattccccatgtctcagtcagtgcctcatatttacattcaagttaaagaatttatttatgccagccttaaattttcagagtcactacaccggagctcaacagaaatagacgatatgcttagaaaatcaacaaatctgctgctgaccagaactttgagtagctgtttactgaaccttattagaaaacctcatataggtttgacagagctggtacaaatcatcataaacacaacacacctggagcaagcttgtaaatatcttgaggactttataactaacattacaaatatttcccaagaaactgttcatactacaagactttatggactttctactttcaaggatgctcgacatgcagcagaaggagaaatatataccaaactgaatcaaaaaattgatgaatttgttcagcttgctgattatgactggacaatgtctgagccagatggaagagctagtggttatttaatggaccttataaattttttgagaagcatctttcaagtgtttactcatttgcctgggaaagttgctcagacagcttgcatgtcagcctgccagcatctgtcaacatccttaatgcagatgctactggacagtgagttaaaacaaataagcatgggagctgttcagcagtttaacttagatgtcatacagtgtgaattgtttgccagctctgagcctgtgccaggattccagggggataccctgcagctagcattcattgacctcagacaactccttgacctgtttatggtttgggattggtctacttacctagctgattatgggcagccagcttctaagtaccttcgggtgaatccaaacacagcccttactcttttggagaagatgaaggatactagcaaaaagaacaatatatttgctcagttcaggaagaatgatcgagacaaacagaagttgatagagacagtcgtgaaacagctgagaagtttggtgaatggtatgtcccagcacatgtagacctcacatggcttgcactcagtgacaccaaatccatgattcaatgttgatcttgagcaagtattggtcatgatacagtaatttgtttacagaatccaaaaatacaatagagaagatacatgagggcttaaacaagaaatagtaataaatatcatttgtatggatttttaaataatcgaatactattttatatatggaaaaaaatgaccattttttcacttttaggggaaaatgcaaaagtgtaatacataaattgtcacaaattatacatgaaattgattacaaatacatttgaaaaacatatgcctctactcataagtatttttttctatttagacttgaatgataatctgttttttgatcagtatatggctttggaattcaatcatgtctgatatggtagtatttcactaccattttctgacttttagcttttattttcacctcaatgtgatttaagcagaccaaaatttctaattctgctaattctgaaggggaaatagacaaatcttaaaagctgcctgaaatcaaacttgatttaactcagtaagaatgtgaattatttgttctacttgggtggtttaatttaatcgttctgaatatgaacaaaaggttttggattttctaaagatgcagtgttgtttctgttcatcagggttaatatttctaactatattgcttgtaggtgaccccattctggatttgtttggtttggtttggttccagttaaaagagaggacaggaactaaatggggctaaccacttcaggtgcagcttgtgcgagggtagatggttcctgcacacagaagttaccacaggggtcaggttactttcttcaaatagcagatttcagtactttatcctcattgtggaaacaagccaaaccaaatgaactctggaaaacctaaaacaaatgtacattttcctttgtgtatgtttccgtggtccaaatggcaatataaatccagtctttattctccctttgttgtatttatgctgaatcttccctttgccttttcaggatttaggcctgtaagaaactatgcctgattctgtaaaataagtgtaaagaattatatgtacatctctggattttgtgatgaaatattaaaaatattgagcaagttgttgaaaatgc

SEQ ID NO: 10176 - DNA, 3263 bp, Homo sapiens
  source 1..3263: mol_type = unassigned DNA
tcctcagcttccagccaaaatggcggagaacagcgagagtctgggcaccgtccccgagcacgagcggatcttgcaggagatcgagagcaccgacaccgcctgtgtggggcccaccctccggtctgtgtatgatgaccaaccaaatgcgcacaagaagtttatggaaaagttagatgcttgtatccgtaatcatgacaaggaaattgaaaagatgtgtaattttcatcatcagggttttgtagatgctattacagaactccttaaagtaaggactgatgcagaaaaactgaaggtgcaagttactgataccaaccgaaggtttcaagatgctggaaaagaggtgatagtccacacagaagatatcattcgatgtagaattcagcagagaaatattacaactgtagtagaaaaattgcagttatgccttcctgtgctagaaatgtacagtaagctgaaagaacagatgagtgccaaaaggtactattctgccctaaaaactatggaacaattagagaatgtgtactttccctgggttagtcaataccggttttgtcagctcatgatagaaaatcttcccaaactccgtgaggatattaaagaaatctccatgtctgatctcaaagactttttggaaagtattcgaaaacattctgacaaaataggtgaaacagcaatgaaacaggcacagcatcagaaaaccttcagtgtttctctgcagaaacaaaataaaatgaaatttgggaaaaatatgtatataaatcgtgatagaattccagaggaaaggaatgaaactgtattgaaacattcacttgaagaagaggatgagaatgaagaagagggtgacgaggaaacatttgaaaactattatcgaaaacaaagaaagaaacaagcaagactggtattgcaaccccagtcgaatatgggttatggttttccagtgaaccgactttttgaccttttatttgaaataagagaccaatacaatgaaacactgcttaagaaatgggctggagttttcagggacatttttgaagaagataattacagccccatccctgttgtcaatgaagaagaatataaaattgtcatcagcaaatttccctttcaagatccagaccttgaaaagcagtctttcccaaagaaattccccatgtctcagtcagtgcctcatatttacattcaagttaaagaatttatttatgccagccttaaattttcagagtcactacaccggagctcaacagaaatagacgatatgcttagaaaatcaacaaatctgctgctgaccagaactttgagtagctgtttactgaaccttattagaaaacctcatataggtttgacagagctggtacaaatcatcataaacacaacacacctggagcaagcttgtaaatatcttgaggactttataactaacattacaaatatttcccaagaaactgttcatactacaagactttatggactttctactttcaaggatgctcgacatgcagcagaaggagaaatatataccaaactgaatcaaaaaattgatgaatttgttcagcttgctgattatgactggacaatgtctgagccagatggaagagctagtggttatttaatggaccttataaattttttgagaagcatctttcaagtgtttactcatttgcctgggaaagttgctcagacagcttgcatgtcagcctgccagcatctgtcaacatccttaatgcagatgctactggacagtgagttaaaacaaataagcatgggagctgttcagcagtttaacttagatgtcatacagtgtgaattgtttgccagctctgagcctgtgccaggattccagggggataccctgcagctagcattcattgacctcagacaactccttgacctgtttatggtttgggattggtctacttacctagctgattatgggcagccagcttctaagtaccttcgggtgaatccaaacacagcccttactcttttggagaagatgaaggatactagcaaaaagaacaatatatttgctcagttcaggaagaatgatcgagacaaacagaagttgatagagacagtcgtgaaacagctgagaagtttggtgaatggtatgtcccagcacatgtagacctcacatggcttgcactcagtgacaccaaatccatgattcaatgttgatcttgagcaagtattggtcatgatacagtaatttgtttacagaatccaaaaatacaatagagaagatacatgagggcttaaacaagaaatagtaataaatatcatttgtatggatttttaaataatcgaatactattttatatatggaaaaaaatgaccattttttcacttttaggggaaaatgcaaaagtgtaatacataaattgtcacaaattatacatgaaattgattacaaatacatttgaaaaacatatgcctctactcataagtatttttttctatttagacttgaatgataatctgttttttgatcagtatatggctttggaattcaatcatgtctgatatggtagtatttcactaccattttctgacttttagcttttattttcacctcaatgtgatttaagcagaccaaaatttctaattctgctaattctgaaggggaaatagacaaatcttaaaagctgcctgaaatcaaacttgatttaactcagtaagaatgtgaattatttgttctacttgggtggtttaatttaatcgttctgaatatgaacaaaaggttttggattttctaaagatgcagtgttgtttctgttcatcagggttaatatttctaactatattgcttgtaggtgaccccattctggatttgtttggtttggtttggttccagttaaaagagaggacaggaactaaatggggctaaccacttcaggtgcagcttgtgcgagggtagatggttcctgcacacagaagttaccacaggggtcaggttactttcttcaaatagcagatttcagtactttatcctcattgtggaaacaagccaaaccaaatgaactctggaaaacctaaaacaaatgtacattttcctttgtgtatgtttccgtggtccaaatggcaatataaatccagtctttattctccctttgttgtatttatgctgaatcttccctttgccttttcaggatttaggcctgtaagaaactatgcctgattctgtaaaataagtgtaaagaattatatgtacatctctggattttgtgatgaaatattaaaaatattgagcaagttgttgaaaatgc

SEQ ID NO: 10177 - DNA, 216 bp, Homo sapiens
  source 1..216: mol_type = unassigned DNA
gggaaagttgctcagacagcttgcatgtcagcctgccagcatctgtcaacatccttaatgcagatgctactggacagtgagttaaaacaaataagcatgggagctgttcagcagtttaacttagatgtcatacagtgtgaattgtttgccagctctgagcctgtgccaggattccagggggataccctgcagctagcattcattgacctcagacaa

SEQ ID NO: 10178 - DNA, 5918 bp, Homo sapiens
  source 1..5918: mol_type = unassigned DNA
agggaggggtcggcctgcgggtagccagaggctggggcggctgtggagcctgtggtgggagcggcattgtggggcagggaaaaggtgagccgagccgacggaggggacgcgctgcggggcgcccccagtctatggagcggggtaagatggcggaggcggagagcctggagacagcggcagagcacgagcggatcctgcgagagatcgagagcactgacacggcctgcatcgggcccacgctcaggtctgtttatgatggtgaagaacatggacgtttcatggagaagcttgaaactcgtatccgtaatcacgaccgagaaattgagaaaatgtgcaactttcattaccagggctttgtggactctataactgaactgctgaaagtgagaggagaagcccagaaactcaaaaatcaagtgacggatactaatagaaaactacaacatgagggaaaggaactggtaatagcaatggaagagctgaagcagtgtcgactacaacagagaaatatttctgccactgttgataaattaatgctgtgtcttccagtcctagagatgtacagcaaactgagggaccagatgaaaactaaaaggcattatcctgcactgaaaactctggaacatctagagcatacctacctgcctcaagtaagccactatcgattctgcaaggtgatggtggacaacatccccaagcttcgagaagaaataaaagatgtttctatgtccgatctcaaagactttctggagagcatccgcaaacattcagacaaaattggagagactgccatgaagcaagcccagcagcaaagaaacctggataacatcgtcttgcaacaacccagaataggtagcaagaggaaatctaagaaagatgcatatataatctttgatacagagatagaaagtactagtccgaagtctgaacaggattcaggaattctggatgttgaagacgaggaagatgatgaagaggtacctggggcccaagatttggtggatttctctccagtttatcgatgtctacatatatattctgtcctgggtgcccgggaaacatttgagaattactaccgaaaacagaggcgaaaacaggctcgtttggtacttcaacctccatctaacatgcatgaaactttagatggctacaggaagtattttaatcaaattgtaggcttttttgtggttgaagatcacattttacatacaacccagggcttagtaaatagagcctacattgatgaactgtgggaaatggcactttcaaaaaccatcgcagcactccgtacccactcgtcttactgttctgatccaaaccttgtgttagatttgaagaacctcattgtgctttttgctgacacacttcaggtgtatggtttccctgtaaatcagctttttgacatgctgttagaaatcagagaccaatatagtgaaactctgctaaagaagtgggcaggtattttcagaaacatacttgattctgacaactacagtcctataccagtaacaagtgaagagatgtacaaaaaggtggtaggacaattcccatttcaagatatagaactggaaaagcaaccatttccaaaaaagtttcctttctctgaatttgtgccaaaagtttacaaccaaattaaagaatttatctacgcttgtctgaagttttcagaagatcttcatctaagctcaactgaagttgatgacatgattcggaaatcaacaaacctgttgctaaccaggactctgagcaactctctgcagaatgtaattaaaaggaagaatattgggcttactgagcttgttcagattattatcaatacaacacatttggagaaatcctgtaagtacttggaagaatttatcaccaacatcactaatgtgcttccagagacagttcacactaccaagctctatggcaccacaacttttaaggatgctagacatgcagctgaagaagagatttataccaacttaaaccagaagattgaccagttcctacagctggcagactatgactggatgaccggagatttgggcaacaaagctagtgattacctggtagacctcattgcctttcttcgtagcacctttgctgtattcacacaccttcctggaaaggtggcccagacagcgtgtatgtcagcttgcaagcatttagccacatccttgatgcaacttttgttggaagctgaagtgcggcagctcaccttgggagcattacagcagttcaacttggacgtcagagaatgtgaacagtttgccagatccggcccggtgcctgggttccaggaggacacgctgcagttggccttcatcgacttgagacaacttttggatcttttcatccagtgggattggtcaacctaccttgctgactatggtcagcccaactgcaagtacctccgggtaaacccagtgactgctctgaccctgcttgagaagatgaaggatactagccgcaagaacaacatgtttgcacagtttcggaaaaatgagcgagacaagcagaaactcattgacaccgtggccaagcagctccgaggactcatcagcagccaccactcatgaagggtgaccccggacccacagaggcgacctgctgcagcctctgtgtcagtctggggtccagccccagctgaccctgcatttgtgcattcttcttcaaagagagcatatgtatttttttattaacccctgtgcagtattcacataacatttccctatagtaaaagaggcacaagaataagcaagtacatgagatgttgctaggctgggactcaggggaagttattactacactatctgtgttatcttagagatggtggtatcatcaattccacagtgatgaaccacctttcatccatggctctaaagcttaggtctggggcttaggaaccataaaaagtgggtatctggcgctgggaggtagagtgagtaagcaaaaggatactaaaatatgtcctgttcactcttggatgcccattcaccacatagatgaggctgattcttctcaatacaaggaaagggcatggcaaacattactatttagtacactaagggcagctctggagggtcatctcctcagtctgctgactttcactggcttgtgaacaagcatggcatatggcaagatgacagcttcattccaatcccccaagaatggcggtttctttagcctgatctaaccccaggcttttattgcaattttttctagggcaggatacagctaagtagacagcagtaataattggatcccatgtttaactgcatattgccccagctctaggagtgttgagtctcaactcgaagagtttttctggatcttgaaagccagttttcatggaatcagagacccaatcccttccctgttcatctcatttccttcacttacagtcagagcacttggttcaggacataaatcaacagttacttccataggccttcacagggcgtttcagacttagcctcctccagtaatgccattgaaatagttcagatttcggaagcctaaaaatggcctttaccttacccttaggtgtaacctgaggattagttgggattgttcctttatgttttaaaaccagctttttggttatcatctttaaggaaatgtcaccagctctgcactgtgggggcagccatgcctggactggatgcctctagggatggagacattgttaccataaagtcgacagagccaaccatggcttgtggcttgttgcctctggcccaactgtccttcactaaataatatcctagatattattttgttgctcaagcccaaggttcccaccctcttttgagatccccaaagccatctttggccttgtctaagaaagattgcctataatcctgtcctccaaactctaaagcctggagcagcttagcgtggaggctgcactcattgacccagatggactcctgagacttaacgcaagggctttgctatgaggtcagtcgggggaaactgtactttaagacacttcagaaagatgctactggctagtagcagaaagatggctagtggcaagagtataattgtgcatcaccaaacaatgacaaataagccacacaggcatttccagcttggattgatgggaggagagactcatcaaacagaattcttcactacctttgtcagctactgagttgcttctggggagggaagtacttccttgcccctccccaacccccctacctcaccatatcctatcatatcttgatagtcatggggaagaggatgtgcacacagacatacaaatttcctcaaagctggagagaccaggctacatgtgagctcatagatgctgctgaggctcatcctgagggctggatggttggccagggtttcagaatgagggtaagggatgagcactgccacccagaacttgataagccaagagaaggcaggagccaaaatggcatcgccaagctctcatctttgttgaaacaagtgagaaacgattatattaatctgaagttctattgcttgagaagagttcaaaacacttctctttgctagtacccagtttgcagcaagatctcttcagctttaagtgctgagagactttgaagtggaaatggagagatgtgtaagcatggcacagtgtttgtctttttagaggatcatcattgctggtctggtctcaaacctctgccttggaagaactgtgctatacaggaaaaagtgaacaaggtggaggaataggggttattctgcacagaagtcccatgaaaggaaaagcttattcaagctcaagacataaagatggaccctttgatatatcttctctccattcttagtctgccttcaccttatctaacaaaaaacaacatgcagctactgagttgtatgtagagacatactcttggtgggccagggaaggtaaaaacagggaccagcaatgtcaagtttttgaactagaaaagtgggatgtttttagttttgtctataacctgtagctgggccaacccttgagaggacttgtgcaaagcatgtgtgcccagacccatcagactcctcagatatggcctcaaatacctagagatgtagaagtaccgtggagggcctcaataagagggcaagcacacagatggctagaagcctgtatggcttctggtcaggatgaacccttggccaagttcttgaggaaaccaggtctatattcctgaagggacagttcagtttgggactctattaggtttcagtagtaatataggctgcttgcatcattttaacattcatagggaaaatctctttgagcaggctataaatgaagctgttgcaggtagggaagaacaggacctgaaaatgggaaccaggaagtgagatcctgttggcaaagggaatgtagagcttccagggtgcattgcccactgttctcattgcataccagtcctccaagtcagtctagccttactgtacacttgacaagtgcttactcagcaagtcccagacccacggccttttatctcccaagactggctttggccatgaccttcctcatcaggcctctgagcacactctctaggaactgctgcagaaattcccctaccttagcctcccttctcccaggactcctctcttgactgcaattgcctcttcttcttcttcttcttcttcctttttgttttttttttttttgcctgcattcacaattacttttcacaaaggtgttggaaatggcatttttattttacacagatagttgcacatatatagagaaaattaggaaagtccatttttaactctaaagggaacttttttctctaaaacttacttgtaaagctactgatacagatgggccgcatggttaggggaaagctcctctgtgaaaagagcatgtttattcctcttgtacattttcctcttttaactgctattaaacaagaaagcctacatacctgtttcaaaagcca

SEQ ID NO: 10179 - DNA, 2154 bp, Homo sapiens
  source 1..2154: mol_type = unassigned DNA
gagcctgagggaggggtcggcctgcgggtagccagaggctggggcggctgtggagcctgtggtgggagcggcattgtggggcagggaaaaggtgagccgagccgacggaggggacgcgctgcggggcgcccccagtctatggagcggggtaagatggcggaggcggagagcctggagacagcggcagagcacgagcggatcctgcgagagatcgagagcactgacacggcctgcatcgggcccacgctcaggtctgtttatgatggtgaagaacatggacgtttcatggagaagcttgaaactcgtatccgtaatcacgaccgagaaattgagaaaatgtgcaactttcattaccagggctttgtggactctataactgaactgctgaaagtgagaggagaagcccagaaactcaaaaatcaagtgacggatactaatagaaaactacaacatgagggaaaggaactggtaatagcaatggaagagctgaagcagtgtcgactacaacagagaaatatttctgccactgttgataaattaatgctgtgtcttccagtcctagagatgtacagcaaactgagggaccagatgaaaactaaaaggcattatcctgcactgaaaactctggaacatctagagcatacctacctgcctcaagtaagccactatcgattctgcaaggtgatggtggacaacatccccaagcttcgagaagaaataaaagatgtttctatgtccgatctcaaagactttctggagagcatccgcaaacattcagacaaaattggagagactgccatgaagcaagcccagcagcaaagaaacctggataacatcgtcttgcaacaacccagaataggtagcaagaggaaatctaagaaagatgcatatataatctttgatacagagatagaaagtactagtccgaagtctgaacaggattcaggaattctggatgttgaagacgaggaagatgatgaagaggtacctggggcccaagatttggtggatttctctccagtttatcgatgtctacatatatattctgtcctgggtgcccgggaaacatttgagaattactaccgaaaacagaggcgaaaacaggctcgtttggtacttcaacctccatctaacatgcatgaaactttagatggctacaggaagtattttaatcaaattgtaggcttttttgtggttgaagatcacattttacatacaacccagggcttagtaaatagagcctacattgatgaactgtgggaaatggcactttcaaaaaccatcgcagcactccgtacccactcgtcttactgttctgatccaaaccttgtgttagatttgaagaacctcattgtgctttttgctgacacacttcaggtgtatggtttccctgtaaatcagctttttgacatgctgttagaaatcagagaccaatatagtgaaactctgctaaagaagtgggcaggtattttcagaaacatacttgattctgacaactacagtcctataccagtaacaagtgaagagatgtacaaaaaggtggtaggacaattcccatttcaagatatagaactggaaaagcaaccatttccaaaaaagtttcctttctctgaatttgtgccaaaagtttacaaccaaattaaagaatttatctacgcttgtctgaagttttcagaagatcttcatctaagctcaactgaagttgatgacatgattcggaaatcaacaaacctgttgctaaccaggactctgagcaactctctgcagaatgtaattaaaaggaagaatattgggcttactgagcttgttcagattattatcaatacaacacatttggagaaatcctgtaagtacttggaagaatttatcaccaacatcactaatgtgcttccagagacagttcacactaccaagctctatggcaccacaacttttaaggatgctagacatgcagctgaagaagagatttataccaacttaaaccagaagattgaccagttcctacagctggcagactatgactggatgaccggagatttgggcaacaaagctagtgattacctggtagacctcattgcctttcttcgtagcacctttgctgtattcacacaccttcctgtaagtggcagttgctactttgtcctttatatataa

SEQ ID NO: 10180 - DNA, 10187 bp, Homo sapiens
  source 1..10187: mol_type = unassigned DNA
attattggctgtgggatcaagttcgtgaaactggtcttgtacaggttgaaaaatgccttcctaacaggaggcgccaaggagcttaagtgtaactcacacacagtaaagaaaatgacgaaagttcctccggcgtttgatttcagtttcttaaatgacgaagaggccaggaagatccttcaggtgctggaaaggaatgaggagttacagagggccgagaaggacaggatcagcaaacttcagaagacaaagagggatatcagatggcttcagggagtgactggtgaatggtttgaagaaattcaaagaaaaaagttttgcaatgaaacagatgttagccaaatgttaaaacaaccacttacatacaggctaagtaaggagatggcaaaaaatgatccgatagaattacctacatcaagatctaaaaatgtaactaatcaaaaaaagccgacacctttttcttcccggatgagcttcagatcgtcatttgcttccctgttctcattcaggaaatctggaaaggagacttcaaagcttccatcactgggacagaaaggatgtgatggccatgcaggacctcctatgcctgtgaggggagctgctgtgcaggcaaaaatatacaattcacctctggaaaatcatctagttgacagtacatttgtcccaaagccagcagtcatgagggaggagagtggcatgcctccaccgtgggatgcttcactgctggagaatgagtttttccaagttttagatgacttggatagcaaattggctcaggaacagtctgcaagctcagtgaataccagaacacccctcaactatggatcaagaacacagttcggtcacttttattccagtggtaacagacatggtaatatcacagaaaggcacaaaaaacactataatgaaacttccaatatgtctatctatgacatcctaagaccaggaactcctagggaaggttttaaaaccttttctcctaggacaagcacaatttatgatatgtataggacaagggagcccagagtctttaaagaagattatgtgcaaaagaatacttttggcagtacttcgctgtgttttgacagcaggcaacggtcggccttaccagccacagggcatttcacagcaagaagcttacattttccagccacaactcagagcaagagtgggtttataccaccaaggcaccagcagagtccaaagagaactcctttatcatccatcatatggaacagatcagattcctctagagacagggagaaccaggaagagttcctgagggcaccatcaccaatggaaattgatcccgctgacaagtatgtgtatcccaggggttttcaggagaataagagatatgaatcgtaccattcacagaatgtttaccaacgtgttagtttaaatgctcccatggagaatgcaatgagtcccgacacttttgagaactcagagaacatgccattctaccatcaaagcaacacatttaccagatctttcttcagcaatacctttggacgaagcggagaacagaggagatttggacaaggtcctttttggggccaagagaaaggacattctttctggtctgactttcatcgaagcaggaaatcattcagttcttctgacagagactttgaaatgatttccatggaagcaaatagtgtatcagccattcatggccataatgtttcttctgaacactgggaatcattttcttctggttatggaacagatgtttccagaggccaagaagagccacatccttggcagtttgattttcagagatccacactggatagcatggtggtatcacatggtaatgagacccagttgactcctcattttggcacaccaaatgtttgctccatgactggttcaagctatcacgtcaaatctagtgagttggtaagtcaacaggacagttctcctgtagaagtacatataaacaaagaagcttcctcatttggaattgctcagactctagcatcctcattcaaaacttccttttcccagatttctgatgacagaaggaatcctcagagtcccaacttgcagaatcccacagtcactttgcagaaaatttttccaaataagcctgcctctcatccaatgagaagccatacagaagtcactgtgaccagcagcaattcagttgactctctgcctcttgccaaaagccagcccaatatcttggtcacagaagtaaataatgagaaagacttaaatgaatctatttcagaagaagacaaacagctaagcaagatggaccagacaaacaaggcaggtgaaataccccaacctgtttcacagacagggatctcaaactctttacctgattttcaaaatcccttatcccaggactcagccaagagcaacgggtttggttttaatgcatctaccataataagttcaaaaaagtcacccagagtcttttccaggaaagatacctccaaaatgtatataccgcacacagataaatccaatgacattaaacaagataagaggtttactgaaaacagaaaacttggctcaacagcttcccttcctttcattcaggaacacagaacaccaccatctttccccaggacagaccaaggttgtcaccaggaattaactgtaaataatgaagatatttcaagaattattacaaataaccactggagctctgcactgactgatactcaaaatgcacaatactcaaaatgcaagttaactcctggccacaagacctcgtgtgattctttagatctgtcatcagctgcactaccagattcctcaccatcaaagaattcttcccttgatgctcctgtggttccatctactacagtgttctccaggagaagtccttcagacaaagatccatcgctaggagaaagagaagaaaaagacaatgctgggaagaaccaaaagaatcagtttattgtaagccactcagaaaaccaagagagaaatgatagtcctgtgcctacacatgatgaagtggttgatgtcaaatgccattcacactctccttttaggaatgaaagaggaaaaggaaaaataaggcatcatatatcctgtattgaaaagttaagcaaaacagaaagtatatcagtacccaccagtgatcacaggagcctcattgaagcaaatcaaagcaattccaaagtttctgaacttgacacaatttattgtaccttgccaagaaaatcaagcagttttctcatacatggcaggcagtcaggaagtaaaataatggctgcttcattgaggaatgggccacctcccttccaaatcaaaaataatgtggaagatgcaatggggaactatatgttaaacaaatttagtcccagttctcctgagtcagcgaatgaatgttccaaagtcctttcagactcagccctggaagcacctgaagccacagagagaatgacaaatgtaaaaagcagtggatctacttccgttagaaaaggaccacttccattcctcatcaacagggctatgtcatgtccctcaggggagccacatgcctcaactggaagagaaggaagaaaaaagccattgacctcaggcatggatgcttctgagctaacaccaagggcttgggagagaatcattagccctgtggaaagtgactcatctgttagagattgttctttaaccaaaagacaacaccaaaaggaaaacttccaagaatacactgagaaagagggtaaaatggctgcctccaggagaagtgtatttgctctttcaaatgaagaccctttacctttttgctcagacttgtcaggaaaagaacgtgggaaaacattacataaagttaagacgactagtacgttttctgtttctggtgatgaagataatgtaaaatgtctggaggtggtctcaatatattacactctaccgaggaaacccagcaaaaaattctgtaacctccttcaacagtatacacaaaatactaatttacttatagaatcacctcaagtggagactgaaacatttcctaacgctttagaaaaagacaaacagaattattctacacgagagcagtcaggaacaccttcatgtgaaaatctaaagatgtccgtcaactctgatcagacgctcaccactgaaaatatgactgccttccgattatcaaatagggggcccctagctcctacattacaggaaatggcttctgttgaggcagctgtttctcttcctgaagaggaatctaaagctagagagattttttcagataatttagctaaaacacctctaggtgattcagaaaacaagaaggaaagaggcaaaaagttgcaaagtgaaaccctgcatacttcattgatgcttcagagaaaaaatgtatccgaagaaaaatctgaaaattgtcaacaatccattaattcaagtaacagtggtccctctagtcttccagctctttcagaagttaatattggaaattcccaaactagaagaagttcttgggagtgtacagggagtggtagagccattccatttactggaagtggcaagtgtccccagaaagatcacacatccacagctgtaggtgatggctccagtggatcacagcctagggaaggcagaggggacattggaaccaactgccaaaaaatgactaataaaacactttctcactcagagagtcaagtctttgcccttactccagcattgcataaactacagcttggtgaggagactcagtcagatgaaccaaacttagagagtctgcagtctgaaccaagagaattacctcaaagaagtcaggaggcaaatatgacagagagcaggaaggctgaagatgaaatgcagaagtcagcttgggatcaaccttcacttcctgaaggaaacaaaaataaaaccaacttggatgacctagtaaagggggaaaatagatcttcagttaaacacagattggcagccatgtctaaagccagcagaaaattcccagctaaagatgtaagccccagaagacatgtagctactatcttcccccaaagtggaagcagatctggctttgaccatttatctcttggcacagtggagtgcaacccactgttccctgagcctactccaaaatctgcagagtccattggcgaaagcaggttgagtgagaacggaaagcatgtgaagaaatccgagaaccttctccccattactgtactacccaacagagaaccttctacacacgtcagcaaccagaagtctaacagcatttcacaacgacatcagaatgagtttaaaaacgtctcagaatcaccatcaaagcatgagaattctaaagacgtcacagcagctcagaatttagtaagagaatcaggagccccatcacccatcacattcaccagcctcagggaagcagaattctctgacaatcagaggaggctgagccctccttttccactggagcctgcacagaaatctagagtaagcagtccactggccagttttctgcagcaacaaaggagtgcttcatctctggagtgggaacctgagccacacctctatcgttcaaagagtttaaaaagcattaatgttcatggcgatctactacgaaaaagccatcctccaaaagtcagggagcgccatttttctgaaagcacttctattgacaatgccctgagtcgactgacccttgggaatgaattctctgtcaacaatgggtacagtcgaagattcagatctttttctgaactcccctcctgtgatggaaatgaaagttgggcttatcgcagcgggacaaaaacaggtcccaggtctgcaatatctatatacagacctatcgactatgggatctttgggaaagaacaacagttagctttcttagaaaatgtaaagaggtcacttacacaaggaagattatggaaaccaagttttcttaagaaccctggcttcctaaaagatgatttgaggaaccctcccaacccctcagagtcattaagctcaaattctcccagtagtcaggtgccagaagatggcttatctccaagtgaaccgcttaatatctatgaggatgacccagtggactcaaattgtgacacagacacaaccacagatgatgaatactacctggatgaaaatgacaaagagtcagaactgtgaggctttttcaataaaatgctttacttttttcaccaaaagcttataatggaactaaggtgtacatgtgcatgtgcatggaaggataaaagatctagtctgggcagtgtctgctctgaaatgtcccacatctccttttttttcctccacaccctatatagacacttcctgaatgctagaacaatgaattcttgttttgagagagtctctgctattttctatctctgtaaatgttcttagcctgcctttccaccactcccacttaatccctgattcactgtctgatttgggctttctgctttacttccctcctaacatttttcatctttaattgtgatttacaaccctaatatcccaggcacatacaaaacttatgaattacccagcacaactgtgaaactctgtattgcttcttccggtccacaccctatactcatgacattaaataaaaggtagggatgataacagtggggtaaatattatcatcctgtttgactcatgaacatttaggaagtttaaggtggtgatcttctctttcaaacaaagataaaggaatttattttttaacctgagaaactgattgcaaaaaggaaaaaaaaaagataaaggaattttgtaagtacttcctgttatatccgtagtggagcctgggaggcacatggtcaaagcacatgttgaggttatagattaggacctgaatccctagtaagccaatagaaggttagcagtcctagaaattcctctgaaaccgtgggggactggctggattattaagggcttttagtcaagccaaggacttaggccaggcaacctgaccatacagaaagttgcctggtcacagaatttctgcttatgaagagaacatagctgaggagcagaggtaggaagtaggtatcccttcatgggaccgacttacctttactgcagttctctcagcaactggcttttcccatttcctcagaactatccattttcacattttcttttttttgtttttgttttttgtttggttttgttttgtttttgttttttggagacggagttttgctctgtcacccaggctggagtgcagtggcatgatctgggctcactgcaacctccgcctcccgggttcaagcgattctcctgcctcagcctccagagtagctgggatcacaggcgcacccaggcgcacgctgccacgcccagctaatatttttgtattttagtagagacggggtttcaccgtgttgcccaggctggtctcgaactcctgagctcaggcaatccgcccacttcagcctcccagagtgctaggattacaggcatgagctaccatgcccagtctttttttgttttgttttgtttttgtttttgttttgaggtggagtcttgttcttgttgctcaggctagagtgcaatggcatgatctcagcttactgcaacctcctcctcccaagttcaggcaattctcctgcctcagcctcccaagtagctgggactacaggcacccaccaccacacctggctaatttttttttttttttttttttttttggtatttttagtagagttggagtttcaccaggttggccaggctggtctcaaacttctgacctcaggtgatctgcccacctcggcctcccaaactgctgggattacaggcatgagccaccgtgcctggcccacattttctttaattgcaaggtagaacgcttcttttcaggtggggcattttagtcccaaatatcaagtgggaaccttggccaagtccctaaaatgccatcaagtcagatctgacaccctggaattcattctttgctgcaggatcatctacgaaacccttgggaaattctaaggcagagctcctaagggcttgtcactatgattcagtgatttatctagagtaaatcacttatgatacccactgatattttggctttcctaactctttatttgccatgcagaacctcgggggatttctctcctaattcaggataaagaccaatagatggcagtgaagataatctgctttaactacagacagcatggattcctggatctcaatactatgatagtcaacatgagtggattttatcttgcttggtttatatttgcttcgcgacctaatctaattttccattttttatacctagtctgtttcatcattataaactaagaataatgatagatgttggtgaagtgtatagagatctggaactgatagagagttaagaaagaactatgttgttgttatccttctaatcattcccttacatagacgcaaaatgcgtgggttactttacatggttcccatgcaactcaaagctaatgaacatgcggtaactaacatgaaagctattccctaaatctgtcaactattttaaacttcaagctctgaccaatcctgagctcagaaagctcaaaaatcaaatattgtgaacttttcaatgcaaatttgtatggtaaagaataaataacactatttcttggttaatatatgtttgtaaattctgcctttcctctttttctatttatctgattattattattattattattattttctttgagacagagtctcactctgttgcccaggctggagtgcaatggcgcaatctcggctcactgcaacctccgcctcccaggttcaagcgattctcctgcctcagcttcccgagtagctgggattacaggtgcccaccaccacgcccagctaatttttgtatttttagcagagacggggtttcgccatgttggccaggctggtttcgaactcctgacctcaggtgatccgcctgcctcagcctcccaaactgctgggattataggcatgagccacctcgccagccctatttatctgattatttaagtaaaactttaataaaccatgacctacattttctatgcaattttaagatactcagagttaatattttaatattgaggttcttgatttttttaatgatcagctttcaaattatatttcagtatatactctgagtctacgtgtatgctacaaaaggtgaaatgaagttagcttatttttcagtgagtttaggctatattaagagttaggtaagttaggtaagggtgaaactgctttggggcccagactgcgctggaatgtactgtttaaattcaaaggtaattgatggccagtgttcagttgctctatttgtaacgtttgcatgttggtctggctgaagtatcaggaaaacacaaaattcatgaaaatagcaccttttataattttatacttttataaagcacttgttaaagaagtatagcaaatttctatgtattttaacatacaagtcgctgcattttaatgttcatttttggtatagctatggtaacttataatagtcatttttatattcataacttgttttctgaaagatatagtcattattaaaataaacattcatgtaaatggagtaaatcataggggaatcaatcgtaataaataccttataaattataaacttgtttagatactagatttctataaccataaattttatactgtaaagtctgtttaaaatagggtttaatgaagttattttaatttttagagactcccctctaaataatttactcctacattgtaaatacattgatgccaacaaaattccaactgctactaacaaaggtttggttggtgataagctaataacagctactttgtgtaggaggtaaatatgtgtactggagggggtaaaaatccatttaggttatggcaaagatgggaatcaaactgtaaaactcatagccccataaaattaatattctttgttaagtgccagagggtttaagagaacttcttgcttagagtttattgataataataatgcttcagaatatcccatttaaatgtacagtgtaaatatgtaaaatattttacttcccaggcaagtttgtggctgtattgccacttagtggctctttgtgactggcagttctgtatatctgaaacaaataagctgtaagcacttttgttaaaactttgtcaaataatccttttatgtacttgttctcagacctgttctctggttatgaaatgtgttaaagacaaggtgcaaatttaaaacaatgcctgtattgaaataaatgacttaaacagatgca

SEQ ID NO: 10181 - DNA, 10142 bp, Homo sapiens
  source 1..10142: mol_type = unassigned DNA
gataaagctactggtgcagccactgaaccacagggctttctcttccttcactctgcctctttctgattgggaacacacaacagttgttttaaagctttccctggagggtgagtgataagaaacctattacctggaagtatcgcctttctaaagtaggagaacaaaaggccacactttccccagatgcaaacttcagaagacaaagagggatatcagatggcttcagggagtgactggtgaatggtttgaagaaattcaaagaaaaaagttttgcaatgaaacagatgttagccaaatgttaaaacaaccacttacatacaggctaagtaaggagatggcaaaaaatgatccgatagaattacctacatcaagatctaaaaatgtaactaatcaaaaaaagccgacacctttttcttcccggatgagcttcagatcgtcatttgcttccctgttctcattcaggaaatctggaaaggagacttcaaagcttccatcactgggacagaaaggatgtgatggccatgcaggacctcctatgcctgtgaggggagctgctgtgcaggcaaaaatatacaattcacctctggaaaatcatctagttgacagtacatttgtcccaaagccagcagtcatgagggaggagagtggcatgcctccaccgtgggatgcttcactgctggagaatgagtttttccaagttttagatgacttggatagcaaattggctcaggaacagtctgcaagctcagtgaataccagaacacccctcaactatggatcaagaacacagttcggtcacttttattccagtggtaacagacatggtaatatcacagaaaggcacaaaaaacactataatgaaacttccaatatgtctatctatgacatcctaagaccaggaactcctagggaaggttttaaaaccttttctcctaggacaagcacaatttatgatatgtataggacaagggagcccagagtctttaaagaagattatgtgcaaaagaatacttttggcagtacttcgctgtgttttgacagcaggcaacggtcggccttaccagccacagggcatttcacagcaagaagcttacattttccagccacaactcagagcaagagtgggtttataccaccaaggcaccagcagagtccaaagagaactcctttatcatccatcatatggaacagatcagattcctctagagacagggagaaccaggaagagttcctgagggcaccatcaccaatggaaattgatcccgctgacaagtatgtgtatcccaggggttttcaggagaataagagatatgaatcgtaccattcacagaatgtttaccaacgtgttagtttaaatgctcccatggagaatgcaatgagtcccgacacttttgagaactcagagaacatgccattctaccatcaaagcaacacatttaccagatctttcttcagcaatacctttggacgaagcggagaacagaggagatttggacaaggtcctttttggggccaagagaaaggacattctttctggtctgactttcatcgaagcaggaaatcattcagttcttctgacagagactttgaaatgatttccatggaagcaaatagtgtatcagccattcatggccataatgtttcttctgaacactgggaatcattttcttctggttatggaacagatgtttccagaggccaagaagagccacatccttggcagtttgattttcagagatccacactggatagcatggtggtatcacatggtaatgagacccagttgactcctcattttggcacaccaaatgtttgctccatgactggttcaagctatcacgtcaaatctagtgagttggtaagtcaacaggacagttctcctgtagaagtacatataaacaaagaagcttcctcatttggaattgctcagactctagcatcctcattcaaaacttccttttcccagatttctgatgacagaaggaatcctcagagtcccaacttgcagaatcccacagtcactttgcagaaaatttttccaaataagcctgcctctcatccaatgagaagccatacagaagtcactgtgaccagcagcaattcagttgactctctgcctcttgccaaaagccagcccaatatcttggtcacagaagtaaataatgagaaagacttaaatgaatctatttcagaagaagacaaacagctaagcaagatggaccagacaaacaaggcaggtgaaataccccaacctgtttcacagacagggatctcaaactctttacctgattttcaaaatcccttatcccaggactcagccaagagcaacgggtttggttttaatgcatctaccataataagttcaaaaaagtcacccagagtcttttccaggaaagatacctccaaaatgtatataccgcacacagataaatccaatgacattaaacaagataagaggtttactgaaaacagaaaacttggctcaacagcttcccttcctttcattcaggaacacagaacaccaccatctttccccaggacagaccaaggttgtcaccaggaattaactgtaaataatgaagatatttcaagaattattacaaataaccactggagctctgcactgactgatactcaaaatgcacaatactcaaaatgcaagttaactcctggccacaagacctcgtgtgattctttagatctgtcatcagctgcactaccagattcctcaccatcaaagaattcttcccttgatgctcctgtggttccatctactacagtgttctccaggagaagtccttcagacaaagatccatcgctaggagaaagagaagaaaaagacaatgctgggaagaaccaaaagaatcagtttattgtaagccactcagaaaaccaagagagaaatgatagtcctgtgcctacacatgatgaagtggttgatgtcaaatgccattcacactctccttttaggaatgaaagaggaaaaggaaaaataaggcatcatatatcctgtattgaaaagttaagcaaaacagaaagtatatcagtacccaccagtgatcacaggagcctcattgaagcaaatcaaagcaattccaaagtttctgaacttgacacaatttattgtaccttgccaagaaaatcaagcagttttctcatacatggcaggcagtcaggaagtaaaataatggctgcttcattgaggaatgggccacctcccttccaaatcaaaaataatgtggaagatgcaatggggaactatatgttaaacaaatttagtcccagttctcctgagtcagcgaatgaatgttccaaagtcctttcagactcagccctggaagcacctgaagccacagagagaatgacaaatgtaaaaagcagtggatctacttccgttagaaaaggaccacttccattcctcatcaacagggctatgtcatgtccctcaggggagccacatgcctcaactggaagagaaggaagaaaaaagccattgacctcaggcatggatgcttctgagctaacaccaagggcttgggagagaatcattagccctgtggaaagtgactcatctgttagagattgttctttaaccaaaagacaacaccaaaaggaaaacttccaagaatacactgagaaagagggtaaaatggctgcctccaggagaagtgtatttgctctttcaaatgaagaccctttacctttttgctcagacttgtcaggaaaagaacgtgggaaaacattacataaagttaagacgactagtacgttttctgtttctggtgatgaagataatgtaaaatgtctggaggtggtctcaatatattacactctaccgaggaaacccagcaaaaaattctgtaacctccttcaacagtatacacaaaatactaatttacttatagaatcacctcaagtggagactgaaacatttcctaacgctttagaaaaagacaaacagaattattctacacgagagcagtcaggaacaccttcatgtgaaaatctaaagatgtccgtcaactctgatcagacgctcaccactgaaaatatgactgccttccgattatcaaatagggggcccctagctcctacattacaggaaatggcttctgttgaggcagctgtttctcttcctgaagaggaatctaaagctagagagattttttcagataatttagctaaaacacctctaggtgattcagaaaacaagaaggaaagaggcaaaaagttgcaaagtgaaaccctgcatacttcattgatgcttcagagaaaaaatgtatccgaagaaaaatctgaaaattgtcaacaatccattaattcaagtaacagtggtccctctagtcttccagctctttcagaagttaatattggaaattcccaaactagaagaagttcttgggagtgtacagggagtggtagagccattccatttactggaagtggcaagtgtccccagaaagatcacacatccacagctgtaggtgatggctccagtggatcacagcctagggaaggcagaggggacattggaaccaactgccaaaaaatgactaataaaacactttctcactcagagagtcaagtctttgcccttactccagcattgcataaactacagcttggtgaggagactcagtcagatgaaccaaacttagagagtctgcagtctgaaccaagagaattacctcaaagaagtcaggaggcaaatatgacagagagcaggaaggctgaagatgaaatgcagaagtcagcttgggatcaaccttcacttcctgaaggaaacaaaaataaaaccaacttggatgacctagtaaagggggaaaatagatcttcagttaaacacagattggcagccatgtctaaagccagcagaaaattcccagctaaagatgtaagccccagaagacatgtagctactatcttcccccaaagtggaagcagatctggctttgaccatttatctcttggcacagtggagtgcaacccactgttccctgagcctactccaaaatctgcagagtccattggcgaaagcaggttgagtgagaacggaaagcatgtgaagaaatccgagaaccttctccccattactgtactacccaacagagaaccttctacacacgtcagcaaccagaagtctaacagcatttcacaacgacatcagaatgagtttaaaaacgtctcagaatcaccatcaaagcatgagaattctaaagacgtcacagcagctcagaatttagtaagagaatcaggagccccatcacccatcacattcaccagcctcagggaagcagaattctctgacaatcagaggaggctgagccctccttttccactggagcctgcacagaaatctagagtaagcagtccactggccagttttctgcagcaacaaaggagtgcttcatctctggagtgggaacctgagccacacctctatcgttcaaagagtttaaaaagcattaatgttcatggcgatctactacgaaaaagccatcctccaaaagtcagggagcgccatttttctgaaagcacttctattgacaatgccctgagtcgactgacccttgggaatgaattctctgtcaacaatgggtacagtcgaagattcagatctttttctgaactcccctcctgtgatggaaatgaaagttgggcttatcgcagcgggacaaaaacaggtcccaggtctgcaatatctatatacagacctatcgactatgggatctttgggaaagaacaacagttagctttcttagaaaatgtaaagaggtcacttacacaaggaagattatggaaaccaagttttcttaagaaccctggcttcctaaaagatgatttgaggaaccctcccaacccctcagagtcattaagctcaaattctcccagtagtcaggtgccagaagatggcttatctccaagtgaaccgcttaatatctatgaggatgacccagtggactcaaattgtgacacagacacaaccacagatgatgaatactacctggatgaaaatgacaaagagtcagaactgtgaggctttttcaataaaatgctttacttttttcaccaaaagcttataatggaactaaggtgtacatgtgcatgtgcatggaaggataaaagatctagtctgggcagtgtctgctctgaaatgtcccacatctccttttttttcctccacaccctatatagacacttcctgaatgctagaacaatgaattcttgttttgagagagtctctgctattttctatctctgtaaatgttcttagcctgcctttccaccactcccacttaatccctgattcactgtctgatttgggctttctgctttacttccctcctaacatttttcatctttaattgtgatttacaaccctaatatcccaggcacatacaaaacttatgaattacccagcacaactgtgaaactctgtattgcttcttccggtccacaccctatactcatgacattaaataaaaggtagggatgataacagtggggtaaatattatcatcctgtttgactcatgaacatttaggaagtttaaggtggtgatcttctctttcaaacaaagataaaggaatttattttttaacctgagaaactgattgcaaaaaggaaaaaaaaaagataaaggaattttgtaagtacttcctgttatatccgtagtggagcctgggaggcacatggtcaaagcacatgttgaggttatagattaggacctgaatccctagtaagccaatagaaggttagcagtcctagaaattcctctgaaaccgtgggggactggctggattattaagggcttttagtcaagccaaggacttaggccaggcaacctgaccatacagaaagttgcctggtcacagaatttctgcttatgaagagaacatagctgaggagcagaggtaggaagtaggtatcccttcatgggaccgacttacctttactgcagttctctcagcaactggcttttcccatttcctcagaactatccattttcacattttcttttttttgtttttgttttttgtttggttttgttttgtttttgttttttggagacggagttttgctctgtcacccaggctggagtgcagtggcatgatctgggctcactgcaacctccgcctcccgggttcaagcgattctcctgcctcagcctccagagtagctgggatcacaggcgcacccaggcgcacgctgccacgcccagctaatatttttgtattttagtagagacggggtttcaccgtgttgcccaggctggtctcgaactcctgagctcaggcaatccgcccacttcagcctcccagagtgctaggattacaggcatgagctaccatgcccagtctttttttgttttgttttgtttttgtttttgttttgaggtggagtcttgttcttgttgctcaggctagagtgcaatggcatgatctcagcttactgcaacctcctcctcccaagttcaggcaattctcctgcctcagcctcccaagtagctgggactacaggcacccaccaccacacctggctaatttttttttttttttttttttttttggtatttttagtagagttggagtttcaccaggttggccaggctggtctcaaacttctgacctcaggtgatctgcccacctcggcctcccaaactgctgggattacaggcatgagccaccgtgcctggcccacattttctttaattgcaaggtagaacgcttcttttcaggtggggcattttagtcccaaatatcaagtgggaaccttggccaagtccctaaaatgccatcaagtcagatctgacaccctggaattcattctttgctgcaggatcatctacgaaacccttgggaaattctaaggcagagctcctaagggcttgtcactatgattcagtgatttatctagagtaaatcacttatgatacccactgatattttggctttcctaactctttatttgccatgcagaacctcgggggatttctctcctaattcaggataaagaccaatagatggcagtgaagataatctgctttaactacagacagcatggattcctggatctcaatactatgatagtcaacatgagtggattttatcttgcttggtttatatttgcttcgcgacctaatctaattttccattttttatacctagtctgtttcatcattataaactaagaataatgatagatgttggtgaagtgtatagagatctggaactgatagagagttaagaaagaactatgttgttgttatccttctaatcattcccttacatagacgcaaaatgcgtgggttactttacatggttcccatgcaactcaaagctaatgaacatgcggtaactaacatgaaagctattccctaaatctgtcaactattttaaacttcaagctctgaccaatcctgagctcagaaagctcaaaaatcaaatattgtgaacttttcaatgcaaatttgtatggtaaagaataaataacactatttcttggttaatatatgtttgtaaattctgcctttcctctttttctatttatctgattattattattattattattattttctttgagacagagtctcactctgttgcccaggctggagtgcaatggcgcaatctcggctcactgcaacctccgcctcccaggttcaagcgattctcctgcctcagcttcccgagtagctgggattacaggtgcccaccaccacgcccagctaatttttgtatttttagcagagacggggtttcgccatgttggccaggctggtttcgaactcctgacctcaggtgatccgcctgcctcagcctcccaaactgctgggattataggcatgagccacctcgccagccctatttatctgattatttaagtaaaactttaataaaccatgacctacattttctatgcaattttaagatactcagagttaatattttaatattgaggttcttgatttttttaatgatcagctttcaaattatatttcagtatatactctgagtctacgtgtatgctacaaaaggtgaaatgaagttagcttatttttcagtgagtttaggctatattaagagttaggtaagttaggtaagggtgaaactgctttggggcccagactgcgctggaatgtactgtttaaattcaaaggtaattgatggccagtgttcagttgctctatttgtaacgtttgcatgttggtctggctgaagtatcaggaaaacacaaaattcatgaaaatagcaccttttataattttatacttttataaagcacttgttaaagaagtatagcaaatttctatgtattttaacatacaagtcgctgcattttaatgttcatttttggtatagctatggtaacttataatagtcatttttatattcataacttgttttctgaaagatatagtcattattaaaataaacattcatgtaaatggagtaaatcataggggaatcaatcgtaataaataccttataaattataaacttgtttagatactagatttctataaccataaattttatactgtaaagtctgtttaaaatagggtttaatgaagttattttaatttttagagactcccctctaaataatttactcctacattgtaaatacattgatgccaacaaaattccaactgctactaacaaaggtttggttggtgataagctaataacagctactttgtgtaggaggtaaatatgtgtactggagggggtaaaaatccatttaggttatggcaaagatgggaatcaaactgtaaaactcatagccccataaaattaatattctttgttaagtgccagagggtttaagagaacttcttgcttagagtttattgataataataatgcttcagaatatcccatttaaatgtacagtgtaaatatgtaaaatattttacttcccaggcaagtttgtggctgtattgccacttagtggctctttgtgactggcagttctgtatatctgaaacaaataagctgtaagcacttttgttaaaactttgtcaaataatccttttatgtacttgttctcagacctgttctctggttatgaaatgtgttaaagacaaggtgcaaatttaaaacaatgcctgtattgaaataaatgacttaaacagatgc

SEQ ID NO: 10182 - DNA, 2758 bp, Homo sapiens
  source 1..2758: mol_type = unassigned DNA
cactgtcgctgagaaacaagaggcagcaagcagctggtgggttgtgtgatgaggctgctggatttaacagaccactgtcctcccctcttgggtgaatggagggtttttcacttccagctttcacccgaggctgtttttgtctgatgaaagaaagagcagaccacaatgtagatttatgtgactgtagctaccagagtcactagcaaggaaatactcttcaaatagatgtgatggccatgcaggacctcctatgcctgtgaggggagctgctgtgcaggcaaaaatatacaattcacctctggaaaatcatctagttgacagtacatttgtcccaaagccagcagtcatgagggaggagagtggcatgcctccaccgtgggatgcttcactgctggagaatgagtttttccaagttttagatgacttggatagcaaattggctcaggaacagtctgcaagctcagtgaataccagaacacccctcaactatggatcaagaacacagttcggtcacttttattccagtggtaacagacatggtaatatcacagaaaggcacaaaaaacactataatgaaacttccaatatgtctatctatgacatcctaagaccaggaactcctagggaaggttttaaaaccttttctcctaggacaagcacaatttatgatatgtataggacaagggagcccagagtctttaaagaagattatgtgcaaaagaatacttttggcagtacttcgctgtgttttgacagcaggcaacggtcggccttaccagccacagggcatttcacagcaagaagcttacattttccagccacaactcagagcaagagtgggtttataccaccaaggcaccagcagagtccaaagagaactcctttatcatccatcatatggaacagatcagattcctctagagacagggagaaccaggaagagttcctgagggcaccatcaccaatggaaattgatcccgctgacaagtatgtgtatcccaggggttttcaggagaataagagatatgaatcgtaccattcacagaatgtttaccaacgtgttagtttaaatgctcccatggagaatgcaatgagtcccgacacttttgagaactcagagaacatgccattctaccatcaaagcaacacatttaccagatctttcttcagcaatacctttggacgaagcggagaacagaggagatttggacaaggtcctttttggggccaagagaaaggacattctttctggtctgactttcatcgaagcaggaaatcattcagttcttctgacagagactttgaaatgatttccatggaagcaaatagtgtatcagccattcatggccataatgtttcttctgaacactgggaatcattttcttctggttatggaacagatgtttccagaggccaagaagagccacatccttggcagtttgattttcagagatccacactggatagcatggtggtatcacatggtaatgagacccagttgactcctcattttggcacaccaaatgtttgctccatgactggttcaagctatcacgtcaaatctagtgagttggtaagtcaacaggacagttctcctgtagaagtacatataaacaaagaagcttcctcatttggaattgctcagactctagcatcctcattcaaaacttccttttcccagatttctgatgacagaaggaatcctcagagtcccaacttgcagaatcccacagtcactttgcagaaaatttttccaaataagcctgcctctcatccaatgagaagccatacagaagtcactgtgaccagcagcaattcagttgactctctgcctcttgccaaaagccagcccaatatcttggtcacagaagtaaataatgagaattctaaagacgtcacagcagctcagaatttagtaagagaatcaggagccccatcacccatcacattcaccagcctcagggaagcagaattctctgacaatcagaggaggctgagccctccttttccactggagcctgcacagaaatctagagtaagcagtccactggccagttttctgcagcaacaaaggagtgcttcatctctggagtgggaacctgagccacacctctatcgttcaaagagtttaaaaagcattaatgttcatggcgatctactacgaaaaagccatcctccaaaagtcagggagcgccatttttctgaaagcacttctattgacaatgccctgagtcgactgacccttgggaatgaattctctgtcaacaatgggtacagtcgaagattcagatctttttctgaactcccctcctgtgatggaaatgaaagttgggcttatcgcagcgggacaaaaacaggtcccaggtctgcaatatctatatacagacctatcgactatgggatctttgggaaagaacaacagttagctttcttagaaaatgtaaagaggtcacttacacaaggaagattatggaaaccaagttttcttaagaaccctggcttcctaaaagatgatttgaggaaccctcccaacccctcagagtcattaagctcaaattctcccagtagtcaggtgccagaagatggcttatctccaagtgaaccgcttaatatctatgaggatgacccagtggactcaaattgtgacacagacacaaccacagatgatgaatactacctggatgaaaatgacaaagagtcagaactgtgaggctttttcaataaaatgctttacttttttcaccaaaagcttataatg

SEQ ID NO: 10183 - DNA, 9828 bp, Homo sapiens
  source 1..9828: mol_type = unassigned DNA
aaataaaaggtgttggaggtcactgtcgctgagaaacaagaggcagcaagcagctggtgggttgtgtgatgaggctgctggatttaacagaccactgtcctcccctcttgggtgaatggagggtttttcacttccagctttcacccgaggctgtttttgtctgatgaaagaaagagcagaccacaatgtagatttatgtgactgtagctaccagagtcactagcaaggaaatactcttcaaatagcaggcaaaaatatacaattcacctctggaaaatcatctagttgacagtacatttgtcccaaagccagcagtcatgagggaggagagtggcatgcctccaccgtgggatgcttcactgctggagaatgagtttttccaagttttagatgacttggatagcaaattggctcaggaacagtctgcaagctcagtgaataccagaacacccctcaactatggatcaagaacacagttcggtcacttttattccagtggtaacagacatggtaatatcacagaaaggcacaaaaaacactataatgaaacttccaatatgtctatctatgacatcctaagaccaggaactcctagggaaggttttaaaaccttttctcctaggacaagcacaatttatgatatgtataggacaagggagcccagagtctttaaagaagattatgtgcaaaagaatacttttggcagtacttcgctgtgttttgacagcaggcaacggtcggccttaccagccacagggcatttcacagcaagaagcttacattttccagccacaactcagagcaagagtgggtttataccaccaaggcaccagcagagtccaaagagaactcctttatcatccatcatatggaacagatcagattcctctagagacagggagaaccaggaagagttcctgagggcaccatcaccaatggaaattgatcccgctgacaagtatgtgtatcccaggggttttcaggagaataagagatatgaatcgtaccattcacagaatgtttaccaacgtgttagtttaaatgctcccatggagaatgcaatgagtcccgacacttttgagaactcagagaacatgccattctaccatcaaagcaacacatttaccagatctttcttcagcaatacctttggacgaagcggagaacagaggagatttggacaaggtcctttttggggccaagagaaaggacattctttctggtctgactttcatcgaagcaggaaatcattcagttcttctgacagagactttgaaatgatttccatggaagcaaatagtgtatcagccattcatggccataatgtttcttctgaacactgggaatcattttcttctggttatggaacagatgtttccagaggccaagaagagccacatccttggcagtttgattttcagagatccacactggatagcatggtggtatcacatggtaatgagacccagttgactcctcattttggcacaccaaatgtttgctccatgactggttcaagctatcacgtcaaatctagtgagttggtaagtcaacaggacagttctcctgtagaagtacatataaacaaagaagcttcctcatttggaattgctcagactctagcatcctcattcaaaacttccttttcccagatttctgatgacagaaggaatcctcagagtcccaacttgcagaatcccacagtcactttgcagaaaatttttccaaataagcctgcctctcatccaatgagaagccatacagaagtcactgtgaccagcagcaattcagttgactctctgcctcttgccaaaagccagcccaatatcttggtcacagaagtaaataatgagaaagacttaaatgaatctatttcagaagaagacaaacagctaagcaagatggaccagacaaacaaggcaggtgaaataccccaacctgtttcacagacagggatctcaaactctttacctgattttcaaaatcccttatcccaggactcagccaagagcaacgggtttggttttaatgcatctaccataataagttcaaaaaagtcacccagagtcttttccaggaaagatacctccaaaatgtatataccgcacacagataaatccaatgacattaaacaagataagaggtttactgaaaacagaaaacttggctcaacagcttcccttcctttcattcaggaacacagaacaccaccatctttccccaggacagaccaaggttgtcaccaggaattaactgtaaataatgaagatatttcaagaattattacaaataaccactggagctctgcactgactgatactcaaaatgcacaatactcaaaatgcaagttaactcctggccacaagacctcgtgtgattctttagatctgtcatcagctgcactaccagattcctcaccatcaaagaattcttcccttgatgctcctgtggttccatctactacagtgttctccaggagaagtccttcagacaaagatccatcgctaggagaaagagaagaaaaagacaatgctgggaagaaccaaaagaatcagtttattgtaagccactcagaaaaccaagagagaaatgatagtcctgtgcctacacatgatgaagtggttgatgtcaaatgccattcacactctccttttaggaatgaaagaggaaaaggaaaaataaggcatcatatatcctgtattgaaaagttaagcaaaacagaaagtatatcagtacccaccagtgatcacaggagcctcattgaagcaaatcaaagcaattccaaagtttctgaacttgacacaatttattgtaccttgccaagaaaatcaagcagttttctcatacatggcaggcagtcaggaagtaaaataatggctgcttcattgaggaatgggccacctcccttccaaatcaaaaataatgtggaagatgcaatggggaactatatgttaaacaaatttagtcccagttctcctgagtcagcgaatgaatgttccaaagtcctttcagactcagccctggaagcacctgaagccacagagagaatgacaaatgtaaaaagcagtggatctacttccgttagaaaaggaccacttccattcctcatcaacagggctatgtcatgtccctcaggggagccacatgcctcaactggaagagaaggaagaaaaaagccattgacctcaggcatggatgcttctgagctaacaccaagggcttgggagagaatcattagccctgtggaaagtgactcatctgttagagattgttctttaaccaaaagacaacaccaaaaggaaaacttccaagaatacactgagaaagagggtaaaatggctgcctccaggagaagtgtatttgctctttcaaatgaagaccctttacctttttgctcagacttgtcaggaaaagaacgtgggaaaacattacataaagttaagacgactagtacgttttctgtttctggtgatgaagataatgtaaaatgtctggaggtggtctcaatatattacactctaccgaggaaacccagcaaaaaattctgtaacctccttcaacagtatacacaaaatactaatttacttatagaatcacctcaagtggagactgaaacatttcctaacgctttagaaaaagacaaacagaattattctacacgagagcagtcaggaacaccttcatgtgaaaatctaaagatgtccgtcaactctgatcagacgctcaccactgaaaatatgactgccttccgattatcaaatagggggcccctagctcctacattacaggaaatggcttctgttgaggcagctgtttctcttcctgaagaggaatctaaagctagagagattttttcagataatttagctaaaacacctctaggtgattcagaaaacaagaaggaaagaggcaaaaagttgcaaagtgaaaccctgcatacttcattgatgcttcagagaaaaaatgtatccgaagaaaaatctgaaaattgtcaacaatccattaattcaagtaacagtggtccctctagtcttccagctctttcagaagttaatattggaaattcccaaactagaagaagttcttgggagtgtacagggagtggtagagccattccatttactggaagtggcaagtgtccccagaaagatcacacatccacagctgtaggtgatggctccagtggatcacagcctagggaaggcagaggggacattggaaccaactgccaaaaaatgactaataaaacactttctcactcagagagtcaagtctttgcccttactccagcattgcataaactacagcttggtgaggagactcagtcagatgaaccaaacttagagagtctgcagtctgaaccaagagaattacctcaaagaagtcaggaggcaaatatgacagagagcaggaaggctgaagatgaaatgcagaagtcagcttgggatcaaccttcacttcctgaaggaaacaaaaataaaaccaacttggatgacctagtaaagggggaaaatagatcttcagttaaacacagattggcagccatgtctaaagccagcagaaaattcccagctaaagatgtaagccccagaagacatgtagctactatcttcccccaaagtggaagcagatctggctttgaccatttatctcttggcacagtggagtgcaacccactgttccctgagcctactccaaaatctgcagagtccattggcgaaagcaggttgagtgagaacggaaagcatgtgaagaaatccgagaaccttctccccattactgtactacccaacagagaaccttctacacacgtcagcaaccagaagtctaacagcatttcacaacgacatcagaatgagtttaaaaacgtctcagaatcaccatcaaagcatgagaattctaaagacgtcacagcagctcagaatttagtaagagaatcaggagccccatcacccatcacattcaccagcctcagggaagcagaattctctgacaatcagaggaggctgagccctccttttccactggagcctgcacagaaatctagagtaagcagtccactggccagttttctgcagcaacaaaggagtgcttcatctctggagtgggaacctgagccacacctctatcgttcaaagagtttaaaaagcattaatgttcatggcgatctactacgaaaaagccatcctccaaaagtcagggagcgccatttttctgaaagcacttctattgacaatgccctgagtcgactgacccttgggaatgaattctctgtcaacaatgggtacagtcgaagattcagatctttttctgaactcccctcctgtgatggaaatgaaagttgggcttatcgcagcgggacaaaaacaggtcccaggtctgcaatatctatatacagacctatcgactatgggatctttgggaaagaacaacagttagctttcttagaaaatgtaaagaggtcacttacacaaggaagattatggaaaccaagttttcttaagaaccctggcttcctaaaagatgatttgaggaaccctcccaacccctcagagtcattaagctcaaattctcccagtagtcaggtgccagaagatggcttatctccaagtgaaccgcttaatatctatgaggatgacccagtggactcaaattgtgacacagacacaaccacagatgatgaatactacctggatgaaaatgacaaagagtcagaactgtgaggctttttcaataaaatgctttacttttttcaccaaaagcttataatggaactaaggtgtacatgtgcatgtgcatggaaggataaaagatctagtctgggcagtgtctgctctgaaatgtcccacatctccttttttttcctccacaccctatatagacacttcctgaatgctagaacaatgaattcttgttttgagagagtctctgctattttctatctctgtaaatgttcttagcctgcctttccaccactcccacttaatccctgattcactgtctgatttgggctttctgctttacttccctcctaacatttttcatctttaattgtgatttacaaccctaatatcccaggcacatacaaaacttatgaattacccagcacaactgtgaaactctgtattgcttcttccggtccacaccctatactcatgacattaaataaaaggtagggatgataacagtggggtaaatattatcatcctgtttgactcatgaacatttaggaagtttaaggtggtgatcttctctttcaaacaaagataaaggaatttattttttaacctgagaaactgattgcaaaaaggaaaaaaaaaagataaaggaattttgtaagtacttcctgttatatccgtagtggagcctgggaggcacatggtcaaagcacatgttgaggttatagattaggacctgaatccctagtaagccaatagaaggttagcagtcctagaaattcctctgaaaccgtgggggactggctggattattaagggcttttagtcaagccaaggacttaggccaggcaacctgaccatacagaaagttgcctggtcacagaatttctgcttatgaagagaacatagctgaggagcagaggtaggaagtaggtatcccttcatgggaccgacttacctttactgcagttctctcagcaactggcttttcccatttcctcagaactatccattttcacattttcttttttttgtttttgttttttgtttggttttgttttgtttttgttttttggagacggagttttgctctgtcacccaggctggagtgcagtggcatgatctgggctcactgcaacctccgcctcccgggttcaagcgattctcctgcctcagcctccagagtagctgggatcacaggcgcacccaggcgcacgctgccacgcccagctaatatttttgtattttagtagagacggggtttcaccgtgttgcccaggctggtctcgaactcctgagctcaggcaatccgcccacttcagcctcccagagtgctaggattacaggcatgagctaccatgcccagtctttttttgttttgttttgtttttgtttttgttttgaggtggagtcttgttcttgttgctcaggctagagtgcaatggcatgatctcagcttactgcaacctcctcctcccaagttcaggcaattctcctgcctcagcctcccaagtagctgggactacaggcacccaccaccacacctggctaatttttttttttttttttttttttttggtatttttagtagagttggagtttcaccaggttggccaggctggtctcaaacttctgacctcaggtgatctgcccacctcggcctcccaaactgctgggattacaggcatgagccaccgtgcctggcccacattttctttaattgcaaggtagaacgcttcttttcaggtggggcattttagtcccaaatatcaagtgggaaccttggccaagtccctaaaatgccatcaagtcagatctgacaccctggaattcattctttgctgcaggatcatctacgaaacccttgggaaattctaaggcagagctcctaagggcttgtcactatgattcagtgatttatctagagtaaatcacttatgatacccactgatattttggctttcctaactctttatttgccatgcagaacctcgggggatttctctcctaattcaggataaagaccaatagatggcagtgaagataatctgctttaactacagacagcatggattcctggatctcaatactatgatagtcaacatgagtggattttatcttgcttggtttatatttgcttcgcgacctaatctaattttccattttttatacctagtctgtttcatcattataaactaagaataatgatagatgttggtgaagtgtatagagatctggaactgatagagagttaagaaagaactatgttgttgttatccttctaatcattcccttacatagacgcaaaatgcgtgggttactttacatggttcccatgcaactcaaagctaatgaacatgcggtaactaacatgaaagctattccctaaatctgtcaactattttaaacttcaagctctgaccaatcctgagctcagaaagctcaaaaatcaaatattgtgaacttttcaatgcaaatttgtatggtaaagaataaataacactatttcttggttaatatatgtttgtaaattctgcctttcctctttttctatttatctgattattattattattattattattttctttgagacagagtctcactctgttgcccaggctggagtgcaatggcgcaatctcggctcactgcaacctccgcctcccaggttcaagcgattctcctgcctcagcttcccgagtagctgggattacaggtgcccaccaccacgcccagctaatttttgtatttttagcagagacggggtttcgccatgttggccaggctggtttcgaactcctgacctcaggtgatccgcctgcctcagcctcccaaactgctgggattataggcatgagccacctcgccagccctatttatctgattatttaagtaaaactttaataaaccatgacctacattttctatgcaattttaagatactcagagttaatattttaatattgaggttcttgatttttttaatgatcagctttcaaattatatttcagtatatactctgagtctacgtgtatgctacaaaaggtgaaatgaagttagcttatttttcagtgagtttaggctatattaagagttaggtaagttaggtaagggtgaaactgctttggggcccagactgcgctggaatgtactgtttaaattcaaaggtaattgatggccagtgttcagttgctctatttgtaacgtttgcatgttggtctggctgaagtatcaggaaaacacaaaattcatgaaaatagcaccttttataattttatacttttataaagcacttgttaaagaagtatagcaaatttctatgtattttaacatacaagtcgctgcattttaatgttcatttttggtatagctatggtaacttataatagtcatttttatattcataacttgttttctgaaagatatagtcattattaaaataaacattcatgtaaatggagtaaatcataggggaatcaatcgtaataaataccttataaattataaacttgtttagatactagatttctataaccataaattttatactgtaaagtctgtttaaaatagggtttaatgaagttattttaatttttagagactcccctctaaataatttactcctacattgtaaatacattgatgccaacaaaattccaactgctactaacaaaggtttggttggtgataagctaataacagctactttgtgtaggaggtaaatatgtgtactggagggggtaaaaatccatttaggttatggcaaagatgggaatcaaactgtaaaactcatagccccataaaattaatattctttgttaagtgccagagggtttaagagaacttcttgcttagagtttattgataataataatgcttcagaatatcccatttaaatgtacagtgtaaatatgtaaaatattttacttcccaggcaagtttgtggctgtattgccacttagtggctctttgtgactggcagttctgtatatctgaaacaaataagctgtaagcacttttgttaaaactttgtcaaataatccttttatgtacttgttctcagacctgttctctggttatgaaatgtgttaaagacaaggtgcaaatttaaaacaatgcctgtattgaaataaatgacttaaacagatgc

SEQ ID NO: 10184 - DNA, 6542 bp, Homo sapiens
  source 1..6542: mol_type = unassigned DNA
gaaacatgtcattaagtttcttaaatgacgaagaggccaggaagatccttcaggtgctggaaaggaatgaggagttacagagggccgagaaggacaggatcagcaaacttcagaagacaaagagggatatcagatggcttcagggagtgactggtgaatggtttgaagaaattcaaagaaaaaagttttgcaatgaaacagatgttagccaaatgttaaaacaaccacttacatacaggctaagtaaggagatggcaaaaaatgatccgatagaattacctacatcaagatctaaaaatgtaactaatcaaaaaaagccgacacctttttcttcccggatgagcttcagatcgtcatttgcttccctgttctcattcaggaaatctggaaaggagacttcaaagcttccatcactgggacagaaaggatgtgatggccatgcaggacctcctatgcctgtgaggggagctgctgtgcaggcaaaaatatacaattcacctctggaaaatcatctagttgacagtacatttgtcccaaagccagcagtcatgagggaggagagtggcatgcctccaccgtgggatgcttcactgctggagaatgagtttttccaagttttagatgacttggatagcaaattggctcaggaacagtctgcaagctcagtgaataccagaacacccctcaactatggatcaagaacacagttcggtcacttttattccagtggtaacagacatggtaatatcacagaaaggcacaaaaaacactataatgaaacttccaatatgtctatctatgacatcctaagaccaggaactcctagggaaggttttaaaaccttttctcctaggacaagcacaatttatgatatgtataggacaagggagcccagagtctttaaagaagattatgtgcaaaagaatacttttggcagtacttcgctgtgttttgacagcaggcaacggtcggccttaccagccacagggcatttcacagcaagaagcttacattttccagccacaactcagagcaagagtgggtttataccaccaaggcaccagcagagtccaaagagaactcctttatcatccatcatatggaacagatcagattcctctagagacagggagaaccaggaagagttcctgagggcaccatcaccaatggaaattgatcccgctgacaagtatgtgtatcccaggggttttcaggagaataagagatatgaatcgtaccattcacagaatgtttaccaacgtgttagtttaaatgctcccatggagaatgcaatgagtcccgacacttttgagaactcagagaacatgccattctaccatcaaagcaacacatttaccagatctttcttcagcaatacctttggacgaagcggagaacagaggagatttggacaaggtcctttttggggccaagagaaaggacattctttctggtctgactttcatcgaagcaggaaatcattcagttcttctgacagagactttgaaatgatttccatggaagcaaatagtgtatcagccattcatggccataatgtttcttctgaacactgggaatcattttcttctggttatggaacagatgtttccagaggccaagaagagccacatccttggcagtttgattttcagagatccacactggatagcatggtggtatcacatggtaatgagacccagttgactcctcattttggcacaccaaatgtttgctccatgactggttcaagctatcacgtcaaatctagtgagttggtaagtcaacaggacagttctcctgtagaagtacatataaacaaagaagcttcctcatttggaattgctcagactctagcatcctcattcaaaacttccttttcccagatttctgatgacagaaggaatcctcagagtcccaacttgcagaatcccacagtcactttgcagaaaatttttccaaataagcctgcctctcatccaatgagaagccatacagaagtcactgtgaccagcagcaattcagttgactctctgcctcttgccaaaagccagcccaatatcttggtcacagaagtaaataatgagaaagacttaaatgaatctatttcagaagaagacaaacagctaagcaagatggaccagacaaacaaggcaggtgaaataccccaacctgtttcacagacagggatctcaaactctttacctgattttcaaaatcccttatcccaggactcagccaagagcaacgggtttggttttaatgcatctaccataataagttcaaaaaagtcacccagagtcttttccaggaaagatacctccaaaatgtatataccgcacacagataaatccaatgacattaaacaagataagaggtttactgaaaacagaaaacttggctcaacagcttcccttcctttcattcaggaacacagaacaccaccatctttccccaggacagaccaaggttgtcaccaggaattaactgtaaataatgaagatatttcaagaattattacaaataaccactggagctctgcactgactgatactcaaaatgcacaatactcaaaatgcaagttaactcctggccacaagacctcgtgtgattctttagatctgtcatcagctgcactaccagattcctcaccatcaaagaattcttcccttgatgctcctgtggttccatctactacagtgttctccaggagaagtccttcagacaaagatccatcgctaggagaaagagaagaaaaagacaatgctgggaagaaccaaaagaatcagtttattgtaagccactcagaaaaccaagagagaaatgatagtcctgtgcctacacatgatgaagtggttgatgtcaaatgccattcacactctccttttaggaatgaaagaggaaaaggaaaaataaggcatcatatatcctgtattgaaaagttaagcaaaacagaaagtatatcagtacccaccagtgatcacaggagcctcattgaagcaaatcaaagcaattccaaagtttctgaacttgacacaatttattgtaccttgccaagaaaatcaagcagttttctcatacatggcaggcagtcaggaagtaaaataatggctgcttcattgaggaatgggccacctcccttccaaatcaaaaataatgtggaagatgcaatggggaactatatgttaaacaaatttagtcccagttctcctgagtcagcgaatgaatgttccaaagtcctttcagactcagccctggaagcacctgaagccacagagagaatgacaaatgtaaaaagcagtggatctacttccgttagaaaaggaccacttccattcctcatcaacagggctatgtcatgtccctcaggggagccacatgcctcaactggaagagaaggaagaaaaaagccattgacctcaggcatggatgcttctgagctaacaccaagggcttgggagagaatcattagccctgtggaaagtgactcatctgttagagattgttctttaaccaaaagacaacaccaaaaggaaaacttccaagaatacactgagaaagagggtaaaatggctgcctccaggagaagtgtatttgctctttcaaatgaagaccctttacctttttgctcagacttgtcaggaaaagaacgtgggaaaacattacataaagttaagacgactagtacgttttctgtttctggtgatgaagataatgtaaaatgtctggaggtggtctcaatatattacactctaccgaggaaacccagcaaaaaattctgtaacctccttcaacagtatacacaaaatactaatttacttatagaatcacctcaagtggagactgaaacatttcctaacgctttagaaaaagacaaacagaattattctacacgagagcagtcaggaacaccttcatgtgaaaatctaaagatgtccgtcaactctgatcagacgctcaccactgaaaatatgactgccttccgattatcaaatagggggcccctagctcctacattacaggaaatggcttctgttgaggcagctgtttctcttcctgaagaggaatctaaagctagagagattttttcagataatttagctaaaacacctctaggtgattcagaaaacaagaaggaaagaggcaaaaagttgcaaagtgaaaccctgcatacttcattgatgcttcagagaaaaaatgtatccgaagaaaaatctgaaaattgtcaacaatccattaattcaagtaacagtggtccctctagtcttccagctctttcagaagttaatattggaaattcccaaactagaagaagttcttgggagtgtacagggagtggtagagccattccatttactggaagtggcaagtgtccccagaaagatcacacatccacagctgtaggtgatggctccagtggatcacagcctagggaaggcagaggggacattggaaccaactgccaaaaaatgactaataaaacactttctcactcagagagtcaagtctttgcccttactccagcattgcataaactacagcttggtgaggagactcagtcagatgaaccaaacttagagagtctgcagtctgaaccaagagaattacctcaaagaagtcaggaggcaaatatgacagagagcaggaaggctgaagatgaaatgcagaagtcagcttgggatcaaccttcacttcctgaaggaaacaaaaataaaaccaacttggatgacctagtaaagggggaaaatagatcttcagttaaacacagattggcagccatgtctaaagccagcagaaaattcccagctaaagatgtaagccccagaagacatgtagctactatcttcccccaaagtggaagcagatctggctttgaccatttatctcttggcacagtggagtgcaacccactgttccctgagcctactccaaaatctgcagagtccattggcgaaagcaggttgagtgagaacggaaagcatgtgaagaaatccgagaaccttctccccattactgtactacccaacagagaaccttctacacacgtcagcaaccagaagtctaacagcatttcacaacgacatcagaatgagtttaaaaacgtctcagaatcaccatcaaagcatgagaattctaaagacgtcacagcagctcagaatttagtaagagaatcaggagccccatcacccatcacattcaccagcctcagggaagcagaattctctgacaatcagaggaggctgagccctccttttccactggagcctgcacagaaatctagagtaagcagtccactggccagttttctgcagcaacaaaggagtgcttcatctctggagtgggaacctgagccacacctctatcgttcaaagagtttaaaaagcattaatgttcatggcgatctactacgaaaaagccatcctccaaaagtcagggagcgccatttttctgaaagcacttctattgacaatgccctgagtcgactgacccttgggaatgaattctctgtcaacaatgggtacagtcgaagattcagatctttttctgaactcccctcctgtgatggaaatgaaagttgggcttatcgcagcgggacaaaaacaggtcccaggtctgcaatatctatatacagacctatcgactatgggatctttgggaaagaacaacagttagctttcttagaaaatgtaaagaggtcacttacacaaggaagattatggaaaccaagttttcttaagaaccctggcttcctaaaagatgatttgaggaaccctcccaacccctcagagtcattaagctcaaattctcccagtagtcaggtgccagaagatggcttatctccaagtgaaccgcttaatatctatgaggatgacccagtggactcaaattgtgacacagacacaaccacagatgatgaatactacctggatgaaaatgacaaagagtcagaactgtgaggctttttcaataaaatgctttacttttttcaccaaaagcttataatggaactaaggtgtacatgtgcatgtgcatggaaggataaaagatctagtctgggcagtgtctgctctgaaatgtcccacatctccttttttttcctccacaccctatatagacacttcctgaatgctagaacaatgaattcttgttttgagagagtctctgctattttctatctctgtaaatgttcttagcctgcctttccaccactcccacttaatccctgattcactgtctgatttgggctttctgctttacttccctcctaacatttttcatctttaattgtgatttacaaccctaatatcccaggcacatacaaaacttatgaattacccagcacaactgtgaaactctgtattgcttcttccggtccacaccctatactcatgacattaaataaaaggtagggatgataacagtggggtaaatattatcatcctgtttgactcatgaacatttaggaagtttaaggtggtgatcttctctttcaaacaaagataaaggaatttattttttaacctgagaaactgattgcaaaaagg

SEQ ID NO: 10185 - DNA, 2721 bp, Homo sapiens
  source 1..2721: mol_type = unassigned DNA
gacaagctctcgcgagacgagccgtgcaggctgaaaaaatggcgccacccagtacccgggagcccagggtcctgtcggcgaccagcgcaaccaaatccgacggagagatggtgctgccaggcttcccggacgccgacagctttgtgaagtttgctcttgggtccgtggtggcagtcaccaaggcatctgggggcctaccacagtttggcgatgagtatgatttttaccgaagttttcctggcttccaagcattttgcgaaacacagggagacaggttgcttcagtgcatgagcagagtaatgcagtaccatgggtgtcgcagcaacattaaggatcgaagtaaagtgactgagctggaagacaagtttgatttactagttgatgccaatgatgtaattctggagagagtgggtattttactggatgaagcctcaggtgtaaacaagaatcaacagcctgtcctccctgccggcttgcaggtccccaaaacggtagtgtccagctggaaccgtaaggcagcagaatatggcaaaaaagcaaaatctgaaactttccggctgcttcatgcaaaaaatatcatccgacctcagctcaagtttcgagagaagattgacaattccaacacaccatttcttcctaaaatcttcatcaaacccaatgctcagaaacctctccctcaagctctctctaaggaaaggcgggaacgcccacaggatcgtcctgaggacttggacgtcccccctgcactggctgatttcatccatcagcagagaacccagcaggttgagcaagacatgtttgcacatccttatcaatatgaactaaatcactttaccccagcagatgcagtgcttcaaaagccacaaccccagttatacagacctatagaagagacaccatgccatttcatatcctccctggatgaactcgtggaactcaacgaaaagctcttgaattgtcaggaatttgcagttgacttggagcaccactcttacaggagcttcctgggactgacctgcctgatgcaaatttctactcggacggaagacttcatcattgacaccctcgagcttcgaagtgacatgtacattctcaatgagagcctcacagacccagccatcgttaaggtctttcatggtgctgattcagacatagaatggctacagaaagactttgggttgtatgtagtaaacatgtttgatactcatcaggcagcacgccttcttaacctgggcaggcactcactcgatcatctcctgaaactctactgcaacgtggactcaaacaagcaatatcagctggctgattggagaatacgccctctgcccgaggagatgctcagctacgcccgggatgacacccattacctgctatatatctatgacaaaatgaggctggagatgtgggagcgcggcaacgggcagccggtgcagctgcaggtggtgtggcaacggagcagggacatctgcctcaagaaattcatcaaacctatcttcacggatgagtcctaccttgaactctataggaagcagaagaagcaccttaacacacagcagttgacagcctttcagctgctgtttgcctggagggataaaacagctcgcagggaagatgaaagttacggatatgtactgccaaaccacatgatgctgaaaatagctgaagaactgcctaaggaacctcagggcatcatagcttgctgcaacccagtaccgccccttgtgcggcagcagatcaacgaaatgcaccttttaatccagcaggcccgagagatgcccctgctcaagtctgaagttgcagccggagtgaagaagagcggaccgctgcccagtgctgagagattggagaatgttctctttggacctcacgactgctcccatgcccctccggatggctatccaatcatcccaaccagtggatctgtgccagttcagaagcaggcgagcctcttccctgatgaaaaagaagataacttgctgggtaccacatgcctgattgccacagctgtcatcacgttatttaatgaacctagtgctgaagacagtaaaaagggtccattgacagttgcacagaaaaaagcccagaacatcatggagtcctttgaaaatccatttaggatgatcagcaaccgctggaagctggcccaggtacaagtacaaaaagactctaaagaagctgtcaagaagaaggcagctgagcaaacagctgcccgggaacaggcaaaggaggcgtgcaaagctgcagcagaacaggccatctccgtccgacagcaggtcgtgctagaaaatgctgcaaagaagagagagcgagcaacaagcgacccaaggaccacagaacagaaacaagagaagaaacgactcaaaatttccaagaagccaaaggacccagagccaccagaaaaagagtttacgccttacgactacagccagtcagacttcaaggcttttgctggaaacagcaaatccaaagtttcttctcagtttgatccaaataaacagaccccgtctggcaagaaatgcattgcagccaaaaaaattaaacagtcggtgggaaacaaaagcatgtcctttccaactggaaagtcagacagaggcttcaggtacaactggccacagagatagtcctggaagacacgtggcgcctgtggaccggaagcaccaaatgctggtgctgcttttgtacatacatatttttaaaccattaaaattcttcctgaagaaa

SEQ ID NO: 10186 - DNA, 2808 bp, Homo sapiens
  source 1..2808: mol_type = unassigned DNA
gtctcctcggccgacaagctctcgcgagacgagccgtgcaggctgaaaaaatggcgccacccagtacccgggagcccagggtcctgtcggcgaccagcgcaaccaaatccgacggagagatggtgctgccaggcttcccggacgccgacagctttgtgaagtttgctcttgggtccgtggtggcagtcaccaaggcatctgggggcctaccacagtttggcgatgagtatgatttttaccgaagttttcctggcttccaagcattttgcgaaacacagggagacaggttgcttcagtgcatgagcagagtaatgcagtaccatgggtgtcgcagcaacattaaggatcgaagtaaagtgactgagctggaagacaagtttgatttactagttgatgccaatgatgtaattctggagagagtgggtattttactggatgaagcctcaggtgtaaacaagaatcaacagcctgtcctccctgccggcttgcaggtccccaaaacggtagtgtccagctggaaccgtaaggcagcagaatatggcaaaaaagcaaaatctgaaactttccggctgcttcatgcaaaaaatatcatccgacctcagctcaagtttcgagagaagattgacaattccaacacaccatttcttcctaaaatcttcatcaaacccaatgctcagaaacctctccctcaagctctctctaaggaaaggcgggaacgcccacaggatcgtcctgaggacttggacgtcccccctgcactggctgatttcatccatcagcagagaacccagcaggttgagcaagacatgtttgcacatccttatcaatatgaactaaatcactttaccccagcagatgcagtgcttcaaaagccacaaccccagttatacagacctatagaagagacaccatgccatttcatatcctccctggatgaactcgtggaactcaacgaaaagctcttgaattgtcaggaatttgcagttgacttggagcaccactcttacaggagcttcctgggactgacctgcctgatgcaaatttctactcggacggaagacttcatcattgacaccctcgagcttcgaagtgacatgtacattctcaatgagagcctcacagacccagccatcgttaaggtctttcatggtgctgattcagacatagaatggctacagaaagactttgggttgtatgtagtaaacatgtttgatactcatcaggcagcacgccttcttaacctgggcaggcactcactcgatcatctcctgaaactctactgcaacgtggactcaaacaagcaatatcagctggctgattggagaatacgccctctgcccgaggagatgctcagctacgcccgggatgacacccattacctgctatatatctatgacaaaatgaggctggagatgtgggagcgcggcaacgggcagccggtgcagctgcaggtggtgtggcaacggagcagggacatctgcctcaagaaattcatcaaacctatcttcacggatgagtcctaccttgaactctataggaagcagaagaagcaccttaacacacagcagttgacagcctttcagctgctgtttgcctggagggataaaacagctcgcagggaagatgaaagttacggatatgtactgccaaaccacatgatgctgaaaatagctgaagaactgcctaaggaacctcagggcatcatagcttgctgcaacccagtaccgccccttgtgcggcagcagatcaacgaaatgcaccttttaatccagcaggcccgagagatgcccctgctcaagtctgaagttgcagccggagtgaagaagagcggaccgctgcccagtgctgagagattggagaatgttctctttggacctcacgactgctcccatgcccctccggatggctatccaatcatcccaaccagtggatctgtgccagttcagaagcaggcgagcctcttccctgatgaaaaagaagataacttgctgggtaccacatgcctgattgccacagctgtcatcacgttatttaatgaacctagtgctgaagacagtaaaaagggtccattgacagttgcacagaaaaaagcccagaacatcatggagtcctttgaaaatccatttaggatgtttctgccctcactgggacaccgtgctcccgtctctcaggcagcgaagttcgatccatcaaccaaaatctatgaaatcagcaaccgctggaagctggcccaggtacaagtacaaaaagactctaaagaagctgtcaagaagaaggcagctgagcaaacagctgcccgggaacaggcaaaggaggcgtgcaaagctgcagcagaacaggccatctccgtccgacagcaggtcgtgctagaaaatgctgcaaagaagagagagcgagcaacaagcgacccaaggaccacagaacagaaacaagagaagaaacgactcaaaatttccaagaagccaaaggacccagagccaccagaaaaagagtttacgccttacgactacagccagtcagacttcaaggcttttgctggaaacagcaaatccaaagtttcttctcagtttgatccaaataaacagaccccgtctggcaagaaatgcattgcagccaaaaaaattaaacagtcggtgggaaacaaaagcatgtcctttccaactggaaagtcagacagaggcttcaggtacaactggccacagagatagtcctggaagacacgtggcgcctgtggaccggaagcaccaaatgctggtgctgcttttgtacatacatatttttaaaccattaaaattcttcctgaagaaa

SEQ ID NO: 10187 - DNA, 3334 bp, Homo sapiens
  source 1..3334: mol_type = unassigned DNA
gaaaaaatggcgccacccagtacccgggagcccagggtcctgtcggcgaccagcgcaaccaaatccgacggagagatggtgctgccaggcttcccggacgccgacagctttgtgaagtttgctcttgggtccgtggtggcagtcaccaaggcatctgggggcctaccacagtttggcgatgagtatgatttttaccgaagttttcctggcttccaagcattttgcgaaacacagggagacaggttgcttcagtgcatgagcagagtaatgcagtaccatgggtgtcgcagcaacattaaggatcgaagtaaagtgactgagctggaagacaagtttgatttactagttgatgccaatgatgtaattctggagagagtgggtattttactggatgaagcctcaggtgtaaacaagaatcaacagcctgtcctccctgccggcttgcaggtccccaaaacggtagtgtccagctggaaccgtaaggcagcagaatatggcaaaaaagcaaaatctgaaactttccggctgcttcatgcaaaaaatatcatccgacctcagctcaagtttcgagagaagattgacaattccaacacaccatttcttcctaaaatcttcatcaaacccaatgctcagaaacctctccctcaagctctctctaaggaaaggcgggaacgcccacaggatcgtcctgaggacttggacgtcccccctgcactggctgatttcatccatcagcagagaacccagcaggttgagcaagacatgtttgcacatccttatcaatatgaactaaatcactttaccccagcagatgcagtgcttcaaaagccacaaccccagttatacagacctatagaagagacaccatgccatttcatatcctccctggatgaactcgtggaactcaacgaaaagctcttgaattgtcaggaatttgcagttgacttggagcaccactcttacaggagcttcctgggactgacctgcctgatgcaaatttctactcggacggaagacttcatcattgacaccctcgagcttcgaagtgacatgtacattctcaatgagagcctcacagacccagccatcgttaaggtctttcatggtgctgattcagacatagaatggctacagaaagactttgggttgtatgtagtaaacatgtttgatactcatcaggcagcacgccttcttaacctgggcaggcactcactcgatcatctcctgaaactctactgcaacgtggactcaaacaagcaatatcagctggctgattggagaatacgccctctgcccgaggagatgctcagctacgcccgggatgacacccattacctgctatatatctatgacaaaatgaggctggagatgtgggagcgcggcaacgggcagccggtgcagctgcaggtggtgtggcaacggagcagggacatctgcctcaagaaattcatcaaacctatcttcacggatgagtcctaccttgaactctataggaagcagaagaagcaccttaacacacagcagttgacagcctttcagctgctgtttgcctggagggataaaacagctcgcagggaagatgaaagttacggatatgtactgccaaaccacatgatgctgaaaatagctgaagaactgcctaaggaacctcagggcatcatagcttgctgcaacccagtaccgccccttgtgcggcagcagatcaacgaaatgcaccttttaatccagcaggcccgagagatgcccctgctcaagtctgaagttgcagccggagtgaagaagagcggaccgctgcccagtgctgaggtagagtgtcggatctgttttctcccccaggagggaaaacgtcaagtcacagccagtgcaagtacacctctgacagaggcctgtgctgacagctggcagaaagctactgccggcttgcacgttttacatgccagcctgctggtgtcttttaatgcagagattggagaatgttctctttggacctcacgactgctcccatgcccctccggatggctatccaatcatcccaaccagtggtaaagtcgagagccctcctgactgtcccgaagaggttgggacacagctaccttgtctaaaattctgtaggcttggccgggcgtggtggcttatgcctgtaatgccagcatattggaaggctgaggcgggtagatcacctgaggtcaggagtttgagaccagcctggccaacatggtgaaaccccatctctactaaaaatacaaaaattagctggcatggtggtgggcacctgtaatcttagctacttaggaggcagaggcaggagaatcacttgaaccgaggaggcggaggttgcagtgagccgagattgtgccattgtactccagcctaggggactacactaaaactccatctcaaaaagaaaaaataaacaaaattctgtaggctttgaccttactatcttctgctcctctaggatctgtgccagttcagaagcaggcgagcctcttccctgatgaaaaagaagataacttgctgggtaccacatgcctgattgccacagctgtcatcacgttatttaatgaacctagtgctgaagacagtaaaaagggtccattgacagttgcacagaaaaaagcccagaacatcatggagtcctttgaaaatccatttaggatgtttctgccctcactgggacaccgtgctcccgtctctcaggcagcgaagttcgatccatcaaccaaaatctatgaaatcagcaaccgctggaagctggcccaggtacaagtacaaaaagactctaaagaagctgtcaagaagaaggcagctgagcaaacagctgcccgggaacaggcaaaggaggcgtgcaaagctgcagcagaacaggccatctccgtccgacagcaggtcgtgctagaaaatgctgcaaagaagagagagcgagcaacaagcgacccaaggaccacagaacagaaacaagagaagaaacgactcaaaatttccaagaagccaaaggacccagagccaccagaaaaagagtttacgccttacgactacagccagtcagacttcaaggcttttgctggaaacagcaaatccaaagtttcttctcagtttgatccaaataaacagaccccgtctggcaagaaatgcattgcagccaaaaaaattaaacagtcggtgggaaacaaaagcatgtcctttccaactggaaagtcagacagaggcttcaggtacaactggccacagagatagtcctggaagacacgtggcgcctgtggaccggaagcaccaaatgctggtgctgcttttgtacatacatatttttaaaccattaaaattcttcctgaag

SEQ ID NO: 10188 - DNA, 872 bp, Homo sapiens
  source 1..872: mol_type = unassigned DNA
gcaggcgcagacgcgcgggcgggaagatggcggctgggttcaaaaccgtggaacctctggagtattacaggagatttctgaaagagaactgccgtcctgatggaagagaacttggtgaattcagaaccacaactgtcaacatcggttcaattagtaccgcagatggttctgctttagtgaagttgggaaatactacagtaatctgtggagttaaagcattccggtctggacctcctggagaagaggcccaagtggctagccagttcattgcagatgtcattgaaaattcacagataattcagaaagaggacttatgcatttctccaggaaagcttgtctgggttctatactgtgatctcatttgcctcgactacgatggaaacattttggatgcctgcacatttgctttgctagcggctttaaaaaatgtacagttgcctgaagttactataaatgaagaaactgctttagcagaagttaatttaaagaagaaaagttatttgaatattagaactcatccagttgcaacttcctttgctgtgtttgatgacactttgcttatagttgaccctactggagaggaggaacatctggcaacaggaaccttaacaatagtaatggatgaggaaggcaaactctgttgtcttcacaaaccaggtggaagtgggctaactggagctaaacttcaggactgtatgagccgagcagttacaagacacaaagaagttaaaaaactgatggatgaagtaattaagagtatgaaacccaaataaacagccaccacattttcaaaacagatttgtaaaaattgtatttgttaacactgtgcacaaacgttttatactaaataaatatcaaactacattcttctg

SEQ ID NO: 10189 - DNA, 1198 bp, Homo sapiens
  source 1..1198: mol_type = unassigned DNA
agtcacagcaccagctcttttataaagagggagacccgctccttctttaacagcagattcgtcaaaatacgtccaaggcaaggaaacctagaaaggcgtctgggcaggggaaagtcgatgcgagggcgggccagggacctttcgtcgcgtccccaccttggcatttcccgtggcgtgagcggccccggcatccgtgtcgaaagtgcggcggcggaacaggcgcgcaggagaggagcggcgcaggcgcagacgcgcgggcgggaagatggcggctgggttcaaaaccgtggaacctctggagtattacaggagatttctgaaagagaactgccgtcctgatggaagagaacttggtgaattcagaaccacaactgtcaacatcggttcaattagtaccgcagatggttctgctttagtgaagttgggaaatactacagtaatctgtggagttaaagcagaatttgcagcaccatcaacagatgcccctgataaaggatacgttgttcctaatgtggatctaccacccctgtgttcatcgagattccggtctggacctcctggagaagaggcccaagtggctagccagttcattgcagatgtcattgaaaattcacagataattcagaaagaggacttatgcatttctccaggaaagcttgtctgggttctatactgtgatctcatttgcctcgactacgatggaaacattttggatgcctgcacatttgctttgctagcggctttaaaaaatgtacagttgcctgaagttactataaatgaagaaactgctttagcagaagttaatttaaagaagaaaagttatttgaatattagaactcatccagttgcaacttcctttgctgtgtttgatgacactttgcttatagttgaccctactggagaggaggaacatctggcaacaggaaccttaacaatagtaatggatgaggaaggcaaactctgttgtcttcacaaaccaggtggaagtgggctaactggagctaaacttcaggactgtatgagccgagcagttacaagacacaaagaagttaaaaaactgatggatgaagtaattaagagtatgaaacccaaataaacagccaccacattttcaaaacagatttgtaaaaattgtatttgttaacactgtgcacaaacgttttatactaaataaatatcaaactacattcttctgaaa

SEQ ID NO: 10190 - DNA, 1481 bp, Homo sapiens
  source 1..1481: mol_type = unassigned DNA
gatgacgtaattttcctgcgcctcggggcgagcagcggcgcgcaaggaaagatcgggttccgtttttcccgcggattctggtgcctgtggggccggtgacccaacaccatgaaggaaacgccactctcaaactgcgaacgccgcttcctactccgtgccatcgaagagaagaagcggctggatggcagacaaacctatgattataggaacatcaggatctcatttggaacagattacggatgctgcattgtggaacttggaaaaacaagagttcttggacaggtttcctgtgaacttgtgtctccaaaactcaatcgggcaacagaaggtattcttttttttaaccttgaactctctcagatggccgctccagctttcgaacctggcaggcagtcagatctcttggtgaagttgaatcgactcatggaaagatgtctaagaaattcgaagtgtatagacactgagtctctctgtgttgttgctggtgaaaaggtttggcaaatacgtgtagacctacatttattaaatcatgatggaaatattattgatgctgccagcattgctgcaatcgtggccttatgtcatttccgaagacctgatgtctctgtccaaggagatgaagtaacactgtatacacctgaagagcgtgatcctgtaccattaagtatccaccacatgcccatttgtgtcagttttgcctttttccagcaaggaacatatttattggtggatcccaatgaacgagaagaacgtgtgatggatggcttgctggtgattgccatgaacaaacatcgagagatttgtactatccagtccagtggtgggataatgctactaaaagatcaagttctgagatgcagtaaaatcgctggtgtgaaagtagcagaaattacagagctaatattgaaagctttggagaatgaccaaaaagtaaggaaagaaggtggaaagtttggttttgcagagtctatagcaaatcaaaggatcacagcatttaaaatggaaaaggcccctattgatacctcggatgtagaagaaaaagcagaagaaatcattgctgaagcagaacctccttcagaagttgtttctacacctgtgctatggactcctggaactgcccaaattggagagggagtagaaaactcctggggtgatcttgaagactctgagaaggaagatgatgaaggcggtggtgatcaagctatcattcttgatggtataaaaatggacactggagtagaagtctctgatattggaagccaagatgctcccataatactctcagatagtgaagaagaagaaatgatcattttggaaccagacaagaatccaaagaaaataagaacacagaccaccagtgcaaaacaagaaaaagcaccaagtaaaaagccagtgaaaagaagaaaaaagaagagagctgccaattaaagctaacagttgtatatctgtatatataactattaaaagggatatttattcca

SEQ ID NO: 10191 - DNA, 1529 bp, Homo sapiens
  source 1..1529: mol_type = unassigned DNA
gacgtaattttcctgcgcctcggggcgagcagcggcgcgcaaggaaagatcgggttccgtttttcccgcggattctggtgcctgtggggccggtgacccaacaccatgaaggaaacgccactctcaaactgcgaacgccgcttcctactccgtgccatcgaagagaagaagcggctggatggcagacaaacctatgattataggaacatcaggatctcatttggaacagattacggatgctgcattgtggaacttggaaaaacaagagttcttggacaggtttcctgtgaacttgtgtctccaaaactcaatcgggcaacagaaggtattcttttttttaaccttgaactctctcagatggccgctccagctttcgaacctggcaggcagtcagatctcttggtgaagttgaatcgactcatggaaagatgtctaagaaattcgaagtgtatagacactgagtctctctgtgttgttgctggtgaaaaggtttggcaaatacgtgtagacctacatttattaaatcatgatggaaatattattgatgctgccagcattgctgcaatcgtggccttatgtcatttccgaagacctgatgtctctgtccaaggagatgaagtaacactgtatacacctgaagagcgtgatcctgtaccattaagtatccaccacatgcccatttgtgtcagttttgcctttttccagcaaggaacatatttattggtggatcccaatgaacgagaagaacgtgtgatggatggcttgctggtgattgccatgaacaaacatcgagagatttgtactatccagtccagtggtgggataatgctactaaaagatcaagttctgagatgcagtaaaatcgctggtgtgaaagtagcagaaattacagagctaatattgaaagctttggagaatgaccaaaaagtaaggaaagaaggtggaaagtttggttttgcagagtctatagcaaatcaaaggatcacagcatttaaaatggaaaaggcccctattgatacctcggatgtagaagaaaaagcagaagaaatcattgctgaagcagaacctccttcagaagttgtttctacacctgtgctatggactcctggaactgcccaaattggagagggagtagaaaactcctggggtgatcttgaagactctgagaaggaagatgatgaaggcggtggtgatcaagctatcattcttgatggtataaaaatggacactggagtagaagtctctgatattggaagccaagagctggggtttcaccatgttggccagactggactcgagttcctgacctcagatgctcccataatactctcagatagtgaagaagaagaaatgatcattttggaaccagacaagaatccaaagaaaataagaacacagaccaccagtgcaaaacaagaaaaagcaccaagtaaaaagccagtgaaaagaagaaaaaagaagagagctgccaattaaagctaacagttgtatatctgtatatataactattaaaagggatatttattcca

SEQ ID NO: 10192 - DNA, 4015 bp, Homo sapiens
  source 1..4015: mol_type = unassigned DNA
ccgactggagagggatgggaggagataccatagggtttggggggcttggcacagcggccctggcctctgcactgtgatagctccaagccagatggtgcaaggcagctgctgggctgcggggaagaggggctgcacttcctgagctggtgcagcggcagagtggataaggatcaggaccccgagccctcctggccctccaaggcagggggacaccggctgcacccaggctgtgacctcagctgacgccgatgatccacatgggatgcagggtctaattttagctccagccacaggggccacagcccagaagcgtctgccagcgggcacaggggcagccagggctgctcaggcaaggggaggagtgggaagaccagcccagctccctccagcctgtccctggccaagccgcctcctgtgggagctctgactggtccccatggcctggcagacagccctcctctcagttgagggcaaggtcaaggggtgcagccaggagggcagggggacacggccctgcattctggacaggggttgcgtcagccagagcagtgcccaggggcaggggtccctgctgggagggaaaaggctggcttggttgtccaaaggccgagaaggcagagtcctgagagcaggggggccaggccagcaagctgggtcccacctggcctcctcctgcctggctggtgactcactatctgaccttagacaggcggcctggtctcgatgggcctcagtcttcccatctgtacaatgacagcacaggactagcaggtcggtcccagctctggtctcccgccccaggccctgctcttcctgcttgctggcagaggcctcccagcttccctagccctgactgtgggtggccacatgcagtcgtggaggagaagaaagtccctgtggctggcactgtcagcctcctggctcctgcttgtcctgctgggaggcttctcccttctccgcctggcattgcctcccagacctcggcccggggcttcccaaggctggccccgctggctggatgcagagctcctgcagagcttctcccagcctggagagctcccagaagatgccgtttcacctcctcaagcccctcatggtggcagctgcaactgggaatcttgctttgatacctcaaagtgcaggggcgatggccttaaggtattcgtgtacccagcggttggaaccatctctgagactcatcgcaggatcctggcttccattgagggctctcgcttctacacattcagccctgctggggcctgcctcctcctcctcctcagcctggacgcccagactggagagtgcagctcaatgcctctgcaatggaacaggggcaggaaccatctggtcctccgtctccacccggctccctgccccaggaccttccagctgggacaggctatggtggctgaggccagccccacggtggactccttccggcccggctttgatgtggccctcccttttctccctgaagcccacccgttgcgaggtggggctcctggccagctgcggcaacacagcccccagcccggggtagccctgctagccctggaagaggagaggggtgggtggcgcacagcagacactggctcctctgcctgcccctgggatgggcgctgtgagcaagaccctggacctgggcagacccagcgccaggagacgctgcccaatgccaccttctgcctcatctctggccaccgtcccgaggctgcctcgcgcttcctccaagccctgcaggccggctgcatcccagtgcttctcagcccccgctgggagctgcccttctccgaggtcatcgactggaccaaggcagccatcgtagctgatgagaggctcccacttcaggtcctggctgccctccaggagatgtcccctgcacgggtcctcgccctgcgtcagcagacccagtttctatgggatgcctacttctcctcagtggagaaggtcatccataccactctggaggttattcaggaccggatttttggaacatcagctcacccctcactgctgtggaacagccccccaggggcactcctggccctgtctactttttccacaagcccccaggacttccccttctactacctgcaacagggctcccgccctgagggcagattcagcgccctgatctgggtggggcccccaggccagccccctctgaagctcatccaggcggtggcaggctcccagcactgtgcccagatcttggttctctggagcaatgagaggccactcccatccaggtggccggagacagctgtgcccttgacagtcattgatgggcacaggaaggttagtgatcgcttctacccatatagcaccatcagaacagatgccatcctcagcctcgatgcccgcagcagtctttccacaagtgaggtggactttgcctttctggtgtggcagagcttcccagagcggatggtgggcttcctgacgtcgagccatttctgggacgaggcccatggtggctggggctacactgctgagaggaccaacgaattctccatggttctcaccacagccgccttctaccataggtattaccacactctcttcacccactccctgcccaaggctctgaggaccctggcagatgaggcacccacctgtgtggacgtcctgatgaatttcatagtagcagcagtcaccaagctgccccctatcaaggtgccctatggcaagcagcgccaggaggctgctccactggcgcctgggggcccggggcccaggccaaagccgcctgccccagcccccgactgcatcaaccagatagcggcagcgttcggccacatgcccttgctgtcctctcgtctgcgtctggacccggtgctgtttaaggacccggtgtccgtgcagcgcaagaagtaccgcagcctggagaagccctaggggggcgacccgcggagaccccagcagaggtcgcagcccagctcccagggggcccggcgcctgccggcgggctccgctcttgggacaccggagaacctatcatgtcagccagcgggcccacacgtcggaccccggttggccaatcacaacaggggggcgtggccttaccttctcctgctcgccctcagccgcggagcctctgcggaggctgagccccgcgaccggagcgccgctctccgcttctccacccagctaacttctgctcgtctttcagagcattgtctcctccagggacttgcctggccctcctccccctccgcccccaatgggttcggtctcctttgcgctttcgcagtccagtgtttgccgcggttcccgcacggtcaggccccaggactggcttgcgagccccggggggcgggtcgtgtcgtgtccttttctctctggctaggcaggtgtgccgcaaatatttgacgaatagatggatggcagacattaactgcgtgcctggccctatgagggcggcggcgggacagggtgagcggagagacagaactgtccccgccccaccccgccacccattcctagggttcctagtcccgggaaggcaactacccaaagacgcctgggttgtcaggctcaatccttgagcctcaaccaaggagcagaggggtgcgggtaaacgaggagtggggcgaggaaagcgggatgggaacaagtggcctgtccccgcacggcccgcggctcagcctcggccgtctgccctgcactaccaaggccgaccactagaggtcagcgtcgcgccgcactcttcacccgcatgtccagagggcggccgggatgtggagggtgagcgctgtgggcagctcgggggctgaaagctgggaagagaaatctgaagaacagccccatctctttcgcctgcacacttggaactcagcaagaagggactgtttctaggtgggctgggcgcgagcagggactgtcccgagcggtataggtgagaatggagttggggggggacactaggtcctccggggttcacccacctggagctggaattatcacttccgaaataaagcgcgtgtccttgccccctcacgctccaggctataaa

SEQ ID NO: 10193 - DNA, 2835 bp, Homo sapiens
  source 1..2835: mol_type = unassigned DNA
cactttgcgggcggcactttttccaggttgttaatccagctaatggagaaggatagatgcacgctacttggtttagaaaaaaaaacaaaaatgagcaaacgagacgccccttccgttttatgataactaagctgcagggaaataaatcggctggccctactgcaatctactgcactcgagaaacatcacagaaaattctttgatttatcttaatagtgacaagtgagcctgcttctgtcaattactgaagctataaggagattttttaaaaattaaacttcaacacaatgaggtgttgccacatctgcaaacttcctgggagagtaatggggattcgagtgcttcgattatctttggtggtcatcctcgtattattactggtagctggtgctttgactgccttacttcccagtgttaaagaagacaagatgctcatgttgcgtagggaaataaaatcccagggcaagtccaccatggactcctttactctcataatgcagacgtacaacagaacagatctcttattgaaacttttaaatcattatcaggctgtaccaaatctgcacaaagtgattgtggtatggaacaatattggagagaaggcaccagatgaattatggaattctctagggccccaccctatccctgtgatcttcaaacaacagacagcaaacaggatgagaaatcgactccaggtctttcctgaactggaaaccaatgcagtgttgatggtagatgatgacacactcatcagcaccccagaccttgtttttgctttctcagtttggcagcaatttcctgatcaaattgtaggatttgttcctagaaagcacgtctctacttcatcaggtatctacagttatggaagttttgaaatgcaagcaccagggtctggaaatggtgaccagtactctatggtgctgattggagcctcattcttcaatagcaaatatcttgaattatttcagaggcaacctgcagctgtccatgctttgatagatgatactcaaaactgtgatgatattgccatgaattttatcattgccaagcatattggcaagacttcagggatatttgtgaagcctgtaaacatggacaatttggaaaaagaaaccaacagtggctattctggaatgtggcatcgagctgagcacgctctgcagaggtcttattgtataaataagcttgttaatatctatgatagcatgcccttaagatactccaacattatgatttcccagtttggttttccatatgccaactacaaaagaaaaatataaaagtaaaacaaacaaaaacaaacctgaaaactgcttggcatttgagtagcttctccatgctatgtatttttttaagcaacatcatgaattttatctactccagaagtctctacaatagaaaaaaaagtgcagtgcttctaggatataaaattcacattacttttgaaagccaagaagttggtcttatccagttaggtcttcttatgaagagttttcatccagggatataactccttggtcagtgattttattgtttacatcctgagactgttctacagtttctttgactcctggcatttgccttaaggacctatagcaagctgtttctaggatcagaaactcaagagaggcatttctctgctttttcactaaaggtcagttgttttaatttgaaacctgaaatgcctctttagcaaaagcctgtggtatggggtaaagccatgtaagaagagaatagtctcagtcacatatgaagaggaaaatttgcagctgccagtgctttccttgtggccctgccaaccagctcttccaggacgaactcagtccagcatggttttgatgtaaccatccatgcttttatttttgttaagtcttttgtgactgggacagttaattttagtagctgaagaacgtctagttgtttgcttgatatttgtgaacatttactgcatggatcacaaaacaatataccctgtatttcttacacgccacttatatgcagcaaggagtaaatgtgttactagattcgggtagtgcattttgtcactgaatctgaccttgagaatgtacattaattcttatattttacataatgtatgtgttgtttaagaaatgtataaaaaacctgaaaaaaatgagtaagaactggcagaagttaaaaccctttgtatcaaaagatctttattggtagagcactggttatcttctggatactaaaaagttgtattacaaagccaaacacttgcattcacaactttaaaaaaagatccaaggaactattcataatgatgaaatttcaactacatacaaggaggagaaaataagaacccagtcataacagaggaattctataggagtctgcatcaattcattcttaaggttgcctactctctgttatgtgaattagcgtctgtgtttcacccattgtctgtgtttagtccttgttcaccactaaggcaaggaattcttaactaggcctctgtttaccaacttctctttctcctcctttccctcttattcctccttctcctcttccttcttatataatgctagtatattctcaaaattgcaaagctgtgagaatattaaaataatcatggctaatgttccaataatgaggtctttgtgcatttagttccgcatatgatggttttttttttacattaaagagtatatgtgtcttaatgcagtcagattgtaaaaaacaaaaacaaagaaactaagaatcttactaaaaatcgataatgtcagttatctgttttgtccaatattggtagtacttttttgcctcttatgattcctctagcagataaataaaagaaacttttgccatcca

SEQ ID NO: 10194 - DNA, 3985 bp, Homo sapiens
  source 1..3985: mol_type = unassigned DNA
gggcgggatgagaaaggtgctggagctgttggagggacgccaggaggtggcaactaccagggggtgtgaggggctgacctgggatggaatcctgccacccggactcaggaagaaaatcctgaggtggcgacctgcagactgggctgggagatggagagcccgctcacgcccacccgaccgcctaccaccagtgttcccggatgcatgggctccagcgcctgccctttcgccatttcctcccaactggcattaaatcctggtgtggtagatatcagtgattaagagtctaggcagccacgtgttctattgccgccagtccgcaggaaacgcaagtgatcgttttgctgcgttaactctatgggcgcccaaatcttaggaatccattccacgccaccccgaaaacagcgcttgacccttctggactgccacgcaggaggcgatcaatgtttttctttctttatttttttaagagacaaggtctcgccctgtcacctaggctggagcacaatgaggctcactacagcctggaactcccggacgcaagtgatcctcctcagcctccggagtagctgagacctcaggcgtgcgccaccatgcctggcatcaatcaatgtctttcaaaataaaggctgttaaacgtagtataggaaagaagctttttaatggtaggttctaccagacgtgtttgtttgatttttaggtttggttaatgcattgtttcccgtacaatctcaacccgcggaaaccccgaaactctagaattcgtgccggtctctttcgcttccaggtcatccccggggcaacggccgccgctctaattcttgtcagaacctccaggccagtttcagcaacgtgcaggcagaagctggcccctcggtgggatgcgagggcgtgtggagcgcggggaggagagccccacaggcctttcctgggcacccgcggtggatgggaaggctccttcgggcgcctttcagggaagttgtttggctgagggaaggtggtccgtcacgtgaatgtttaaaagttgttaccttggagaagaaatggaggaaaggattggctttcggaggtgggctggaaactacaaaaccgagcttcctgggaatgccttttaggccgacaggaagtggagcgtcaccgaaagggaggggcggccactcggggactgtcccttgctccaggcgctcactttgcgggcggcactttttccaggttgttaatccagctaatggagaaggatagatgcacgctacttggtttagaaaaaaaaacaaaaatgagcaaacgagacgccccttccgttttatgataactaagctgcagggaaataaatcggctggccctactgcaatctactgcactcgagtgacaagtgagcctgcttctgtcaattactgaagctataaggagattttttaaaaattaaacttcaacacaatgaggtgttgccacatctgcaaacttcctgggagagtaatggggattcgagtgcttcgattatctttggtggtcatcctcgtattattactggtagctggtgctttgactgccttacttcccagtgttaaagaagacaagatgctcatgttgcgtagggaaataaaatcccagggcaagtccaccatggactcctttactctcataatgcagacgtacaacagaacagatctcttattgaaacttttaaatcattatcaggctgtaccaaatctgcacaaagtgattgtggtatggaacaatattggagagaaggcaccagatgaattatggaattctctagggccccaccctatccctgtgatcttcaaacaacagacagcaaacaggatgagaaatcgactccaggtctttcctgaactggaaaccaatgcagtgttgatggtagatgatgacacactcatcagcaccccagaccttgtttttgctttctcagtttggcagcaatttcctgatcaaattgtaggatttgttcctagaaagcacgtctctacttcatcaggtatctacagttatggaagttttgaaatgcaagcaccagggtctggaaatggtgaccagtactctatggtgctgattggagcctcattcttcaatagcaaatatcttgaattatttcagaggcaacctgcagctgtccatgctttgatagatgatactcaaaactgtgatgatattgccatgaattttatcattgccaagcatattggcaagacttcagggatatttgtgaagcctgtaaacatggacaatttggaaaaagaaaccaacagtggctattctggaatgtggcatcgagctgagcacgctctgcagaggtcttattgtataaataagcttgttaatatctatgatagcatgcccttaagatactccaacattatgatttcccagtttggttttccatatgccaactacaaaagaaaaatataaaagtaaaacaaacaaaaacaaacctgaaaactgcttggcatttgagtagcttctccatgctatgtatttttttaagcaacatcatgaattttatctactccagaagtctctacaatagaaaaaaaagtgcagtgcttctaggatataaaattcacattacttttgaaagccaagaagttggtcttatccagttaggtcttcttatgaagagttttcatccagggatataactccttggtcagtgattttattgtttacatcctgagactgttctacagtttctttgactcctggcatttgccttaaggacctatagcaagctgtttctaggatcagaaactcaagagaggcatttctctgctttttcactaaaggtcagttgttttaatttgaaacctgaaatgcctctttagcaaaagcctgtggtatggggtaaagccatgtaagaagagaatagtctcagtcacatatgaagaggaaaatttgcagctgccagtgctttccttgtggccctgccaaccagctcttccaggacgaactcagtccagcatggttttgatgtaaccatccatgcttttatttttgttaagtcttttgtgactgggacagttaattttagtagctgaagaacgtctagttgtttgcttgatatttgtgaacatttactgcatggatcacaaaacaatataccctgtatttcttacacgccacttatatgcagcaaggagtaaatgtgttactagattcgggtagtgcattttgtcactgaatctgaccttgagaatgtacattaattcttatattttacataatgtatgtgttgtttaagaaatgtataaaaaacctgaaaaaaatgagtaagaactggcagaagttaaaaccctttgtatcaaaagatctttattggtagagcactggttatcttctggatactaaaaagttgtattacaaagccaaacacttgcattcacaactttaaaaaaagatccaaggaactattcataatgatgaaatttcaactacatacaaggaggagaaaataagaacccagtcataacagaggaattctataggagtctgcatcaattcattcttaaggttgcctactctctgttatgtgaattagcgtctgtgtttcacccattgtctgtgtttagtccttgttcaccactaaggcaaggaattcttaactaggcctctgtttaccaacttctctttctcctcctttccctcttattcctccttctcctcttccttcttatataatgctagtatattctcaaaattgcaaagctgtgagaatattaaaataatcatggctaatgttccaataatgaggtctttgtgcatttagttccgcatatgatggttttttttttacattaaagagtatatgtgtcttaatgcagtcagattgtaaaaaacaaaaacaaagaaactaagaatcttactaaaaatcgataatgtcagttatctgttttgtccaatattggtagtacttttttgcctcttatgattcctctagcagataaataaaagaaacttttgccatcca

SEQ ID NO: 10195 - DNA, 730 bp, Homo sapiens
  source 1..730: mol_type = unassigned DNA
actttgcgggcggcactttttccaggttgttaatccagctaatggagaaggatagatgcacgctacttggtttagaaaaaaaaacaaaaatgagcaaacgagacgccccttccgttttatgataactaagctgcagggaaataaatcggctggccctactgcaatctactgcactcgagaaacatcacagaaaattctttgatttatcttaatagtgacaagtgagcctgcttctgtcaattactgaagctataaggagattttttaaaaattaaacttcaacacaatgagaacctggaacagtggtggcacaaagtaagtgctcaggaactatctgttgaatgagtgttgccacatctgcaaacttcctgggagagtaatggggattcgagtgcttcgattatctttggtggtcatcctcgtattattactggtagctggtgctttgactgccttacttcccagtgttaaagaagacaagatgctcatgttgcgtagggaaataaaatcccagggcaagtccaccatggactcctttactctcataatgcagacgtacaacagaacagatctcttattgaaacttttaaatcattatcaggctgtaccaaatctgcacaaagtgattgtggtatggaacaatattggagagaaggcaccagatgaattatggaattctctagggccccaccctatccctgtgatcttcaaacaacagacagcaaacagg

SEQ ID NO: 10196 - DNA, 902 bp, Homo sapiens
  source 1..902: mol_type = unassigned DNA
ggctggccctactgcaatctactgcactcgagtgacaagtgagcctgcttctgtcaattactgaagctataaggagattttttaaaaattaaacttcaacacaatgagaacctggaacagtggtggcacaaagtgttgccacatctgcaaacttcctgggagagtaatggggattcgagtgcttcgattatctttggtggtcatcctcgtattattactggtagctggtgctttgactgccttacttcccagtgttaaagaagacaagatgctcatgttgcgtagggaaataaaatcccagggcaagtccaccatggactcctttactctcataatgcagacgtacaacagaacagatctcttattgaaacttttaaatcattatcaggctgtaccaaatctgcacaaagtgattgtggtatggaacaatattggagagaaggcaccagatgaattatggaattctctagggccccaccctatccctgtgatcttcaaacaacagacagcaaacaggatgagaaatcgactccaggtctttcctgaactggaaaccaatgcagtgttgatggtagatgatgacacactcatcagcaccccagaccttgtttttgctttctcagtttggcagcaatttcctgatcaaattgtaggatttgttcctagaaagcacgtctctacttcatcaggtatctacagttatggaagttttgaaatgcaagcaccagggtctggaaatggtgaccagtactctatggtgctgattggagcctcattcttcaatagcaaatatcttgaattatttcagaggcaacctgcagctgtccatgctttgatagatgatactcaaaactgtgatgatattgccatgaattttatcattgccaagcatattggcaaga

SEQ ID NO: 10197 - DNA, 1780 bp, Homo sapiens
  source 1..1780: mol_type = unassigned DNA
gtcccttgctccaggcgctcactttgcgggcggcactttttccaggttgttaatccagctaatggagaaggatagatgcacgctacttggtttagaaaaaaaaacaaaaatgagcaaacgagacgccccttccgttttatgataactaagctgcagggaaataaatcggctggccctactgcaatctactgcactcgagtgacaagtgagcctgcttctgtcaattactgaagctataaggagattttttaaaaattaaacttcaacacaatgaggtaaaattgggggattaggagctatctgaaaggaaatgtctgtgatggatacaggggataaactcctacttaaaagaatacatgagaaggaagcagtcactcatgagtgtcttcaacggtgtatatttatagtgttgccacatctgcaaacttcctgggagagtaatggggattcgagtgcttcgattatctttggtggtcatcctcgtattattactggtagctggtgctttgactgccttacttcccagtgttaaagaagacaagatgctcatgttgcgtagggaaataaaatcccagggcaagtccaccatggactcctttactctcataatgcagacgtacaacagaacagatctcttattgaaacttttaaatcattatcaggctgtaccaaatctgcacaaagtgattgtggtatggaacaatattggagagaaggcaccagatgaattatggaattctctagggccccaccctatccctgtgatcttcaaacaacagacagcaaacaggatgagaaatcgactccaggtctttcctgaactggaaaccaatgcagtgttgatggtagatgatgacacactcatcagcaccccagaccttgtttttgctttctcagtttggcagcaatttcctgatcaaattgtaggatttgttcctagaaagcacgtctctacttcatcaggtatctacagttatggaagttttgaaatgcaagcaccagggtctggaaatggtgaccagtactctatggtgctgattggagcctcattcttcaatagcaaatatcttgaattatttcagaggcaacctgcagctgtccatgctttgatagatgatactcaaaactgtgatgatattgccatgaattttatcattgccaagcatattggcaagacttcagggatatttgtgaagcctgtaaacatggacaatttggaaaaagaaaccaacagtggctattctggaatgtggcatcgagctgagcacgctctgcagaggtcttattgtataaataagcttgttaatatctatgatagcatgcccttaagatactccaacattatgatttcccagtttggttttccatatgccaactacaaaagaaaaatataaaagtaaaacaaacaaaaacaaacctgaaaactgcttggcatttgagtagcttctccatgctatgtatttttttaagcaacatcatgaattttatctactccagaagtctctacaatagaaaaaaaagtgcagtgcttctaggatataaaattcacattacttttgaaagccaagaagttggtcttatccagttaggtcttcttatgaagagttttcatccagggatataactccttggtcagtgattttattgtttacatcctgagactgttctacagtttctttgactcctggcatttgccttaaggacctatagcaagctgtttctaggatcagaaactcaagagaggcatttctctgctttttcactaaaggtcagttgtttt

SEQ ID NO: 10198 - DNA, 6483 bp, Homo sapiens
  source 1..6483: mol_type = unassigned DNA
acaatccccggcgcccggccccgcgcccctgacccgggtgtcaccgcggagctgcgggaggcctcggcggtcttcggacgcggtcgggaaagtggcgagcgcgcgcccgcgtccgcgcccccgctcgcgaacgccggcttcggccatttccggcgcggcgcccttcggcaagttccgcagtcgcctgtcggaaatggctgccggccggcagggggagcggcggatcaggcgcggcctggaaggcgggcggccggcagccagaacggcttctgggacgccgactttcgcgcaggcggcggcggcggcggcggcgggtccctgagctggaagccggagagcaagccctggaggttcactctttcaagaagtcgtgtgctgaggtgtaatgctacacaagtcagaggaaggaagggtcctgaaacacatggcctgattgttggcaaaggcatcataagaagctggcatttatttctgttctaacctattactgtataactgtgaatagacactatgcatatttgttggtcagcaaaaccaagaaacaagagctatggcatttgaaaaagtctgtctgattccagggtgtttttcctgggtttcatcatcaggtacctcctccctttcatctcagcaagaatgtggcaccttttatcgtttgataaagattaaggacatgttctttggtcaacagccagaacttaaaatctgctggaatagggtcagagaccatttcagctgcagctgaggaaaatgaaatgttcattttatttggtgccttgtctggggagcacactaactcttctggaaacgtgtcagtgaaacagagatcgttttgtggaatagcaacccatggttatggcgagtgacccgacgtgatctggggggcaggctgcagaggactcatgacaggctataccatgctgcggaatgggggcgcggggaacggaggtcagacctgcatgctgcgctggtccaaccgcatccgcctcacgtggctcagcttcacgctctttgtcatcctggtcttcttcccgctcatcgcccactattacctcaccactctggatgaggctgatgaggcaggcaagcggatttttggtccccgggtggggaacgagctgtgcgaggtgaagcacgtgctggatctgtgccgcatccgggagtcggtgagtgaagagctcctgcagctggaggccaagcgccaagagctgaacagcgagatcgccaagctgaatctgaagatcgaagcctgtaagaagagcattgagaacgccaagcaggacctgctccagctcaagaatgtcatcagccagaccgagcattcctacaaggagctcatggcccagaaccagcccaagctgtccctgcccatccgactgctcccagagaaggacgatgccggcctccctcccccgaaggccactcggggctgccggctacacaactgctttgattattctcgttgccctctcacctctggcttcccggtctacgtctatgacagtgaccagtttgtctttggcagctacctggatcccttggtcaagcaggcttttcaggcgacagcacgagctaacgtttatgttacagaaaatgcagacatcgcctgcctttacgtgatactagtgggagagatgcaggagccggtggtgctgcggcctgctgagctggagaagcagttgtattccctgccacactggcggacggatggacacaaccatgtcatcatcaatctgtcacgtaagtcagatacacagaaccttctctataacgtcagtactggccgtgccatggtggcccagtccaccttctacactgtccagtacagacctggctttgacttggtcgtatcaccgctggtccatgccatgtctgagcccaacttcatggaaatcccaccacaggtgccggtgaagcggaaatatctcttcaccttccagggcgagaagattgagtctctgaggtctagccttcaggaggcccgctccttcgaagaggaaatggagggcgaccctcccgccgactacgatgaccggatcattgccaccctgaaggcggtgcaggacagcaagctggatcaggtcctggtggaattcacctgcaaaaaccagcccaaacccagcctgccgactgagtgggcactgtgtggagagcgggaggaccgcttggaattgctgaagctctccaccttcgccctcatcattacccccggggaccctcgcttggttatttcctctgggtgtgcaacacggctcttcgaagccctggaagtcggtgccgtcccggtggtgctgggggagcaggtccagcttccctaccaggacatgctgcagtggaacgaggcggccctggtggtgccaaagcctcgtgttaccgaggttcatttcctgctcagaagcctctccgatagtgacctcctggctatgaggcggcaaggccgctttctctgggagacttacttctccactgctgacagtatttttaataccgtgctggctatgattaggactcgcatccagatcccagccgctcccatccgggaagaggcggcagctgagatcccccaccgttcaggcaaggcggctggaactgaccccaacatggctgacaacggggacctggacctggggccagtggagacggagccgccctacgcctcacccagatacctccgcaatttcactctgactgtcactgacttttaccgcagctggaactgtgctccagggcctttccatcttttcccccacactccctttgaccctgtgttgccctcagaggccaaattcttgggctcagggactggctttcggcctattggtggtggagctgggggttctggcaaggaatttcaggcagcgcttggaggcaatgttccccgagagcagttcacggtggtgatgttgacttatgagcgggaggaagtgcttatgaactctttagagaggctgaatggcctcccttacctgaacaaggtcgtggtggtgtggaattctcccaagctgccatcagaggaccttctgtggcctgacattggcgtccccatcatggtggtccgtactgagaagaacagtttgaacaaccgattcttaccctggaatgaaattgagacagaggccatcctgtccattgatgacgatgctcacctccgccatgacgaaatcatgtttgggttccgggtgtggagagaagctcgggaccgcatcgtgggcttccctggccgttaccacgcatgggacatcccccatcagtcctggctctacaactccaactactcctgtgagctgtccatggtgctgacaggtgctgccttctttcacaagtattatgcctacctgtattcttatgtgatgccccaggccatccgggacatggtggatgaatacatcaactgtgaggacattgccatgaacttccttgtctcccacatcactcggaagccccccatcaaggtgacctcacggtggacattccgatgcccaggatgccctcaggccctgtctcatgatgactcccacttccacgagcggcacaagtgcatcaacttcttcgtgaaggtgtacggctacatgcccctcctgtacacgcagttcagggtggattctgtgctcttcaagacacgcctgccccatgacaagaccaagtgcttcaagttcatctaggggcagcgcacggtctggggaagaggatgagcagagggaggaagatggctcccaaggttcctaggcattgcaggaccttgggcacatctgctggtgggtggcccagagcctctgctggaaggggcagcaggaggagtggaaggaaaccgctgcctttatcttgaagtcagccacactgggcctggagccctgggcggagtccccggggttccccacacagggcactgactgatagcttacactgaggactgtggcgactctgcagagtcactcacaccgttcgtacgcccaggacagctggttcgtggtttttacattcaataacaactattatgattatttaaaaagagaaagtttcagatttgccattcaaggcttatttatatatatgtgtgtgtatataaatacatgcacacacttgcatacatatatatttttggctgggggagtgtgagttttgcctttctaagggagggaccgcgcaggctcctttgttctgtattctggcggagatgggtcctggccttgtgtcactggcttatccttaaagatcatctcccatcctccccagcgccatctgtgtgcagcaaccagaaagggatgaacttggccctcttgcgggcctggacaaggtctcttccttaccctttctgttgccagtcagcaacctgtaactcacattctcttcccagtgaatccctgggagcgcctgaccctggtgggctgttcagcttcctgctgctggggccagcgatttttgaggatttatctttaggccaggcttgcctccgtacttatccctgctctcccatttctctcttgtttgagagagaatgaggaagcaaagagtgagaaagaataggggctgaagacgccactcccagatggctctttctatcctgctcttctgttgaaacacacgtgctgtgggcctcaggcgtttctgaagtgctctttcttggattggacaggagatcagcagcgtgcacatctgctgtggtctgaagtggtttgcaggtcagcctcctctccctagtgtagagcaagccagtgtccttcgaggaacccacccggctggccgggaagttttacagcaaggcgcctgccttgggataattccttggtgaaattcaccttccccccgcctctgtctggagccccatcctgtgttatctgtggtttttggacccctaatgtcagcttggctgtaggactccccgaggtttggtatgtgctagaacaatgggaggctgtgatttgctgtgtaagctcacatccagccttggaatctaacgggcattcacaacccgagttaccactttccactccctgcttaggattctgttccctgggctgaaactgaaataagctaattttttgggtcacggtggcagtaggggaacctaggagggtgtgagtggcatttgtcagggatttagcccatgacgtgtttcttgaaccctactttctggaagtggagttgactctggaagttttctagcaactgaacaaaagctcaggtttgtcctggtcatgcacatgccttaagccagttccgtcttccctagaccttggcatcctgtgcttctatttcttggaatacgttctcctctgacctgcctgtaccacgtgggtcctcttcaagtactgttttgaagctgggctcttttgtgtagctcccacccacctgtagggctagctcggcttaagggaactctccccattggcaaaccggacccggccgccgccaggactgtgtttccaaaggttccccgcccccaaccccagcatcagcctgtagctcccctgctgaggcagtgtggttatgttcccagcagtgggggtcagacgcccttcctcagaactttctagttgccctctacctgactcctgacttgtattccttttagcagtagccttcttccctcggggagccaaagagtgtggtgtgtggcgctatattgtggctgctatttcatctggtttcttttaatgtgaggaactcacatactgacttcagtgggactcggtgagccggggccgtctgtgtggtgggaccccctttagcgggactcagtgagctggggccgtctgtgtggtggagccagggcctctccctttagtggagccaggttgtcgggccccgaatgtcactggtggatctaagaagggctgagtggtctgacaccaaaacatgccgcagggagggctgtggtgccggtgcttccaacaaggacagccctccttgaccctgaaaggaacactggcttgaaggactgcagacaggctctgaggggcacgccctcctcagcgagaggcagcaaggtggccacagtgtcactggtcaggtgcttctcaccacgggaaagccgccgacctgtgactcgcttgagatgggaaagcggcgccacagaccccgggtctccttggctgtctgtgggccgcccctggccaccttgtcctggctcgcagggtgcaggagcgcctcgttctctgggtggccggcttgctgctccggtttgggctgtcttaccataacaccgtcccagggctctgcaggccactgtgagcgctggctccctgggcagtgctcctccgtgtggactgtgcctcaggccagggctcaccagctggggtcctgtccggaaggatgggatctttctgggagctgcgccggacagagtggggagctcctagtttgtggggggaagctttgatatccatgccacgtccatccaccccaccccttttcgtcacgagcacaatggtcttacattggatttttgtaaaaaaataaaaataaatggagactttaactcaa

SEQ ID NO: 10199 - DNA, 1779 bp, Homo sapiens
  source 1..1779: mol_type = unassigned DNA
agagggcggggccgggccgctggcgctgtcgccggctgcagtggccgccgctggagaccgcgggacctggcgctgcagcgaggagagcaagccctggaggttcactctttcaagaagtcgtgtgctgaggtgtaatgctacacaagtcagaggaaggaagggtcctggtggaattcacctgcaaaaaccagcccaaacccagcctgccgactgagtgggcactgtgtggagagcgggaggaccgcttggaattgctgaagctctccaccttcgccctcatcattacccccggggaccctcgcttggttatttcctctgggtgtgcaacacggctcttcgaagccctggaagtcggtgccgtcccggtggtgctgggggagcaggtccagcttccctaccaggacatgctgcagtggaacgaggcggccctggtggtgccaaagcctcgtgttaccgaggttcatttcctgctcagaagcctctccgatagtgacctcctggctatgaggcggcaaggccgctttctctgggagacttacttctccactgctgacagtatttttaataccgtgctggctatgattaggactcgcatccagatcccagccgctcccatccgggaagaggcggcagctgagatcccccaccgttcaggcaaggcggctggaactgaccccaacatggctgacaacggggacctggacctggggccagtggagacggagccgccctacgcctcacccagatacctccgcaatttcactctgactgtcactgacttttaccgcagctggaactgtgctccagggcctttccatcttttcccccacactccctttgaccctgtgttgccctcagaggccaaattcttgggctcagggactggctttcggcctattggtggtggagctgggggttctggcaaggaatttcaggcagcgcttggaggcaatgttccccgagagcagttcacggtggtgatgttgacttatgagcgggaggaagtgcttatgaactctttagagaggctgaatggcctcccttacctgaacaaggtcgtggtggtgtggaattctcccaagctgccatcagaggaccttctgtggcctgacattggcgtccccatcatggtggtccgtactgagaagaacagtttgaacaaccgattcttaccctggaatgaaattgagacagaggccatcctgtccattgatgacgatgctcacctccgccatgacgaaatcatgtttgggttccgggtgtggagagaagctcgggaccgcatcgtgggcttccctggccgttaccacgcatgggacatcccccatcagtcctggctctacaactccaactactcctgtgagctgtccatggtgctgacaggtgctgccttctttcacaagtattatgcctacctgtattcttatgtgatgccccaggccatccgggacatggtggatgaatacatcaactgtgaggacattgccatgaacttccttgtctcccacatcactcggaagccccccatcaaggtgacctcacggtggacattccgatgcccaggatgccctcaggccctgtctcatgatgactcccacttccacgagcggcacaagtgcatcaacttcttcgtgaaggtgtacggctacatgcccctcctgtacacgcagttcagggtggattctgtgctcttcaagacacgcctgccccatgacaagaccaagtgcttcaagttcatctaggggcagcgcacggtctggggaagaggatgagcagagg

SEQ ID NO: 10200 - DNA, 4915 bp, Homo sapiens
  source 1..4915: mol_type = unassigned DNA
caaccggttccgagtttgaggcactaggaggagggggagaagcggctgcagcggccgcggcaggagcagcgggagctacagcatcagcaagagcaacagtagctacagccccggcggcggtgcctgttccagtctttgctgctgcagtccgtgcaaccacccagagggggaggggggaaccaccagtcgctgaggaacaagagaaggggggaaagtttaggcgagccttgggggggggggggccagcgccggagccgcgtgagagagggagccgtgttttggtaggggggagtcggactgcaactggcagcagagcgtctccccggccgtgtggactctacaccccctactcctgccgcttctgctgctgcctgtggctggagggtccccctggggctgaatctttgggacttgaccccgttccctcccccttccctcactccccagccgggcgggagcatttattccccagattaattccccttttgggggggggcgggtgtgtgtgtgtgtgtgtgtgtgtgtgtgtgttgggggaagcgtccctgaaatagtaaatattattgagctctttttgcccttttcctgtccgtttttttaatttccttttttgaggtgggaaaactgaaacccaccttgattcgtcccctctcccccctccccaccttccctcgccctaatcccccaacgaggaaggaaggagcagttggttcaatctctggtaatctatgccagcaattatgacaatgttagcagaccatgcagctcgtcagctgcttgatttcagccaaaaactggatatcaacttattagataatgtggtgaattgcttataccatggagaaggagcccagcaaagaatggctcaagaagtactgacacatttaaaggagcatcctgatgcttggacaagagtcgacacaattttggaattttctcagaatatgaatacgaaatactatggactacaaattttggaaaatgtgataaaaacaaggtggaagattcttccaaggaaccagtgcgaaggaataaaaaaatacgttgttggcctcattatcaagacgtcatctgacccaacttgtgtagagaaagaaaaggtgtatatcggaaaattaaatatgatccttgttcagatactgaaacaagaatggcccaaacattggccaacttttatcagtgatattgttggagcaagtaggaccagcgaaagtctctgtcaaaataatatggtgattcttaaactcttgagtgaagaagtatttgatttctctagtggacagataacccaagtcaaatctaagcatttaaaagacagcatgtgcaatgaattctcacagatatttcaactgtgtcagtttgtaatggaaaattctcaaaatgctccacttgtacatgcaaccttggaaacattgctcagatttctgaactggattcccctgggatatatttttgagaccaaattaatcagcacattgatttataagttcctgaatgttccaatgtttcgaaatgtctctctgaagtgcctcactgagattgctggtgtgagtgtaagccaatatgaagaacaatttgtaacactatttactctgacaatgatgcaactaaagcagatgcttcctttaaataccaatattcgacttgcgtactcaaatggaaaagatgatgaacagaacttcattcaaaatctcagtttgtttctctgcacctttcttaaggaacatgatcaacttatagaaaaaagattaaatctcagggaaactcttatggaggcccttcattatatgttgttggtatctgaagtagaagaaactgaaatctttaaaatttgtcttgaatactggaatcatttggctgctgaactctatagagagagtccattctctacatctgcctctccgttgctttctggaagtcaacattttgatgttcctcccaggagacagctatatttgcccatgttattcaaggtccgtttattaatggttagtcgaatggctaaaccagaggaagtattggttgtagagaatgatcaaggagaagttgtgagagaattcatgaaggatacagattccataaatttgtataagaatatgagggaaacattggtttatcttactcatctggattatgtagatacagaaagaataatgacagagaagcttcacaatcaagtgaatggtacagagtggtcatggaaaaatttgaatacattgtgttgggcaataggctccattagtggagcaatgcatgaagaggacgaaaaacgatttcttgttactgttataaaggatctattaggattatgtgaacagaaaagaggcaaagataataaagctattattgcatcaaatatcatgtacatagtaggtcaatacccacgttttttgagagctcactggaaatttctgaagactgtagttaacaagctgttcgaattcatgcatgagacccatgatggagtccaggatatggcttgtgatactttcattaaaatagcccaaaaatgccgcaggcatttcgttcaggttcaggttggagaagtgatgccatttattgatgaaattttgaacaacattaacactattatttgtgatcttcagcctcaacaggttcatacgttttatgaagctgtggggtacatgattggtgcacaaacagatcaaacagtacaagaacacttgatagaaaagtacatgttactccctaatcaagtgtgggatagtataatccagcaggcaaccaaaaatgtggatatactgaaagatcctgaaacagtcaagcagcttggtagcattttgaaaacaaatgtgagagcctgcaaagctgttggacacccctttgtaattcagcttggaagaatttatttagatatgcttaatgtatacaagtgcctcagtgaaaatatttctgcagctatccaagctaatggtgaaatggttacaaagcaaccattgattagaagtatgcgaactgtaaaaagggaaactttaaagttaatatctggttgggtgagccgatccaatgatccacagatggtcgctgaaaattttgttccccctctgttggatgcagttctcattgattatcagagaaatgtcccagctgctagagaaccagaagtgcttagtactatggccataattgtcaacaagttagggggacatataacagctgaaatacctcaaatatttgatgctgtttttgaatgcacattgaatatgataaataaggactttgaagaatatcctgaacatagaacgaactttttcttactacttcaggctgtcaattctcattgtttcccagcattccttgctattccacctacacagtttaaacttgttttggattccatcatttgggctttcaaacatactatgaggaatgtcgcagatacgggcttacagatactttttacactcttacaaaatgttgcacaagaagaagctgcagctcagagtttttatcaaacttatttttgtgatattctccagcatatcttttctgttgtgacagacacttcacatactgctggtttaacaatgcatgcatcaattcttgcatatatgtttaatttggttgaagaaggaaaaataagtacatcattaaatcctggaaatccagttaacaaccaaatctttcttcaggaatatgtggctaatctccttaagtcggccttccctcacctacaagatgctcaagtaaagctctttgtgacagggcttttcagcttaaatcaagatattcctgctttcaaggaacatttaagagatttcctagttcaaataaaggaatttgcaggtgaagacacttctgatttgtttttggaagagagagaaatagccctacggcaggctgatgaagagaaacataaacgtcaaatgtctgtccctggcatctttaatccacatgagattccagaagaaatgtgtgattaaaatccaaattcatgctgttttttttctctgcaactcgttagcagaggaaaacagcatgtgggtatttgtcgaccaaaatgatgccaatttgtaaattaaaatgtcacctagtggccctttttcttatgtgtttttttgtataagaaattttctgtgaaatatccttccattgtttaagcttttgttttggtcatctttatttagtttgcatgaagttgaaaattaaggcatttttaaaaattttacttcatgcccatttttgtggctgggctggggggaggaggcaaattcgatttgaacatatacttgtaattctaatgcaaaattatacaatttttcctgtaaacaataccaatttttaattagggagcattttccttctagtctatttcagcctagaagaaaagataatgagtaaaacaaattgcgttgtttaaaggattatagtgctgcattgtctgaagttagcacctcttggactgaatcgtttgtctagactacatgtattacaaagtctctttggcaagattgcagcaagatcatgtgcatatcatcccattgtaaagcgacttcaaaaatatgggaacacagttagttatttttacacagttctttttgtttttgtgtgtgtgtgctgtcgcttgtcgacaacagctttttgttttcctcaatgaggagtgttgctcatttgtgagccttcattaactcgaagtgaaatggttaaaaatatttatcctgttagaataggctgcatctttttaacaactcattaaaaaacaaaacaactctggcttttgagatgacttatactaatttacattgtttaccaagctgtagtgctttaagaacactacttaaaaagcaaaataaacttggtttacatttatttttcctttattgactcatttattcctatattaatgatagtgggtatttgtgtttaagcatcaagtaacattttaaatgaagtt

SEQ ID NO: 10201 - DNA, 4105 bp, Homo sapiens
  source 1..4105: mol_type = unassigned DNA
agcttgggatgggggagggaggggctgccgactccctgttcctccagcaaggaaactcgaaagctctccggttttgcagagtggcatgtgaagtaggaaagatcagtttttcaggggcctgcacatgggattccgtcttgtagttccttttcaggggtttgaatgtgataagttggttaaaccatttactgttggccttgtacagtggaggatgccctgattctccttcattccgatgtctgtgagtttgggttgggtgggaggaagtggtgtagtagaggaagcattcagtactggctcagcccggacctcctctgatcacgccgaggccatgctgcatagagaaaggggcggtgaacttaaggcgcctggtctaaatgcctcctccgagtaagggcgggtaatctatgccagcaattatgacaatgttagcagaccatgcagctcgtcagctgcttgatttcagccaaaaactggatatcaacttattagataatgtggtgaattgcttataccatggagaaggagcccagcaaagaatggctcaagaagtactgacacatttaaaggagcatcctgatgcttggacaagagtcgacacaattttggaattttctcagaatatgaatacgaaatactatggactacaaattttggaaaatgtgataaaaacaaggtggaagattcttccaaggaaccagtgcgaaggaataaaaaaatacgttgttggcctcattatcaagacgtcatctgacccaacttgtgtagagaaagaaaaggtgtatatcggaaaattaaatatgatccttgttcagatactgaaacaagaatggcccaaacattggccaacttttatcagtgatattgttggagcaagtaggaccagcgaaagtctctgtcaaaataatatggtgattcttaaactcttgagtgaagaagtatttgatttctctagtggacagataacccaagtcaaatctaagcatttaaaagacagcatgtgcaatgaattctcacagatatttcaactgtgtcagtttgtaatggaaaattctcaaaatgctccacttgtacatgcaaccttggaaacattgctcagatttctgaactggattcccctgggatatatttttgagaccaaattaatcagcacattgatttataagttcctgaatgttccaatgtttcgaaatgtctctctgaagtgcctcactgagattgctggtgtgagtgtaagccaatatgaagaacaatttgtaacactatttactctgacaatgatgcaactaaagcagatgcttcctttaaataccaatattcgacttgcgtactcaaatggaaaagatgatgaacagaacttcattcaaaatctcagtttgtttctctgcacctttcttaaggaacatgatcaacttatagaaaaaagattaaatctcagggaaactcttatggaggcccttcattatatgttgttggtatctgaagtagaagaaactgaaatctttaaaatttgtcttgaatactggaatcatttggctgctgaactctatagagagagtccattctctacatctgcctctccgttgctttctggaagtcaacattttgatgttcctcccaggagacagctatatttgcccatgttattcaaggtccgtttattaatggttagtcgaatggctaaaccagaggaagtattggttgtagagaatgatcaaggagaagttgtgagagaattcatgaaggatacagattccataaatttgtataagaatatgagggaaacattggtttatcttactcatctggattatgtagatacagaaagaataatgacagagaagcttcacaatcaagtgaatggtacagagtggtcatggaaaaatttgaatacattgtgttgggcaataggctccattagtggagcaatgcatgaagaggacgaaaaacgatttcttgttactgttataaaggatctattaggattatgtgaacagaaaagaggcaaagataataaagctattattgcatcaaatatcatgtacatagtaggtcaatacccacgttttttgagagctcactggaaatttctgaagactgtagttaacaagctgttcgaattcatgcatgagacccatgatggagtccaggatatggcttgtgatactttcattaaaatagcccaaaaatgccgcaggcatttcgttcaggttcaggttggagaagtgatgccatttattgatgaaattttgaacaacattaacactattatttgtgatcttcagcctcaacaggttcatacgttttatgaagctgtggggtacatgattggtgcacaaacagatcaaacagtacaagaacacttgatagaaaagtacatgttactccctaatcaagtgtgggatagtataatccagcaggcaaccaaaaatgtggatatactgaaagatcctgaaacagtcaagcagcttggtagcattttgaaaacaaatgtgagagcctgcaaagctgttggacacccctttgtaattcagcttggaagaatttatttagatatgcttaatgtatacaagtgcctcagtgaaaatatttctgcagctatccaagctaatggtgaaatggttacaaagcaaccattgattagaagtatgcgaactgtaaaaagggaaactttaaagttaatatctggttgggtgagccgatccaatgatccacagatggtcgctgaaaattttgttccccctctgttggatgcagttctcattgattatcagagaaatgtcccagctgctagagaaccagaagtgcttagtactatggccataattgtcaacaagttagggggacatataacagctgaaatacctcaaatatttgatgctgtttttgaatgcacattgaatatgataaataaggactttgaagaatatcctgaacatagaacgaactttttcttactacttcaggctgtcaattctcattgtttcccagcattccttgctattccacctacacagtttaaacttgttttggattccatcatttgggctttcaaacatactatgaggaatgtcgcagatacgggcttacagatactttttacactcttacaaaatgttgcacaagaagaagctgcagctcagagtttttatcaaacttatttttgtgatattctccagcatatcttttctgttgtgacagacacttcacatactgctggtttaacaatgcatgcatcaattcttgcatatatgtttaatttggttgaagaaggaaaaataagtacatcattaaatcctggaaatccagttaacaaccaaatctttcttcaggaatatgtggctaatctccttaagtcggccttccctcacctacaagatgctcaagtaaagctctttgtgacagggcttttcagcttaaatcaagatattcctgctttcaaggaacatttaagagatttcctagttcaaataaaggaatttgcaggtgaagacacttctgatttgtttttggaagagagagaaatagccctacggcaggctgatgaagagaaacataaacgtcaaatgtctgtccctggcatctttaatccacatgagattccagaagaaatgtgtgattaaaatccaaattcatgctgttttttttctctgcaactcgttagcagaggaaaacagcatgtgggtatttgtcgaccaaaatgatgccaatttgtaaattaaaatgtcacctagtggccctttttcttatgtgtttttttgtataagaaattttctgtgaaatatccttccattgtttaagcttttgttttggtcatctttatttagtttgcatgaagttgaaaattaaggcatttttaaaaattttacttcatgcccatttttgtggctgggctggggggaggaggcaaattcgatttgaacatatacttgtaattctaatgcaaaattatacaatttttcctgtaaacaataccaatttttaattagggagcattttccttctagtctatttcagcctagaagaaaagataatgagtaaaacaaattgcgttgtttaaaggattatagtgctgcattgtctgaagttagcacctcttggactg

SEQ ID NO: 10202 - DNA, 3479 bp, Homo sapiens
  source 1..3479: mol_type = unassigned DNA
ggagaagcggctgcagcggccgcggcaggagcagcgggagctacagcatcagcaagagcaacagtagctacagccccggcggcggtgcctgttccagtctttgctgctgcagaaggagcagttggttcaatctctggtaatctatgccagcaattatgacaatgttagcagaccatgcagctcgtcagctgcttgatttcagccaaaaactggatatcaacttattagataatgtggtgaattgcttataccatggagaaggagcccagcaaagaatggctcaagaagtactgacacatttaaaggagcatcctgatgcttggacaagagtcgacacaattttggaattttctcagaatatgaatacgaaatactatggactacaaattttggaaaatgtgataaaaacaaggtggaagattcttccaaggaaccagtgcgaaggaataaaaaaatacgttgttggcctcattatcaagacgtcatctgacccaacttgtgtagagaaagaaaaggtgtatatcggaaaattaaatatgatccttgttcagatactgaaacaagaatggcccaaacattggccaacttttatcagtgatattgttggagcaagtaggaccagcgaaagtctctgtcaaaataatatggtgattcttaaactcttgagtgaagaagtatttgatttctctagtggacagataacccaagtcaaatctaagcatttaaaagacagcatgtgcaatgaattctcacagatatttcaactgtgtcagtttgtaatggaaaattctcaaaatgctccacttgtacatgcaaccttggaaacattgctcagatttctgaactggattcccctgggatatatttttgagaccaaattaatcagcacattgatttataagttcctgaatgttccaatgtttcgaaatgtctctctgaagtgcctcactgagattgctggtgtgagtgtaagccaatatgaagaacaatttgtaacactatttactctgacaatgatgcaactaaagcagatgcttcctttaaataccaatattcgacttgcgtactcaaatggaaaagatgatgaacagaacttcattcaaaatctcagtttgtttctctgcacctttcttaaggaacatgatcaacttatagaaaaaagattaaatctcagggaaactcttatggaggcccttcattatatgttgttggtatctgaagtagaagaaactgaaatctttaaaatttgtcttgaatactggaatcatttggctgctgaactctatagagagagtccattctctacatctgcctctccgttgctttctggaagtcaacattttgatgttcctcccaggagacagctatatttgcccatgttattcaaggtccgtttattaatggttagtcgaatggctaaaccagaggaagtattggttgtagagaatgatcaaggagaagttgtgagagaattcatgaaggatacagattccataaatttgtataagaatatgagggaaacattggtttatcttactcatctggattatgtagatacagaaagaataatgacagagaagcttcacaatcaagtgaatggtacagagtggtcatggaaaaatttgaatacattgtgttgggcaataggctccattagtggagcaatgcatgaagaggacgaaaaacgatttcttgttactgttataaaggatctattaggattatgtgaacagaaaagaggcaaagataataaagctattattgcatcaaatatcatgtacatagtaggtcaatacccacgttttttgagagctcactggaaatttctgaagactgtagttaacaagctgttcgaattcatgcatgagacccatgatggagtccaggatatggcttgtgatactttcattaaaatagcccaaaaatgccgcaggcatttcgttcaggttcaggttggagaagtgatgccatttattgatgaaattttgaacaacattaacactattatttgtgatcttcagcctcaacaggttcatacgttttatgaagctgtggggtacatgattggtgcacaaacagatcaaacagtacaagaacacttgatagaaaagtacatgttactccctaatcaagtgtgggatagtataatccagcaggcaaccaaaaatgtggatatactgaaagatcctgaaacagtcaagcagcttggtagcattttgaaaacaaatgtgagagcctgcaaagctgttggacacccctttgtaattcagcttggaagaatttatttagatatgcttaatgtatacaagtgcctcagtgaaaatatttctgcagctatccaagctaatggtgaaatggttacaaagcaaccattgattagaagtatgcgaactgtaaaaagggaaactttaaagttaatatctggttgggtgagccgatccaatgatccacagatggtcgctgaaaattttgttccccctctgttggatgcagttctcattgattatcagagaaatgtcccagctgctagagaaccagaagtgcttagtactatggccataattgtcaacaagttagggggacatataacagctgaaatacctcaaatatttgatgctgtttttgaatgcacattgaatatgataaataaggactttgaagaatatcctgaacatagaacgaactttttcttactacttcaggctgtcaattctcattgtttcccagcattccttgctattccacctacacagtttaaacttgttttggattccatcatttgggctttcaaacatactatgaggaatgtcgcagatacgggcttacagatactttttacactcttacaaaatgttgcacaagaagaagctgcagctcagagtttttatcaaacttatttttgtgatattctccagcatatcttttctgttgtgacagacacttcacatactgctggtttaacaatgcatgcatcaattcttgcatatatgtttaatttggttgaagaaggaaaaataagtacatcattaaatcctggaaatccagttaacaaccaaatctttcttcaggaatatgtggctaatctccttaagtcggccttccctcacctacaagatgctcaagtaaagctctttgtgacagggcttttcagcttaaatcaagatattcctgctttcaaggaacatttaagagatttcctagttcaaataaaggaatttgcaggtgaagacacttctgatttgtttttggaagagagagaaatagccctacggcaggctgatgaagagaaacataaacgtcaaatgtctgtccctggcatctttaatccacatgagattccagaagaaatgtgtgattaaaatccaaattcatgctgttttttttctctgcaactcgttagcagaggaaaacagcatgtgggtatttgtcgaccaaaatgatgccaatttgtaaattaaaatgtcacctagtggcccttt

SEQ ID NO: 10203 - DNA, 682 bp, Homo sapiens
  source 1..682: mol_type = unassigned DNA
acttgcttaaaaagttttgacatcaagatactgaactgtatcacgttttaggaccataaaatcctaatagtggatgcgtttaaataataggttagcatactttataaatgttagtagaataggaaagtcttcctggtgtataaactaaacactagaaaagttgaatggaccataataatttatgtaattatcaaatagctaagtaatttcagcttttgttacttgcttttactatctcagttttctgtaattaaagtctctaaagtattcattaaaatatttgtaataacatggttgaagtaaaataacttgtaggaagtttttgataataccaaaacttgataggcagcttcaattttttttctttattttcagtaatctatgccagcaattatgacaatgttagcagaccatgcagctcgtcagctgcttgatttcagccaaaaactggatatcaacttattagataatgtggtgaattgcttataccatggagaaggagcccagcaaagaatggctcaagaagtactgacacatttaaaggagcatcctgatgcttggacaagagtcgacacaattttggaattttctcagaatatgaatacgaaatactatggactacaaattttggaaaatgtgataaaaacaaggtggaagattcttccaaggaaccagtgcgaag

SEQ ID NO: 10204 - DNA, 382 bp, Homo sapiens
  source 1..382: mol_type = unassigned DNA
cggggttttgccatgttggccaggctggtctggaactcctgacctcaagtgattcgcccacctcggcctcccaaagtgctgggattacagtaatctatgccagcaattatgacaatgttagcagaccatgcagctcgtcagctgcttgatttcagccaaaaactggatatcaacttattagataatgtggtgaattgcttataccatggagaaggagcccagcaaagaatggctcaagaagtactgacacatttaaaggagcatcctgatgcttggacaagagtcgacacaattttggaattttctcagaatatgaatacgaaatactatggactacaaattttggaaaatgtgataaaaacaaggtggaagattcttccaa

SEQ ID NO: 10205 - DNA, 318 bp, Homo sapiens
  source 1..318: mol_type = unassigned DNA
ggctttccttcgctctcttttctactcatccctgctcttcgtcccacctcctcctcctccacccctctcctcttgcctttcgaccctccccacttcccctcccccactctgcgggcaaatcgctgctgaaaagagtaatctatgccagcaattatgacaatgttagcagaccatgcagctcgtcagctgcttgatttcagccaaaaactggatatcaacttattagataatgtggtgaattgcttataccatggagaaggagcccagcaaagaatggctcaagaagtactgacacatttaaaggagcatcctgatgct

SEQ ID NO: 10206 - DNA, 565 bp, Homo sapiens
  source 1..565: mol_type = unassigned DNA
ggctttccttcgctctcttttctactcatccctgctcttcgtcccacctcctcctcctccacccctctcctcttgcctttcgaccctccccacttcccctcccccactctgcgggcaaatcgctgctgaaaagaggaaggagcagttggttcaatctctggtaatctatgccagcaattatgacaatgttagcagaccatgcagctcgtcagctgcttgatttcagccaaaaactggatatcaacttattagataatgtggtgaattgcttataccatggagaaggagcccagcaaagaatggctcaagaagtactgacacatttaaaggagcatcctgatgcttggacaagagtcgacacaattttggaattttctcagaatatgaatacgaaatactatggactacaaattttggaaaatgtgataaaaacaaggtggaagattcttccaaggaaccagtgcgaaggaataaaaaaatacgttgttggcctcattatcaagacgtcatctgacccaacttgtgtagagaaagaaaaggtgtatatcggaaaattaaatatgat

SEQ ID NO: 10207 - DNA, 579 bp, Homo sapiens
  source 1..579: mol_type = unassigned DNA
acaacctaaggagcagtctttcgccttgtagcgacttgtttttcacctagtgtgaagttattaagcaacggttatgattttctgggttttgtttaggaattggcattgggtgtcacttgtagagtcacattatccattaagctggataatccctagtgtatgttatccagtgagtggattttaggattgaagagcccaatgggaatgagcgttcgtggttacacctctcgcactatggcttgtttgctgtctgattgtatatcttaagtgtgggacactgctgttagtggaaagaatgttttggaagcggtttgatttgggggactaaatgtgcttggcattgaccacaaagccgccatttctgtactatgtacagttcaggaatagtaatctatgccagcaattatgacaatgttagcagaccatgcagctcgtcagctgcttgatttcagccaaaaactggatatcaacttattagataatgtggtgaattgcttataccatggagaaggagcccagcaaagaatggctcaagaagtactgacacatttaaaggagcatcctgatgcttggacaaga

SEQ ID NO: 10208 - DNA, 643 bp, Homo sapiens
  source 1..643: mol_type = unassigned DNA
ggtggagagcttgggatgggggagggaggggctgccgactccctgttcctccagcaaggaaactcgaaagctctccggttttgcagagtggcatgtgaataatctatgccagcaattatgacaatgttagcagaccatgcagctcgtcagctgcttgatttcagccaaaaactggatatcaacttattagataatgtggtgaattgcttataccatggagaaggagcccagcaaagaatggctcaagaagtactgacacatttaaaggagcatcctgatgcttggacaagagtcgacacaattttggaattttctcagaatatgaatacgaaatactatggactacaaattttggaaaatgtgataaaaacaaggtggaagattcttccaaggaaccagtgcgaaggaataaaaaaatacgttgttggcctcattatcaagacgtcatctgacccaacttgtgtagagaaagaaaaggtgtatatcggaaaattaaatatgatccttgttcagatactgaaacaagaatggcccaaacattggccaacttttatcagtgatattgttggagcaagtaggaccagcgaaagtctctgtcaaaataatatggtgattcttaaactcttgagtgaagaagtatttg

SEQ ID NO: 10209 - DNA, 488 bp, Homo sapiens
  source 1..488: mol_type = unassigned DNA
gtcccctctcccccctccccaccttccctcgccctaatcccccaacgaggaaggaaggagcagttggttcaatctctggatggagtctcattctcttgcccaggctagagtgtggtggtgcatctcggcttactgcaaactccgtctcctgggttcaagcagttctcctgcctcagcttcccaagtagctgggattacagtaatctatgccagcaattatgacaatgttagcagaccatgcagctcgtcagctgcttgatttcagccaaaaactggatatcaacttattagataatgtggtgaattgcttataccatggagaaggagcccagcaaagaatggctcaagaagtactgacacatttaaaggagcatcctgatgcttggacaagagtcgacacaattttggaattttctcagaatatgaatacgaaatactatggactacaaattttggaaaatgtgataaaaacaaggtggaagattctt

SEQ ID NO: 10210 - DNA, 5360 bp, Homo sapiens
  source 1..5360: mol_type = unassigned DNA
acttccgcgggcgcgtgcgcagtggcgggccgggcgcgtgcgcagcgccggcttcttcccagcgcgagttgctgctaacgctcctcctccagcttcccacccccgccgcccgccgcggcccggtaccaacgggtggtctcgccgagggagctgtcgtgcctcgtggtcccgggactgcagtggtgtgcgctctcggcgcgtggcgctaggcatggcgatggatcaagtaaacgcgctgtgcgagcagctggtgaaagcggtgacggtcatgatggaccccaactccacccagcgctaccggctggaagccctcaagttttgtgaggagtttaaagaaaagtgtcctatctgtgtcccctgtggcttgaggttggctgagaaaacacaagttgccatcgtcagacattttggccttcagatcctggaacacgttgtcaagtttcggtggaacggcatgtctcgattggagaaggtgtatctgaagaacagtgtcatggagctgattgcaaatggaacattgaacattttggaagaggagaaccatattaaagatgctctgtctcgaattgtagtggaaatgatcaagcgagagtggccacagcattggcctgacatgctaatagaattggacactctttccaaacaaggggaaacacagacagaattggtgatgtttatccttttgcgactggcagaggatgtagtgacttttcagacacttccccctcaaagaagaagggacatccagcaaacattaacccagaacatggaaaggatcttcagttttctgcttaacacacttcaagaaaatgtaaacaagtatcagcaagtgaagacagatacttctcaggagtcaaaggcgcaagcaaactgtcgagtaggagttgcagcactgaatactctagcaggctatattgactgggtgtctatgagtcacatcactgctgaaaactgtaaactcctggagatactgtgtttgctgttgaatgaacaggaacttcagttgggagccgctgagtgtcttctcattgcagtcagcagaaaaggcaagttggaagaccggaagcccttgatggtcttatttggagatgttgccatgcattatatactctccgccgcacagactgctgatggaggaggtttggtagaaaaacactacgtctttctgaagaggctctgtcaggtgttgtgtgcgctgggcaatcagctgtgtgcattgctgggtgcagattctgatgtagaaacaccatcaaactttggaaaatacctggaatcttttcttgctttcacaacccatccaagtcagtttctacgctcttcaactcagatgacttggggagccctcttcaggcatgaaatcctgtcccgtgatcctttgctattagcaataataccaaaatatcttcgtgcttccatgactaacttggtcaagatgggctttccttctaaaacagacagccctagctgtgaatattctcggtttgattttgatagcgatgaggacttcaatgctttcttcaactcctcccgagcacaacaaggagaggtgatgaggttggcatgtcgtttggatcccaaaactagcttccagatggctggggagtggctaaagtatcaactatcaacttttcttgatgctggttctgtgaattcttgttctgcagttggaactggagaaggaagcctctgttccgtcttctcaccttcattcgtgcagtgggaagccatgactctttttttggaaagtgttatcacccagatgtttcgaacactaaatagagaagaaattcctgttaatgatggaatagagctattgcagatggttctgaactttgataccaaggatcccctcatcctgtcctgcgtccttactaatgtctctgcactctttccatttgtcacctacagaccagagttcctgccccaggtcttctctaagctattttcatctgtcacttttgaaactgttgaagaaagtaaggcccccagaacccgggcagtgaggaatgtgaggaggcatgcttgttcctccatcatcaagatgtgtcgtgactacccccagcttgtgctgcccaattttgacatgctttataaccatgtgaagcaactcctctccaatgagctactcctgacacaaatggagaagtgtgccctcatggaagccctggttctcattagcaaccaatttaagaactacgagcgtcagaaggtgttcctagaggagctgatggcaccagtggccagcatctggctttctcaagacatgcacagagtgctgtcagatgttgatgctttcattgcgtatgtgggtacagatcagaagagctgtgacccaggcctggaggatccgtgtggcttaaaccgtgcacgaatgagcttttgtgtatacagcattctgggtgtggtgaaacgaacttgctggcccactgacctagaagaggccaaagctgggggatttgtggtgggttatacatccagtggaaatccaatcttccgtaacccctgcacagagcagattctgaaacttcttgacaatttgcttgcgcttataagaacccacaatacattatatgcaccagaaatgctagccaaaatggcagagcctttcaccaaggctctggatatgcttgacgcggaaaaatctgctatattaggattacctcaacctctcttggaactcaatgactctcctgtcttcaaaaccgtcttggaaagaatgcagcgtttcttctctaccctctatgaaaactgttttcatatcctagggaaggcaggcccttccatgcagcaagacttctatactgtggaggaccttgctacccagcttctcagctcagcctttgtcaacttgaacaatattcctgactaccgactcagacccatgcttcgtgtctttgtaaagcctctggtgctcttctgtcccccagagcactatgaagccctggtatcccccatcctcggacctcttttcacctacctccatatgaggctttctcagaaatggcaagttatcaaccaaaggagcctgctgtgtggagaagatgaggctgcagatgaaaacccagagtctcaagagatgctggaggagcaactggtgaggatgttaacccgagaagtcatggacctaatcacggtttgctgtgtttcaaagaagggtgctgaccacagtagtgctcccccagcagatggagacgatgaagaaatgatggccacagaggtcaccccctcagctatggcagagcttacagacctgggcaaatgtctgatgaagcatgaggatgtttgtacagcgctattaattacagccttcaattccctggcctggaaagatactctgtcctgccagaggacaacctcacagctctgctggcctctcctcaaacaagtgctgtcagggacactgctcgcagatgcagttacgtggcttttcaccagtgtgctgaaaggcttacagatgcacgggcagcacgacgggtgcatggcttccctggtccatctggccttccagatatacgaggcactgcgccccaggtacctggagataagagctgtaatggagcaaatccctgaaatacagaaggactcactggaccagtttgactgcaagcttttaaacccctccctgcagaaagtggctgacaagcgccgaaaggaccaattcaaacgcctcattgctggttgcattgggaaacccttgggagagcagttccgaaaagaagttcacattaagaatcttccctcacttttcaaaaaaacaaagccaatgctggagacggaggtgctggacaatgatgggggtggcctggccaccatctttgaaccctgaatcaagcttttgggcatccttcctcggcctttcttgtcatctcttctttccctttgtagccgatctctaggcccttcttgcactgccacctcactttccaccactgtcagcctggaaagagatccaggtctggagctggagagaacaggccctgtgcaggaccagaagtaattatactaaagtatcaagaaagggagttagggcttaaactattctgtctagatgtcccagatagttcccattctacttggagatttggcttttccaagaaaagctagagcagagcagcccttctcccacaagccctcccacccccgtgcagccacatacctgtacagaatggtaactaagggtgctgtgcccaaccctgcgactagcaaggctcgcagcaagagcacagccctcaactacttgtgccagagtttctcttggaccactccaactcccactgagcccttttgctgctgggctggcaggaaactttccccactccctaaggggcatgtctgggttaggtgctaagtgctgaagagaacttggtcagttctctcaactttgctttgggcaagaatctggtcacctgatgggatccatggtacaggctactgctaaacttggcacagtatcaagtatagtacctccaaggaccagggctgggaagtctttagtgctaacatcccctttagagttcacacatcttgcccttccatgaatgacccctcagtctggcctccccagcctcaaggtccactcaggcacaagagccacagtaccctagatagtgtcacatgacaccgttgtcatccaaggataatacagaccaactaggctacatctgtgatgagcagctagcaaagccgctggtcttctcctaggactaagtccaggtgccttccacaatctcatggtctttcaggtccctggttacttttctcaaaggccatttccaaaagaatacatgccttcacatcacaacctgtactgtgagtccattctagaggtcactgaaaggccctgtaaagagaggacatggatacgggacctggccctgaggttattactggccgtaaggcagagttaatccatacagaaaccagtgtgtccatgtgctctgcacaaaaacagacctgttgtccatccagtccactgacaagagggtttccccgagagccgaagtggactgaagctacagtttttagctggtgcgggccacaggcagggtcagattgagaagaagcaaagctggggaagcagaagttgggagtcttgtgttgctccctcttcctgtgtggtgctctgggtttctgtggatcgtgaaggcgatctcaagagtgtttccctccaaacctgatagctgcctattcctgtctggttggggctgtggaggatgtagttgtatttattgcattgtaatatttttaacatcctgtgacttcatgctagaaattttctattgtttatagaaactttttgtagaaacattaactctaaagcacatctgcatgtcagtaaaaatctcagtttcgtacagaaa

SEQ ID NO: 10211 - DNA, 2070 bp, Homo sapiens
  source 1..2070: mol_type = unassigned DNA
cgcgtgcgcagcgccggcttcttcccagcgcgagttgctgctaacgctcctcctccagcttcccacccccgccgcccgccgcggcccggtaccaacgggtggtctcgccgagggagctgtcgtgcctcgtggtcccgggactgcagtggtgtgcgctctcggcgcgtggcgctaggcatggcgatggatcaagtaaacgcgctgtgcgagcagctggtgaaagcggtgacggtcatgatggaccccaactccacccagcgctaccggctggaagccctcaagttttgtgaggagtttaaagaaaagtgtcctatctgtgtcccctgtggcttgaggttggctgagaaaacacaagttgccatcgtcagacattttggccttcagatcctggaacacgttgtcaagtttcggtggaacggcatgtctcgattggagaaggtgtatctgaagaacagtgtcatggagctgattgcaaatggaacattgaacattttggaagaggagaaccatattaaagatgctctgtctcgaattgtagtggaaatgatcaagcgagagtggccacagcattggcctgacatgctaatagaattggacactctttccaaacaaggggaaacacagacagaattggtgatgtttatccttttgcgactggcagaggatgtagtgacttttcagacacttccccctcaaagaagaagggacatccagcaaacattaacccagaacatggaaaggatcttcagttttctgcttaacacacttcaagaaaatgtaaacaagtatcagcaagtgaagacagatacttctcaggagtcaaaggcgcaagcaaactgtcgagtaggagttgcagcactgaatactctagcaggctatattgactgggtgtctatgagtcacatcactgctgaaaactgtaaactcctggagatactgtgtttgctgttgaatgaacaggaacttcagttgggagccgctgagtgtcttctcattgcagtcagcagaaaaggcaagttggaagaccggaagcccttgatggtcttatttggagatgttgccatgcattatatactctccgccgcacagactgctgatggaggaggtttggtagaaaaacactacgtctttctgaagaggctctgtcaggtgttgtgtgcgctgggcaatcagctgtgtgcattgctgggtgcagattctgatgtagaaacaccatcaaactttggaaaatacctggaatcttttcttgctttcacaacccatccaagtcagtttctacgctcttcaactcagatgacttggggagccctcttcaggcatgaaatcctgtcccgtgatcctttgctattagcaataataccaaaatatcttcgtgcttccatgactaacttggtcaagatgggctttccttctaaaacagacagccctagctgtgaatattctcggtttgattttgatagcgatgaggacttcaatgctttcttcaactcctcccgagcacaacaaggagaggtgatgaggttggcatgtcgtttggatcccaaaactagcttccagatggctggggagtggctaaagtatcaactatcaacttttcttgatgctggttctgtgaattcttgttctgcagttggaactggagaaggaagcctctgttccgtcttctcaccttcattcgtgcagtgggaagccatgactctttttttggaaagtgttatcacccagatgtttcgaacactaaatagagaagaaattcctgttaatgatggaatagagctattgcagatggttctgaactttgataccaaggatcccctcatcctgtcctgcgtccttactaatgtctctgcactctttccatttgtcacctacagaccagagttcctgccccaggtcttctctaagctattttcatctgtcacttttgaaactgttgaagaaagtaagccacctcactttccaccactgtcagcctggaaagagatccaggtctggagctggagagaacaggccctgtgcaggaccagaagtaattatactaaagtatcaagaaagggagttagggcttaa

SEQ ID NO: 10212 - DNA, 3757 bp, Homo sapiens
  source 1..3757: mol_type = unassigned DNA
acttccgcgggcgcgtgcgcagtggcgggccgggcgcgtgcgcagcgccggcttcttcccagcgcgagttgctgctaacgctcctcctccagcttcccacccccgccgcccgccgcggcccggtaccaacgggtggtctcgccgagggagctgtcgtgcctcgtggtcccgggactgcagtggtgtgcgctctcggcgcgtggcgctaggcatggcgatggatcaagtaaacgcgctgtgcgagcagctggtgaaagcggtgacggtcatgatggaccccaactccacccagcgctaccggctggaagccctcaagttttgtgaggagtttaaagaaaagtgtcctatctgtgtcccctgtggcttgaggttggctgagaaaacacaagttgccatcgtcagacattttggccttcagatcctggaacacgttgtcaagtttcggtggaacggcatgtctcgattggagaaggtgtatctgaagaacagtgtcatggagctgattgcaaatggaacattgaacattttggaagaggagaaccatattaaagatgctctgtctcgaattgtagtggaaatgatcaagcgagagtggccacagcattggcctgacatgctaatagaattggacactctttccaaacaaggggaaacacagacagaattggtgatgtttatccttttgcgactggcagaggatgtagtgacttttcagacacttccccctcaaagaagaagggacatccagcaaacattaacccagaacatggaaaggatcttcagttttctgcttaacacacttcaagaaaatgtaaacaagtatcagcaagtgaagacagatacttctcaggagtcaaaggcgcaagcaaactgtcgagtaggagttgcagcactgaatactctagcaggctatattgactgggtgtctatgagtcacatcactgctgaaaactgtaaactcctggagatactgtgtttgctgttgaatgaacaggaacttcagttgggagccgctgagtgtcttctcattgcagtcagcagaaaaggcaagttggaagaccggaagcccttgatggtcttatttggagatgttgccatgcattatatactctccgccgcacagactgctgatggaggaggtttggtagaaaaacactacgtctttctgaagaggctctgtcaggtgttgtgtgcgctgggcaatcagctgtgtgcattgctgggtgcagattctgatgtagaaacaccatcaaactttggaaaatacctggaatcttttcttgctttcacaacccatccaagtcagtttctacgctcttcaactcagatgacttggggagccctcttcaggcatgaaatcctgtcccgtgatcctttgctattagcaataataccaaaatatcttcgtgcttccatgactaacttggtcaagatgggctttccttctaaaacagacagccctagctgtgaatattctcggtttgattttgatagcgatgaggacttcaatgctttcttcaactcctcccgagcacaacaaggagaggtgatgaggttggcatgtcgtttggatcccaaaactagcttccagatggctggggagtggctaaagtatcaactatcaacttttcttgatgctggttctgtgaattcttgttctgcagttggaactggagaaggaagcctctgttccgtcttctcaccttcattcgtgcagtgggaagccatgactctttttttggaaagtgttatcacccagatgtttcgaacactaaatagagaagaaattcctgttaatgatggaatagagctattgcagatggttctgaactttgataccaaggatcccctcatcctgtcctgcgtccttactaatgtctctgcactctttccatttgtcacctacagaccagagttcctgccccaggtcttctctaagctattttcatctgtcacttttgaaactgttgaagaaagtaaggcccccagaacccgggcagtgaggaatgtgaggaggcatgcttgttcctccatcatcaagatgtgtcgtgactacccccagcttgtgctgcccaattttgacatgctttataaccatgtgaagcaactcctctccaatgagctactcctgacacaaatggagaagtgtgccctcatggaagccctggttctcattagcaaccaatttaagaactacgagcgtcagaaggtgttcctagaggagctgatggcaccagtggccagcatctggctttctcaagacatgcacagagtgctgtcagatgttgatgctttcattgcgtatgtgggtacagatcagaagagctgtgacccaggcctggaggatccgtgtggcttaaaccgtgcacgaatgagcttttgtgtatacagcattctgggtgtggtgaaacgaacttgctggcccactgacctagaagaggccaaagctgggggatttgtggtgggttatacatccagtggaaatccaatcttccgtaacccctgcacagagcagattctgaaacttcttgacaatttgcttgcgcttataagaacccacaatacattatatgcaccagaaatgctagccaaaatggcagagcctttcaccaaggctctggatatgcttgacgcggaaaaatctgctatattaggattacctcaacctctcttggaactcaatgactctcctgtcttcaaaaccgtcttggaaagaatgcagcgtttcttctctaccctctatgaaaactgttttcatatcctagggaaggcaggcccttccatgcagcaagacttctatactgtggaggaccttgctacccagcttctcagctcagcctttgtcaacttgaacaatattcctgactaccgactcagacccatgcttcatatcctttcaaaacctctggtgctcttctgtcccccagagcactatgaagccctggtatcccccatcctcggacctcttttcacctacctccatatgaggctttctcagaaatggcaagttatcaaccaaaggagcctgctgtgtggagaagatgaggctgcagatgaaaacccagagtctcaagagatgctggaggagcaactggtgaggatgttaacccgagaagtcatggacctaatcacggtttgctgtgtttcaaagaagggtgctgaccacagtagtgctcccccagcagatggagacgatgaagaaatgatggccacagaggtcaccccctcagctatggcagagcttacagacctgggcaaatgtctgatgaagcatgaggatgtttgtacagcgctattaattacagccttcaattccctggcctggaaagatactctgtcctgccagaggacaacctcacagctctgctggcctctcctcaaacaagtgctgtcagggacactgctcgcagatgcagttacgtggcttttcaccagtgtgctgaaaggcttacagatgcacgggcagcacgacgggtgcatggcttccctggtccatctggccttccagatatacgaggcactgcgccccaggtacctggagataagagctgtaatggagcaaatccctgaaatacagaaggactcactggaccagtttgactgcaagcttttaaacccctccctgcagaaagtggctgacaagcgccgaaaggaccaattcaaacgcctcattgctggttgcattgggaaacccttgggagagcagttccgaaaagaagttcacattaagaatcttccctttgtagccgatctctag

SEQ ID NO: 10213 - DNA, 3307 bp, Homo sapiens
  source 1..3307: mol_type = unassigned DNA
acttccgcgggcgcgtgcgcagtggcgggccgggcgcgtgcgcagcgccggcttcttcccagcgcgagttgctgctaacgctcctcctccagcttcccacccccgccgcccgccgcggcccggtaccaacgggtggtctcgccgagggagctgtcgtgcctcgtggtcccgggactgcagtggtgtgcgctctcggcgcgtggcgctaggcatggcgatggatcaagtaaacgcgctgtgcgagcagctggtgaaagcggtgacggtcatgatggaccccaactccacccagcgctaccggctggaagccctcaagttttgtgaggagtttaaagaaaagtgtcctatctgtgtcccctgtggcttgaggttggctgagaaaacacaagttgccatcgtcagacattttggccttcagatcctggaacacgttgtcaagtttcggtggaacggcatgtctcgattggagaaggtgtatctgaagaacagtgtcatggagctgattgcaaatggaacattgaacattttggaagaggagaaccatattaaagatgctctgtctcgaattgtagtggaaatgatcaagcgagagtggccacagcattggcctgacatgctaatagaattggacactctttccaaacaaggggaaacacagacagaattggtgatgtttatccttttgcgactggcagaggatgtagtgacttttcagacacttccccctcaaagaagaagggacatccagcaaacattaacccagaacatggaaaggatcttcagttttctgcttaacacacttcaagaaaatgtaaacaagtatcagcaagtgaagacagatacttctcaggagtcaaaggcgcaagcaaactgtcgagtaggagttgcagcactgaatactctagcaggctatattgactgggtgtctatgagtcacatcactgctgaaaactgtaaactcctggagatactgtgtttgctgttgaatgaacaggaacttcagttgggagccgctgagtgtcttctcattgcagtcagcagaaaaggcaagttggaagaccggaagcccttgatggtcttatttggagatgttgccatgcattatatactctccgccgcacagactgctgatggaggaggtttggtagaaaaacactacgtctttctgaagaggctctgtcaggtgttgtgtgcgctgggcaatcagctgtgtgcattgctgggtgcagattctgatgtagaaacaccatcaaactttggaaaatacctggaatcttttcttgctttcacaacccatccaagtcagtttctacgctcttcaactcagatgacttggggagccctcttcaggcatgaaatcctgtcccgtgatcctttgctattagcaataataccaaaatatcttcgtgcttccatgactaacttggtcaagatgggctttccttctaaaacagacagccctagctgtgaatattctcggtttgattttgatagcgatgaggacttcaatgctttcttcaactcctcccgagcacaacaaggagaggtgatgaggttggcatgtcgtttggatcccaaaactagcttccagatggctggggagtggctaaagtatcaactatcaacttttcttgatgctggttctgtgaattcttgttctgcagttggaactggagaaggaagcctctgttccgtcttctcaccttcattcgtgcagtgggaagccatgactctttttttggaaagtgttatcacccagatgtttcgaacactaaatagagaagaaattcctgttaatgatggaatagagctattgcagatggttctgaactttgataccaaggatcccctcatcctgtcctgcgtccttactaatgtctctgcactctttccatttgtcacctacagaccagagttcctgccccaggtcttctctaagctattttcatctgtcacttttgaaactgttgaagaaagtaaggcccccagaacccgggcagtgaggaatgtgaggaggcatgcttgttcctccatcatcaagatgtgtcgtgactacccccagcttgtgctgcccaattttgacatgctttataaccatgtgaagcaactcctctccaatgagctactcctgacacaaatggagaagtgtgccctcatggaagccctggttctcattagcaaccaatttaagaactacgagcgtcagaaggtgttcctagaggagctgatggcaccagtggccagcatctggctttctcaagacatgcacagagtgctgtcagatgttgatgctttcattgcgtatgtgggtacagatcagaagagctgtgacccaggcctggaggatccgtgtggcttaaaccgtgcacgaatgagcttttgtgtatacagcattctgggtgtggtgaaacgaacttgctggcccactgacctagaagaggccaaagctgggggatttgtggtgggttatacatccagtggaaatccaatcttccgtaacccctgcacagagcagattctgaaacttcttgacaatttgcttgcgcttataagaacccacaatacattatatgcaccagaaatgctagccaaaatggcagagcctttcaccaaggctctggatatgcttgacgcggaaaaatctgctatattaggattacctcaacctctcttggaactcaatgactctcctgtcttcaaaaccgtcttggaaagaatgcagcgtttcttctctaccctctatgaaaactgttttcatatcctagggaaggcaggcccttccatgcagcaagacttctatactgtggaggaccttgctacccagcttctcagctcagcctttgtcaacttgaacaatattcctgactaccgactcagacccatgcttcatatcctttcaaaacctctggtgctcttctgtcccccagagcactatgaagccctggtatcccccatcctcggacctcttttcacctacctccatatgaggctttctcagaaatggcaagttatcaaccaaaggagcctgctgtgtggagaagatgaggctgcagatgaaaacccagagtctcaagagatgctggaggagcaactggtgaggatgttaacccgagaagtcatggacctaatcacggtttgctgtgtttcaaagaagggtgctgaccacagtagtgctcccccagcagatggagacgatgaagaaatgatggccacagaggtcaccccctcagctatggcagagcttacagacctggtgtccatccagtccactgacaagagggtttccccgagagccgaagtggactga

SEQ ID NO: 10214 - DNA, 3172 bp, Homo sapiens
  source 1..3172: mol_type = unassigned DNA
gtgcgcagcgccggcttcttcccagcgcgagttgctgctaacgctcctcctccagcttcccacccccgccgcccgccgcggcccggtaccaacgggtggtctcgccgagggagctgtcgtgcctcgtggtcccgggactgcagtggtgtgcgctctcggcgcgtggcgctaggcatggcgatggatcaagtaaacgcgctgtgcgagcagctggtgaaagcggtgacggtcatgatggaccccaactccacccagcgctaccggctggaagccctcaagttttgtgaggagtttaaagaaaagtgtcctatctgtgtcccctgtggcttgaggttggctgagaaaacacaagttgccatcgtcagacattttggccttcagatcctggaacacgttgtcaagtttcggtggaacggcatgtctcgattggagaaggtgtatctgaagaacagtgtcatggagctgattgcaaatggaacattgaacattttggaagaggctctgtcaggtgttgtgtgcgctgggcaatcagctgtgtgcattgctgggtgcagattctgatgtagaaacaccatcaaactttggaaaatacctggaatcttttcttgctttcacaacccatccaagtcagtttctacgctcttcaactcagatgacttggggagccctcttcaggcatgaaatcctgtcccgtgatcctttgctattagcaataataccaaaatatcttcgtgcttccatgactaacttggtcaagatgggctttccttctaaaacagacagccctagctgtgaatattctcggtttgattttgatagcgatgaggacttcaatgctttcttcaactcctcccgagcacaacaaggagaggtgatgaggttggcatgtcgtttggatcccaaaactagcttccagatggctggggagtggctaaagtatcaactatcaacttttcttgatgctggttctgtgaattcttgttctgcagttggaactggagaaggaagcctctgttccgtcttctcaccttcattcgtgcagtgggaagccatgactctttttttggaaagtgttatcacccagatgtttcgaacactaaatagagaagaaattcctgttaatgatggaatagagctattgcagatggttctgaactttgataccaaggatcccctcatcctgtcctgcgtccttactaatgtctctgcactctttccatttgtcacctacagaccagagttcctgccccaggtcttctctaagctattttcatctgtcacttttgaaactgttgaagaaagtaaggcccccagaacccgggcagtgaggaatgtgaggaggcatgcttgttcctccatcatcaagatgtgtcgtgactacccccagcttgtgctgcccaattttgacatgctttataaccatgtgaagcaactcctctccaatgagctactcctgacacaaatggagaagtgtgccctcatggaagccctggttctcattagcaaccaatttaagaactacgagcgtcagaaggtgttcctagaggagctgatggcaccagtggccagcatctggctttctcaagacatgcacagagtgctgtcagatgttgatgctttcattgcgtatgtgggtacagatcagaagagctgtgacccaggcctggaggatccgtgtggcttaaaccgtgcacgaatgagcttttgtgtatacagcattctgggtgtggtgaaacgaacttgctggcccactgacctagaagaggccaaagctgggggatttgtggtgggttatacatccagtggaaatccaatcttccgtaacccctgcacagagcagattctgaaacttcttgacaatttgcttgcgcttataagaacccacaatacattatatgcaccagaaatgctagccaaaatggcagagcctttcaccaaggctctggatatgcttgacgcggaaaaatctgctatattaggattacctcaacctctcttggaactcaatgactctcctgtcttcaaaaccgtcttggaaagaatgcagcgtttcttctctaccctctatgaaaactgttttcatatcctagggaaggcaggcccttccatgcagcaagacttctatactgtggaggaccttgctacccagcttctcagctcagcctttgtcaacttgaacaatattcctgactaccgactcagacccatgcttcgtgtctttgtaaagcctctggtgctcttctgtcccccagagcactatgaagccctggtatcccccatcctcggacctcttttcacctacctccatatgaggctttctcagaaatggcaagttatcaaccaaaggagcctgctgtgtggagaagatgaggctgcagatgaaaacccagagtctcaagagatgctggaggagcaactggtgaggatgttaacccgagaagtcatggacctaatcacggtttgctgtgtttcaaagaagggtgctgaccacagtagtgctcccccagcagatggagacgatgaagaaatgatggccacagaggtcaccccctcagctatggcagagcttacagacctgggcaaatgtctgatgaagcatgaggatgtttgtacagcgctattaattacagccttcaattccctggcctggaaagatactctgtcctgccagaggacaacctcacagctctgctggcctctcctcaaacaagtgctgtcagggacactgctcgcagatgcagttacgtggcttttcaccagtgtgctgaaaggcttacagatgcacgggcagcacgacgggtgcatggcttccctggtccatctggccttccagatatacgaggcactgcgccccaggtacctggagataagagctgtaatggagcaaatccctgaaatacagaaggactcactggaccagtttgactgcaagcttttaaacccctccctgcagaaagtggctgacaagcgccgaaaggaccaattcaaacgcctcattgctggttgcattgggaaacccttgggagagcagttccgaaaagaagttcacattaagaatcttccctcacttttcaaaaaaacaaagccaatgctggagacggaggtgctggacaatgatgggggtggcctggccaccatctttgaaccctgaatcaagcttttgggcatcctt

SEQ ID NO: 10215 - DNA, 4422 bp, Homo sapiens
  source 1..4422: mol_type = unassigned DNA
ggcagtggccgtgtgggttgaggctgcgaggacagcgcgggcccccgggcctctcccctgagccggccgcctgggccgcgcggtcgaggcctgtcagcctccgcccgttcagcctcggggccggggccgccgccacctctgcccgcggaggccggggagcccctgcctgggcccgcagcctcccccgcgggggtcgggcccgggcgggggtcccgagcagctgccctcctcgccggcatccgagcctcatttcctgctttttcagtttccttggggaggggcgggtgggtctggatgaattgtctcggggtcccccgatgaggcgacccgggcggccctgccctttttagagggtcccctcggggcccggtggggaaggggttgtctttgcatgggtgggggacttcccgagtctgccgggaccatgacctgaactgtgcgagcgggacgtgtccgaagcccaagaaccagctcatctgagccgccccctccccggccagcatggcatctgaagaagcctctctcagggcattggaaagtctgatgacagaattttttcacgattgtacaaccaatgaaagaaaacgtgagatagaggagcttcttaataactttgcccagcaaataggagcctggagattctgcctgtactttctctccagcactaggaatgactatgtaatgatgtacagtttaacagtttttgagaatctgatcaataaaatgtggcttggggtcccatctcaggataagatggaaatccgtagctgtctgcccaaactccttttggctcaccataaaaccttaccttactttatccggaacaagctctgcaaagttattgttgatattggacgtcaggattggcccatgttctaccacgacttttttactaacattttacagttgatccagtcccctgtgacaaccccccttgggctgatcatgttgaagacaacttcagaagagctggcttgtccccgtgaggacctcagtgtggctcggaaggaggagttgcggaagctgctactggaccaggtgcagacagtgcttgggctactgacaggtatcttggagactgtctgggacaaacacagtgttactgctgccactccaccaccatccccgacctcaggagaaagtggtgacttactgagtaacctgttgcagagtcccagttcagccaaactgttgaatcagccaattcccatccttgatgtggagagtgagtatatctgttccctggctttggagtgcctggcccatctcttcagttggattcctctgtctgccagcatcaccccatccctccttaccaccatcttccactttgcacgatttggctgtgacatccgggccagaaagatggcgtcagttaacggcagcagccagaactgtgtctcgggtcaggagcgcggccggctgggggtcctggccatgtcctgcatcaatgaactcatgtccaagaactgtgtgcctatggaatttgaggagtatttactgcgtatgttccagcagactttctacctcctgcagaaaatcaccaaggataacaatgcccacacagtgaagagcaggctagaagagctcgatgagagctatatcgagaagtttactgactttcttcggctctttgtgagtgttcacctaagaagaatcgagtcttactcccagttccctgtggtggagtttttgacacttttgttcaagtacacatttcatcagcctactcatgaaggttacttctcttgtttggatatctggacgctgtttttggactatctgacaagtaaaattaaaagtcgtcttggagacaaggaagcagttctcaacaggtacgaagatgccctggtgctcctgctcacagaggtgttgaatcgaatccagttcagatacaaccaagcccagctggaggagttggatgatgagactctggatgacgatcagcagacggagtggcagcggtacttacggcagagcttggaggtggtggccaaagtgatggagctcctgcccacgcacgccttctccacactgttccctgttcttcaggacaatttagaagtttatttgggattacaacagtttatagtcacttcagggtcaggacacaggttgaacatcacggcggagaacgactgccggcggctgcactgctccctgagagacttgagctccctgctgcaggccgtgggccgcctggccgagtactttatcggggatgtgtttgctgcacggttcaatgatgccctcacagtcgtggaaaggttggtcaaagtcactctgtacggatctcagataaaattgtacaacattgaaactgctgtgccatcagtattgaaacctgacctcattgatgtgcatgctcagtccctggctgcgctgcaggcttactctcactggttagcacagtattgcagtgaagttcaccggcagaacacgcagcagttcgtgacactcatctctactaccatggatgcaatcacacctctaatcagcaccaaggtccaagacaagctgctgctatctgcgtgccacttactggtctcactggccaccaccgtgcggcccgtctttctgatcagcatccctgcagtgcagaaagtattcaacagaatcactgatgcctctgccctgcgacttgtcgataaggcccaggtgttggtgtgccgagccctctctaacatcttgctgcttccgtggccaaaccttccagagaatgagcagcagtggcccgtgcgctccatcaaccacgccagcctcatctctgcactctcccgggactatcgcaacctgaagcccagtgctgttgccccacagagaaagatgccactggatgacaccaaactgattatccaccagacactcagcgtcttagaagatattgtggagaatatctcgggggagtccaccaagtctcgacagatttgctaccagtcgctgcaggaatctgttcaggtctccctggccctctttccagcttttatccatcagtcagatgtgactgatgagatgctgagcttcttcctcactctgtttcgaggccttagagtacagatgggtgtgcctttcactgagcaaatcatacagactttcctcaacatgtttaccagagagcagttagccgagagcatcctccacgagggcagcacaggctgccgggtggtggagaagtttctgaagatcctgcaggtggtggtccaggagccaggccaggtgttcaagcccttcctccccagcatcatcgccctgtgcatggagcaagtgtatcccatcattgccgagcgtccctcccctgatgtgaaggccgagctgtttgagctccttttccggacgctccatcacaactggaggtacttcttcaagtccaccgtgctggccagtgtccagagggggatcgctgaggagcagatggagaatgagccccagttcagtgccatcatgcaggctttcggacagtcctttctccagcccgacatccacctttttaaacaaaatctcttctacttggagactctcaacaccaagcagaagctgtaccacaagaagatcttccggactgccatgctgttccagtttgtgaacgtgctgctccaggtcctggtccacaagtcccatgatcttctgcaggaggagattggcatcgccatctacaacatggcctcagtcgactttgatggcttctttgccgccttcctcccagagttcctgaccagctgtgatggtgtggatgccaaccagaaaagtgtgctggggcggaatttcaagatggatcgggacctgccctcattcacccagaatgtgcacaggctggtcaacgacctgcgctactacagactctgcaacgacagcctgccccctggcactgtgaagctctaggcctgctactgcctggggacacggacttctgctgctgccacctgcgccagccctaccttccaccacagatgtctcccagatgggccttggtcacactccttggcttctcccaccgcaagcaacgctgcctgcctctgccgctcctccacatcttgccgctgcccagcagagctggcttctgggtccacctgagcactggacggtgctcccagggcgttggagcaggcggaggggtgtgtggccaggtactaggaggcaccaggaaatcccgcggggtggcccatgcagaccaggcgcacgtggctcatggggcagaattgccaaggacagctcacgacagtgccaccttctcaccattccagccaaggagagatgtgacgttggaactgctctggcacttctgtcaagcctcccccgccccaattgccttgagatctctgctctttgtcagagatttgcaaagactcacgtttttgttgttttctcatcattccattgtgatactaagaaactaagaagcttaatgaaaagaaataaaatgcc

SEQ ID NO: 10216 - DNA, 4255 bp, Homo sapiens
  source 1..4255: mol_type = unassigned DNA
gaggcgacccgggcggccctgccctttttagagggtcccctcggggcccggtggggaaggggttgtctttgcatgggtgggggacttcccgagtctgccgggaccatgacctgaactgtgcgagcgggacgtgtccgaagcccaagaaccagctcatctgagccgccccctccccggccagcatggtagctcatgtaagtggagtcatgaagtatttggcctgttgtgactgccttatttcacatggcacagtgttctcaagcttcatccgtgtggtggcgtgtgtcagagcttccttccttttgaaagctgaattccattgcatctgaagaagcctctctcagggcattggaaagtctgatgacagaattttttcacgattgtacaaccaatgaaagaaaacgtgagatagaggagcttcttaataactttgcccagcaaataggagcctggagattctgcctgtactttctctccagcactaggaatgactatgtaatgatgtacagtttaacagtttttgagaatctgatcaataaaatgtggcttggggtcccatctcaggataagatggaaatccgtagctgtctgcccaaactccttttggctcaccataaaaccttaccttactttatccggaacaagctctgcaaagttattgttgatattggacgtcaggattggcccatgttctaccacgacttttttactaacattttacagttgatccagtcccctgtgacaaccccccttgggctgatcatgttgaagacaacttcagaagagctggcttgtccccgtgaggacctcagtgtggctcggaaggaggagttgcggaagctgctactggaccaggtgcagacagtgcttgggctactgacaggtatcttggagactgtctgggacaaacacagtgttactgctgccactccaccaccatccccgacctcaggagaaagtggtgacttactgagtaacctgttgcagagtcccagttcagccaaactgttgaatcagccaattcccatccttgatgtggagagtgagtatatctgttccctggctttggagtgcctggcccatctcttcagttggattcctctgtctgccagcatcaccccatccctccttaccaccatcttccactttgcacgatttggctgtgacatccgggccagaaagatggcgtcagttaacggcagcagccagaactgtgtctcgggtcaggagcgcggccggctgggggtcctggccatgtcctgcatcaatgaactcatgtccaagaactgtgtgcctatggaatttgaggagtatttactgcgtatgttccagcagactttctacctcctgcagaaaatcaccaaggataacaatgcccacacagtgaagagcaggctagaagagctcgatgagagctatatcgagaagtttactgactttcttcggctctttgtgagtgttcacctaagaagaatcgagtcttactcccagttccctgtggtggagtttttgacacttttgttcaagtacacatttcatcagcctactcatgaaggttacttctcttgtttggatatctggacgctgtttttggactatctgacaagtaaaattaaaagtcgtcttggagacaaggaagcagttctcaacaggtacgaagatgccctggtgctcctgctcacagaggtgttgaatcgaatccagttcagatacaaccaagcccagctggaggagttggatgatgagactctggatgacgatcagcagacggagtggcagcggtacttacggcagagcttggaggtggtggccaaagtgatggagctcctgcccacgcacgccttctccacactgttccctgttcttcaggacaatttagaagtttatttgggattacaacagtttatagtcacttcagggtcaggacacaggttgaacatcacggcggagaacgactgccggcggctgcactgctccctgagagacttgagctccctgctgcaggccgtgggccgcctggccgagtactttatcggggatgtgtttgctgcacggttcaatgatgccctcacagtcgtggaaaggttggtcaaagtcactctgtacggatctcagataaaattgtacaacattgaaactgctgtgccatcagtattgaaacctgacctcattgatgtgcatgctcagtccctggctgcgctgcaggcttactctcactggttagcacagtattgcagtgaagttcaccggcagaacacgcagcagttcgtgacactcatctctactaccatggatgcaatcacacctctaatcagcaccaaggtccaagacaagctgctgctatctgcgtgccacttactggtctcactggccaccaccgtgcggcccgtctttctgatcagcatccctgcagtgcagaaagtattcaacagaatcactgatgcctctgccctgcgacttgtcgataaggcccaggtgttggtgtgccgagccctctctaacatcttgctgcttccgtggccaaaccttccagagaatgagcagcagtggcccgtgcgctccatcaaccacgccagcctcatctctgcactctcccgggactatcgcaacctgaagcccagtgctgttgccccacagagaaagatgccactggatgacaccaaactgattatccaccagacactcagcgtcttagaagatattgtggagaatatctcgggggagtccaccaagtctcgacagatttgctaccagtcgctgcaggaatctgttcaggtctccctggccctctttccagcttttatccatcagtcagatgtgactgatgagatgctgagcttcttcctcactctgtttcgaggccttagagtacagatgggtgtgcctttcactgagcaaatcatacagactttcctcaacatgtttaccagagagcagttagccgagagcatcctccacgagggcagcacaggctgccgggtggtggagaagtttctgaagatcctgcaggtggtggtccaggagccaggccaggtgttcaagcccttcctccccagcatcatcgccctgtgcatggagcaagtgtatcccatcattgccgagcgtccctcccctgatgtgaaggccgagctgtttgagctccttttccggacgctccatcacaactggaggtacttcttcaagtccaccgtgctggccagtgtccagagggggatcgctgaggagcagatggagaatgagccccagttcagtgccatcatgcaggctttcggacagtcctttctccagcccgacatccacctttttaaacaaaatctcttctacttggagactctcaacaccaagcagaagctgtaccacaagaagatcttccggactgccatgctgttccagtttgtgaacgtgctgctccaggtcctggtccacaagtcccatgatcttctgcaggaggagattggcatcgccatctacaacatggcctcagtcgactttgatggcttctttgccgccttcctcccagagttcctgaccagctgtgatggtgtggatgccaaccagaaaagtgtgctggggcggaatttcaagatggatcgggacctgccctcattcacccagaatgtgcacaggctggtcaacgacctgcgctactacagactctgcaacgacagcctgccccctggcactgtgaagctctaggcctgctactgcctggggacacggacttctgctgctgccacctgcgccagccctaccttccaccacagatgtctcccagatgggccttggtcacactccttggcttctcccaccgcaagcaacgctgcctgcctctgccgctcctccacatcttgccgctgcccagcagagctggcttctgggtccacctgagcactggacggtgctcccagggcgttggagcaggcggaggggtgtgtggccaggtactaggaggcaccaggaaatcccgcggggtggcccatgcagaccaggcgcacgtggctcatggggcagaattgccaaggacagctcacgacagtgccaccttctcaccattccagccaaggagagatgtgacgttggaactgctctggcacttctgtcaagcctcccccgccccaattgccttgagatctctgctctttgtcagagatttgcaaagactcacgtttttgttgttttctcatcattccattgtgatactaagaaactaagaagcttaatgaaaagaaataaaatgcctatgttgttgttctag

SEQ ID NO: 10217 - DNA, 4861 bp, Homo sapiens
  source 1..4861: mol_type = unassigned DNA
gcgcagcggcgacggcgtcggcggcggcggcggcagcggctccggccgaggtgcgcgctgggggggagggggggccggagaggagcatgaatggagcaaaatggcggatcatgtgcagagcctggcccaactagagaatctgtgcaaacagctgtatgaaaccacagacacaaccactcgactccaggcagagaaagccttggttgaatttaccaacagccctgattgcctgagcaagtgccagctactcctcgaaagaggaagttcctcttactcccagttactggcagctacatgccttaccaagcttgtatcacgcacaaacaaccccctaccattggaacagcgaatagatattcggaactatgtgctcaactaccttgccactcggccgaagttggctactttcgtgacacaagcacttattcagttatatgccagaatcacaaaactgggctggtttgactgtcagaaggatgactatgtcttcagaaatgcaatcacagacgtcacaaggtttttacaggatagtgttgaatactgcatcattggtgtcacaattttatctcagctaaccaatgaaattaatcaagcagacaccacccatcctttaaccaagcacagaaaaatagcctcttcttttcgcgattcatcattatttgatatcttcacactttcctgcaatttactaaaacaggcttcaggaaagaatctaaacttgaatgatgaaagtcagcatggcttgctcatgcaactgctcaagctcactcataactgcctcaactttgacttcatcggcacttccactgatgagtcctcagacgacctgtgtacagtgcagattcccaccagctggagatcagccttcttagattcttcaaccttgcagctgttttttgacctgtatcattccatccctccttcattttcacctctggtattatcctgcttggtacagatcgcttcagtcagaagatccctgtttaacaatgcagagagggccaagtttctctctcatcttgttgatggtgttaaacgaatactggaaaacccacagagtttatcagacccaaacaattaccatgagttttgcagactactggcccgattgaagagtaactatcaactgggagaattggtaaaggtggaaaactaccctgaggtcatccgattgatagccaacttcacagtgaccagcctacagcactgggaatttgctccaaatagtgtgcactatcttctgagcctgtggcagcggctggcagcctctgtgccgtatgtcaaagccacagagccccacatgctggaaacttacactcctgaggtcaccaaagcctacatcacatcccggttggaatctgtgcacatcatactgagagatggcctggaagatcccctggaggatacggggctggtccagcagcagttggaccagctgtccaccattgggcgttgtgaatatgagaagacgtgtgcactcctcgtgcagttgtttgaccagtcggcccagtcgtaccaggagctgctacagagcgccagcgcaagcccaatggacattgcagtgcaggagggaaggctgacatggctggtttacattattggagcagtgatcggtggccgggtttcttttgccagcactgatgagcaagacgccatggatggtgagcttgtctgtcgggtgctccagctgatgaacctaacagattctcgtttggcccaggcgggtaatgagaagctagagttggccatgctgagcttttttgaacagtttcgtaagatctacattggggaccaagtgcagaaatcctctaagctgtaccgccgactctcagaagttctgggcttgaatgatgagaccatggtcctaagcgtcttcataggaaaaatcatcaccaacttgaagtactggggccgttgtgaaccaatcacctccaagacactacagcttctcaatgacctgtccattgggtacagtagcgtaaggaagctagtgaagcttagtgcggtacagttcatgctgaacaatcacacgagcgagcacttttcatttttgggtattaacaatcagtccaacctgacagacatgcggtgtcggactaccttctacacagcacttgggcgtctcctcatggtggatttaggagaggatgaagatcagtatgagcagttcatgctgccactcacagcagcatttgaggctgtggcccagatgtttagcaccaatagtttcaacgagcaggaggcaaagcgaactctagttggcctagtaagagacctgagagggatcgctttcgctttcaatgccaagaccagcttcatgatgctctttgaatggatatatccatcctatatgccaattctccaacgggcaattgagctctggtaccatgatccagcctgtactacacctgtactcaagttgatggctgaattggttcataataggtcccagcgactccagtttgatgtctcttcccccaatggcatcttactcttccgagaaaccagcaagatgataacaatgtatggcaatcgcatcctgacactaggagaggtcccaaaggatcaggtctatgctctgaagctcaagggcatctccatctgcttctccatgctgaaggctgctctcagtgggagttacgtcaatttcggagtctttcgtctctatggagacgatgccctggacaatgctctgcagaccttcatcaagctgctcctctctattcctcacagtgatctcttggattaccccaagctcagccagtcttattattcactactggaagtcctgacccaggaccatatgaactttattgcaagcctggaacctcacgtcatcatgtatattctctcttccatttctgaaggacttactgcacttgacaccatggtatgcacaggctgctgctcctgcctggaccacattgtgacatacctcttcaagcagctgtcacgtagcaccaagaagaggaccacacccctgaaccaggagagcgaccgctttctgcacatcatgcagcagcatccagagatgatccagcagatgctgtccacggtgctgaacatcatcatctttgaagactgtaggaaccagtggtctatgtcccgaccactacttggcttgatattgcttaatgaaaagtatttttctgacctaagaaacagtattgtgaacagccagccaccggagaagcagcaggccatgcacctgtgttttgagaacctgatggaaggcatcgagcgaaatcttcttacgaaaaacagagacaggttcacccagaacctgtcagcattccgtcgagaagtcaacgactcaatgaagaattccacttatggcgtgaatagcaatgacatgatgagctgacacctccttggactctacctgtacagagcagcgtccctttggtttggcccagaggggcgaacaattgcaagggagagggcctggctgatcctggctcttttctccaggggtgtggggaaaatggcaaaggtcaactagctgcttccccagggaataggggtgtgagtacactcactagggggcagggcgctgctggttcctgggggactgggtgggaagggtggtgggaggagataagagatacaaactgagactccagcctctcctcctggggccacccaagtggggagaacccctagtgtcctgccacaacctgccttgtataaacatgtacattttttcataacattttgaacaaggtttatattgactcaagtttaaaaacaaaaagtgtgactgaaaaatttttacagagtctagtgcaccaatgctgatgtgaggggttgtgtatgcgagtgaagaaaatgtgtattctggtggcctgaagctttactggacaaggatgtgtgagagtgcagagatatatttagtgacacagtagagaggcaaaaaaaaagctaaaattccaaatgtatattttttcgtattgccctgtcctcacccagaaatgatcaattcctgttactgtattaacccttgttattaggaactctaagccatgccagaacaccgtccctccccttggaccgtgtagattctgccctgggtccctagccccttgcagtgataaataactccagctaaaagtgtttggtgttcttatctccaccctctttcctactttgcttaccctcatcctcagacagatgcctcttgcttttaaaagttggatttaacgacgtgttgtagggttcttggtctgtgtgaaggcagagaccagagagaaggaagtgagcccactgctctcctgggagcaatgtgggtgagtccaccagaggccctgctgtgtgtggccaataaattttagtcttccccagccctcgaggcagtgtgtgtggatgtatgcgtgtggatatttatatatgtaccctgcactcatgaatgtatgaactggaggaagttactacagtggaagggttcttaataacaaggtctacctagcatgaagtatttaacattctcccatcccttaaaaaatatacatttttataaaatgaaaaccataataaatgttttgaatattaaaaaaaataataacctacagaggaaaattaatggagacagctatttgccttgtactttttccacaattgttgctgctagttgtacacatctctagttcagctcttgcccacgggacactcatcaattaggttttatttttatttctttcctctacccccagaaacaagcctgttaattttttttccttctcctctggcgactgtgtgatgaatcctttcttgcgtgatcaggttgcggatagacttgtaagggtgtttgctgcatacagtgtaagcattgtgaccgccaataaacttcaatggtttctactga

SEQ ID NO: 10218 - DNA, 4818 bp, Homo sapiens
  source 1..4818: mol_type = unassigned DNA
ggaaccaaagtaagagtttaaagtgcaacagaagagagtctgctgaactttagacatgagggatccagggaggaagagcctggcccaactagagaatctgtgcaaacagctgtatgaaaccacagacacaaccactcgactccaggcagagaaagccttggttgaatttaccaacagccctgattgcctgagcaagtgccagctactcctcgaaagaggaagttcctcttactcccagttactggcagctacatgccttaccaagcttgtatcacgcacaaacaaccccctaccattggaacagcgaatagatattcggaactatgtgctcaactaccttgccactcggccgaagttggctactttcgtgacacaagcacttattcagttatatgccagaatcacaaaactgggctggtttgactgtcagaaggatgactatgtcttcagaaatgcaatcacagacgtcacaaggtttttacaggatagtgttgaatactgcatcattggtgtcacaattttatctcagctaaccaatgaaattaatcaagcagacaccacccatcctttaaccaagcacagaaaaatagcctcttcttttcgcgattcatcattatttgatatcttcacactttcctgcaatttactaaaacaggcttcaggaaagaatctaaacttgaatgatgaaagtcagcatggcttgctcatgcaactgctcaagctcactcataactgcctcaactttgacttcatcggcacttccactgatgagtcctcagacgacctgtgtacagtgcagattcccaccagctggagatcagccttcttagattcttcaaccttgcagctgttttttgacctgtatcattccatccctccttcattttcacctctggtattatcctgcttggtacagatcgcttcagtcagaagatccctgtttaacaatgcagagagggccaagtttctctctcatcttgttgatggtgttaaacgaatactggaaaacccacagagtttatcagacccaaacaattaccatgagttttgcagactactggcccgattgaagagtaactatcaactgggagaattggtaaaggtggaaaactaccctgaggtcatccgattgatagccaacttcacagtgaccagcctacagcactgggaatttgctccaaatagtgtgcactatcttctgagcctgtggcagcggctggcagcctctgtgccgtatgtcaaagccacagagccccacatgctggaaacttacactcctgaggtcaccaaagcctacatcacatcccggttggaatctgtgcacatcatactgagagatggcctggaagatcccctggaggatacggggctggtccagcagcagttggaccagctgtccaccattgggcgttgtgaatatgagaagacgtgtgcactcctcgtgcagttgtttgaccagtcggcccagtcgtaccaggagctgctacagagcgccagcgcaagcccaatggacattgcagtgcaggagggaaggctgacatggctggtttacattattggagcagtgatcggtggccgggtttcttttgccagcactgatgagcaagacgccatggatggtgagcttgtctgtcgggtgctccagctgatgaacctaacagattctcgtttggcccaggcgggtaatgagaagctagagttggccatgctgagcttttttgaacagtttcgtaagatctacattggggaccaagtgcagaaatcctctaagctgtaccgccgactctcagaagttctgggcttgaatgatgagaccatggtcctaagcgtcttcataggaaaaatcatcaccaacttgaagtactggggccgttgtgaaccaatcacctccaagacactacagcttctcaatgacctgtccattgggtacagtagcgtaaggaagctagtgaagcttagtgcggtacagttcatgctgaacaatcacacgagcgagcacttttcatttttgggtattaacaatcagtccaacctgacagacatgcggtgtcggactaccttctacacagcacttgggcgtctcctcatggtggatttaggagaggatgaagatcagtatgagcagttcatgctgccactcacagcagcatttgaggctgtggcccagatgtttagcaccaatagtttcaacgagcaggaggcaaagcgaactctagttggcctagtaagagacctgagagggatcgctttcgctttcaatgccaagaccagcttcatgatgctctttgaatggatatatccatcctatatgccaattctccaacgggcaattgagctctggtaccatgatccagcctgtactacacctgtactcaagttgatggctgaattggttcataataggtcccagcgactccagtttgatgtctcttcccccaatggcatcttactcttccgagaaaccagcaagatgataacaatgtatggcaatcgcatcctgacactaggagaggtcccaaaggatcaggtctatgctctgaagctcaagggcatctccatctgcttctccatgctgaaggctgctctcagtgggagttacgtcaatttcggagtctttcgtctctatggagacgatgccctggacaatgctctgcagaccttcatcaagctgctcctctctattcctcacagtgatctcttggattaccccaagctcagccagtcttattattcactactggaagtcctgacccaggaccatatgaactttattgcaagcctggaacctcacgtcatcatgtatattctctcttccatttctgaaggacttactgcacttgacaccatggtatgcacaggctgctgctcctgcctggaccacattgtgacatacctcttcaagcagctgtcacgtagcaccaagaagaggaccacacccctgaaccaggagagcgaccgctttctgcacatcatgcagcagcatccagagatgatccagcagatgctgtccacggtgctgaacatcatcatctttgaagactgtaggaaccagtggtctatgtcccgaccactacttggcttgatattgcttaatgaaaagtatttttctgacctaagaaacagtattgtgaacagccagccaccggagaagcagcaggccatgcacctgtgttttgagaacctgatggaaggcatcgagcgaaatcttcttacgaaaaacagagacaggttcacccagaacctgtcagcattccgtcgagaagtcaacgactcaatgaagaattccacttatggcgtgaatagcaatgacatgatgagctgacacctccttggactctacctgtacagagcagcgtccctttggtttggcccagaggggcgaacaattgcaagggagagggcctggctgatcctggctcttttctccaggggtgtggggaaaatggcaaaggtcaactagctgcttccccagggaataggggtgtgagtacactcactagggggcagggcgctgctggttcctgggggactgggtgggaagggtggtgggaggagataagagatacaaactgagactccagcctctcctcctggggccacccaagtggggagaacccctagtgtcctgccacaacctgccttgtataaacatgtacattttttcataacattttgaacaaggtttatattgactcaagtttaaaaacaaaaagtgtgactgaaaaatttttacagagtctagtgcaccaatgctgatgtgaggggttgtgtatgcgagtgaagaaaatgtgtattctggtggcctgaagctttactggacaaggatgtgtgagagtgcagagatatatttagtgacacagtagagaggcaaaaaaaaagctaaaattccaaatgtatattttttcgtattgccctgtcctcacccagaaatgatcaattcctgttactgtattaacccttgttattaggaactctaagccatgccagaacaccgtccctccccttggaccgtgtagattctgccctgggtccctagccccttgcagtgataaataactccagctaaaagtgtttggtgttcttatctccaccctctttcctactttgcttaccctcatcctcagacagatgcctcttgcttttaaaagttggatttaacgacgtgttgtagggttcttggtctgtgtgaaggcagagaccagagagaaggaagtgagcccactgctctcctgggagcaatgtgggtgagtccaccagaggccctgctgtgtgtggccaataaattttagtcttccccagccctcgaggcagtgtgtgtggatgtatgcgtgtggatatttatatatgtaccctgcactcatgaatgtatgaactggaggaagttactacagtggaagggttcttaataacaaggtctacctagcatgaagtatttaacattctcccatcccttaaaaaatatacatttttataaaatgaaaaccataataaatgttttgaatattaaaaaaaataataacctacagaggaaaattaatggagacagctatttgccttgtactttttccacaattgttgctgctagttgtacacatctctagttcagctcttgcccacgggacactcatcaattaggttttatttttatttctttcctctacccccagaaacaagcctgttaattttttttccttctcctctggcgactgtgtgatgaatcctttcttgcgtgatcaggttgcggatagacttgtaagggtgtttgctgcatacagtgtaagcattgtgaccgccaataaacttcaatggtttctactg

SEQ ID NO: 10219 - DNA, 4889 bp, Homo sapiens
  source 1..4889: mol_type = unassigned DNA
aggcgcagcggcgacggcgtcggcggcggcggcggcagcggctccggccgaggtgcgcgctgggggggagggggggccggagaggagcatgaatggagcaaaatggcggatcatgtgcagagcctggcccaactagagaatctgtgcaaacagctgtatgaaaccacagacacaaccactcgactccaggcagagaaagccttggttgaatttaccaacagccctgattgcctgagcaagtgccagctactcctcgaaagaggaagttcctcttactcccagttactggcagctacatgccttaccaagcttgtatcacgcacaaacaaccccctaccattggaacagcgaatagatattcggaactatgtgctcaactaccttgccactcggccgaagttggctactttcgtgacacaagcacttattcagttatatgccagaatcacaaaactgggctggtttgactgtcagaaggatgactatgtcttcagaaatgcaatcacagacgtcacaaggtttttacaggatagtgttgaatactgcatcattggtgtcacaattttatctcagctaaccaatgaaattaatcaagtaagtgctacagccttcctcattgaagcagacaccacccatcctttaaccaagcacagaaaaatagcctcttcttttcgcgattcatcattatttgatatcttcacactttcctgcaatttactaaaacaggcttcaggaaagaatctaaacttgaatgatgaaagtcagcatggcttgctcatgcaactgctcaagctcactcataactgcctcaactttgacttcatcggcacttccactgatgagtcctcagacgacctgtgtacagtgcagattcccaccagctggagatcagccttcttagattcttcaaccttgcagctgttttttgacctgtatcattccatccctccttcattttcacctctggtattatcctgcttggtacagatcgcttcagtcagaagatccctgtttaacaatgcagagagggccaagtttctctctcatcttgttgatggtgttaaacgaatactggaaaacccacagagtttatcagacccaaacaattaccatgagttttgcagactactggcccgattgaagagtaactatcaactgggagaattggtaaaggtggaaaactaccctgaggtcatccgattgatagccaacttcacagtgaccagcctacagcactgggaatttgctccaaatagtgtgcactatcttctgagcctgtggcagcggctggcagcctctgtgccgtatgtcaaagccacagagccccacatgctggaaacttacactcctgaggtcaccaaagcctacatcacatcccggttggaatctgtgcacatcatactgagagatggcctggaagatcccctggaggatacggggctggtccagcagcagttggaccagctgtccaccattgggcgttgtgaatatgagaagacgtgtgcactcctcgtgcagttgtttgaccagtcggcccagtcgtaccaggagctgctacagagcgccagcgcaagcccaatggacattgcagtgcaggagggaaggctgacatggctggtttacattattggagcagtgatcggtggccgggtttcttttgccagcactgatgagcaagacgccatggatggtgagcttgtctgtcgggtgctccagctgatgaacctaacagattctcgtttggcccaggcgggtaatgagaagctagagttggccatgctgagcttttttgaacagtttcgtaagatctacattggggaccaagtgcagaaatcctctaagctgtaccgccgactctcagaagttctgggcttgaatgatgagaccatggtcctaagcgtcttcataggaaaaatcatcaccaacttgaagtactggggccgttgtgaaccaatcacctccaagacactacagcttctcaatgacctgtccattgggtacagtagcgtaaggaagctagtgaagcttagtgcggtacagttcatgctgaacaatcacacgagcgagcacttttcatttttgggtattaacaatcagtccaacctgacagacatgcggtgtcggactaccttctacacagcacttgggcgtctcctcatggtggatttaggagaggatgaagatcagtatgagcagttcatgctgccactcacagcagcatttgaggctgtggcccagatgtttagcaccaatagtttcaacgagcaggaggcaaagcgaactctagttggcctagtaagagacctgagagggatcgctttcgctttcaatgccaagaccagcttcatgatgctctttgaatggatatatccatcctatatgccaattctccaacgggcaattgagctctggtaccatgatccagcctgtactacacctgtactcaagttgatggctgaattggttcataataggtcccagcgactccagtttgatgtctcttcccccaatggcatcttactcttccgagaaaccagcaagatgataacaatgtatggcaatcgcatcctgacactaggagaggtcccaaaggatcaggtctatgctctgaagctcaagggcatctccatctgcttctccatgctgaaggctgctctcagtgggagttacgtcaatttcggagtctttcgtctctatggagacgatgccctggacaatgctctgcagaccttcatcaagctgctcctctctattcctcacagtgatctcttggattaccccaagctcagccagtcttattattcactactggaagtcctgacccaggaccatatgaactttattgcaagcctggaacctcacgtcatcatgtatattctctcttccatttctgaaggacttactgcacttgacaccatggtatgcacaggctgctgctcctgcctggaccacattgtgacatacctcttcaagcagctgtcacgtagcaccaagaagaggaccacacccctgaaccaggagagcgaccgctttctgcacatcatgcagcagcatccagagatgatccagcagatgctgtccacggtgctgaacatcatcatctttgaagactgtaggaaccagtggtctatgtcccgaccactacttggcttgatattgcttaatgaaaagtatttttctgacctaagaaacagtattgtgaacagccagccaccggagaagcagcaggccatgcacctgtgttttgagaacctgatggaaggcatcgagcgaaatcttcttacgaaaaacagagacaggttcacccagaacctgtcagcattccgtcgagaagtcaacgactcaatgaagaattccacttatggcgtgaatagcaatgacatgatgagctgacacctccttggactctacctgtacagagcagcgtccctttggtttggcccagaggggcgaacaattgcaagggagagggcctggctgatcctggctcttttctccaggggtgtggggaaaatggcaaaggtcaactagctgcttccccagggaataggggtgtgagtacactcactagggggcagggcgctgctggttcctgggggactgggtgggaagggtggtgggaggagataagagatacaaactgagactccagcctctcctcctggggccacccaagtggggagaacccctagtgtcctgccacaacctgccttgtataaacatgtacattttttcataacattttgaacaaggtttatattgactcaagtttaaaaacaaaaagtgtgactgaaaaatttttacagagtctagtgcaccaatgctgatgtgaggggttgtgtatgcgagtgaagaaaatgtgtattctggtggcctgaagctttactggacaaggatgtgtgagagtgcagagatatatttagtgacacagtagagaggcaaaaaaaaagctaaaattccaaatgtatattttttcgtattgccctgtcctcacccagaaatgatcaattcctgttactgtattaacccttgttattaggaactctaagccatgccagaacaccgtccctccccttggaccgtgtagattctgccctgggtccctagccccttgcagtgataaataactccagctaaaagtgtttggtgttcttatctccaccctctttcctactttgcttaccctcatcctcagacagatgcctcttgcttttaaaagttggatttaacgacgtgttgtagggttcttggtctgtgtgaaggcagagaccagagagaaggaagtgagcccactgctctcctgggagcaatgtgggtgagtccaccagaggccctgctgtgtgtggccaataaattttagtcttccccagccctcgaggcagtgtgtgtggatgtatgcgtgtggatatttatatatgtaccctgcactcatgaatgtatgaactggaggaagttactacagtggaagggttcttaataacaaggtctacctagcatgaagtatttaacattctcccatcccttaaaaaatatacatttttataaaatgaaaaccataataaatgttttgaatattaaaaaaaataataacctacagaggaaaattaatggagacagctatttgccttgtactttttccacaattgttgctgctagttgtacacatctctagttcagctcttgcccacgggacactcatcaattaggttttatttttatttctttcctctacccccagaaacaagcctgttaattttttttccttctcctctggcgactgtgtgatgaatcctttcttgcgtgatcaggttgcggatagacttgtaagggtgtttgctgcatacagtgtaagcattgtgaccgccaataaacttcaatggtttctactg

SEQ ID NO: 10220 - DNA, 6623 bp, Homo sapiens
  source 1..6623: mol_type = unassigned DNA
ggttacattttggatcctcgcggagtactggtcaggcggttaagtcctgtacctaggaaagagggcgagctctggggcgctctccggtgtcatgaggagcttcaaaagagtcaactttgggactctgctaagcagccagaaggaggctgaagagttgctgcccgccttgaaggagttcctgtccaaccctccagctggttttcccagcagccgatctgatgctgagaggagacaagcttgtgatgccatcctgagggcttgcaaccagcagctgactgctaagctagcttgccctaggcatctggggagcctgctggagctggcagagctggcctgtgatggctacttagtgtctaccccacagcgtcctcccctctacctggaacgaattctctttgtcttactgcggaatgctgctgcacaaggaagcccagaggccacactccgccttgctcagcccctccatgcctgcttggtgcagtgctctcgcgaggctgctccccaggactatgaggccgtggctcggggcagcttttctctgctttggaagggggcagaagccctgttggaacggcgagctgcatttgcagctcggctgaaggccttgagcttcctagtactcttggaggatgaaagtaccccttgtgaggttcctcactttgcttctccaacagcctgtcgagcggtagctgcccatcagctatttgatgccagtggccatggtctaaatgaagcagatgctgatttcctagatgacctgctctccaggcacgtgatcagagccttggtgggtgagagagggagctcttctgggcttctttctccccagagggccctctgcctcttggagctcaccttggaacactgccgtcgcttttgctggagccgccaccatgacaaagccatcagcgcagtggagaaggctcacagttacctaaggaacaccaatctagcccctagccttcagctatgtcagctgggggttaagctgctgcaggttggggaggaaggacctcaggcagtggccaagcttctgatcaaggcatcagctgtcctgagcaagagtatggaggcaccatcacccccacttcgggcattgtatgagagctgccagttcttcctttcaggcctggaacgaggcaccaagaggcgctatagacttgatgccattctgagcctctttgcttttcttggagggtactgctctcttctgcagcagctgcgggatgatggtgtgtatgggggctcctccaagcaacagcagtcttttcttcagatgtactttcagggacttcacctctacactgtggtggtttatgactttgcccaaggctgtcagatagttgatttggctgacctgacccaactagtggacagttgtaaatctaccgttgtctggatgctggaggccttagagggcctgtcgggccaagagctgacggaccacatggggatgaccgcttcttacaccagtaatttggcctacagcttctatagtcacaagctctatgccgaggcctgtgccatctctgagccgctctgtcagcacctgggtttggtgaagccaggcacttatcccgaggtgcctcctgagaagttgcacaggtgcttccggctacaagtagagagtttgaagaaactgggtaaacaggcccagggctgcaagatggtgattttgtggctggcagccctgcaaccctgtagccctgaacacatggctgagccagtcactttctgggttcgggtcaagatggatgcggccagggctggagacaaggagctacagctaaagactctgcgagacagcctcagtggctgggacccggagaccctggccctcctgctgagggaggagctgcaggcctacaaggcggtgcgggccgacactggacaggaacgcttcaacatcatctgtgacctcctggagctgagccccgaggagacaccagccggggcctgggcacgagccacccacctggtagaactggctcaggtgctctgctaccacgactttacgcagcagaccaactgctctgctctggatgctatccgggaagccctgcagcttctggactctgtgaggcctgaggcccaggccagagatcagcttctggacgataaagcacaggccttgctgtggctttacatctgtactctggaagccaaaatgcaggaaggtatcgagcgggatcggagagcccaggcccctggtaacttggaggaatttgaagtcaatgacctgaactatgaagataaactccaggaagatcgtttcctatacagtaacattgccttcaacctggctgcagatgctgctcagtccaaatgcctggaccaagccctggccctgtggaaggagctgcttacaaaggggcaggccccagctgtacggtgtctccagcagacagcagcctcactgcagatcctagcagccctctaccagctggtggcaaagcccatgcaggctctggaggtcctcctgctgctacggattgtctctgagagactgaaggaccactcgaaggcagctggctcctcctgccacatcacccagctcctcctgaccctcggctgtcccagctatgcccagttacacctggaagaggcagcatcgagcctgaagcatctcgatcagactactgacacatacctgctcctttccctgacctgtgatctgcttcgaagtcaactctactggactcaccagaaggtgaccaagggtgtctctctgctgctgtctgtgcttcgggatcctgccctccagaagtcctccaaggcttggtacttgctgcgtgtccaggtcctgcagctggtggcagcttaccttagcctcccgtcaaacaacctctcacactccctgtgggagcagctctgtgcccaaggctggcagacacctgagatagctctcatagactcccataagctcctccgaagcatcatcctcctgctgatgggcagtgacattctctcaactcagaaagcagctgtggagacatcgtttttggactatggtgaaaatctggtacaaaaatggcaggttctttcagaggtgctgagctgctcagagaagctggtctgccacctgggccgcctgggtagtgtgagtgaagccaaggccttttgcttggaggccctaaaacttacaacaaagctgcagataccacgccagtgtgccctgttcctggtgctgaagggcgagctggagctggcccgcaatgacattgatctctgtcagtcggacctgcagcaggttctgttcttgcttgagtcttgcacagagtttggtggggtgactcagcacctggactctgtgaagaaggtccacctgcagaaggggaagcagcaggcccaggtcccctgtcctccacagctcccagaggaggagctcttcctaagaggccctgctctagagctggtggccactgtggccaaggagcctggccccatagcaccttctacaaactcctccccagtcttgaaaaccaagccccagcccatacccaacttcctgtcccattcacccacctgtgactgctcgctctgcgccagccctgtcctcacagcagtctgtctgcgctgggtattggtcacggcaggggtgaggctggccatgggccaccaagcccagggtctggatctgctgcaggtcgtgctgaagggctgtcctgaagccgctgagcgcctcacccaagctctccaagcttccctgaatcataaaacacccccctccttggttccaagcctcttggatgagatcttggctcaagcatacacactgttggcactggagggcctgaaccagccatcaaacgagagcctgcagaaggttctacagtcagggctgaagtttgtagcagcacggataccccacctagagccctggcgagccagcctgctcttgatttgggccctcacaaaactaggtggcctcagctgctgtactacccaactttttgcaagctcctggggctggcagccaccattaataaaaagtgtccctggctcagagccctctaagactcagggccaaaaacgttctggacgagggcgccaaaagttagcctctgctcccctgcgcctcaataatacctctcagaaaggtctggaaggtagaggactgccctgcacacctaaacccccagaccggatcaggcaagctggccctcatgtccccttcacggtgtttgaggaagtctgccctacagagagcaagcctgaagtaccccaggcccccagggtacaacagagagtccagacgcgcctcaaggtgaacttcagtgatgacagtgacttggaagaccctgtctcagctgaggcctggctggcagaggagcctaagagacggggcactgcttcccggggccgggggcgagcaaggaagggcctgagcctaaagacggatgccgtggttgccccaggtagtgcccctgggaaccctggcctgaatggcaggagccggagggccaagaaggtggcatcaagacattgtgaggagcggcgtccccagagggccagtgaccaggccaggcctggccctgagatcatgaggaccatccctgaggaagaactgactgacaactggagaaaaatgagctttgagatcctcaggggctctgacggggaagactcagcctcaggtgggaagactccagctccgggccctgaggcagcttctggagaatgggagctgctgaggctggattccagcaagaagaagctgcccagcccatgcccagacaaggagagtgacaaggaccttggtcctcggctccggctcccctcagcccccgtagccactggtctttctaccctggactccatctgtgactccctgagtgttgctttccggggcattagtcactgtcctcctagtgggctctatgcccacctctgccgcttcctggccttgtgcctgggccaccgggatccttatgccactgctttccttgtcaccgagtctgtctccatcacctgtcgccaccagctgctcacccacctccacagacagctcagcaaggcccagaagcaccgaggatcacttgaaatagcagaccagctgcaggggctgagccttcaggagatgcctggagatgtccccctggcccgcatccagcgcctcttttccttcagggctttggaatctggccacttcccccagcctgaaaaggagagtttccaggagcgcctggctctgatccccagtggggtgactgtgtgtgtgttggccctggccaccctccagcccggaaccgtgggcaacaccctcctgctgacccggctggaaaaggacagtcccccagtcagtgtgcagattcccactggccagaacaagcttcatctgcgttcagtcctgaatgagtttgatgccatccagaaggcacagaaagagaacagcagctgtactgacaagcgagaatggtggacagggcggctggcactggaccacaggatggaggttctcatcgcttccctagagaagtctgtgctgggctgctggaaggggctgctgctgccgtccagtgaggagcccggccctgcccaggaggcctcccgcctacaggagctgctacaggactgtggctggaaatatcctgaccgcactctgctgaaaatcatgctcagtggtgccggtgccctcacccctcaggacattcaggccctggcctacgggctgtgcccaacccagccagagcgagcccaggagctcctgaatgaggcagtaggacgtctacagggcctgacagtaccaagcaatagccaccttgtcttggtcctagacaaggacttgcagaagctgccgtgggaaagcatgcccagcctccaagcactgcctgtcacccggctgccctccttccgcttcctactcagctactccatcatcaaagagtatggggcctcgccagtgctgagtcaaggggtggatccacgaagtaccttctatgtcctgaaccctcacaataacctgtcaagcacagaggagcaatttcgagccaatttcagcagtgaagctggctggagaggagtggttggggaggtgccaagacctgaacaggtgcaggaagccctgacaaagcatgatttgtatatctatgcagggcatggggctggtgcccgcttccttgatgggcaggctgtcctgcggctgagctgtcgggcagtggccctgctgtttggctgtagcagtgcggccctggctgtgcgtggaaacctggagggggctggcatcgtgctcaagtacatcatggctggttgccccttgtttctgggtaatctctgggatgtgactgaccgcgacattgaccgctacacggaagctctgctgcaaggctggcttggagcaggcccaggggccccccttctctactatgtaaaccaggcccgccaagctccccgactcaagtatcttattggggctgcacctatagcctatggcttgcctgtctctctgcggtaaccccatggagctgtcttattgatgctagaagcctcataactgttctacctccaaggttagatttaatccttaggataactcttttaaagtgattttccccagtgttttatatgaaacatttccttttgatttaacctcagtataataaagatacatcatttaaaccctg

SEQ ID NO: 10221 - DNA, 6447 bp, Homo sapiens
  source 1..6447: mol_type = unassigned DNA
cggttaagtcctgtacctaggaaagagggcgagctctggggcggtaaggccggaagggactcgtgagcgtggctctccggtgtcatgaggagcttcaaaagagtcaactttgggactctgctaagcagccagaaggaggctgaagagttgctgcccgccttgaaggagttcctgtccaaccctccagctggttttcccagcagccgatctgatgctgagaggagacaagcttgtgatgccatcctgagggcttgcaaccagcagctgactgctaagctagcttgccctaggcatctggggagcctgctggagctggcagagctggcctgtgatggctacttagtgtctaccccacagcgtcctcccctctacctggaacgaattctctttgtcttactgcggaatgctgctgcacaaggaagcccagaggccacactccgccttgctcagcccctccatgcctgcttggtgcagtgctctcgcgaggctgctccccaggactatgaggccgtggctcggggcagcttttctctgctttggaagggggcagaagccctgttggaacggcgagctgcatttgcagctcggctgaaggccttgagcttcctagtactcttggaggatgaaagtaccccttgtgaggttcctcactttgcttctccaacagcctgtcgagcggtagctgcccatcagctatttgatgccagtggccatggtctaaatgaagcagatgctgatttcctagatgacctgctctccaggcacgtgatcagagccttggtgggtgagagagggagctcttctgggcttctttctccccagagggccctctgcctcttggagctcaccttggaacactgccgtcgcttttgctggagccgccaccatgacaaagccatcagcgcagtggagaaggctcacagttacctaaggaacaccaatctagcccctagccttcagctatgtcagctgggggttaagctgctgcaggttggggaggaaggacctcaggcagtggccaagcttctgatcaaggcatcagctgtcctgagcaagagtatggaggcaccatcacccccacttcgggcattgtatgagagctgccagttcttcctttcaggcctggaacgaggcaccaagaggcgctatagacttgatgccattctgagcctctttgcttttcttggagggtactgctctcttctgcagcagctgcgggatgatggtgtgtatgggggctcctccaagcaacagcagtcttttcttcagatgtactttcagggacttcacctctacactgtggtggtttatgactttgcccaaggctgtcagatagttgatttggctgacctgacccaactagtggacagttgtaaatctaccgttgtctggatgctggaggccttagagggcctgtcgggccaagagctgacggaccacatggggatgaccgcttcttacaccagtaatttggcctacagcttctatagtcacaagctctatgccgaggcctgtgccatctctgagccgctctgtcagcacctgggtttggtgaagccaggcacttatcccgaggtgcctcctgagaagttgcacaggtgcttccggctacaagtagagagtttgaagaaactgggtaaacaggcccagggctgcaagatggtgattttgtggctggcagccctgcaaccctgtagccctgaacacatggctgagccagtcactttctgggttcgggtcaagatggatgcggccagggctggagacaaggagctacagctaaagactctgcgagacagcctcagtggctgggacccggagaccctggccctcctgctgagggaggagctgcaggcctacaaggcggtgcgggccgacactggacaggaacgcttcaacatcatctgtgacctcctggagctgagccccgaggagacaccagccggggcctgggcacgagccacccacctggtagaactggctcaggtgctctgctaccacgactttacgcagcagaccaactgctctgctctggatgctatccgggaagccctgcagcttctggactctgtgaggcctgaggcccaggccagagatcagcttctggacgataaagcacaggccttgctgtggctttacatctgtactctggaagccaaaatgcaggaaggtatcgagcgggatcggagagcccaggcccctggtaacttggaggaatttgaagtcaatgacctgaactatgaagataaactccaggaagatcgtttcctatacagtaacattgccttcaacctggctgcagatgctgctcagtccaaatgcctggaccaagccctggccctgtggaaggagctgcttacaaaggggcaggccccagctgtacggtgtctccagcagacagcagcctcactgcagatcctagcagccctctaccagctggtggcaaagcccatgcaggctctggaggtcctcctgctgctacggattgtctctgagagactgaaggaccactcgaaggcagctggctcctcctgccacatcacccagctcctcctgaccctcggctgtcccagctatgcccagttacacctggaagaggcagcatcgagcctgaagcatctcgatcagactactgacacatacctgctcctttccctgacctgtgatctgcttcgaagtcaactctactggactcaccagaaggtgaccaagggtgtctctctgctgctgtctgtgcttcgggatcctgccctccagaagtcctccaaggcttggtacttgctgcgtgtccaggtcctgcagctggtggcagcttaccttagcctcccgtcaaacaacctctcacactccctgtgggagcagctctgtgcccaaggctggcagacacctgagatagctctcatagactcccataagctcctccgaagcatcatcctcctgctgatgggcagtgacattctctcaactcagaaagcagctgtggagacatcgtttttggactatggtgaaaatctggtacaaaaatggcaggttctttcagaggtgctgagctgctcagagaagctggtctgccacctgggccgcctgggtagtgtgagtgaagccaaggccttttgcttggaggccctaaaacttacaacaaagctgcagataccacgccagtgtgccctgttcctggtgctgaagggcgagctggagctggcccgcaatgacattgatctctgtcagtcggacctgcagcaggttctgttcttgcttgagtcttgcacagagtttggtggggtgactcagcacctggactctgtgaagaaggtccacctgcagaaggggaagcagcaggcccaggtcccctgtcctccacagctcccagaggaggagctcttcctaagaggccctgctctagagctggtggccactgtggccaaggagcctggccccatagcaccttctacaaactcctccccagtcttgaaaaccaagccccagcccatacccaacttcctgtcccattcacccacctgtgactgctcgctctgcgccagccctgtcctcacagcagtctgtctgcgctgggtattggtcacggcaggggtgaggctggccatgggccaccaagcccagggtctggatctgctgcaggtcgtgctgaagggctgtcctgaagccgctgagcgcctcacccaagctctccaagcttccctgaatcataaaacacccccctccttggttccaagcctcttggatgagatcttggctcaagcatacacactgttggcactggagggcctgaaccagccatcaaacgagagcctgcagaaggttctacagtcagggctgaagtttgtagcagcacggataccccacctagagccctggcgagccagcctgctcttgatttgggccctcacaaaactaggtggcctcagctgctgtactacccaactttttgcaagctcctggggctggcagccaccattaataaaaagtgtccctggctcagagccctctaagactcagggccaaaaacgttctggacgagggcgccaaaagttagcctctgctcccctgcgcctcaataatacctctcagaaaggtctggaaggtagaggactgccctgcacacctaaacccccagaccggatcaggcaagctggccctcatgtccccttcacggtgtttgaggaagtctgccctacagagagcaagcctgaagtaccccaggcccccagggtacaacagagagtccagacgcgcctcaaggtgaacttcagtgatgacagtgacttggaagaccctgtctcagctgaggcctggctggcagaggagcctaagagacggggcactgcttcccggggccgggggcgagcaaggaagggcctgagcctaaagacggatgccgtggttgccccaggtagtgcccctgggaaccctggcctgaatggcaggagccggagggccaagaaggtggcatcaagacattgtgaggagcggcgtccccagagggccagtgaccaggccaggcctggccctgagatcatgaggaccatccctgaggaagaactgactgacaactggagaaaaatgagctttgagatcctcaggggctctgacggggaagactcagcctcaggtgggaagactccagctccgggccctgaggcagcttctggagaatgggagctgctgaggctggattccagcaagaagaagctgcccagcccatgcccagacaaggagagtgacaaggaccttggtcctcggctccggctcccctcagcccccgtagccactggtctttctaccctggactccatctgtgactccctgagtgttgctttccggggcattagtcactgtcctcctagtgggctctatgcccacctctgccgcttcctggccttgtgcctgggccaccgggatccttatgccactgctttccttgtcaccgagtctgtctccatcacctgtcgccaccagctgctcacccacctccacagacagctcagcaaggcccagaagcaccgaggatcacttgaaatagcagaccagctgcaggggctgagccttcaggagatgcctggagatgtccccctggcccgcatccagcgcctcttttccttcagggctttggaatctggccacttcccccagcctgaaaaggagagtttccaggagcgcctggctctgatccccagtggggtgactgtgtgtgtgttggccctggccaccctccagcccggaaccgtgggcaacaccctcctgctgacccggctggaaaaggacagtcccccagtcagtgtgcagattcccactggccagaacaagcttcatctgcgttcagtcctgaatgagtttgatgccatccagaaggcacagaaagagaacagcagctgtactgacaagcgagaatggtggacagggcggctggcactggaccacaggatggaggttctcatcgcttccctagagaagtctgtgctgggctgctggaaggggctgctgctgccgtccagtgaggagcccggccctgcccaggaggcctcccgcctacaggagctgctacaggactgtggctggaaatatcctgaccgcactctgctgaaaatcatgctcagtggtgccggtgccctcacccctcaggacattcaggccctggcctacgggctgtgcccaacccagccagagcgagcccaggagctcctgaatgaggcagtaggacgtctacagggcctgacagtaccaagcaatagccaccttgtcttggtcctagacaaggacttgcagaagctgccgtgggaaagcatgcccagcctccaagcactgcctgtcacccggctgccctccttccgcttcctactcagctactccatcatcaaagagtatggggcctcgccagtgctgagtcaaggggtggatccacgaagtaccttctatgtcctgaaccctcacaataacctgtcaagcacagaggagcaatttcgagccaatttcagcagtgaagctggctggagaggagtggttggggaggtgccaagacctgaacaggtgcaggaagccctgacaaagcatgatttgtatatctatgcagggcatggggctggtgcccgcttccttgatgggcaggctgtcctgcggctgagctgtcgggcagtggccctgctgtttggctgtagcagtgcggccctggctgtgcgtggaaacctggagggggctggcatcgtgctcaagtacatcatggctggttgccccttgtttctgggtaatctctgggatgtgactgaccgcgacattgaccgctacacggaagctctgctgcaaggctggcttggagcaggcccaggggccccccttctctactatgtaaaccaggcccgccaagctccccgactcaagtatcttattggggctgcacctatagcctatggcttgcctgtctctctgcggtaa

SEQ ID NO: 10222 - DNA, 6662 bp, Homo sapiens
  source 1..6662: mol_type = unassigned DNA
ggcggttaagtcctgtacctaggaaagagggcgagctctggggcgctctccggtgtcatgaggagcttcaaaagagtcaactttgggactctgctaagcagccagaaggaggctgaagagttgctgcccgccttgaaggtgggggtgctgcctggctcgggatacacctggctttccaaactgagctgttttgtgtttgccttttgaagagatggataagagttcctgtccaaccctccagctggttttcccagcagccgatctgatgctgagaggagacaagcttgtgatgccatcctgagggcttgcaaccagcagctgactgctaagctagcttgccctaggcatctggggagcctgctggagctggcagagctggcctgtgatggctacttagtgtctaccccacagcgtcctcccctctacctggaacgaattctctttgtcttactgcggaatgctgctgcacaaggaagcccagaggccacactccgccttgctcagcccctccatgcctgcttggtgcagtgctctcgcgaggctgctccccaggactatgaggccgtggctcggggcagcttttctctgctttggaagggggcagaagccctgttggaacggcgagctgcatttgcagctcggctgaaggccttgagcttcctagtactcttggaggatgaaagtaccccttgtgaggttcctcactttgcttctccaacagcctgtcgagcggtagctgcccatcagctatttgatgccagtggccatggtctaaatgaagcagatgctgatttcctagatgacctgctctccaggcacgtgatcagagccttggtgggtgagagagggagctcttctgggcttctttctccccagagggccctctgcctcttggagctcaccttggaacactgccgtcgcttttgctggagccgccaccatgacaaagccatcagcgcagtggagaaggctcacagttacctaaggaacaccaatctagcccctagccttcagctatgtcagctgggggttaagctgctgcaggttggggaggaaggacctcaggcagtggccaagcttctgatcaaggcatcagctgtcctgagcaagagtatggaggcaccatcacccccacttcgggcattgtatgagagctgccagttcttcctttcaggcctggaacgaggcaccaagaggcgctatagacttgatgccattctgagcctctttgcttttcttggagggtactgctctcttctgcagcagctgcgggatgatggtgtgtatgggggctcctccaagcaacagcagtcttttcttcagatgtactttcagggacttcacctctacactgtggtggtttatgactttgcccaaggctgtcagatagttgatttggctgacctgacccaactagtggacagttgtaaatctaccgttgtctggatgctggaggccttagagggcctgtcgggccaagagctgacggaccacatggggatgaccgcttcttacaccagtaatttggcctacagcttctatagtcacaagctctatgccgaggcctgtgccatctctgagccgctctgtcagcacctgggtttggtgaagccaggcacttatcccgaggtgcctcctgagaagttgcacaggtgcttccggctacaagtagagagtttgaagaaactgggtaaacaggcccagggctgcaagatggtgattttgtggctggcagccctgcaaccctgtagccctgaacacatggctgagccagtcactttctgggttcgggtcaagatggatgcggccagggctggagacaaggagctacagctaaagactctgcgagacagcctcagtggctgggacccggagaccctggccctcctgctgagggaggagctgcaggcctacaaggcggtgcgggccgacactggacaggaacgcttcaacatcatctgtgacctcctggagctgagccccgaggagacaccagccggggcctgggcacgagccacccacctggtagaactggctcaggtgctctgctaccacgactttacgcagcagaccaactgctctgctctggatgctatccgggaagccctgcagcttctggactctgtgaggcctgaggcccaggccagagatcagcttctggacgataaagcacaggccttgctgtggctttacatctgtactctggaagccaaaatgcaggaaggtatcgagcgggatcggagagcccaggcccctggtaacttggaggaatttgaagtcaatgacctgaactatgaagataaactccaggaagatcgtttcctatacagtaacattgccttcaacctggctgcagatgctgctcagtccaaatgcctggaccaagccctggccctgtggaaggagctgcttacaaaggggcaggccccagctgtacggtgtctccagcagacagcagcctcactgcagatcctagcagccctctaccagctggtggcaaagcccatgcaggctctggaggtcctcctgctgctacggattgtctctgagagactgaaggaccactcgaaggcagctggctcctcctgccacatcacccagctcctcctgaccctcggctgtcccagctatgcccagttacacctggaagaggcagcatcgagcctgaagcatctcgatcagactactgacacatacctgctcctttccctgacctgtgatctgcttcgaagtcaactctactggactcaccagaaggtgaccaagggtgtctctctgctgctgtctgtgcttcgggatcctgccctccagaagtcctccaaggcttggtacttgctgcgtgtccaggtcctgcagctggtggcagcttaccttagcctcccgtcaaacaacctctcacactccctgtgggagcagctctgtgcccaaggctggcagacacctgagatagctctcatagactcccataagctcctccgaagcatcatcctcctgctgatgggcagtgacattctctcaactcagaaagcagctgtggagacatcgtttttggactatggtgaaaatctggtacaaaaatggcaggttctttcagaggtgctgagctgctcagagaagctggtctgccacctgggccgcctgggtagtgtgagtgaagccaaggccttttgcttggaggccctaaaacttacaacaaagctgcagataccacgccagtgtgccctgttcctggtgctgaagggcgagctggagctggcccgcaatgacattgatctctgtcagtcggacctgcagcaggttctgttcttgcttgagtcttgcacagagtttggtggggtgactcagcacctggactctgtgaagaaggtccacctgcagaaggggaagcagcaggcccaggtcccctgtcctccacagctcccagaggaggagctcttcctaagaggccctgctctagagctggtggccactgtggccaaggagcctggccccatagcaccttctacaaactcctccccagtcttgaaaaccaagccccagcccatacccaacttcctgtcccattcacccacctgtgactgctcgctctgcgccagccctgtcctcacagcagtctgtctgcgctgggtattggtcacggcaggggtgaggctggccatgggccaccaagcccagggtctggatctgctgcaggtcgtgctgaagggctgtcctgaagccgctgagcgcctcacccaagctctccaagcttccctgaatcataaaacacccccctccttggttccaagcctcttggatgagatcttggctcaagcatacacactgttggcactggagggcctgaaccagccatcaaacgagagcctgcagaaggttctacagtcagggctgaagtttgtagcagcacggataccccacctagagccctggcgagccagcctgctcttgatttgggccctcacaaaactaggtggcctcagctgctgtactacccaactttttgcaagctcctggggctggcagccaccattaataaaaagtgtccctggctcagagccctctaagactcagggccaaaaacgttctggacgagggcgccaaaagttagcctctgctcccctgcgcctcaataatacctctcagaaaggtctggaaggtagaggactgccctgcacacctaaacccccagaccggatcaggcaagctggccctcatgtccccttcacggtgtttgaggaagtctgccctacagagagcaagcctgaagtaccccaggcccccagggtacaacagagagtccagacgcgcctcaaggtgaacttcagtgatgacagtgacttggaagaccctgtctcagctgaggcctggctggcagaggagcctaagagacggggcactgcttcccggggccgggggcgagcaaggaagggcctgagcctaaagacggatgccgtggttgccccaggtagtgcccctgggaaccctggcctgaatggcaggagccggagggccaagaaggtggcatcaagacattgtgaggagcggcgtccccagagggccagtgaccaggccaggcctggccctgagatcatgaggaccatccctgaggaagaactgactgacaactggagaaaaatgagctttgagatcctcaggggctctgacggggaagactcagcctcaggtgggaagactccagctccgggccctgaggcagcttctggagaatgggagctgctgaggctggattccagcaagaagaagctgcccagcccatgcccagacaaggagagtgacaaggaccttggtcctcggctccggctcccctcagcccccgtagccactggtctttctaccctggactccatctgtgactccctgagtgttgctttccggggcattagtcactgtcctcctagtgggctctatgcccacctctgccgcttcctggccttgtgcctgggccaccgggatccttatgccactgctttccttgtcaccgagtctgtctccatcacctgtcgccaccagctgctcacccacctccacagacagctcagcaaggcccagaagcaccgaggatcacttgaaatagcagaccagctgcaggggctgagccttcaggagatgcctggagatgtccccctggcccgcatccagcgcctcttttccttcagggctttggaatctggccacttcccccagcctgaaaaggagagtttccaggagcgcctggctctgatccccagtggggtgactgtgtgtgtgttggccctggccaccctccagcccggaaccgtgggcaacaccctcctgctgacccggctggaaaaggacagtcccccagtcagtgtgcagattcccactggccagaacaagcttcatctgcgttcagtcctgaatgagtttgatgccatccagaaggcacagaaagagaacagcagctgtactgacaagcgagaatggtggacagggcggctggcactggaccacaggatggaggttctcatcgcttccctagagaagtctgtgctgggctgctggaaggggctgctgctgccgtccagtgaggagcccggccctgcccaggaggcctcccgcctacaggagctgctacaggactgtggctggaaatatcctgaccgcactctgctgaaaatcatgctcagtggtgccggtgccctcacccctcaggacattcaggccctggcctacgggctgtgcccaacccagccagagcgagcccaggagctcctgaatgaggcagtaggacgtctacagggcctgacagtaccaagcaatagccaccttgtcttggtcctagacaaggacttgcagaagctgccgtgggaaagcatgcccagcctccaagcactgcctgtcacccggctgccctccttccgcttcctactcagctactccatcatcaaagagtatggggcctcgccagtgctgagtcaaggggtggatccacgaagtaccttctatgtcctgaaccctcacaataacctgtcaagcacagaggagcaatttcgagccaatttcagcagtgaagctggctggagaggagtggttggggaggtgccaagacctgaacaggtgcaggaagccctgacaaagcatgatttgtatatctatgcagggcatggggctggtgcccgcttccttgatgggcaggctgtcctgcggctgagctgtcgggcagtggccctgctgtttggctgtagcagtgcggccctggctgtgcgtggaaacctggagggggctggcatcgtgctcaagtacatcatggctggttgccccttgtttctgggtaatctctgggatgtgactgaccgcgacattgaccgctacacggaagctctgctgcaaggctggcttggagcaggcccaggggccccccttctctactatgtaaaccaggcccgccaagctccccgactcaagtatcttattggggctgcacctatagcctatggcttgcctgtctctctgcggtaaccccatggagctgtcttattgatgctagaagcctcataactgttctacctccaaggttagatttaatccttaggataactcttttaaagtgattttccccagtgttttatatgaaacatttccttttgatttaacctcagtataataaagatacatcattt

SEQ ID NO: 10223 - DNA, 1444 bp, Homo sapiens
  source 1..1444: mol_type = unassigned DNA
acaaccgtaacagccaccagacaagcttcagtggccggcccttcacatccagacttgcctgagaggacccacctctgagtgtccagtggtcagttgccccaggatggggaccacagccagagcagccttggtcttgacctatttggctgttgcttctgctgcctctgagggaggcttcacggctacaggacagaggcagctgaggccagagcactttcaagaagttggctacgcagctcccccctccccacccctatcccgaagcctccccatggatcaccctgactcctctcagcatggccctccctttgagggacagagtcaagtgcagccccctccctctcaggaggccacccctctccaacaggaaaagctgctacctgcccaactccctgctgaaaaggaagtgggtccccctctccctcaggaagctgtccccctccaaaaagagctgccctctctccagcaccccaatgaacagaaggaaggaacgccagctccatttggggaccagagccatccagaacctgagtcctggaatgcagcccagcactgccaacaggaccggtcccaagggggctggggccaccggctggatggcttcccccctgggcggccttctccagacaatctgaaccaaatctgccttcctaaccgtcagcatgtggtatatggtccctggaacctaccacagtccagctactcccacctcactcgccagggtgagaccctcaatttcctggagattggatattcccgctgctgccactgccgcagccacacaaaccgcctagagtgtgccaaacttgtgtgggaggatacccttgacaaatactgtgaccgggagtatgctgtgaagacccaccaccacttgtgttgccgccaccctcccagccctactcgggatgagtgctttgcccgtcgggctccttaccccaactatgaccgggacatcttgaccattgacatcggtcgagtcacccccaacctcatgggccacctctgtggaaaccaaagagttctcaccaagcataaacatattcctgggctgatccacaacatgactgcccgctgctgtgacctgccatttccagaacaggcctgctgtgcagaggaggagaaattaaccttcatcaatgatctgtgtggtccccgacgtaacatctggcgagaccctgccctctgctgttacctgagtcctggggatgaacaggtcaactgcttcaacatcaattatctgaggaacgtggctctagtgtctggagacactgagaacgccaagggccagggggagcagggctcaactggaggaacaaatatcagctccacctctgagcccaaggaagaatgagtcaccccagagccctagagggtcagatggggggaaccccaccctgccccacccatctgaacactcattacactaaacacctcttggatttgg

SEQ ID NO: 10224 - DNA, 2070 bp, Homo sapiens
  source 1..2070: mol_type = unassigned DNA
agaagagctggtcctgaagctcacaaccgtaacagccaccagacaagcttcagtggccggcccttcacatccagacttgcctgagaggacccacctctgagtgtccagtggtcagttgccccaggatggggaccacagccagagcagccttggtcttgacctatttggctgttgcttctgctgcctctgagggaggcttcacggctacaggacagaggcagctgaggccagagcactttcaagaagttggctacgcagctcccccctccccacccctatcccgaagcctccccatggatcaccctgactcctctcagcatggccctccctttgagggacagagtcaagtgcagccccctccctctcaggaggccacccctctccaacaggaaaagctgctacctgcccaactccctgctgaaaaggaagtgggtccccctctccctcaggaagctgtccccctccaaaaagagctgccctctctccagcaccccaatgaacagaaggaaggaacgccagctccatttggggaccagagccatccagaacctgagtcctggaatgcagcccagcactgccaacaggaccggtcccaagggggctggggccaccggctggatggcttcccccctgggcggccttctccagacaatctgaaccaaatctgccttcctaaccgtcagcatgtggtatatggtccctggaacctaccacagtccagctactcccacctcactcgccagggtgagaccctcaatttcctggagattggatattcccgctgctgccactgccgcagccacacaaaccgcctagagtgtgccaaacttgtgtgggaggaagcaatgagccgattctgtgaggccgagttctcggtcaagacccgaccccactggtgctgcacgcggcagggggaggctcggttctcctgcttccaggaggaagctccccagccacactaccagctccgggcctgccccagccatcagcctgatatttcctcgggtcttgagctgcctttccctcctggggtgcccacattggacaatatcaagaacatctgccacctgaggcgcttccgctctgtgccacgcaacctgccagctactgaccccctacaaagggagctgctggcactgatccagctggagagggagttccagcgctgctgccgccaggggaacaatcacacctgtacatggaaggcctgggaggatacccttgacaaatactgtgaccgggagtatgctgtgaagacccaccaccacttgtgttgccgccaccctcccagccctactcgggatgagtgctttgcccgtcgggctccttaccccaactatgaccgggacatcttgaccattgacatcggtcgagtcacccccaacctcatgggccacctctgtggaaaccaaagagttctcaccaagcataaacatattcctgggctgatccacaacatgactgcccgctgctgtgacctgccatttccagaacaggcctgctgtgcagaggaggagaaattaaccttcatcaatgatctgtgtggtccccgacgtaacatctggcgagaccctgccctctgctgttacctgagtcctggggatgaacaggtcaactgcttcaacatcaattatctgaggaacgtggctctagtgtctggagacactgagaacgccaagggccagggggagcagggctcaactggaggaacaaatatcagctccacctctgagcccaaggaagaatgagtcaccccagagccctagagggtcagatggggggaaccccaccctgccccacccatctgaacactcattacactaaacacctcttggatttggtgtcctcattgtctatctaatgtctcacccgcagtgttttaagtggatcttggtgccctggcccaggagggcactggcgttttcagacacaccacagacaaacacaccctcctaagcctgcttgtatttccttcagtgcctggcccctgaggcccacggccctgcccccttcactgagcagatgttcacaggctgtgggatgcgaccataactaaacagcttgacgtca

SEQ ID NO: 10225 - DNA, 1925 bp, Homo sapiens
  source 1..1925: mol_type = unassigned DNA
aattataaaagaagagctggtcctgaagctcacaaccgtaacagccaccagacaagcttcagtggccggcccttcacatccagacttgcctgagaggacccacctctgagtgtccagtggtcagttgccccaggatggggaccacagccagagcagccttggtcttgacctatttggctgttgcttctgctgcctctgagggaggcttcacggctacaggacagaggcagctgaggccagagcactttcaagaagttggctacgcagctcccccctccccacccctatcccgaagcctccccatggatcaccctgactcctctcagcatggccctccctttgagggacagagtggaaaggagggaagaggccctcgcccccactcccagccctggctaggagaaagggtgggctgctcacacattcccccttctatagtgcagccccctccctctcaggaggccacccctctccaacaggaaaagctgctacctgcccaactccctgctgaaaaggaagtgggtccccctctccctcaggaagctgtccccctccaaaaagagctgccctctctccagcaccccaatgaacagaaggaaggaacgccagctccatttggggaccagagccatccagaacctgagtcctggaatgcagcccagcactgccaacaggaccggtcccaagggggctggggccaccggctggatggcttcccccctgggcggccttctccagacaatctgaaccaaatctgccttcctaaccgtcagcatgtggtatatggtccctggaacctaccacagtccagctactcccacctcactcgccagggtgagaccctcaatttcctggagattggatattcccgctgctgccactgccgcagccacacaaaccgcctagagtgtgccaaacttgtgtgggaggaagcaatgagccgattctgtgaggccgagttctcggtcaagacccgaccccactggtgctgcacgcggcagggggaggctcggttctcctgcttccaggaggaagctccccagccacactaccagctccgggcctgccccagccatcagcctgatatttcctcgggtcttgagctgcctttccctcctggggtgcccacattggacaatatcaagaacatctgccacctgaggcgcttccgctctgtgccacgcaacctgccagctactgaccccctacaaagggagctgctggcactgatccagctggagagggagttccagcgctgctgccgccaggggaacaatcacacctgtacatggaaggcctgggaggatacccttgacaaatactgtgaccgggagtatgctgtgaagacccaccaccacttgtgttgccgccaccctcccagccctactcgggatgagtgctttgcccgtcgggctccttaccccaactatgaccgggacatcttgaccattgacatcggtcgagtcacccccaacctcatgggccacctctgtggaaaccaaagagttctcaccaagcataaacatattcctgggctgatccacaacatgactgcccgctgctgtgacctgccatttccagaacaggcctgctgtgcagaggaggagaaattaaccttcatcaatgatctgtgtggtccccgacgtaacatctggcgagaccctgccctctgctgttacctgagtcctggggatgaacaggtcaactgcttcaacatcaattatctgaggaacgtggctctagtgtctggagacactgagaacgccaagggccagggggagcagggctcaactggaggaacaaatatcagctccacctctgagcccaaggaagaatgagtcaccccagagccctagagggtcagatggggggaaccccaccctgccccacccatctgaacactcattacactaaacacctcttgg

SEQ ID NO: 10226 - DNA, 3253 bp, Homo sapiens
  source 1..3253: mol_type = unassigned DNA
caaatacttttcaacattcccttctgtcctttctttgtttttaaagaaagctctgattttgtttcattttcagctggagacttaaatgacaccaagcaaagcctacttagtttagatctccagaaattggctggtggaaaaaaatcaaacatgaagattgcagttttgttttgtttttttctgcttatcatttttcaaactgactttggaaaaaatgaagaaattcctaggaagcaaaggaggaagatctaccacagaaggttgaggaaaagttcaacctcacacaagcacagatcaaacagacagcttggaattcagcaaacaacagtttttacaccagtagcaagacttcctattgttaactttgattatagcatggaggaaaagtttgaatccttttcaagttttcctggagtagaatcaagttataatgtgttaccaggaaagaagggacactgtttggtaaagggcataaccatgtacaacaaagctgtgtggtcgcctgagccctgcactacctgcctctgctcagatggaagagttctttgtgatgaaaccatgtgccatccccagaggtgcccccaaacagttatacctgaaggggaatgctgcccggtctgctccgctactgtctcctattctctactcagtggtatagcattaaatgatagaaatgaattttctggtgattcttcagaacaaagagaacctaccaatttacttcataagcaactgccacctcctcaggtgggaatggaccgaatagtaagaaaagaagcacttcaatctgaggaggatgaagaagtgaaagaagaagatacagagcaaaagagagagacccctgaatctagaaatcaggggcaactttacagtgagggggacagcagaggaggagacagaaagcagaggcctggagaggagaggaggctggcacaccagcaacaacgccaaggaagggaggaggaggaggatgaggaggaggagggtgaggagggtgaggaggatgaggaggacgaggaggacccggtaagaggagatatgttccgaatgccctctcgatccccgcttcctgctcctcccagaggcacactgcgcctgccaagcgggtgctctctgtcctacaggaccatcagctgcatcaacgccatgcttacccagataccaccgctgacagcaccacagataacaagtctggagctcactggcaattccatcgcctccatcccagatgaagcatttaatggattaccaaatttggaaaggcttgatctgagtaaaaataatatcacttcttcaggcataggtccaaaagcattcaagcttctgaagaagttaatgcgtttgaatatggatggaaataatttgatacagattccttcacaattgccatctacattagaagaacttaaagtcaatgagaacaatcttcaggctatcgatgaagaaagtttatcagacttaaatcagttggtcaccttagaattggaaggaaacaatctcagtgaagccaatgtcaatcctttagctttcaaacctttgaagagcctagcctacttgcgtctgggaaaaaataaatttagaattataccgcagggtcttcctggttctattgaggaattatacctagaaaataaccaaattgaagaaataactgaaatttgtttcaatcataccagaaagatcaatgtcattgtactacgttataacaaaattgaagaaaataggattgctcctttagcctggataaatcaagaaaatctagaatccattgatctctcctacaacaagctctatcacgtcccgtcctatctacccaagtccttgctgcacctagtactccttgggaaccagattgaacggatccctggctatgtgtttggccacatggaaccaggcctggaatacttgtacctgtcatttaacaaacttgctgatgatggcatggaccgtgtctccttctatggggcatatcattctctgagagaattatttctggatcacaatgacttaaaatctataccacctgggatacaagaaatgaaagcactacattttctgaggctgaacaacaacaagatacggaacattcttccagaagaaatttgcaatgctgaagaggatgatgactcaaatctggaacatcttcatcttgaaaacaattatattaaaattagagaaataccatcttacacattttcatgcataagatcatactcaagtatcgttcttaaaccacaaaacatcaagtaattccaagttttcctttgctgtttataaactttactcatgtatttgtagtagctgcatttgtcattaataagagagacataatcctcctgttatactcagtatcattatatgctagtcaacctgattcactaacacacagatgaacaaccaaaatatacctaaaaggtatagtctctaggagttttattaatagtaaaggtaaaatctctcagtttcctacctctagaaagaggccatctcactagaataggatattatgcatactgagctagaccagaagagtctggaacaaaataaacacagcctttataatcaacttgaatactggtgttagctgagaactctgtaagtccctttaaaaattatgtatcttttggttcaagattaagaagcataatgacaacaaaaaaagcaggcagaatttatgaataagtgttgtttattattaaaacaataatttgttaatttcttataaggtcctgtgctataattactggtataaatataactgaatattggggtagctttcatttcttccattaattacatgtgtaaaattaaaacactactgtaatgttaatttcctggttttgaaaatcatattatggttatgtacattgttaacattaaggaaagctggcagaagggtgtgcataaattctatactctttttgaaacttttctataattctaaaattattttttaaagttaaacagtatattaagattaccttcactattcctcactcaagattaagacattttttgaaaagcagtagagtttgcttaaaatacaaattaattattcttgactataaccttgtaaaggtaaatctaatgtataaatttttgaaaaattttgcaccactggtcatagcatctatctcctttgccttaatttactgaaatacatcattttattcggttcaattgaaataaagctatgtctttactatgtattggccctaccaaaatcatatattaaaattttctaacataatga

SEQ ID NO: 10227 - DNA, 1606 bp, Homo sapiens
  source 1..1606: mol_type = unassigned DNA
caaatacttttcaacattcccttctgtcctttctttgtttttaaagaaagctctgattttgtttcattttcagctggagacttaaatgacaccaagcaaagcctacttagtttagatctccagaaattggctggtggaaaaaaatcaaacatgaagattgcagttttgttttgtttttttctgcttatcatttttcaaactgactttggaaaaaatgaagaaattcctaggaagcaaaggaggaagatctaccacagaaggttgaggaaaagttcaacctcacacaagcacagatcaaacagacagcttggaattcagcaaacaacagtttttacaccagtagcaagacttcctattgttaactttgattatagcatggaggaaaagtttgaatccttttcaagttttcctggagtagaatcaagttataatgtgttaccaggaaagaagggacactgtttggtaaagggcataaccatgtacaacaaagctgtgtggtcgcctgagccctgcactacctgcctctgctcagatggaagagttctttgtgatgaaaccatgtgccatccccagaggtgcccccaaacagttatacctgaaggggaatgctgcccggtctgctccgctactggtacagagatttagctaagcaaaatatcagtgtgtgattaatctttaacttccatttgtttttgttactaattttagattaaaattatgatacattagtcagatctgagtacttaaaatattggcaaaatgctgattaacatagaaaatatctgggaaaatgtatggtaggggatataaataatagactgtggctttatagttctagctctatcagattcagtaaacttggatgagattacattccacatttgactctcagctttagagatatggtaacagaatttctacaacagatcctgaattcttattgcattaagggctctgctttggtctatatgtgcattatcccacttaatccagtgcaacgtgcctttatcatcttgaagccagggtaaacaaaggaagagtgatttgcatctaaagagaacaaagccccaaccctctggctatacccaaccactcaaaggcagcacaggaacccacatcactgcttggataatcccaggaaaatgcagaaaaagtgtagcctgaagcatgattttctcatgtggcacttctgtgtgcaggagatcacagcgcgggttttgttggctgctcatggaccccttctccaatgaggctcatacctgactgaatgaaggacccttgggagggaggcccagtctcctctgagaaaagcctaaccaacaccttatgaaaataagcaaataaatacttgttaaataattggctgggaagggatagggacatcttctcttgtctataaccaaggtagattgctcccatgcacacagatgatcacagggtaggtgtctacaaaagtctccttgccaggaaaaacttttgactatttagaaattgtgttttgcgttatactaccaaatatttcactaatatttaaaaagagttaggaaaaaagtgttcaatgaaatggattccttggagtgaaataaatacaaggtttacaaagtaa

SEQ ID NO: 10228 - DNA, 612 bp, Homo sapiens
  source 1..612: mol_type = unassigned DNA
tttgcagataaagaaactgaggccaaagtacacaactaatttgccagcgtaacagctggagacttaaatgacaccaagcaaagcctacttagtttagatctccagaaattggctggtggaaaaaaatcaaacatgaagattgcagttttgttttgtttttttctgcttatcatttttcaaactgactttggaaaaaatgaagaaattcctaggaagcaaaggaggaagatctaccacagaaggttgaggaaaagttcaacctcacacaagcacagatcaaacagacagcttggaattcagcaaacaacagtttttacaccagtagcaagacttcctattgttaactttgattatagcatggaggaaaagtttgaatccttttcaagttttcctggagtagaatcaagttataatgtgttaccaggaaagaagggacactgtttggtaaagggcataaccatgtacaacaaagctgtgtggtcgcctgagccctgcactacctgcctctgctcagatggaagagttctttgtgatgaaaccatgtgccatccccagaggtgcccccaaacagttatacctgaaggggaatgctgcccggtctgctccgctact

SEQ ID NO: 10229 - DNA, 1999 bp, Homo sapiens
  source 1..1999: mol_type = unassigned DNA
aaatgacaccaagcaaagcctacttagtttagatctccagaaattggctggtggaaaaaaatcaaacatgaagattgcagttttgttttgtttttttctgcttatcatttttcaaactgactttggaaaaaatgaagaaattcctaggaagcaaaggaggaagatctaccacagaaggttgaggaaaagttcaacctcacacaagcacagatcaaacagacagcttggaattcagcaaacaacagtttttacaccagtagcaagacttcctattgttaactttgattatagcatggaggaaaagtttgaatccttttcaagttttcctggagtagaatcaagttataatgtgttaccaggaaagaagggacactgtttggtaaagggcataaccatgtacaacaaagctgtgtggtcgcctgagccctgcactacctgcctctgctcagatggaagagttctttgtgatgaaaccatgtgccatccccagaggtgcccccaaacagttatacctgaaggggaatgctgcccggtctgctccgctactgaacaaagagaacctaccaatttacttcataagcaactgccacctcctcaggtgggaatggaccgaatagtaagaaaagaagcacttcaatctgaggaggatgaagaagtgaaagaagaagatacagagcaaaagagagagacccctgaatctagaaatcaggggcaactttacagtgagggggacagcagaggaggagacagaaagcagaggcctggagaggagaggaggctggcacaccagcaacaacgccaaggaagggaggaggaggaggatgaggaggaggagggtgaggagggtgaggaggatgaggaggacgaggaggacccggtaagaggagatatgttccgaatgccctctcgatccccgcttcctgctcctcccagaggcacactgcgcctgccaagcgggtgctctctgtcctacaggaccatcagctgcatcaacgccatgcttacccagataccaccgctgacagcaccacagataacaagtctggagctcactggcaattccatcgcctccatcccagatgaagcatttaatggattaccaaatttggaaaggcttgatctgagtaaaaataatatcacttcttcaggcataggtccaaaagcattcaagcttctgaagaagttaatgcgtttgaatatggatggaaataatttgatacagattccttcacaattgccatctacattagaagaacttaaagtcaatgagaacaatcttcaggctatcgatgaagaaagtttatcagacttaaatcagttggtcaccttagaattggaaggaaacaatctcagtgaagccaatgtcaatcctttagctttcaaacctttgaagagcctagcctacttgcgtctgggaaaaaataaatttagaattataccgcagggtcttcctggttctattgaggaattatacctagaaaataaccaaattgaagaaataactgaaatttgtttcaatcataccagaaagatcaatgtcattgtactacgttataacaaaattgaagaaaataggattgctcctttagcctggataaatcaagaaaatctagaatccattgatctctcctacaacaagctctatcacgtcccgtcctatctacccaagtccttgctgcacctagtactccttgggaaccagattgaacggatccctggctatgtgtttggccacatggaaccaggcctggaatacttgtacctgtcatttaacaaacttgctgatgatggcatggaccgtgtctccttctatggggcatatcattctctgagagaattatttctggatcacaatgacttaaaatctataccacctgggatacaagaaatgaaagcactacattttctgaggctgaacaacaacaagatacgctgtgtttcagatgctgttctagagacagtgacaaacagatcagatgtggcctttcctctctggtag

SEQ ID NO: 10230 - DNA, 4326 bp, Homo sapiens
  source 1..4326: mol_type = unassigned DNA
aaaccaataaggttaggacaagagaatagctgtggtttgcgttgcaaaaaccaaaaaaaaaaaaaaaaaaaaaaaaagaaagccccgaggctccatgggcagacctacaaggctgcgcaaacaaatcgagggatgagattctgctgtttctttgtctagggttctcagatgctatctgccgctgctgtttggtggggaaggagcgctgggcgcaaagctgttaccaaacagaacggtgggagctgatggctccgagtttggggcgaggtagaaactctccagtgccacttccgactttaagccttcctgttgccgtccactgtggcgggtttcttcctggggaacacgttttcgctcagtcgctcggcagcccgagcctgcggcagcggccaggcgcctgccccctgcgccgagctttcccctgcagaggcgctccactcccagaagcgccgcggctgcaccagagcgcctgagagcccccgcgcgtacccatccaggagcaaaactatgtcaggaatggaggtttgctaacccagaaaattcgaaggaacacattaaactggtggatgcagcagatgtaagcgctgtgcaaacatctcaagccagttcagatgttgctgtttcctcaagttgcaggtctatggaaatgcaggatctaaccagcccgcatagccgtctgagtggtagtagtgaatcccccagtggccccaaactcggtaactctcatataaatagtaattccatgactcccaatggcaccgaagttaaaacagagccaatgagcagcagtgaaacagcttcaacgacagccgacgggtctttaaacaatttctcaggttcagcaattgggagcagtagtttcagcccacgaccaactcaccagttctctccaccacagatttacccttccaacagaccatacccacatattctccctaccccttcctcacaaactatggctgcatatgggcaaacacagtttaccacaggaatgcaacaagctacagcctatgccacgtacccacagccaggacagccgtacggcatttcctcatatggtgcattgtgggcaggcatcaagactgaaggtggattgtcacagtctcagtcacctggacagacaggatttctcagctatggcacaagcttcagtacccctcaacctggacaggcaccatacagctaccagatgcaaggtagcagttttacaacatcatcaggaatatatacaggaaataattcactcacaaattcctctggatttaatagttcacagcaggactatccgtcttatcccagttttggccagggtcagtacgcacagtattataacagctcaccgtatccagcacattatatgaccagcagcaacaccagcccaacgacaccatccaccaatgccacttaccagcttcaagaaccgccatctggcatcaccagccaagcagttacagatcccacagcagagtacagcacaatccacagcccatcaacacccattaaagattcagattctgatcgattgcgtcgaggttcagatgggaaatcacgtggacggggccgaagaaacaataatccttcacctcccccagattctgatcttgagagagtgttcatctgggacttggatgagacaatcattgttttccactccttgcttactgggtcctacgccaacagatatgggagggatccacccacttcagtttcccttggactgcgaatggaagaaatgattttcaacttggcagacacacatttattttttaatgacttagaagaatgtgaccaagtccatatagatgatgtttcttcagatgataacggacaggacctaagcacatataactttggaacagatggctttcctgctgcagcaaccagtgctaacttatgtttggcaactggtgtacggggcggtgtggactggatgagaaagttggccttccgctacagacgggtaaaagagatctacaacacctacaaaaataatgttggaggtctgcttggtccagctaagagggaagcctggctgcagttgagggccgaaattgaagccctgaccgactcctggttgacactggccctgaaagcactctcgctcattcactcccggacaaactgtgtgaatattttagtaacaactactcagctcatcccagcattggcgaaagtcctgctgtatgggttaggaattgtatttccaatagaaaatatttacagtgcaactaaaataggaaaagaaagctgttttgagagaataattcaaaggtttggaagaaaagtggtgtatgttgttataggagatggtgtagaagaagaacaaggagcaaaaaagcacgcgatgcccttctggaggatctccagccactcggacctcatggccctgcaccatgccttggaactggagtacctgtaacagcgctcggcactttgacagcgcacagctgctctgtgaccagggacagatccagcaggccccagtctcgcatcagcgccggcctccagaacttagcaatttccgcctggtgatgcgcagttgctgtcagtcttgacctctgcctttgtggtgaatggaggaccacgtctatttcatcagaacagctgttgactctagtactgtgaatccagtgaaaataagccatgagaatgttttagcacagcgttatgtgtctgccacattaactacacggttcaaacctgtgaagaaaggacctgcaaacgcttcagttgttagcattttcaatgtgatataaacagcttctccaatacagcaaacctaattgcacaacagagactgaaatgtgtttcctgaataccagtggaggaattttcttgtaaagaaggtttactttttggtgtctcatacccagggtaatctgtacatctctacttatttatgaacagactttttttaaaaagataaaaaaacagctttattgaggtataattcacccaccagacttttttaaacatcaaataattgaagagacaatagcattagaaataagtgattaaaggcctctgcctcacaacatggcaagtacagtactttgaattttagcacattgcatagtagttttaagtatgtctaatttaaacgtataatatgtacatcactgagacaatcatgtacagaaagaatttttggtgtaaatttgtaataatggataattcttttacatattgtttagggaaatgatattgaaaggtagcaatgcctggatagtgaagcatgaggcagcacgtgcacaaattcatgtgccgtgccttatctgagttttcggtataaatatgtagataatggattttttttttttagataatgttgtcaagaccaaaagcatggatgtcaagtgtcagtaaggattttgttttctaaaattttttcctgcatcagttcttctgagggccttgatgaaataacacagcagtttcttaaacaatttgaaacaaaatgagctctcctaccacctcactttttcatttccacactaatgtattatatgtaactacttggaaaaaataattattcaaatgcttcttcccacaaagaatatagatgatagtagatatattttattaataaaatggttcatgaatcggagactaacaaagttttcatgtgctcagaattattaattatcgtgtctgcattttctttcgataaaggaagacacacgatgctaatccggaaatcagcaaactttgcattactccctatgtgcgtattttctctttcttcctgtcaccctgaggaaggttcattgccattgtcatcaccatggaaacaacgttcctctccacctgcattatgtactacatgacaggcatcaatctggggaaataataaaattatcacctttgtcagaccataagagtttctccaaaagtggtcagtttggctgggcaatattttctctcatctaacaaacacaatccattgtcatgaaattacccttaggatgagtcttctttaatcaatcatatattgggcgggaaaaacaccagctttgacccgaagtagttgaagagctacttcattcttttctgaagttgtgtgttgctgctagaaatagtcatttgtgaattatccaaattgtttaaattcacaattgaattagttttttcttcctttttgcttgaagcaaacagttgacaatttttaaccttttcattttatgtttttgtactctgcagactgaaaagacaaagtttatcttggccttactgtataaaggtgtgctgtgtccaccgttgtgtacagaatttttcttcattaattttgtgtttaagttaataaaatttatttgtgatgtactgtaa

SEQ ID NO: 10231 - DNA, 3843 bp, Homo sapiens
  source 1..3843: mol_type = unassigned DNA
atttggctgccttccccccctgacaaggggaggaggaggatagacctgcaggaggaaacaacagttgagacctcaacttaaagacaatatgcctttcactgctgcagtatcctcctttttctcttttggttaaaagagagcattgtcgttctcagccatgtgctctgtataattaagagctgacactgaagcagagtaacaacatcttctaatttttttacccctgatcacaggtgcaaacatctcaagccagttcagatgttgctgtttcctcaagttgcagttaaaacagagccaatgagcagcagtgaaacagcttcaacgacagccgacgggtctttaaacaatttctcaggttcagcaattgggagcagtagtttcagcccacgaccaactcaccagttctctccaccacagatttacccttccaacagaccatacccacatattctccctaccccttcctcacaaactatggctgcatatgggcaaacacagtttaccacaggaatgcaacaagctacagcctatgccacgtacccacagccaggacagccgtacggcatttcctcatatggtgcattgtgggcaggcatcaagactgaaggtggattgtcacagtctcagtcacctggacagacaggatttctcagctatggcacaagcttcagtacccctcaacctggacaggcaccatacagctaccagatgcaaggtagcagttttacaacatcatcaggaatatatacaggaaataattcactcacaaattcctctggatttaatagttcacagcaggactatccgtcttatcccagttttggccagggtcagtacgcacagtattataacagctcaccgtatccagcacattatatgaccagcagcaacaccagcccaacgacaccatccaccaatgccacttaccagcttcaagaaccgccatctggcatcaccagccaagcagttacagatcccacagcagagtacagcacaatccacagcccatcaacacccattaaagattcagattctgatcgattgcgtcgaggttcagatgggaaatcacgtggacggggccgaagaaacaataatccttcacctcccccagattctgatcttgagagagtgttcatctgggacttggatgagacaatcattgttttccactccttgcttactgggtcctacgccaacagatatgggagggatccacccacttcagtttcccttggactgcgaatggaagaaatgattttcaacttggcagacacacatttattttttaatgacttagaagaatgtgaccaagtccatatagatgatgtttcttcagatgataacggacaggacctaagcacatataactttggaacagatggctttcctgctgcagcaaccagtgctaacttatgtttggcaactggtgtacggggcggtgtggactggatgagaaagttggccttccgctacagacgggtaaaagagatctacaacacctacaaaaataatgttggaggtctgcttggtccagctaagagggaagcctggctgcagttgagggccgaaattgaagccctgaccgactcctggttgacactggccctgaaagcactctcgctcattcactcccggacaaactgtgtgaatattttagtaacaactactcagctcatcccagcattggcgaaagtcctgctgtatgggttaggaattgtatttccaatagaaaatatttacagtgcaactaaaataggaaaagaaagctgttttgagagaataattcaaaggtttggaagaaaagtggtgtatgttgttataggagatggtgtagaagaagaacaaggagcaaaaaagcacgcgatgcccttctggaggatctccagccactcggacctcatggccctgcaccatgccttggaactggagtacctgtaacagcgctcggcactttgacagcgcacagctgctctgtgaccagggacagatccagcaggccccagtctcgcatcagcgccggcctccagaacttagcaatttccgcctggtgatgcgcagttgctgtcagtcttgacctctgcctttgtggtgaatggaggaccacgtctatttcatcagaacagctgttgactctagtactgtgaatccagtgaaaataagccatgagaatgttttagcacagcgttatgtgtctgccacattaactacacggttcaaacctgtgaagaaaggacctgcaaacgcttcagttgttagcattttcaatgtgatataaacagcttctccaatacagcaaacctaattgcacaacagagactgaaatgtgtttcctgaataccagtggaggaattttcttgtaaagaaggtttactttttggtgtctcatacccagggtaatctgtacatctctacttatttatgaacagactttttttaaaaagataaaaaaacagctttattgaggtataattcacccaccagacttttttaaacatcaaataattgaagagacaatagcattagaaataagtgattaaaggcctctgcctcacaacatggcaagtacagtactttgaattttagcacattgcatagtagttttaagtatgtctaatttaaacgtataatatgtacatcactgagacaatcatgtacagaaagaatttttggtgtaaatttgtaataatggataattcttttacatattgtttagggaaatgatattgaaaggtagcaatgcctggatagtgaagcatgaggcagcacgtgcacaaattcatgtgccgtgccttatctgagttttcggtataaatatgtagataatggattttttttttttagataatgttgtcaagaccaaaagcatggatgtcaagtgtcagtaaggattttgttttctaaaattttttcctgcatcagttcttctgagggccttgatgaaataacacagcagtttcttaaacaatttgaaacaaaatgagctctcctaccacctcactttttcatttccacactaatgtattatatgtaactacttggaaaaaataattattcaaatgcttcttcccacaaagaatatagatgatagtagatatattttattaataaaatggttcatgaatcggagactaacaaagttttcatgtgctcagaattattaattatcgtgtctgcattttctttcgataaaggaagacacacgatgctaatccggaaatcagcaaactttgcattactccctatgtgcgtattttctctttcttcctgtcaccctgaggaaggttcattgccattgtcatcaccatggaaacaacgttcctctccacctgcattatgtactacatgacaggcatcaatctggggaaataataaaattatcacctttgtcagaccataagagtttctccaaaagtggtcagtttggctgggcaatattttctctcatctaacaaacacaatccattgtcatgaaattacccttaggatgagtcttctttaatcaatcatatattgggcgggaaaaacaccagctttgacccgaagtagttgaagagctacttcattcttttctgaagttgtgtgttgctgctagaaatagtcatttgtgaattatccaaattgtttaaattcacaattgaattagttttttcttcctttttgcttgaagcaaacagttgacaatttttaaccttttcattttatgtttttgtactctgcagactgaaaagacaaagtttatcttggccttactgtataaaggtgtgctgtgtccaccgttgtgtacagaatttttcttcattaattttgtgtttaagttaataaaatttatttgtgatgtactgt

SEQ ID NO: 10232 - DNA, 3907 bp, Homo sapiens
  source 1..3907: mol_type = unassigned DNA
gagacctcaacttaaagacaatatgcctttcactgctgcagtatcctcctttttctcttttggttaaaagagagcattgtcgttctcagccatgtgctctgtataattaagagctgacactgaagcagagtaacaacatcttctaatttttttacccctgatcacaggtgcaaacatctcaagccagttcagatgttgctgtttcctcaagttgcaggtctatggaaatgcaggatctaaccagcccgcatagccgtctgagtggtagtagtgaatcccccagtggccccaaactcggtaactctcatataaatagtaattccatgactcccaatggcaccgaagttaaaacagagccaatgagcagcagtgaaacagcttcaacgacagccgacgggtctttaaacaatttctcaggttcagcaattgggagcagtagtttcagcccacgaccaactcaccagttctctccaccacagatttacccttccaacagaccatacccacatattctccctaccccttcctcacaaactatggctgcatatgggcaaacacagtttaccacaggaatgcaacaagctacagcctatgccacgtacccacagccaggacagccgtacggcatttcctcatatggtgcattgtgggcaggcatcaagactgaaggtggattgtcacagtctcagtcacctggacagacaggatttctcagctatggcacaagcttcagtacccctcaacctggacaggcaccatacagctaccagatgcaaggtagcagttttacaacatcatcaggaatatatacaggaaataattcactcacaaattcctctggatttaatagttcacagcaggactatccgtcttatcccagttttggccagggtcagtacgcacagtattataacagctcaccgtatccagcacattatatgaccagcagcaacaccagcccaacgacaccatccaccaatgccacttaccagcttcaagaaccgccatctggcatcaccagccaagcagttacagatcccacagcagagtacagcacaatccacagcccatcaacacccattaaagattcagattctgatcgattgcgtcgaggttcagatgggaaatcacgtggacggggccgaagaaacaataatccttcacctcccccagattctgatcttgagagagtgttcatctgggacttggatgagacaatcattgttttccactccttgcttactgggtcctacgccaacagatatgggagggatccacccacttcagtttcccttggactgcgaatggaagaaatgattttcaacttggcagacacacatttattttttaatgacttagaagaatgtgaccaagtccatatagatgatgtttcttcagatgataacggacaggacctaagcacatataactttggaacagatggctttcctgctgcagcaaccagtgctaacttatgtttggcaactggtgtacggggcggtgtggactggatgagaaagttggccttccgctacagacgggtaaaagagatctacaacacctacaaaaataatgttggaggtctgcttggtccagctaagagggaagcctggctgcagttgagggccgaaattgaagccctgaccgactcctggttgacactggccctgaaagcactctcgctcattcactcccggacaaactgtgtgaatattttagtaacaactactcagctcatcccagcattggcgaaagtcctgctgtatgggttaggaattgtatttccaatagaaaatatttacagtgcaactaaaataggaaaagaaagctgttttgagagaataattcaaaggtttggaagaaaagtggtgtatgttgttataggagatggtgtagaagaagaacaaggagcaaaaaagcacgcgatgcccttctggaggatctccagccactcggacctcatggccctgcaccatgccttggaactggagtacctgtaacagcgctcggcactttgacagcgcacagctgctctgtgaccagggacagatccagcaggccccagtctcgcatcagcgccggcctccagaacttagcaatttccgcctggtgatgcgcagttgctgtcagtcttgacctctgcctttgtggtgaatggaggaccacgtctatttcatcagaacagctgttgactctagtactgtgaatccagtgaaaataagccatgagaatgttttagcacagcgttatgtgtctgccacattaactacacggttcaaacctgtgaagaaaggacctgcaaacgcttcagttgttagcattttcaatgtgatataaacagcttctccaatacagcaaacctaattgcacaacagagactgaaatgtgtttcctgaataccagtggaggaattttcttgtaaagaaggtttactttttggtgtctcatacccagggtaatctgtacatctctacttatttatgaacagactttttttaaaaagataaaaaaacagctttattgaggtataattcacccaccagacttttttaaacatcaaataattgaagagacaatagcattagaaataagtgattaaaggcctctgcctcacaacatggcaagtacagtactttgaattttagcacattgcatagtagttttaagtatgtctaatttaaacgtataatatgtacatcactgagacaatcatgtacagaaagaatttttggtgtaaatttgtaataatggataattcttttacatattgtttagggaaatgatattgaaaggtagcaatgcctggatagtgaagcatgaggcagcacgtgcacaaattcatgtgccgtgccttatctgagttttcggtataaatatgtagataatggattttttttttttagataatgttgtcaagaccaaaagcatggatgtcaagtgtcagtaaggattttgttttctaaaattttttcctgcatcagttcttctgagggccttgatgaaataacacagcagtttcttaaacaatttgaaacaaaatgagctctcctaccacctcactttttcatttccacactaatgtattatatgtaactacttggaaaaaataattattcaaatgcttcttcccacaaagaatatagatgatagtagatatattttattaataaaatggttcatgaatcggagactaacaaagttttcatgtgctcagaattattaattatcgtgtctgcattttctttcgataaaggaagacacacgatgctaatccggaaatcagcaaactttgcattactccctatgtgcgtattttctctttcttcctgtcaccctgaggaaggttcattgccattgtcatcaccatggaaacaacgttcctctccacctgcattatgtactacatgacaggcatcaatctggggaaataataaaattatcacctttgtcagaccataagagtttctccaaaagtggtcagtttggctgggcaatattttctctcatctaacaaacacaatccattgtcatgaaattacccttaggatgagtcttctttaatcaatcatatattgggcgggaaaaacaccagctttgacccgaagtagttgaagagctacttcattcttttctgaagttgtgtgttgctgctagaaatagtcatttgtgaattatccaaattgtttaaattcacaattgaattagttttttcttcctttttgcttgaagcaaacagttgacaatttttaaccttttcattttatgtttttgtactctgcagactgaaaagacaaagtttatcttggccttactgtataaaggtgtgctgtgtccaccgttgtgtacagaatttttcttcattaattttgtgtttaagttaataaaatttatttgtgatgtactgtaa

SEQ ID NO: 10233 - DNA, 3590 bp, Homo sapiens
  source 1..3590: mol_type = unassigned DNA
atgcttatgatatatgttcagttagtagttaaaacagagccaatgagcagcagtgaaacagcttcaacgacagccgacgggtctttaaacaatttctcaggttcagcaattgggagcagtagtttcagcccacgaccaactcaccagttctctccaccacagatttacccttccaacagaccatacccacatattctccctaccccttcctcacaaactatggctgcatatgggcaaacacagtttaccacaggaatgcaacaagctacagcctatgccacgtacccacagccaggacagccgtacggcatttcctcatatggtgcattgtgggcaggcatcaagactgaaggtggattgtcacagtctcagtcacctggacagacaggatttctcagctatggcacaagcttcagtacccctcaacctggacaggcaccatacagctaccagatgcaaggtagcagttttacaacatcatcaggaatatatacaggaaataattcactcacaaattcctctggatttaatagttcacagcaggactatccgtcttatcccagttttggccagggtcagtacgcacagtattataacagctcaccgtatccagcacattatatgaccagcagcaacaccagcccaacgacaccatccaccaatgccacttaccagcttcaagaaccgccatctggcatcaccagccaagcagttacagatcccacagcagagtacagcacaatccacagcccatcaacacccattaaagattcagattctgatcgattgcgtcgaggttcagatgggaaatcacgtggacggggccgaagaaacaataatccttcacctcccccagattctgatcttgagagagtgttcatctgggacttggatgagacaatcattgttttccactccttgcttactgggtcctacgccaacagatatgggagggatccacccacttcagtttcccttggactgcgaatggaagaaatgattttcaacttggcagacacacatttattttttaatgacttagaagaatgtgaccaagtccatatagatgatgtttcttcagatgataacggacaggacctaagcacatataactttggaacagatggctttcctgctgcagcaaccagtgctaacttatgtttggcaactggtgtacggggcggtgtggactggatgagaaagttggccttccgctacagacgggtaaaagagatctacaacacctacaaaaataatgttggaggtctgcttggtccagctaagagggaagcctggctgcagttgagggccgaaattgaagccctgaccgactcctggttgacactggccctgaaagcactctcgctcattcactcccggacaaactgtgtgaatattttagtaacaactactcagctcatcccagcattggcgaaagtcctgctgtatgggttaggaattgtatttccaatagaaaatatttacagtgcaactaaaataggaaaagaaagctgttttgagagaataattcaaaggtttggaagaaaagtggtgtatgttgttataggagatggtgtagaagaagaacaaggagcaaaaaagcacgcgatgcccttctggaggatctccagccactcggacctcatggccctgcaccatgccttggaactggagtacctgtaacagcgctcggcactttgacagcgcacagctgctctgtgaccagggacagatccagcaggccccagtctcgcatcagcgccggcctccagaacttagcaatttccgcctggtgatgcgcagttgctgtcagtcttgacctctgcctttgtggtgaatggaggaccacgtctatttcatcagaacagctgttgactctagtactgtgaatccagtgaaaataagccatgagaatgttttagcacagcgttatgtgtctgccacattaactacacggttcaaacctgtgaagaaaggacctgcaaacgcttcagttgttagcattttcaatgtgatataaacagcttctccaatacagcaaacctaattgcacaacagagactgaaatgtgtttcctgaataccagtggaggaattttcttgtaaagaaggtttactttttggtgtctcatacccagggtaatctgtacatctctacttatttatgaacagactttttttaaaaagataaaaaaacagctttattgaggtataattcacccaccagacttttttaaacatcaaataattgaagagacaatagcattagaaataagtgattaaaggcctctgcctcacaacatggcaagtacagtactttgaattttagcacattgcatagtagttttaagtatgtctaatttaaacgtataatatgtacatcactgagacaatcatgtacagaaagaatttttggtgtaaatttgtaataatggataattcttttacatattgtttagggaaatgatattgaaaggtagcaatgcctggatagtgaagcatgaggcagcacgtgcacaaattcatgtgccgtgccttatctgagttttcggtataaatatgtagataatggattttttttttttagataatgttgtcaagaccaaaagcatggatgtcaagtgtcagtaaggattttgttttctaaaattttttcctgcatcagttcttctgagggccttgatgaaataacacagcagtttcttaaacaatttgaaacaaaatgagctctcctaccacctcactttttcatttccacactaatgtattatatgtaactacttggaaaaaataattattcaaatgcttcttcccacaaagaatatagatgatagtagatatattttattaataaaatggttcatgaatcggagactaacaaagttttcatgtgctcagaattattaattatcgtgtctgcattttctttcgataaaggaagacacacgatgctaatccggaaatcagcaaactttgcattactccctatgtgcgtattttctctttcttcctgtcaccctgaggaaggttcattgccattgtcatcaccatggaaacaacgttcctctccacctgcattatgtactacatgacaggcatcaatctggggaaataataaaattatcacctttgtcagaccataagagtttctccaaaagtggtcagtttggctgggcaatattttctctcatctaacaaacacaatccattgtcatgaaattacccttaggatgagtcttctttaatcaatcatatattgggcgggaaaaacaccagctttgacccgaagtagttgaagagctacttcattcttttctgaagttgtgtgttgctgctagaaatagtcatttgtgaattatccaaattgtttaaattcacaattgaattagttttttcttcctttttgcttgaagcaaacagttgacaatttttaaccttttcattttatgtttttgtactctgcagactgaaaagacaaagtttatcttggccttactgtataaaggtgtgctgtgtccaccgttgtgtacagaatttttcttcattaattttgtgtttaagttaataaaatttatttgtgatgtactgtaa

SEQ ID NO: 10234 - DNA, 1723 bp, Homo sapiens
  source 1..1723: mol_type = unassigned DNA
atgttgctgtttcctcaagttgcaggtctatggaaatgcaggatctaaccagcccgcatagccgtctgagtggtagtagtgaatcccccagtggccccaaactcggtaactctcatataaatagtaattccatgactcccaatggcaccgaagttaaaacagagccaatgagcagcagtgaaacagcttcaacgacagccgacgggtctttaaacaatttctcaggttcagcaattgggagcagtagtttcagcccacgaccaactcaccagttctctccaccacagatttacccttccaacagaccatacccacatattctccctaccccttcctcacaaactatggctgcatatgggcaaacacagtttaccacaggaatgcaacaagctacagcctatgccacgtacccacagccaggacagccgtacggcatttcctcatatggcatcaagactgaaggtggattgtcacagtctcagtcacctggacagacaggatttctcagctatggcacaagcttcagtacccctcaacctggacaggcaccatacagctaccagatgcaaggtagcagttttacaacatcatcaggaatatatacaggaaataattcactcacaaattcctctggatttaatagttcacagcaggactatccgtcttatcccagttttggccagggtcagtacgcacagtattataacagctcaccgtatccagcacattatatgaccagcagcaacaccagcccaacgacaccatccaccaatgccacttaccagcttcaagaaccgccatctggcatcaccagccaagcagttacagatcccacagcagagtacagcacaatccacagcccatcaacacccattaaagattcagattctgatcgattgcgtcgaggttcagatgggaaatcacgtggacggggccgaagaaacaataatccttcacctcccccagattctgatcttgagagagtgttcatctgggacttggatgagacaatcattgttttccactccttgcttactgggtcctacgccaacagatatgggagggaatgtgaccaagtccatatagatgatgtttcttcagatgataacggacaggacctaagcacatataactttggaacagatggctttcctgctgcagcaaccagtgctaacttatgtttggcaactggtgtacggggcggtgtggactggatgagaaagttggccttccgctacagacgggtaaaagagatctacaacacctacaaaaataatgttggaggtctgcttggtccagctaagagggaagcctggctgcagttgagggccgaaattgaagccctgaccgactcctggttgacactggccctgaaagcactctcgctcattcactcccggacaaactgtgtgaatattttagtaacaactactcagctcatcccagcattggcgaaagtcctgctgtatgggttaggaattgtatttccaatagaaaatatttacagtgcaactaaaataggaaaagaaagctgttttgagagaataattcaaaggtttggaagaaaagtggtgtatgttgttataggagatggtgtagaagaagaacaaggagcaaaaaagcacgcgatgcccttctggaggatctccagccactcggacctcatggccctgcaccatgccttggaactggagtacctgtaacagcgctcggcactttgaca

SEQ ID NO: 10235 - DNA, 1540 bp, Homo sapiens
  source 1..1540: mol_type = unassigned DNA
gtacaaggaaatggtagaactagtgatctcacccagcctcactgtaaacagcgattgtctggataaactgaagtttaaccgtgctgacgctgctgtgtggactctgagtgacagacaaggcatcaccaaatcggcccccctgagagtgtcccagctcttctccagatcttgcccacgtgtcctcccccgccagccttccacagccatggcagcctacggccagacgcagtacagtgcggggatccagcaggctaccccctatacagcttacccacctccagcacaagcctatggaatcccttcctacagcatcaagacagaagacagcttgaaccattcccctggccagagtggattcctcagctatggctccagcttcagcacctcacccactggacagagcccatacacctaccagatgcacggcacaacagggttctatcaaggaggaaatggactgggcaacgcagccggtttcgggagtgtgcaccaggactatccttcctaccccggcttcccccagagccagtacccccagtattacggctcatcctacaaccctccctacgtcccggccagcagcatctgcccttcgcccctctccacgtccacctacgtcctccaggaggcatctcacaacgtccccaaccagagttccgagtcacttgctggtgaatacaacacacacaatggaccttccacaccagcgaaagagggagacacagacaggccgcaccgggcctccgacgggaagctccgaggccggtctaagaggagcagtgacccgtccccggcaggggacaatgagattgagcgtgtgttcgtgtgggacttggatgagacaataattatttttcactccttactcacggggacatttgcatccagatacgggaaggattgtgaccagatccacgttgatgacgtctcatcagatgacaatggccaagatttaagcacatacaacttctccgctgacggcttccacagttcggccccaggagccaacctgtgcctgggctctggcgtgcacggcggcgtggactggatgaggaagctggccttccgctaccggcgggtgaaggagatgtacaatacctacaagaacaacgttggtgggttgataggcactcccaaaagggagacctggctacagctccgagctgagctggaagctctcacagacctctggctgacccactccctgaaggcactaaacctcatcaactcccggcccaactgtgtcaatgtgctggtcaccaccactcaactaattcctgccctggccaaagtcctgctatatggcctggggtctgtgtttcctattgagaacatctacagtgcaaccaagacagggaaggagagctgcttcgagaggataatgcagagattcggcagaaaagctgtctacgtggtgatcggtgatggtgtggaagaggagcaaggagcgaaaaagcacaacatgcctttctggcggatatcctgccacgcagacctggaggcactgaggcacgccctggagctggagtatttatagcag

SEQ ID NO: 10236 - DNA, 2702 bp, Homo sapiens
  source 1..2702: mol_type = unassigned DNA
gcgcgctctgctcggctgcaggctcaggaagcggcgcggcggcacgtgctgggccagagccccgcgccctgcgtccagccgccgggtgtgtgcgcccgcgtagcccagcgtcgcgcctcggcgcccccacgcgcccacgcagcggcgcggggacccgggcgggggcagagggagggcccggcccagggaggagaaggggccggtcctcccggcgcaggcagcagccgcggcagcccaggaggcggaggcagcggcaacggcagagacagcaacgtgcccgccgcagtcagcccggcctcgtcggacccgcaccggcccgcccgcccgcccgcaccgcgtcggggcgccctctccactgcgcgcggtacaaggaaatggtagaactagtgatctcacccagcctcactgtaaacagcgattgtctggataaactgaagtttaaccgtgctgacgctgctgtgtggactctgagtgacagacaaggcatcaccaaatcggcccccctgagagtgtcccagctcttctccagatcttgcccacgtgtcctcccccgccagccttccacagccatggcagcctacggccagacgcagtacagtgcggggatccagcaggctaccccctatacagcttacccacctccagcacaagcctatggaatcccttcctacagcatcaagacagaagacagcttgaaccattcccctggccagagtggattcctcagctatggctccagcttcagcacctcacccactggacagagcccatacacctaccagatgcacggcacaacagggttctatcaaggaggaaatggactgggcaacgcagccggtttcgggagtgtgcaccaggactatccttcctaccccggcttcccccagagccagtacccccagtattacggctcatcctacaaccctccctacgtcccggccagcagcatctgcccttcgcccctctccacgtccacctacgtcctccaggaggcatctcacaacgtccccaaccagagttccgagtcacttgctggtgaatacaacacacacaatggaccttccacaccagcgaaagagggagacacagacaggccgcaccgggcctccgacgggaagctccgaggccggtctaagaggagcagtgacccgtccccggcaggggacaatgagattgagcgtgtgttcgtgtgggacttggatgagacaataattatttttcactccttactcacggggacatttgcatccagatacgggaaggacaccacgacgtccgtgcgcattggccttatgatggaagagatgatcttcaaccttgcagatacacatctgttcttcaatgacctggaggattgtgaccagatccacgttgatgacgtctcatcagatgacaatggccaagatttaagcacatacaacttctccgctgacggcttccacagttcggccccaggagccaacctgtgcctgggctctggcgtgcacggcggcgtggactggatgaggaagctggccttccgctaccggcgggtgaaggagatgtacaatacctacaagaacaacgttggtgggttgataggcactcccaaaagggagacctggctacagctccgagctgagctggaagctctcacagacctctggctgacccactccctgaaggcactaaacctcatcaactcccggcccaactgtgtcaatgtgctggtcaccaccactcaactaattcctgccctggccaaagtcctgctatatggcctggggtctgtgtttcctattgagaacatctacagtgcaaccaagacagggaaggagagctgcttcgagaggataatgcagagattcggcagaaaagctgtctacgtggtgatcggtgatggtgtggaagaggagcaaggagcgaaaaagcacaacatgcctttctggcggatatcctgccacgcagacctggaggcactgaggcacgccctggagctggagtatttatagcaggatcagcagcatctccacctgccatctcaccctcagaccccctcgccttccccacctccccaccgagaactccagagacccagatgttggacaccaggaaggggccccacagccgagacgacgtgtccagtgaccatctcagaagccgtccatcagtccaaatgggggttctgagaaggaaagtacccaacattggcttcggagtatttgactttggggaaaagggctggctcggagtctagactcttctgtaagactcacagaacaaaagcaaggaattgctgatttggggggtgcctggtgatgaggaggggatgggtttgtcttgtcttctttttaatttatggactagtctcattactccggaattatgctcttgtacctgtgtggctgggtttcttagtcgttggtttggtttggttttttgaactggtatgtggggtggttcacagttctaatgtaagcactctattctccaagttgtgctttgtggggacaatcattctttgaacattagagaggaaggcagttcaagctgttgaaaagactattgcttatttttgtttttaaagacctacttgacgtcatgtggacagtgcacgtgccttacgctacatcttgttttctaggaagagggggatgctgggaaggaatgggtgctttgtgatggataaaaggcattaaataaaaccacgtttacattttgaa

SEQ ID NO: 10237 - DNA, 2465 bp, Homo sapiens
  source 1..2465: mol_type = unassigned DNA
gcgcgctctgctcggctgcaggctcaggaagcggcgcggcggcacgtgctgggccagagccccgcgccctgcgtccagccgccgggtgtgtgcgcccgcgtagcccagcgtcgcgcctcggcgcccccacgcgcccacgcagcggcgcggggacccgggcgggggcagagggagggcccggcccagggaggagaaggggccggtcctcccggcgcaggcagcagccgcggcagcccaggaggcggaggcagcggcaacggcagagacagcaacgtgcccgccgcagtcagcccggcctcgtcggacccgcaccggcccgcccgcccgcccgcaccgcgtcggggcgccctctccactgcgcgcggtacaaggaaatggtagaactagtgatctcacccagcctcactgtaaacagcgattgtctggataaactgaagtttaaccgtgctgacgctgctgtgtggactctgagtgacagacaaggcatcaccaaatcggcccccctgagagtgtcccagctcttctccagatcttgcccacgtgtcctcccccgccagccttccacagccatggcagcctacggccagacgcagtacagtgcggggatccagcaggctaccccctatacagcttacccacctccagcacaagcctatggaatcccttcctacagcatcaagacagaagacagcttgaaccattcccctggccagagtggattcctcagctatggctccagcttcagcacctcacccactggacagagcccatacacctaccagatgcacggcacaacagggttctatcaaggaggaaatggactgggcaacgcagccggtttcgggagtgtgcaccaggactatccttcctaccccggcttcccccagagccagtacccccagtattacggctcatcctacaaccctccctacgtcccggccagcagcatctgcccttcgcccctctccacgtccacctacgtcctccaggaggcatctcacaacgtccccaaccagagttccgagtcacttgctggtgaatacaacacacacaatggaccttccacaccagcgaaagagggagacacagacaggccgcaccgggcctccgacgggaagctccgaggccggtctaagaggagcagtgacccgtccccggcaggggacaatgagattgagcgtgtgttcgtgtgggacttggatgagacaataattatttttcactccttactcacggggacatttgcatccagatacgggaaggacaccacgacgtccgtgcgcattggccttatgatggaagagatgatcttcaaccttgcagatacacatctgttcttcaatgacctggaggattgtgaccagatccacgttgatgacgtctcatcagatgacaatggccaagatttaagcacatacaacttctccgctgacggcttccacagttcggccccaggagccaacctgtgcctgggctctggcgtgcacggcggcgtggactggatgaggaagctggccttccgctaccggcgggtgaaggagatgtacaatacctacaagaacaacgttggtgggaaggagagctgcttcgagaggataatgcagagattcggcagaaaagctgtctacgtggtgatcggtgatggtgtggaagaggagcaaggagcgaaaaagcacaacatgcctttctggcggatatcctgccacgcagacctggaggcactgaggcacgccctggagctggagtatttatagcaggatcagcagcatctccacctgccatctcaccctcagaccccctcgccttccccacctccccaccgagaactccagagacccagatgttggacaccaggaaggggccccacagccgagacgacgtgtccagtgaccatctcagaagccgtccatcagtccaaatgggggttctgagaaggaaagtacccaacattggcttcggagtatttgactttggggaaaagggctggctcggagtctagactcttctgtaagactcacagaacaaaagcaaggaattgctgatttggggggtgcctggtgatgaggaggggatgggtttgtcttgtcttctttttaatttatggactagtctcattactccggaattatgctcttgtacctgtgtggctgggtttcttagtcgttggtttggtttggttttttgaactggtatgtggggtggttcacagttctaatgtaagcactctattctccaagttgtgctttgtggggacaatcattctttgaacattagagaggaaggcagttcaagctgttgaaaagactattgcttatttttgtttttaaagacctacttgacgtcatgtggacagtgcacgtgccttacgctacatcttgttttctaggaagagggggatgctgggaaggaatgggtgctttgtgatggataaaaggcattaaataaaaccacgtttacattttgaa

SEQ ID NO: 10238 - DNA, 1540 bp, Homo sapiens
  source 1..1540: mol_type = unassigned DNA
gtacaaggaaatggtagaactagtgatctcacccagcctcactgtaaacagcgattgtctggataaactgaagtttaaccgtgctgacgctgctgtgtggactctgagtgacagacaaggcatcaccaaatcggcccccctgagagtgtcccagctcttctccagatcttgcccacgtgtcctcccccgccagccttccacagccatggcagcctacggccagacgcagtacagtgcggggatccagcaggctaccccctatacagcttacccacctccagcacaagcctatggaatcccttcctacagcatcaagacagaagacagcttgaaccattcccctggccagagtggattcctcagctatggctccagcttcagcacctcacccactggacagagcccatacacctaccagatgcacggcacaacagggttctatcaaggaggaaatggactgggcaacgcagccggtttcgggagtgtgcaccaggactatccttcctaccccggcttcccccagagccagtacccccagtattacggctcatcctacaaccctccctacgtcccggccagcagcatctgcccttcgcccctctccacgtccacctacgtcctccaggaggcatctcacaacgtccccaaccagagttccgagtcacttgctggtgaatacaacacacacaatggaccttccacaccagcgaaagagggagacacagacaggccgcaccgggcctccgacgggaagctccgaggccggtctaagaggagcagtgacccgtccccggcaggggacaatgagattgagcgtgtgttcgtgtgggacttggatgagacaataattatttttcactccttactcacggggacatttgcatccagatacgggaaggattgtgaccagatccacgttgatgacgtctcatcagatgacaatggccaagatttaagcacatacaacttctccgctgacggcttccacagttcggccccaggagccaacctgtgcctgggctctggcgtgcacggcggcgtggactggatgaggaagctggccttccgctaccggcgggtgaaggagatgtacaatacctacaagaacaacgttggtgggttgataggcactcccaaaagggagacctggctacagctccgagctgagctggaagctctcacagacctctggctgacccactccctgaaggcactaaacctcatcaactcccggcaaaactgtgtcaatgtgctggtcaccaccactcaactaattcctgccctggccaaagtcctgctatatggcctggggtctgtgtttcctattgagaacatctacagtgcaaccaagacagggaaggagagctgcttcgagaggataatgcagagattcggcagaaaagctgtctacgtggtgatcggtgatggtgtggaagaggagcaaggagcgaaaaagcacaacatgcctttctggcggatatcctgccacgcagacctggaggcactgaggcacgccctggagctggagtatttatagcag

SEQ ID NO: 10239 - DNA, 1729 bp, Homo sapiens
  source 1..1729: mol_type = unassigned DNA
ctgatctccatgtcctgttgtggggcttttacagcctttggattgtgaaaactgctgagagagacttgcaatccagtcacataagtataataaagaaatattggtcctcatggaagaagagcaagatttaccagagcaaccagtgaaaaaagccaagatgcaggaatcaggagagcaaactataagtcaagtaagcaatccagatgtcagtgatcagaagcctgaaacatcaagccttgcttcaaaccttcccatgtcagaggaaattatgacatgcaccgattacatccctcgctcatccaatgattatacctcacaaatgtattctgcaaaaccttatgcacatattctctcagttcctgtttcggaaactgcttaccctggacagactcaataccagacactacagcagactcaaccctatgctgtctaccctcaggcaacccaaacgtatggactacctccttttgcttcaagcacaaatgccagcctgatatctacttcttctacaattgccaatattccagcagcagcagtagccagcatctcaaaccaggattatcccacctatactattcttggtcagaatcagtaccaggcctgctaccccagctccagctttggagtcacaggtcagactaacagtgatgcagagagcaccacattagcagcaaccacataccagtcggagaagcctagtgtcatggcgcctgcacctgcagcacagagactttcctctggagacccttctacaagtccatctttgtcccagactacaccaagtaaagatactgatgatcagtccaggaaaaacatgactagcaagaaccggggcaagaggaaagctgatgccacttcttcccaagacagtgaattagaacgggtatttctgtgggacttggatgaaaccatcatcatcttccactcacttcttactggatcctatgcccagaaatatggaaaggacccaacagtagtgattggctcaggtttaacaatggaagaaatgatttttgaagtggctgatactcatctatttttcaatgacttagaggagtgtgaccaggtacatgtggaagatgtggcttctgatgacaatggccaagacttgagcaactacagtttctcaacagatggtttcagtggctcaggaggtagtggcagccatggttcatctgtgggtgttcagggaggtgtggactggatgaggaaactagctttccgctaccggaaagtgagagaaatctatgataagcataaaagcaacgtgggtggtctcctcagtccccagaggaaggaagcactgcagagattaagagcagaaattgaagttttaacagattcctggttaggaactgcattaaagtccttacttctcatccagtccagaaagaattgtgtgaatgttctgatcactaccacccagctggttccagccctggccaaggttctcctatatggactaggagaaatatttcctattgagaacatctatagtgctaccaaaattggtaaggagagctgctttgagagaattgtgtcaaggtttggaaagaaagtcacatatgtagtgattggagatggacgagatgaagaaattgcagccaaacagcaactctatttcttagacatggaggcattgggttgccagctagaaccaactgccctgatactcttcatccagttaagtggaaaccttagcaactataataaactatgagattggtaa

SEQ ID NO: 10240 - DNA, 2459 bp, Homo sapiens
  source 1..2459: mol_type = unassigned DNA
aaactgctgagagagacttgcaatccagtcacataagtataataaagaaatattggtcctcatggaagaagagcaagatttaccagagcaaccatcaagtaagcaatccagatgtcagtgatcagaagcctgaaacatcaagccttgcttcaaaccttcccatgtcagaggaaattatgacatgcaccgattacatccctcgctcatccaatgattatacctcacaaatgtattctgcaaacttcaagcacaaatgccagcctgatatctacttcttctacaattgccaatattccagcagcagcagtagccagcatctcaaaccaggattatcccacctatactattcttggtcagaatcagtaccaggcctgctaccccagctccagctttggagtcacaggtcagactaacagtgatgcagagagcaccacattagcagcaaccacataccagtcggagaagcctagtgtcatggcgcctgcacctgcagcacagagactttcctctgacccttctacaagtccatctttgtcccagactacaccaagtaaagatactgatgatcagtccaggaaaaacatgactagcaagaaccggggcaagaggaaagctgatgccacttcttcccaagacagtgaattagaacgggtatttctgtgggacttggatgaaaccatcatcatcttccactcacttcttactggatcctatgcccagaaatatggaaaggacccaacagtagtgattggctcaggtttaacaatggaagaaatgatttttgaagtggctgatactcatctatttttcaatgacttagaggagtgtgaccaggtacatgtggaagatgtggcttctgatgacaatggccaagacttgagcaactacagtttctcaacagatggtttcagtggctcaggaggtagtggcagccatggttcatctgtgggtgttcagggaggtgtggactggatgaggaaactagctttccgctaccggaaagtgagagaaatctatgataagcataaaagcaacgtgggtggtctcctcagtccccagaggaaggaagcactgcagagattaagagcagaaattgaagttttaacagattcctggttaggaactgcattaaagtccttacttctcatccagtccagaaagaattgtgtgaatgttctgatcactaccacccagctggttccagccctggccaaggttctcctatatggactaggagaaatatttcctattgagaacatctatagtgctaccaaaattggtaaggagagctgctttgagagaattgtgtcaaggtttggaaagaaagtcacatatgtagtgattggagatggacgagatgaagaaattgcagccaaacagcacaacatgcctttctggaggatcacaaaccatggagacctagtatcccttcaccaggctttagagcttgattttctctaagaactggaatgaggagccttccccttgagctccttttcactcctgaagggagctggagactggaaccaactgagaactttctctgtctgtctctctctgtgtctctgtctctatctctctctctttctctctttctctctctccctctctccctccctcccttcctctctccctccctctctgcctctctctctctctctctctctgtctttatccatggaatgctggcgagaacacaatcagaaccaacagctgcaatttttgctaagagtgagctgcagccccgtgttcatctccatacagaagcagggacagttggatagagagaacaatggactcactgcagctacagtgcttttaatttttctgtgttttgtttttgtttttttgttttcaaaaaatgaaaaagaaaaggaaattcctggggcagagttgcactcttagtccatgaccagattgagaattactgataacttgtggtgatcagataaatgcagcagacttttatgataacatctcttgcagtcttagagtctccttagcttagaatctcacttatttccagcgaatgtgtatgttatttttataggtaagggtctgatctttgacgcaggtttcccccactttctttttctagcaagaaggggtgtttaaagtcttgaaaatagtaattgaaatatctaaaatacctccctgtggcagtagcacctctatagctgctccagtggtctgctctctaggatgatacctttcctgttcttctatctcctagctggtgaactgtggggcactggacactgagtaacttaaactttggcatttcccatctagaagccttagtcttctttccagtcccttttccctttagtcaaatggcacaaccctaaaaactccttcagcttgactgtcattcagactgtatcacaggaggcttagcttccaaactggagagaaggaactaaagtgtcttatgaatttcagcttcttggctcttgaga

SEQ ID NO: 10241 - DNA, 6085 bp, Homo sapiens
  source 1..6085: mol_type = unassigned DNA
aggtttctagtggaacgaggtgtggattgtgaggtgactctggccgcttacttccggttcctagcgatgcgcatccgggtcacgctaacgccgcggtttcctccgctcgattggttctactgtgggtctggactgatctccatgtcctgttgtggggcttttacagcctttggattgtgaaaactgctgagagagacttgcaatccagtcacataagtataataaagaaatattggtcctcatggaagaagagcaagatttaccagagcaaccagtgaaaaaagccaagatgcaggaatcaggagagcaaactataagtcaagtaagcaatccagatgtcagtgatcagaagcctgaaacatcaagccttgcttcaaaccttcccatgtcagaggaaattatgacatgcaccgattacatccctcgctcatccaatgattatacctcacaaatgtattctgcaaaaccttatgcacatattctctcagttcctgtttcggaaactgcttaccctggacagactcaataccagacactacagcagactcaaccctatgctgtctaccctcaggcaacccaaacgtatggactacctccttttggtgcattgtggccaggtatgaaacctgaaagtggtttaattcagactccatctccaagtcaacacagtgttcttacctgcactacagggttaaccacaagccagccaagcccagcacattattcttatcccattcaagcttcaagcacaaatgccagcctgatatctacttcttctacaattgccaatattccagcagcagcagtagccagcatctcaaaccaggattatcccacctatactattcttggtcagaatcagtaccaggcctgctaccccagctccagctttggagtcacaggtcagactaacagtgatgcagagagcaccacattagcagcaaccacataccagtcggagaagcctagtgtcatggcgcctgcacctgcagcacagagactttcctctggagacccttctacaagtccatctttgtcccagactacaccaagtaaagatactgatgatcagtccaggaaaaacatgactagcaagaaccggggcaagaggaaagctgatgccacttcttcccaagacagtgaattagaacgggtatttctgtgggacttggatgaaaccatcatcatcttccactcacttcttactggatcctatgcccagaaatatggaaaggacccaacagtagtgattggctcaggtttaacaatggaagaaatgatttttgaagtggctgatactcatctatttttcaatgacttagaggagtgtgaccaggtacatgtggaagatgtggcttctgatgacaatggccaagacttgagcaactacagtttctcaacagatggtttcagtggctcaggaggtagtggcagccatggttcatctgtgggtgttcagggaggtgtggactggatgaggaaactagctttccgctaccggaaagtgagagaaatctatgataagcataaaagcaacgtgggtggtctcctcagtccccagaggaaggaagcactgcagagattaagagcagaaattgaagttttaacagattcctggttaggaactgcattaaagtccttacttctcatccagtccagaaagaattgtgtgaatgttctgatcactaccacccagctggttccagccctggccaaggttctcctatatggactaggagaaatatttcctattgagaacatctatagtgctaccaaaattggtaaggagagctgctttgagagaattgtgtcaaggtttggaaagaaagtcacatatgtagtgattggagatggacgagatgaagaaattgcagccaaacagcacaacatgcctttctggaggatcacaaaccatggagacctagtatcccttcaccaggctttagagcttgattttctctaagaactggaatgaggagccttccccttgagctccttttcactcctgaagggagctggagactggaaccaactgagaactttctctgtctgtctctctctgtgtctctgtctctatctctctctctttctctctttctctctctccctctctccctccctcccttcctctctccctccctctctgcctctctctctctctctctctctgtctttatccatggaatgctggcgagaacacaatcagaaccaacagctgcaatttttgctaagagtgagctgcagccccgtgttcatctccatacagaagcagggacagttggatagagagaacaatggactcactgcagctacagtgcttttaatttttctgtgttttgtttttgtttttttgttttcaaaaaatgaaaaagaaaaggaaattcctggggcagagttgcactcttagtccatgaccagattgagaattactgataacttgtggtgatcagataaatgcagcagacttttatgataacatctcttgcagtcttagagtctccttagcttagaatctcacttatttccagcgaatgtgtatgttatttttataggtaagggtctgatctttgacgcaggtttcccccactttctttttctagcaagaaggggtgtttaaagtcttgaaaatagtaattgaaatatctaaaatacctccctgtggcagtagcacctctatagctgctccagtggtctgctctctaggatgatacctttcctgttcttctatctcctagctggtgaactgtggggcactggacactgagtaacttaaactttggcatttcccatctagaagccttagtcttctttccagtcccttttccctttagtcaaatggcacaaccctaaaaactccttcagcttgactgtcattcagactgtatcacaggaggcttagcttccaaactggagagaaggaactaaagtgtcttatgaatttcagcttcttggctcttgagaccgaaaggttctacctattccccctgcagagaagcacccatttcccatcagatgctcgtccctgcagcttcttccttcttggtcatcataatgctaggttcttacccctttcctgccctctgcacctcatgtccacctccaggcagctctggccagtccccgggtattagacccaagaattcaaatcaaatctaaaaacatgcttataactacattttggccaaaactgccaatgtatttgacttcctttgtggaagccctaagccatatgaaggatgtcccaggtatgtatttacccagatctctgcctgaaactgaagagcagattgctgtatttaaattttcccatggaaaaccctgcttctcaaatcccattctaaagtaggaaaccagaaagactttgctgattgtggggggaagggagaaacagacaggttttcacattgttgccaaggctggtcttgaacacctggcctcaagcgatcctcccacctcggcctctcaaagtgttgggattgtaggcatgagccactgcacccagccagactttcctgatttaaatgagagtactgcatcattccctacttcatggcccaaaacttaatcctgggccaaatgcaggagcatctctcgacctctgggcagattggtgggtgcccaggcactagtcacagccttccagcccagccatgattgttggatgccccatccctccaagagcaatttgggcatctactcaggcaggataaaattccctagagctgaggaagttcagcctctcccaggctacacagagagagatgatacaagcacctcagattgagatgcaggattggtccgcagaaggaggcattgttgaccaaccccagctataattgcttgtcaccagagattctgcatacccatttccagagatgttgcagcacaaagaggcaagactccttccaatgccaggccacccagatagcaagagagagaggctggtatacacattccttcagaactcattgaaaagcgctcataactcgtgattttaaggagtaagtttttgctgagtagctgaagtcagtgctcctttacttagctgcctctttggccttgtttcctgtggggttgggaggagggagatgtagtgtgaggtaggccttcccttggtctgtattcagcatagttgcctagatgctgctctgccttgtttgatggttgatcttaggaagctctaggttttactctgaggcctcaaaccctccccctatgcagtatagctgttgggtttttgtcctggacaaaggccacggctgttgtgctgcgcttcaggtttgtgaggctgcggagtggtacccccaccatgcacgcaagcacacacacacagatacttccctctccacccttttgggagctctttattttagaatgtaacttgaactcacttttatcattggcctttttcctcttactctgacttcctagcttagctctttccaaaaggaacttgaacttggccaagagaggtaaggaggctgagcagagcagtctttgctcattcctggttgttgccaccctcatttaaatggaagagagaaaacaggagcttcttggctgtttgccaaaatgaattgtccagggaacacagtgctctctgtaattaccctgcctttttctccaccccaacacaaaaatctggaaaggaaaataagtgggtaggattaagagctgttagaagctgaggaccaaaggacactgtgggtccattcatcaagggggagaccctcttcattagagtcctcatgaaattagccaaatgatgagtccttccctagctgggcatggtgggttctctttttttttttttttttttttttgttgttgttgttgagatggagtctcgctctgtcacccaggctggagtacagtggcatgatctcggctcactgcaacctccgcctcccaggttcaagcgattctcctacctcagcctcctgattagctgagattacaggcgcccaccaccacgcctggctaatttttgtatttttagtagagatggggtttcaccatgttgaccaggctgttctcaaactcctgacctcaggtgatctgctcaccttggcctcccaaagtgctgggattacaggcatgagccaccatgcctggccaggcactgtgggttctacaggatgggtctgtaatgtcacggtgagggctctctctagtagtagatctggagtgaggtgtgtcttgggttgaggaggtggcttgactttcgaatgtaaaactgactgtgccttagcatcaccctgtccagtgcccctggggcagctggtagtgtccagaagaatggacacctgctccagatttagatgcccatctgggcttttgtttgatttgcggcgttcctgtcttctgtaaagctagtgagttgtcccaagagactgatgccacagcttgttcgcagtttacacaaactcagctttaaaattccaaatagaatctgacttgcaaactctagctgcagcatgtggagcttctagatgtttactaccttgaatggttgtcagtgtcactgaaccacaggggagaggagtatggggtagagcaatggtctgggccaaggaatggtgagcttagggtcttcctctgactccttactcctcaaggaggcagttagggtccctcttaagcaggcttctatttcttaccactaaattggtttcctttttcatccagaagttagaactccccagatattcacactataggatctgaattccgagattctaaaatatcttaaaccacaagagagaaaatctagttctgcctcagccccagtcagcaggccatctgtcccttcctctcctctgagtcagacagctctggcaagcaaggctccttggctagttcctaatgcactgacaggagccctcccattaaggacgacttctactcaaaatgcgactctccctctgaacttcagatgcctctgttagcaggaaaaggcattgattggattggatatatttatgtgactgcgggcatttgtggctgtagaatccgtgaccgtaatgttatatgtaatgggaactatcttataaacttgaaaaaaataaagtttttattttctata

SEQ ID NO: 10242 - DNA, 5990 bp, Homo sapiens
  source 1..5990: mol_type = unassigned DNA
gcggtttcctccgctcgattggttctactgtgggtctggactgatctccatgtcctgttgtggggcttttacagcctttggattgtgaaaactgctgagagagacttgcaatccagtcacataagtataataaagaaatattggtcctcatggaagaagagcaagatttaccagagcaaccagtgaaaaaagccaagatgcaggaatcaggagagcaaactataagtcaagtaagcaatccagatgtcagtgatcagaagcctgaaacatcaagccttgcttcaaaccttcccatgtcagaggaaattatgacatgcaccgattacatccctcgctcatccaatgattatacctcacaaatgtattctgcaaaaccttatgcacatattctctcagttcctgtttcggaaactgcttaccctggacagactcaataccagacactacagcagactcaaccctatgctgtctaccctcaggcaacccaaacgtatggactacctccttttggtgcattgtggccaggtatgaaacctgaaagtggtttaattcagactccatctccaagtcaacacagtgttcttacctgcactacagggttaaccacaagccagccaagcccagcacattattcttatcccattcaagcttcaagcacaaatgccagcctgatatctacttcttctacaattgccaatattccagcagcagcagtagccagcatctcaaaccaggattatcccacctatactattcttggtcagaatcagtaccaggcctgctaccccagctccagctttggagtcacaggtcagactaacagtgatgcagagagcaccacattagcagcaaccacataccagtcggagaagcctagtgtcatggcgcctgcacctgcagcacagagactttcctctggagacccttctacaagtccatctttgtcccagactacaccaagtaaagatactgatgatcagtccaggaaaaacatgactagcaagaaccggggcaagaggaaagctgatgccacttcttcccaagacagtgaattagaacgggtatttctgtgggacttggatgaaaccatcatcatcttccactcacttcttactggatcctatgcccagaaatatggaaaggacccaacagtagtgattggctcaggtttaacaatggaagaaatgatttttgaagtggctgatactcatctatttttcaatgacttagaggagtgtgaccaggtacatgtggaagatgtggcttctgatgacaatggccaagacttgagcaactacagtttctcaacagatggtttcagtggctcaggaggtagtggcagccatggttcatctgtgggtgttcagggaggtgtggactggatgaggaaactagctttccgctaccggaaagtgagagaaatctatgataagcataaaagcaacgtgggtggtctcctcagtccccagaggaaggaagcactgcagagattaagagcagaaattgaagttttaacagattcctggttaggaactgcattaaagtccttacttctcatccagtccagaaagaattgtgtgaatgttctgatcactaccacccagctggttccagccctggccaaggttctcctatatggactaggagaaatatttcctattgagaacatctatagtgctaccaaaattggtaaggagagctgctttgagagaattgtgtcaaggtttggaaagaaagtcacatatgtagtgattggagatggacgagatgaagaaattgcagccaaacagcacaacatgcctttctggaggatcacaaaccatggagacctagtatcccttcaccaggctttagagcttgattttctctaagaactggaatgaggagccttccccttgagctccttttcactcctgaagggagctggagactggaaccaactgagaactttctctgtctgtctctctctgtgtctctgtctctatctctctctctttctctctttctctctctccctctctccctccctcccttcctctctccctccctctctgcctctctctctctctctctctctgtctttatccatggaatgctggcgagaacacaatcagaaccaacagctgcaatttttgctaagagtgagctgcagccccgtgttcatctccatacagaagcagggacagttggatagagagaacaatggactcactgcagctacagtgcttttaatttttctgtgttttgtttttgtttttttgttttcaaaaaatgaaaaagaaaaggaaattcctggggcagagttgcactcttagtccatgaccagattgagaattactgataacttgtggtgatcagataaatgcagcagacttttatgataacatctcttgcagtcttagagtctccttagcttagaatctcacttatttccagcgaatgtgtatgttatttttataggtaagggtctgatctttgacgcaggtttcccccactttctttttctagcaagaaggggtgtttaaagtcttgaaaatagtaattgaaatatctaaaatacctccctgtggcagtagcacctctatagctgctccagtggtctgctctctaggatgatacctttcctgttcttctatctcctagctggtgaactgtggggcactggacactgagtaacttaaactttggcatttcccatctagaagccttagtcttctttccagtcccttttccctttagtcaaatggcacaaccctaaaaactccttcagcttgactgtcattcagactgtatcacaggaggcttagcttccaaactggagagaaggaactaaagtgtcttatgaatttcagcttcttggctcttgagaccgaaaggttctacctattccccctgcagagaagcacccatttcccatcagatgctcgtccctgcagcttcttccttcttggtcatcataatgctaggttcttacccctttcctgccctctgcacctcatgtccacctccaggcagctctggccagtccccgggtattagacccaagaattcaaatcaaatctaaaaacatgcttataactacattttggccaaaactgccaatgtatttgacttcctttgtggaagccctaagccatatgaaggatgtcccaggtatgtatttacccagatctctgcctgaaactgaagagcagattgctgtatttaaattttcccatggaaaaccctgcttctcaaatcccattctaaagtaggaaaccagaaagactttgctgattgtggggggaagggagaaacagacaggttttcacattgttgccaaggctggtcttgaacacctggcctcaagcgatcctcccacctcggcctctcaaagtgttgggattgtaggcatgagccactgcacccagccagactttcctgatttaaatgagagtactgcatcattccctacttcatggcccaaaacttaatcctgggccaaatgcaggagcatctctcgacctctgggcagattggtgggtgcccaggcactagtcacagccttccagcccagccatgattgttggatgccccatccctccaagagcaatttgggcatctactcaggcaggataaaattccctagagctgaggaagttcagcctctcccaggctacacagagagagatgatacaagcacctcagattgagatgcaggattggtccgcagaaggaggcattgttgaccaaccccagctataattgcttgtcaccagagattctgcatacccatttccagagatgttgcagcacaaagaggcaagactccttccaatgccaggccacccagatagcaagagagagaggctggtatacacattccttcagaactcattgaaaagcgctcataactcgtgattttaaggagtaagtttttgctgagtagctgaagtcagtgctcctttacttagctgcctctttggccttgtttcctgtggggttgggaggagggagatgtagtgtgaggtaggccttcccttggtctgtattcagcatagttgcctagatgctgctctgccttgtttgatggttgatcttaggaagctctaggttttactctgaggcctcaaaccctccccctatgcagtatagctgttgggtttttgtcctggacaaaggccacggctgttgtgctgcgcttcaggtttgtgaggctgcggagtggtacccccaccatgcacgcaagcacacacacacagatacttccctctccacccttttgggagctctttattttagaatgtaacttgaactcacttttatcattggcctttttcctcttactctgacttcctagcttagctctttccaaaaggaacttgaacttggccaagagaggtaaggaggctgagcagagcagtctttgctcattcctggttgttgccaccctcatttaaatggaagagagaaaacaggagcttcttggctgtttgccaaaatgaattgtccagggaacacagtgctctctgtaattaccctgcctttttctccaccccaacacaaaaatctggaaaggaaaataagtgggtaggattaagagctgttagaagctgaggaccaaaggacactgtgggtccattcatcaagggggagaccctcttcattagagtcctcatgaaattagccaaatgatgagtccttccctagctgggcatggtgggttctctttttttttttttttttttttttgttgttgttgttgagatggagtctcgctctgtcacccaggctggagtacagtggcatgatctcggctcactgcaacctccgcctcccaggttcaagcgattctcctacctcagcctcctgattagctgagattacaggcgcccaccaccacgcctggctaatttttgtatttttagtagagatggggtttcaccatgttgaccaggctgttctcaaactcctgacctcaggtgatctgctcaccttggcctcccaaagtgctgggattacaggcatgagccaccatgcctggccaggcactgtgggttctacaggatgggtctgtaatgtcacggtgagggctctctctagtagtagatctggagtgaggtgtgtcttgggttgaggaggtggcttgactttcgaatgtaaaactgactgtgccttagcatcaccctgtccagtgcccctggggcagctggtagtgtccagaagaatggacacctgctccagatttagatgcccatctgggcttttgtttgatttgcggcgttcctgtcttctgtaaagctagtgagttgtcccaagagactgatgccacagcttgttcgcagtttacacaaactcagctttaaaattccaaatagaatctgacttgcaaactctagctgcagcatgtggagcttctagatgtttactaccttgaatggttgtcagtgtcactgaaccacaggggagaggagtatggggtagagcaatggtctgggccaaggaatggtgagcttagggtcttcctctgactccttactcctcaaggaggcagttagggtccctcttaagcaggcttctatttcttaccactaaattggtttcctttttcatccagaagttagaactccccagatattcacactataggatctgaattccgagattctaaaatatcttaaaccacaagagagaaaatctagttctgcctcagccccagtcagcaggccatctgtcccttcctctcctctgagtcagacagctctggcaagcaaggctccttggctagttcctaatgcactgacaggagccctcccattaaggacgacttctactcaaaatgcgactctccctctgaacttcagatgcctctgttagcaggaaaaggcattgattggattggatatatttatgtgactgcgggcatttgtggctgtagaatccgtgaccgtaatgttatatgtaatgggaactatcttataaacttgaaaaaaataaagtttttattttct

SEQ ID NO: 10243 - DNA, 1831 bp, Homo sapiens
  source 1..1831: mol_type = unassigned DNA
gatgcgcatccgggtcacgctaacgccgcggtttcctccgctcgattggttctactgtgggtctggactgatctccatgtcctgttgtggggcttttacagcctttggattgtgaaaactgctgagagagacttgcaatccagtcacataagtataataaagaaatattggtcctcatggaagaagagcaagatttaccagagcaaccagtgaaaaaagccaagatgcaggaatcaggagagcaaactataagtcaagtaagcaatccagatgtcagtgatcagaagcctgaaacatcaagccttgcttcaaaccttcccatgtcagaggaaattatgacatgcaccgattacatccctcgctcatccaatgattatacctcacaaatgtattctgcaaaaccttatgcacatattctctcagttcctgtttcggaaactgcttaccctggacagactcaataccagacactacagcagactcaaccctatgctgtctaccctcaggcaacccaaacgtatggactacctccttttgcttcaagcacaaatgccagcctgatatctacttcttctacaattgccaatattccagcagcagcagtagccagcatctcaaaccaggattatcccacctatactattcttggtcagaatcagtaccaggcctgctaccccagctccagctttggagtcacaggtcagactaacagtgatgcagagagcaccacattagcagcaaccacataccagtcggagaagcctagtgtcatggcgcctgcacctgcagcacagagactttcctctggagacccttctacaagtccatctttgtcccagactacaccaagtaaagatactgatgatcagtccaggaaaaacatgactagcaagaaccggggcaagaggaaagctgatgccacttcttcccaagacagtgaattagaacgggtatttctgtgggacttggatgaaaccatcatcatcttccactcacttcttactggatcctatgcccagaaatatggaaaggacccaacagtagtgattggctcaggtttaacaatggaagaaatgatttttgaagtggctgatactcatctatttttcaatgacttagaggagtgtgaccaggtacatgtggaagatgtggcttctgatgacaatggccaagacttgagcaactacagtttctcaacagatggtttcagtggctcaggaggtagtggcagccatggttcatctgtgggtgttcagggaggtgtggactggatgaggaaactagctttccgctaccggaaagtgagagaaatctatgataagcataaaagcaacgtgggtggtctcctcagtccccagaggaaggaagcactgcagagattaagagcagaaattgaagttttaacagattcctggttaggaactgcattaaagtccttacttctcatccagtccagaaagaattgtgtgaatgttctgatcactaccacccagctggttccagccctggccaaggttctcctatatggactaggagaaatatttcctattgagaacatctatagtgctaccaaaattggtaaggagagctgctttgagagaattgtgtcaaggtttggaaagaaagtcacatatgtagtgattggagatggacgagatgaagaaattgcagccaaacagcacaacatgcctttctggaggatcacaaaccatggagacctagtatcccttcaccaggctttagagcttgattttctctaagaactggaatgaggagccttccccttgagctccttttcactcctgaagggagctggagactggaaccaact

SEQ ID NO: 10244 - DNA, 1837 bp, Homo sapiens
  source 1..1837: mol_type = unassigned DNA
agcgatgcgcatccgggtcacgctaacgccgcggtttcctccgctcgattggttctactgtgggtctggactgatctccatgtcctgttgtggggcttttacagcctttggattgtgaaaactgctgagagagacttgcaatccagtcacataagtataataaagaaatattggtcctcatggaagaagagcaagatttaccagagcaaccagtgaaaaaagccaagatgcaggaatcaggagagcaaactataagttatgacatgcaccgattacatccctcgctcatccaatgattatacctcacaaatgtattctgcaaaaccttatgcacatattctctcagttcctgtttcggaaactgcttaccctggacagactcaataccagacactacagcagactcaaccctatgctgtctaccctcaggcaacccaaacgtatggactacctccttttggtgcattgtggccaggtatgaaacctgaaagtggtttaattcagactccatctccaagtcaacacagtgttcttacctgcactacagggttaaccacaagccagccaagcccagcacattattcttatcccattcaagcttcaagcacaaatgccagcctgatatctacttcttctacaattgccaatattccagcagcagcagtagccagcatctcaaaccaggattatcccacctatactattcttggtcagaatcagtaccaggcctgctaccccagctccagctttggagtcacaggtcagactaacagtgatgcagagagcaccacattagcagcaaccacataccagtcggagaagcctagtgtcatggcgcctgcacctgcagcacagagactttcctctggagacccttctacaagtccatctttgtcccagactacaccaagtaaagatactgatgatcagtccaggaaaaacatgactagcaagaaccggggcaagaggaaagctgatgccacttcttcccaagacagtgaattagaacgggtatttctgtgggacttggatgaaaccatcatcatcttccactcacttcttactggatcctatgcccagaaatatggaaaggacccaacagtagtgattggctcaggtttaacaatggaagaaatgatttttgaagtggctgatactcatctatttttcaatgacttagaggagtgtgaccaggtacatgtggaagatgtggcttctgatgacaatggccaagacttgagcaactacagtttctcaacagatggtttcagtggctcaggaggtagtggcagccatggttcatctgtgggtgttcagggaggtgtggactggatgaggaaactagctttccgctaccggaaagtgagagaaatctatgataagcataaaagcaacgtgggtggtctcctcagtccccagaggaaggaagcactgcagagattaagagcagaaattgaagttttaacagattcctggttaggaactgcattaaagtccttacttctcatccagtccagaaagaattgtgtgaatgttctgatcactaccacccagctggttccagccctggccaaggttctcctatatggactaggagaaatatttcctattgagaacatctatagtgctaccaaaattggtaaggagagctgctttgagagaattgtgtcaaggtttggaaagaaagtcacatatgtagtgattggagatggacgagatgaagaaattgcagccaaacagcacaacatgcctttctggaggatcacaaaccatggagacctagtatcccttcaccaggctttagagcttgattttctctaagaactggaatgaggag

SEQ ID NO: 10245 - DNA, 5692 bp, Homo sapiens
  source 1..5692: mol_type = unassigned DNA
gcaaaacttccatcctgtccacgtgaagttgtcgctgccttagagagggggaaagagctgcgggaaaagccggggagtgacgactgcggcggctgggcgcgctctctcattttcttttcttctcctttcccccctgtcgcagtccggagttttggctcctctcctttcctcctccccctcggagccggcttctccctccgccccgcttctcccccgcttgtgtacgctatttgttgtggggtggccgaaggggatgtcctgttttcaccagaggcacagcgcgaaggggaaacttcgacactggaaggaacgagaataaatacttaattacggacgcactgaaccgcggctgggacagacacttcgggaacccgaggcggaccgggcgacgagatagtcatttttacttgaaggaagctgcttctacttgggagtggcaggagaagtgagaaaaccacatggaagactcccaggatttaaatgaacaatcagtaaagaaaacgtgcacagaatcagatgtttcacaatctcagaattccaggtctatggaaatgcaggacctagcaagtcctcatactcttgttggaggtggtgatactccaggtagctccaaactggaaaaatctaatctcagcagcacatcagttactacaaatgggacaggaggggaaaacatgactgttttaaacacagcagactggttgctgagttgcaacaccccctcttctgcaacaatgtctcttcttgcagtcaaaacagagcccttgaacagcagtgaaaccacagccacgactggagatggagcgcttgacacttttactgggtcagtaattacaagtagtggctacagccccagatcagcacatcagtattccccacagctgtatccttccaagccctatccacacattctttctacaccagcagctcaaacaatgtctgcctatgcaggccagactcagtattcggggatgcagcagccagccgtctacacagcctactcacagacaggacagccctacagcttgcccacttacgatttgggtgtgatgttgccagccatcaagacagagagtggactttcccaaactcagtccccattacagagtggctgcctcagttacagcccagggttctctaccccacagccaggccagacaccttattcttaccaaatgccaggttctagttttgcaccatcatctactatttatgcaaataattcagtttccaattcaacgaatttcagtggttcacaacaggattatccatcctatacagcctttggccaaaaccagtatgcacagtattattcagcatcaacgtatggagcgtatatgacatcgaataacacagccgatggcacaccctcttcaacctctacttatcagttgcaggaatctctcccaggactgactaaccaaccaggagagttcgataccatgcagagtccctccacacccatcaaagatcttgatgagagaacctgtaggagttctgggtcaaagtccagaggaagaggccggaaaaataatccctccccgcctcctgatagtgacctggagcgtgtgtttgtctgggatttggatgaaaccatcattgtttttcactcactgctcaccgggtcttatgcacagaagtatggcaaggatccccccatggctgtaacccttggactccgcatggaagaaatgatttttaatcttgctgatactcatttgttttttaatgatttagaggagtgtgatcaagttcatatagatgatgtttcctctgatgataatgggcaggacttaagtacctacagttttgcaactgatggcttccatgcagctgcaagtagtgcaaacctttgtttgccaacaggtgtaagaggaggggttgactggatgaggaagttggcttttcgttacagaagagtaaaagaattatataacacctacaagaacaacgttggaggactccttggccctgccaagagggatgcctggctacagttaagggcagagattgaaggtctgacagattcctggctaacaaatgcacttaagtctttatcaattattagcactaggagtaactgcataaatgtcttggtaacgacaactcaactgatcccagcacttgcgaaggttctactctatagtttaggaggtgctttccccattgagaatatttacagtgcaactaaaataggcaaggaaagctgttttgagcgtatagtgtccagatttggcactaacataacttatgttgtgattggagatggccgagatgaggagcatgccgctaaccagcacaacatgcccttctggaggatatccagtcactcagacctcctggctctccaccaagcactggaattagagtatttgtaactgtgttctttagccggagatccattttttatatttcaagtacactgaatttttatgtgtgattcaatgcctctggctctacacatataaattgtcttaatggatgaaatcatatttggaataaaaattccagaatgaagaattcagattgctgaatggagttaaactttagtgctacagaaaagaaactctatggtcttatatttacaacactttaatgggttttttaaaaatctgtggaggttgctggtacacaccaaatgagtccaaactggaatgagcagctttagcaaagaactcttaccctggcaaagcagcaacacacatgctccgtctgacaaggtggtcaacaacattcctcaaaatgggagatcttctcagccctgaggtttgaatctgactttagcctacctaacccagaaaatctgaattggaatgcactcagactgtataaggacagtcctatttagacatgtaatttgtgtaaattattgatgaaaataatttactgtgactttattagcagctgactttcaaagtggatgcaatttttctttcttttgttggggaggggaatgggaggggaaatgggaatataatattgtctcttttttaagtttggcaaacagaatgttcatactgatgtgttgtgccttaaagacaagacagcatttgtgtgttacaatgtaactttggttaaaatctctgtagataatgaaaaaaaacaaaaaaaaaaacctttgtgatgattcttaacatgaccaaatttaaaagtcaagctctcagagcttaattaccgcatcagcaagaaactgagtattttttgcaataagaaaacaacaataataaaggaaagcttgtgtttcatttgggttcttaataattccaataattgtatgaggcaactatttgcgcatccaaccatgagtggaaggtttgggaaagactgtgggacctttacttagaaagtgaaatgtatgtagaagtctcaagtaccccttctacagttttactggagaaaactaagagccatattcatgacaacttgcacagttttgaggttgagacttttgatatgtgtaagttgcatagaggaggatattatcatgcaaatcatgagcaattatcacataaacttttttagaatgtgccatgaacatggcataaaattcacattgagtgcacagggcttaaaataaagctaagtatgtttattcccaatgccatggcaaaaatgataatatcatcagaaatggaaggcagttctcccagatggtgtctaatgaaagcaatgagtctatgaaaattttacctagaatatcatcataaattaaattagcaagtgcgctggatcttggcagcgctgctgaaatgacaacagtaaaataatacctggttctccatctgaatacatcaatgcaggttctcctcgtaacagacttgcatatgtttgttagtttctgcctgtattgtcactgcgcaacggatggcattcattacaagaagagcccatcatcgttgtgtttgcatggtttttttccttgtgtgtagcccatgttgggaacacgatacaggttctcctcttatttcctatgacacgatttcccttgtggaaatttaagactttaagaactagagtatttttatggtgtctgcacctgcagttctgtgtttaaaatgtcataatgtggatcctggagtcaggctactagtcagtgcccctagccagaggctggttcatgagttcatcaactgaggcctctgtggcttcaataaagtctacattttgctcacagatcacaacattcactgtggaaatatgatttcatttctttaggctacaaacctgtatttctttactgaatgctaaggccatgtttatattgggtagaaagatattgagatcccaattttgtacaagattgtgatttcattatctaaaccttaaacttaatcctttaaattttgtagcttttggctgcatctgccccaagtactattccaggcaaattaaagttggaatacctttaataatataaaaataatgatagtaaatcttatacttctgttggcccttagcttgaaaatagcagttaaaaaaatttaaatgttgccttgattatcagtacttaattatgttgtgcactaaaaccttaaatatttattactgtgaataaaaacaaattatctttactgtatagctggtttctttaaatgttgatagaattgtggcattacatctaaatttgtaagtcttttcatatcaaacaagcaaggctttttatgctgctaagtctgtgggtgcagaaagaaacaccccttggaagggcaaagagaagccggctggttgcatcaccccgtgcagtttctcacacacatctctttttctgattctgtgttcagaagaggctgccggcataaaacctaaatgcaaggttgacggagaacagcttgtctggcacaacaatggtgcaggcccacgagccagcatcacagcttggccatgggacgttgagtatgcacaaactagaactcttcccttcccaccttaggaatagaaaatcctcttcctttctaatctgaaaaacgaaaactgaacaaacacaaaaccaaccccttggcagttcccacctcctattgacatatggaatattgtgccttattgtaaaccagtttgaaaaatgttctgtaactaaagtgggttttcggctattatgtatacagcttggtatattactacgaaagataaccaccttgtgttgcaccttaaaaatatcaagaccatgtaatttccataacaaaataggtggcctggctatggtattatagcatacaattaggacactatgcccctgcaaaattttgtaaatcaaattcagaggcaaaaacatattttagaatcatacagtttgcacacgacaagtaggtaataactgtctctaaaaatgttttctccttagtccgcaatgagctaagattcagaatagtgtcaacagcatgctcctatatgaagttgttttttttaaagcacatttgtttatgacaagcctacattctcagtgaatatggcatttagtatttcttttgaaaacaaacttaagcatcatgagccaaagttgcactttgactcccaactacggtagcattatggacatctcacaatgtcaagggtttctgttatgtattagtaaagtatagattattggggcctacataatttaaaagaaatgtaaattaatattaaaagcttgtaaaaatatgtatatctttactatttctcaataaatacctttgcaattgttttcatttccttc

SEQ ID NO: 10246 - DNA, 4317 bp, Homo sapiens
  source 1..4317: mol_type = unassigned DNA
gggaaaagccggggagtgacgactgcggcggctgggcgcgctctctcattttcttttcttctcctttcccccctgtcgcagtccggagttttggctcctctcctttcctcctccccctcggagccggcttctccctccgccccgcttctcccccgcttgtgtacgctatttgttgtggggtggccgaaggggatgtcctgttttcaccagaggcacagcgcgaaggggaaacttcgacactggaaggaacgagaataaatacttaattacggacgcactgaaccgcggctgggacagacacttcgggaacccgaggcggaccgggcgacgagatagtcatttttacttgaaggaagctgcttctacttgggagtggcaggagaagtgagaaaaccacatggaagactcccaggatttaaatgaacaatcagtaaagaaaacgtgcacagaatcagatgtttcacaatctcagaattccaggtctatggaaatgcaggacctagcaagtcctcatactcttgttggaggtggtgatactccaggtagctccaaactggaaaaatctaatctcagcagcacatcagttactacaaatgggacaggagtgtctcttcttgcagtcaaaacagagcccttgaacagcagtgaaaccacagccacgactggagatggagcgcttgacacttttactgggtcagtaattacaagtagtggctacagccccagatcagcacatcagtattccccacagctgtatccttccaagccctatccacacattctttctacaccagcagctcaaacaatgtctgcctatgcaggccagactcagtattcggggatgcagcagccagccgtctacacagcctactcacagacaggacagccctacagcttgcccacttacgatttgggtgtgatgttgccagccatcaagacagagagtggactttcccaaactcagtccccattacagagtggctgcctcagttacagcccagggttctctaccccacagccaggccagacaccttattcttaccaaatgccaggttctagttttgcaccatcatctactatttatgcaaataattcagtttccaattcaacgaatttcagtggttcacaacaggattatccatcctatacagcctttggccaaaaccagtatgcacagtattattcagcatcaacgtatggagcgtatatgacatcgaataacacagccgatggcacaccctcttcaacctctacttatcagttgcaggaatctctcccaggactgactaaccaaccaggagagttcgataccatgcagagtccctccacacccatcaaagatcttgatgagagaacctgtaggagttctgggtcaaagtccagaggaagaggccggaaaaataatccctccccgcctcctgatagtgacctggagcgtgtgtttgtctgggatttggatgaaaccatcattgtttttcactcactgctcaccgggtcttatgcacagaagtatggcaaggatccccccatggctgtaacccttggactccgcatggaagaaatgatttttaatcttgctgatactcatttgttttttaatgatttagaggagtgtgatcaagttcatatagatgatgtttcctctgatgataatgggcaggacttaagtacctacagttttgcaactgatggcttccatgcagctgcaagtagtgcaaacctttgtttgccaacaggtgtaagaggaggggttgactggatgaggaagttggcttttcgttacagaagagtaaaagaattatataacacctacaagaacaacgttggaggactccttggccctgccaagagggatgcctggctacagttaagggcagagattgaaggtctgacagattcctggctaacaaatgcacttaagtctttatcaattattagcactaggagtaactgcataaatgtcttggtaacgacaactcaactgatcccagcacttgcgaaggttctactctatagtttaggaggtgctttccccattgagaatatttacagtgcaactaaaataggaaaagaaagttgctttgaacgaataatgcaaaggtttggcagaaaagtagtgtatgttgtaattggggatggtgtagaagaagaacaggcagcaaaaaagcacaacatgcccttctggaggatatccagtcactcagacctcctggctctccaccaagcactggaattagagtatttgtaactgtgttctttagccggagatccattttttatatttcaagtacactgaatttttatgtgtgattcaatgcctctggctctacacatataaattgtcttaatggatgaaatcatatttggaataaaaattccagaatgaagaattcagattgctgaatggagttaaactttagtgctacagaaaagaaactctatggtcttatatttacaacactttaatgggttttttaaaaatctgtggaggttgctggtacacaccaaatgagtccaaactggaatgagcagctttagcaaagaactcttaccctggcaaagcagcaacacacatgctccgtctgacaaggtggtcaacaacattcctcaaaatgggagatcttctcagccctgaggtttgaatctgactttagcctacctaacccagaaaatctgaattggaatgcactcagactgtataaggacagtcctatttagacatgtaatttgtgtaaattattgatgaaaataatttactgtgactttattagcagctgactttcaaagtggatgcaatttttctttcttttgttggggaggggaatgggaggggaaatgggaatataatattgtctcttttttaagtttggcaaacagaatgttcatactgatgtgttgtgccttaaagacaagacagcatttgtgtgttacaatgtaactttggttaaaatctctgtagataatgaaaaaaaacaaaaaaaaaaacctttgtgatgattcttaacatgaccaaatttaaaagtcaagctctcagagcttaattaccgcatcagcaagaaactgagtattttttgcaataagaaaacaacaataataaaggaaagcttgtgtttcatttgggttcttaataattccaataattgtatgaggcaactatttgcgcatccaaccatgagtggaaggtttgggaaagactgtgggacctttacttagaaagtgaaatgtatgtagaagtctcaagtaccccttctacagttttactggagaaaactaagagccatattcatgacaacttgcacagttttgaggttgagacttttgatatgtgtaagttgcatagaggaggatattatcatgcaaatcatgagcaattatcacataaacttttttagaatgtgccatgaacatggcataaaattcacattgagtgcacagggcttaaaataaagctaagtatgtttattcccaatgccatggcaaaaatgataatatcatcagaaatggaaggcagttctcccagatggtgtctaatgaaagcaatgagtctatgaaaattttacctagaatatcatcataaattaaattagcaagtgcgctggatcttggcagcgctgctgaaatgacaacagtaaaataatacctggttctccatctgaatacatcaatgcaggttctcctcgtaacagacttgcatatgtttgttagtttctgcctgtattgtcactgcgcaacggatggcattcattacaagaagagcccatcatcgttgtgtttgcatggtttttttccttgtgtgtagcccatgttgggaacacgatacaggttctcctcttatttcctatgacacgatttcccttgtggaaatttaagactttaagaactagagtatttttatggtgtctgcacctgcagttctgtgtttaaaatgtcataatgtggatcctggagtcaggctactagtcagtgcccctagccagaggctggttcatgagttcatcaactgaggcctctgtggcttcaataaagtctacattttgctcacagatcacaacattcactgtggaaatatgatttcatttctttaggctacaaacctgtatttctttactgaatgctaaggccatgtttatattgggtagaaagatattgagatcccaattttgtacaagattgtgatttcattatctaaaccttaaacttaatcctttaaattttgtagcttttggctgcatctgccccaagtactattccaggcaaattaaagttggaatacctttaataatataaaaataatgatagtaaatcttatacttctgt

SEQ ID NO: 10247 - DNA, 5699 bp, Homo sapiens
  source 1..5699: mol_type = unassigned DNA
ttccgcgcaaaacttccatcctgtccacgtgaagttgtcgctgccttagagagggggaaagagctgcgggaaaagccggggagtgacgactgcggcggctgggcgcgctctctcattttcttttcttctcctttcccccctgtcgcagtccggagttttggctcctctcctttcctcctccccctcggagccggcttctccctccgccccgcttctcccccgcttgtgtacgctatttgttgtggggtggccgaaggggatgtcctgttttcaccagaggcacagcgcgaaggggaaacttcgacactggaaggaacgagaataaatacttaattacggacgcactgaaccgcggctgggacagacacttcgggaacccgaggcggaccgggcgacgagatagtcatttttacttgaaggaagctgcttctacttgggagtggcaggagaagtgagaaaaccacatggaagactcccaggatttaaatgaacaatcagtaaagaaaacgtgcacagaatcagatgtttcacaatctcagaattccaggtctatggaaatgcaggacctagcaagtcctcatactcttgttggaggtggtgatactccaggtagctccaaactggaaaaatctaatctcagcagcacatcagttactacaaatgggacaggaggggaaaacatgactgttttaaacacagcagactggttgctgagttgcaacaccccctcttctgcaacaatgtctcttcttgcagtcaaaacagagcccttgaacagcagtgaaaccacagccacgactggagatggagcgcttgacacttttactgggtcagtaattacaagtagtggctacagccccagatcagcacatcagtattccccacagctgtatccttccaagccctatccacacattctttctacaccagcagctcaaacaatgtctgcctatgcaggccagactcagtattcggggatgcagcagccagccgtctacacagcctactcacagacaggacagccctacagcttgcccacttacgatttgggtgtgatgttgccagccatcaagacagagagtggactttcccaaactcagtccccattacagagtggctgcctcagttacagcccagggttctctaccccacagccaggccagacaccttattcttaccaaatgccaggttctagttttgcaccatcatctactatttatgcaaataattcagtttccaattcaacgaatttcagtggttcacaacaggattatccatcctatacagcctttggccaaaaccagtatgcacagtattattcagcatcaacgtatggagcgtatatgacatcgaataacacagccgatggcacaccctcttcaacctctacttatcagttgcaggaatctctcccaggactgactaaccaaccaggagagttcgataccatgcagagtccctccacacccatcaaagatcttgatgagagaacctgtaggagttctgggtcaaagtccagaggaagaggccggaaaaataatccctccccgcctcctgatagtgacctggagcgtgtgtttgtctgggatttggatgaaaccatcattgtttttcactcactgctcaccgggtcttatgcacagaagtatggcaaggatccccccatggctgtaacccttggactccgcatggaagaaatgatttttaatcttgctgatactcatttgttttttaatgatttagaggagtgtgatcaagttcatatagatgatgtttcctctgatgataatgggcaggacttaagtacctacagttttgcaactgatggcttccatgcagctgcaagtagtgcaaacctttgtttgccaacaggtgtaagaggaggggttgactggatgaggaagttggcttttcgttacagaagagtaaaagaattatataacacctacaagaacaacgttggaggactccttggccctgccaagagggatgcctggctacagttaagggcagagattgaaggtctgacagattcctggctaacaaatgcacttaagtctttatcaattattagcactaggagtaactgcataaatgtcttggtaacgacaactcaactgatcccagcacttgcgaaggttctactctatagtttaggaggtgctttccccattgagaatatttacagtgcaactaaaataggaaaagaaagttgctttgaacgaataatgcaaaggtttggcagaaaagtagtgtatgttgtaattggggatggtgtagaagaagaacaggcagcaaaaaagcacaacatgcccttctggaggatatccagtcactcagacctcctggctctccaccaagcactggaattagagtatttgtaactgtgttctttagccggagatccattttttatatttcaagtacactgaatttttatgtgtgattcaatgcctctggctctacacatataaattgtcttaatggatgaaatcatatttggaataaaaattccagaatgaagaattcagattgctgaatggagttaaactttagtgctacagaaaagaaactctatggtcttatatttacaacactttaatgggttttttaaaaatctgtggaggttgctggtacacaccaaatgagtccaaactggaatgagcagctttagcaaagaactcttaccctggcaaagcagcaacacacatgctccgtctgacaaggtggtcaacaacattcctcaaaatgggagatcttctcagccctgaggtttgaatctgactttagcctacctaacccagaaaatctgaattggaatgcactcagactgtataaggacagtcctatttagacatgtaatttgtgtaaattattgatgaaaataatttactgtgactttattagcagctgactttcaaagtggatgcaatttttctttcttttgttggggaggggaatgggaggggaaatgggaatataatattgtctcttttttaagtttggcaaacagaatgttcatactgatgtgttgtgccttaaagacaagacagcatttgtgtgttacaatgtaactttggttaaaatctctgtagataatgaaaaaaaacaaaaaaaaaaacctttgtgatgattcttaacatgaccaaatttaaaagtcaagctctcagagcttaattaccgcatcagcaagaaactgagtattttttgcaataagaaaacaacaataataaaggaaagcttgtgtttcatttgggttcttaataattccaataattgtatgaggcaactatttgcgcatccaaccatgagtggaaggtttgggaaagactgtgggacctttacttagaaagtgaaatgtatgtagaagtctcaagtaccccttctacagttttactggagaaaactaagagccatattcatgacaacttgcacagttttgaggttgagacttttgatatgtgtaagttgcatagaggaggatattatcatgcaaatcatgagcaattatcacataaacttttttagaatgtgccatgaacatggcataaaattcacattgagtgcacagggcttaaaataaagctaagtatgtttattcccaatgccatggcaaaaatgataatatcatcagaaatggaaggcagttctcccagatggtgtctaatgaaagcaatgagtctatgaaaattttacctagaatatcatcataaattaaattagcaagtgcgctggatcttggcagcgctgctgaaatgacaacagtaaaataatacctggttctccatctgaatacatcaatgcaggttctcctcgtaacagacttgcatatgtttgttagtttctgcctgtattgtcactgcgcaacggatggcattcattacaagaagagcccatcatcgttgtgtttgcatggtttttttccttgtgtgtagcccatgttgggaacacgatacaggttctcctcttatttcctatgacacgatttcccttgtggaaatttaagactttaagaactagagtatttttatggtgtctgcacctgcagttctgtgtttaaaatgtcataatgtggatcctggagtcaggctactagtcagtgcccctagccagaggctggttcatgagttcatcaactgaggcctctgtggcttcaataaagtctacattttgctcacagatcacaacattcactgtggaaatatgatttcatttctttaggctacaaacctgtatttctttactgaatgctaaggccatgtttatattgggtagaaagatattgagatcccaattttgtacaagattgtgatttcattatctaaaccttaaacttaatcctttaaattttgtagcttttggctgcatctgccccaagtactattccaggcaaattaaagttggaatacctttaataatataaaaataatgatagtaaatcttatacttctgttggcccttagcttgaaaatagcagttaaaaaaatttaaatgttgccttgattatcagtacttaattatgttgtgcactaaaaccttaaatatttattactgtgaataaaaacaaattatctttactgtatagctggtttctttaaatgttgatagaattgtggcattacatctaaatttgtaagtcttttcatatcaaacaagcaaggctttttatgctgctaagtctgtgggtgcagaaagaaacaccccttggaagggcaaagagaagccggctggttgcatcaccccgtgcagtttctcacacacatctctttttctgattctgtgttcagaagaggctgccggcataaaacctaaatgcaaggttgacggagaacagcttgtctggcacaacaatggtgcaggcccacgagccagcatcacagcttggccatgggacgttgagtatgcacaaactagaactcttcccttcccaccttaggaatagaaaatcctcttcctttctaatctgaaaaacgaaaactgaacaaacacaaaaccaaccccttggcagttcccacctcctattgacatatggaatattgtgccttattgtaaaccagtttgaaaaatgttctgtaactaaagtgggttttcggctattatgtatacagcttggtatattactacgaaagataaccaccttgtgttgcaccttaaaaatatcaagaccatgtaatttccataacaaaataggtggcctggctatggtattatagcatacaattaggacactatgcccctgcaaaattttgtaaatcaaattcagaggcaaaaacatattttagaatcatacagtttgcacacgacaagtaggtaataactgtctctaaaaatgttttctccttagtccgcaatgagctaagattcagaatagtgtcaacagcatgctcctatatgaagttgttttttttaaagcacatttgtttatgacaagcctacattctcagtgaatatggcatttagtatttcttttgaaaacaaacttaagcatcatgagccaaagttgcactttgactcccaactacggtagcattatggacatctcacaatgtcaagggtttctgttatgtattagtaaagtatagattattggggcctacataatttaaaagaaatgtaaattaatattaaaagcttgtaaaaatatgtatatctttactatttctcaataaatacctttgcaattgttttcatttccttca

SEQ ID NO: 10248 - DNA, 9498 bp, Homo sapiens
  source 1..9498: mol_type = unassigned DNA
atgactgacaaatcaatcgtcattctgagcctgatggtttttcacagctctttcataaatggaaaaacatgtagacggcaattggtggaagaatggcatccacaaccctcatcatatgtggtaaattggacactaacagaaaacatctgcttggacttctacagagattgctggtttttgggtgtaaacactaaaatagatacttcaggcaatcaagctgttccccagatttgccctttgcaaattcaattaggagatatccttgtaatttcttctgaaccatctcttcaatttccagaaataaatttgatgaatgtttctgaaacatctttcgttggctgtgtgcaaaataccacaacggaagatcagttactttttggctgcagactaaaaggaatgcacactgttaattctaagtggctgagtgttgggacacattattttatcacagttatggcaagtggtccatcaccttgtccactgggacttcgactaaatgtgacagtgaaacagcagttctgccaggaatctctgagttcagaattttgctctggtcatggtaaatgtcttagtgaagcttggagcaagacatatagctgccattgccagcctccattttctggaaaatactgccaggaacttgatgcatgttcttttaaaccatgtaaaaataatggcagttgcattaataaaagagaaaattgggatgagcaagcatatgaatgtgtctgtcacccaccatttacaggaaagaattgctcagaaataattggccagtgtcaaccacatgtctgtttccatggaaactgcagcaatattacttcaaatagtttcatttgtgaatgtgatgagcaattttcaggtccattctgtgaggtgtcagcaaaaccttgtgtttctctgcttttttggaaaagaggaatttgcccaaatagcagttctgcttatacttatgaatgcccaaaaggatcttccagccaaaatggtgaaactgatgtcagtgagttttcattagtaccatgtcagaatggtactgactgcatcaaaatatcaaatgatgttatgtgcatctgttcaccaatatttacagatttgctttgtaagagcattcaaacatcatgtgagtcatttcctttgaggaataatgctacatgtaagaaatgtgagaaagattatccttgcagctgtatatcaggatttactgaaaaaaactgtgagaaagcaattgaccactgtaaactgctcagcatcaactgtctgaatgaagaatggtgtttcaatataattggaagattcaaatatgtatgcattccagggtgcacaaaaaatccatgttggtttttgaagaatgtttacctaattcatcaacacctctgctactgtggagtcaccttccatggtatttgccaagataaaggtcctgctcaatttgaatatgtgtggcaattgggatttgcaggatctgaaggcgaaaagtgccaaggggttattgatgcctatttctttctggctgcaaactgcactgaagatgcaacctatgtgaacgatcctgaagataataattcttcatgttggttcccacatgaaggcacaaaagagatttgtgcaaatggatgcagttgtttgagtgaagaagacagtcaggaatatcggtatctatgttttctcagatgggctggcaacatgtatctggaaaatacaactgatgatcaagaaaatgagtgtcaacatgaagctgtttgtaaagatgaaattaatagacccagatgcagctgttctcttagttacattggcagattgtgtgttgtcaatgttgactattgcttagggaaccacagtatatcagtgcatggcctctgcctggccctttcgcacaattgtaactgtagcggtctgcaaagatatgaaaggaacatctgtgagatagatactgaagactgcaaatctgcgtcctgcaaaaatggaacaactagtacacatttaaggggatatttcttccgcaagtgtgtcccaggatttaaaggtacgcaatgtgaaattgatatagatgagtgtgcttcacatccctgcaaaaatggagccacctgcattgaccaacctggtaattacttctgccagtgtgtgcctccatttaaagtggttgatggcttttcctgcttatgcaatccaggctatgttgggataagatgtgaacaggacattgatgactgcatcctgaatgcctgtgagcacaattctacctgcaaagacctgcatctcagctaccagtgtgtgtgcctatctgattgggaaggaaatttttgtgaacaagaatccaatgagtgtaaaatgaatccttgcaagaacaattccacctgtactgacctttacaaaagctatcgatgtgagtgtacatctggatggactggacagaactgtagtgaagaaataaatgaatgcgactctgatccatgcatgaatggaggtctttgtcatgaatctaccatccctggacaatttgtatgtctgtgcccacccctttatactggacaattttgccaccaacgctataacctttgtgacctacttcataacccttgcagaaacaactcaacatgcttagctttggtagacgcaaatcagcattgtatttgtagagaagaatttgaaggtaaaaactgtgaaattgatgtgaaagactgcctcttcctttcctgccaggattatggtgactgtgaagatatggtcaacaatttcaggtgtatttgcagacctgggttttctggatctctgtgtgaaattgaaattaatgaatgttcctctgaaccttgcaaaaataatggaacatgtgtggatctgacaaacagatttttttgtaattgtgaacctgagtaccatgggcccttctgtgaacttgatgtaaataaatgtaaaatctcaccttgtctagatgaagaaaattgtgtctacaggactgatggatacaactgcctctgtgcccctggttatacaggcatcaactgtgaaataaatctagatgaatgcctatcagagccctgtctccatgatggagtttgtatcgatggcatcaatcattatacctgtgactgcaagagtgggttttttggaacacactgtgaaacaaacgccaatgattgcctttcaaatccttgtctacatggaaggtgcacagaacttattaatgaatatccatgttcatgtgatgcagatgggactagcacacaatgtaagatcaaaattaatgactgcacatcaatcccttgtatgaatgaaggcttctgtcagaagtcagcacatggatttacttgcatttgcccacgtggatacactggtgcatactgtgaaaaaagcattgataattgtgctgagcctgaacttaattcagtcatctgtcttaatggagggatctgtgttgatgggcctggacatacttttgactgcagatgtcttcctggattttctggtcaattttgtgaaattaatataaatgaatgctcttcatcaccatgtctacatggtgcagactgtgaagatcacatcaatggatatgtttgcaaatgccaaccaggatggtctggacaccactgtgagaatgagcttgagtgcattcccaactcatgtgttcatgaactctgcatggagaatgaacctggctcgacatgtttatgcacacctggatttatgacctgctccattgggcttctttgtggtgatgaaataaggagaattacctgtttaactcccatctttcaaagaacagatcccatttccacacagacatatacaattcccccttctgagactttggtcagcagctttccatctataaaggctactagaataccagccataatggacacttacccagttgatcaaggtccaaaacagacaggcattgtcaagcacgacattctcccaaccactggtttggcaacattaagaattagcacacccttggaaagctacttactccaagaactgattgtcactagagagctttcagcaaaacacagtcttctttcttccgcagatgtttcctcttctcgattcctgaattttggtattcgtgacccagcacaaattgtccaggacaaaacatcggtatcacatatgcctattcgaacttcagcagccacactaggtttcttttttcctgataggagagcaaggaccccatttatcatgtcttccttaatgtcagattttatttttcctacacaatctttattatttgagaactgtcagactgttgctttatctgctaccccaacgacttcagtaattagaagcattccaggggctgatattgagctaaacaggcagtcattactctcccgtggattcctgcttatagctgcctccataagtgcaactccagttgtctctaggggggctcaagaggatattgaagaatattcagctgattctttaatttcaagaagagagcactggagattgctcagcccctcgatgtctcccatttttcctgctaaggtaattatatctaaacaggtaaccatcttaaactcatcagctctgcaccggttcagtacaaaagccttcaatcccagtgaatatcaggctattactgaggcttcaagcaaccagagactcacaaacatcaaatcacaggctgctgattctttaagagaattaagccaaacatgtgcaacatgttctatgactgaaataaaatcctctcgtgaattctcagatcaagttttgcatagcaaacagtcccacttttatgagacattctggatgaactcagcgatattagccagctggtatgcactaatgggagctcaaactatcacttctgggcattcattttcttctgctactgaaataacaccatcagtggcattcacagaagtgccatctttatttccttctaaaaagagtgcaaaaagaacaattttatcctcatccttggaagaatccattaccctatcaagtaatttggatgttaatttatgtttggataagacttgtttatccattgtcccttcacaaactatctcttcagacttgatgaattctgatttgacttcaaaaatgactactgatgaactgtcagtatcagaaaacattttaaaactattgaaaataagacaatatggcataactatgggacccactgaggtactaaatcaagagagcttattggacatggaaaaaagtaaaggatctcatacactgttcaaacttcacccaagtgatagttctctggattttgagttaaacttacaaatttatccggatgttactttaaagacatattcagaaattacacatgcaaatgacttcaaaaataatctgccaccattgacaggctcagtgcctgatttttcagaagtcaccaccaatgttgcattttatacagtttcagcaactccagcactttcaatacagacgtcttcctccatgtctgtaattaggccagattggccatattttacagattatatgacctctcttaaaaaagaggtcaagacttcttcagaatggtccaaatgggaacttcagcctagtgtgcaatatcaggaatttcccactgcaagccggcatcttcccttcactagatctcttactttgtcttcactggaatccattctggcacctcaacggctgatgatttctgatttcagttgtgttcgttattatggagattcttatctagaatttcagaatgtggctttaaatccacaaaataacatctccctagaatttcagaccttcagctcctatggacttctgctgtatgtcaagcaagactcaaatttagtagatggattttttattcaattgtttattgaaaatggtactttaaagtaccacttttactgtcctggtgaagcaaaatttaaaagcattaatactactgttagagtggacaacgggcaaaagtatacactgcttatcaggcaagaattggatccatgtaacgctgagctgactattttagggaggaatacacaaatatgcgaatctatcaatcatgtactcggaaaacccctgccaaaatcaggatctgtcttcattggtggatttccagaccttcatgggaaaatccagatgcctgtaccagtcaagaattttactggctgcatagaagttatagaaataaataactggagatctttcattccatccaaggcagtgaaaaactatcacattaacaattgcagatcccagggatttatgctgtctccaacagcctcctttgttgatgcttctgatgtgacacaaggggttgataccatgtggacttctgtcagcccctctgttgcagcaccctctgtgtgccagcaggatgtatgccacaatggaggcacatgccatgccatcttcctctccagtggcatagtgtcattccaatgtgactgtccactacatttcactggccgcttctgtgaaaaagatgcaggtttattctttccatctttcaatgggaattcctatttagaactgccctttttgaagtttgtcctggagaaggaacataacagaactgttaccatctacttgactataaaaacaaacagtttaaatggaactattctttacagtaatgggaataattgtggaaagcagtttcttcatttatttcttgtggaaggaaggccatcagttaaatatgggtgtggaaattctcaaaatattttgactgtttctgctaattacagcattaacacaaatgcattcacccctatcacaatacgctacacaacgcctgttggcagccctggagttgtttgtatgattgaaatgactgcagatggaaaacctccagtacagaagaaagacacagagatttcccatgcctctcaggcatattttgaatcaatgttccttggccatattcctgcaaatgttcaaattcataagaaagcaggtcctgtttatgggttcaggggctgcattctagaccttcaagtaaacaacaaagaattcttcatcatcgatgaagcacgacatggaaagaatattgagaactgccacgtcccttggtgtgctcatcatctgtgccgcaacaatggcacctgcatcagtgataatgaaaatctgttttgtgagtgtccaaggctgtattcaggcaagctgtgccagtttgcaagttgtgaaaacaacccatgtggaaatggtgccacctgtgttccaaaatccggaacagatattgtctgcctctgcccatatgggaggtctggacccctctgcactgatgctattaatattactcagccaaggttcagtggcacagatgcctttggatacacctcattcctggcttattcacggatctcagacatcagcttccattatgaattccacctgaagtttcagctggcaaacaaccactcagcactgcaaaataacttgatattttttactggacagaaaggccatgggttgaatggcgatgacttcctggctgtgggcctgctcaatggcagtgtggtttatagttataacctggggtctggcatagcaagcatcaggagcgagcccctcaatctgagccttggagtccacactgttcatctgggcaagttcttccaagagggctggctgaaggtagatgatcataaaaataaatccattatcgccccaggaagactggttggtctcaatgtcttcagtcagttttatgtaggtggctacagtgaatacactccagatctcttaccaaatggagcagattttaaaaatggttttcaaggctgtattttcactcttcaagttcgcactgagaaggatggccatttcagaggactgggaaatcctgagggccacccaaatgctggacgcagtgttggccagtgtcatgcttctccctgcagtttaatgaaatgtggcaatggtgggacatgcatagagagtggaactagtgtttactgcaattgtaccactgggtggaaaggatcattctgcacagagacagtttctacctgtgatcctgaacatgaccctccacaccactgtagcagaggagcaacctgcatttcattacctcatggatacacctgtttctgtcctctaggaaccactggaatctactgtgaacaagcacttatcctcattgtgatcttggaaaagccaaaaccagcagaacggaaagtgaagaaggaggctttatccataagtgatccatctttcagaagcaatgagttatcctggatgtcttttgcttcctttcatgttcgaaaaaagacacatattcaattgcagtttcagcctctcgctgcagatggtatcctattttatgctgcacaacacttaaaagcccaatcaggtgattttttatgcatctctttagtaaatagttccgttcaacttcgctacaaccttggcgacagaactatcattctagaaactctccaaaaagtaactataaacggaagtacttggcatataataaaagcaggaagagttggtgcagaaggctacctggatctagatgggataaatgtaacagaaaaggcctccactaaaatgagttctctggacacaaatacagacttctatattggaggagtatcttctttaaatcttgtaaatcccatggcaatagaaaatgaacctgtaggttttcaaggctgtatccgacaagttatcataaataatcaagaattacaattaactgaatttggagcaaaaggtggctcaaatgtaggtgactgtgatgggacagcctgtgggtacaacacatgcagaaatggaggtgaatgtacagtaaatggcacaactttttcttgcagatgtttgccagattgggctggaaatacatgtaaccagtctgtgtcctgtttgaataatctttgcctccaccaatctttatgtatacctgaccaatcattttcttacagttgcctgtgtactttgggttgggtgggaaggtattgtgaaaacaaaacttcattttcaactgcaaaatttatgggtaattcttacattaaatacattgatccaaattatagaatgagaaacctccagttcactactatatccttaaatttcagtaccactaaaacagaaggtctaattgtatggatgggaatagctcaaaatgaagaaaatgattttctggcaattggtctccataatcagaccttgaaaatagcagttaacttgggagaaagaatctctgtgcctatgagctataacaatggcacattctgttgtaataaatggcaccatgtagttgtaattcaaaatcagactcttatcaaggcctacataaataacagtctaattctttccgaggatattgatccacataaaaactttgtggctctaaactatgatggcatttgttatctagggggctttgaatatggtagaaaggtaaatatcgttactcaagagatttttaaaaccaattttgttggcaaaattaaagatgttgtattttttcaggaaccaaaaaacattgaactaattaaattagaaggatacaatgtttatgatggagatgaacaaaatgaggttacataa

SEQ ID NO: 10249 - DNA, 2312 bp, Homo sapiens
  source 1..2312: mol_type = unassigned DNA
gatacacgctaggcatgtccagacattaaccgtaatcagaagcctcctagggttgcaagcctccttggctaatggttgggctttgtgcctcactcttctcttacacctggggagtcaagtctggatcctctgctccatatttatttagcaaataaaacactgatctcaaacagcaacggaacctgtgtacttgaggtgttttttgaaaactaatcagaagaggaatgcttatctcccaagaaaattgaaaccatctgtaaaagaatcttggctgtgctgtgttttgattagattgaagcttggtgtaaagagaaaacacaaaagaccgcagaatatttacaacatttgaattcctgtttctccatcaaagcacattgtcatcaaagctactttgggtatagaaaaaaggtcaattccaattcccaggaatccttaaccacaactttacttggaaatttccggtaatacttaaaacaccattttgcagcaattctttatgataaactgtaaaatacagctacccgaaaatgactgacaaatcaatcgtcattctgagcctgatggtttttcacagctctttcataaatggaaaaacatgtagacggcaattggtggaagaatggcatccacaaccctcatcatatgtggtaaattggacactaacagaaaacatctgcttggacttctacagagattgctggtttttgggtgtaaacactaaaatagatacttcaggcaatcaagctgttccccagatttgccctttgcaaattcaattaggagatatccttgtaatttcttctgaaccatctcttcaatttccagaaataaatttgatgaatgtttctgaaacatctttcgttggctgtgtgcaaaataccacaacggaagatcagttactttttggctgcagactaaaaggaatgcacactgttaattctaagtggctgagtgttgggacacattattttatcacagttatggcaagtggtccatcaccttgtccactgggacttcgactaaatgtgacagtgaaacagcagttctgccaggaatctctgagttcagaattttgctctggtcatggtaaatgtcttagtgaagcttggagcaagacatatagctgccattgccagcctccattttctggaaaatactgccaggaacttgatgcatgttcttttaaaccatgtaaaaataatggcagttgcattaataaaagagaaaattgggatgagcaagcatatgaatgtgtctgtcacccaccatttacaggaaagaattgctcagaaataattggccagtgtcaaccacatgtctgtttccatggaaactgcagcaatattacttcaaatagtttcatttgtgaatgtgatgagcaattttcaggtccattctgtgaggtgtcagcaaaaccttgtgtttctctgcttttttggaaaagaggaatttgcccaaatagcagttctgcttatacttatgaatgcccaaaaggatcttccagccaaaatggtgaaactgatgtcagtgagttttcattagtaccatgtcagaatggtactgactgcatcaaaatatcaaatgatgttatgtgcatctgttcaccaatatttacagatttgctttgtaagagcattcaaacatcatgtgagtcatttcctttgaggaataatgctacatgtaagaaatgtgagaaagattatccttgcagctgtatatcaggatttactgaaaaaaactgtgagaaagcaattgaccactgtaaactgctcagcatcaactgtctgaatgaagaatggtgtttcaatataattggaagattcaaatatgtatgcattccagggtgcacaaaaaatccatgttggtttttgaagaatgtttacctaattcatcaacacctctgctactgtggagtcaccttccatggtatttgccaagataaaggtcctgctcaatttgaatatgtgtggcaattgggatttgcaggatctgaaggcgaaaagtgccaaggggttattgatgcctatttctttctggctgcaaactgcactgaagatgcaacctatgtgaacgatcctgaagataataattcttcatgttggttcccacatgaaggcacaaaagagatttgtgcaaatggatgcagttgtttgagtgaagaagacagtcaggaatatcggtatctatgttttctcagatgggctggcaacatgtatctggaaaatacaactgatgatcaagaaaatgagtgtcaacatgaagctgtttgtaaagatgaaattaatagacccaggtatttatgtatcatttga

SEQ ID NO: 10250 - DNA, 10485 bp, Homo sapiens
  source 1..10485: mol_type = unassigned DNA
gatacacgctaggcatgtccagacattaaccgtaatcagaagcctcctagggttgcaagcctccttggctaatggttgggctttgtgcctcactcttctcttacacctggggagtcaagtctggatcctctgctccatatttatttagcaaataaaacactgatctcaaacagcaacggaacctgtgtacttgaggtgttttttgaaaactaatcagaagaggaatgcttatctcccaagaaaattgaaaccatctgtaaaagaatcttggctgtgctgtgttttgattagattgaagcttggtgtaaagagaaaacacaaaagaccgcagaatatttacaacatttgaattcctgtttctccatcaaagcacattgtcatcaaagctactttgggtatagaaaaaaggtcaattccaattcccaggaatccttaaccacaactttacttggaaatttccggtaatacttaaaacaccattttgcagcaattctttatgataaactgtaaaatacagctacccgaaaatgactgacaaatcaatcgtcattctgagcctgatggtttttcacagctctttcataaatggaaaaacatgtagacggcaattggtggaagaatggcatccacaaccctcatcatatgtggtaaattggacactaacagaaaacatctgcttggacttctacagagattgctggtttttgggtgtaaacactaaaatagatacttcaggcaatcaagctgttccccagatttgccctttgcaaattcaattaggagatatccttgtaatttcttctgaaccatctcttcaatttccagaaataaatttgatgaatgtttctgaaacatctttcgttggctgtgtgcaaaataccacaacggaagatcagttactttttggctgcagactaaaaggaatgcacactgttaattctaagtggctgagtgttgggacacattattttatcacagttatggcaagtggtccatcaccttgtccactgggacttcgactaaatgtgacagtgaaacagcagttctgccaggaatctctgagttcagaattttgctctggtcatggtaaatgtcttagtgaagcttggagcaagacatatagctgccattgccagcctccattttctggaaaatactgccaggaacttgatgcatgttcttttaaaccatgtaaaaataatggcagttgcattaataaaagagaaaattgggatgagcaagcatatgaatgtgtctgtcacccaccatttacaggaaagaattgctcagaaataattggccagtgtcaaccacatgtctgtttccatggaaactgcagcaatattacttcaaatagtttcatttgtgaatgtgatgagcaattttcaggtccattctgtgaggtgtcagcaaaaccttgtgtttctctgcttttttggaaaagaggaatttgcccaaatagcagttctgcttatacttatgaatgcccaaaaggatcttccagccaaaatggtgaaactgatgtcagtgagttttcattagtaccatgtcagaatggtactgactgcatcaaaatatcaaatgatgttatgtgcatctgttcaccaatatttacagatttgctttgtaagagcattcaaacatcatgtgagtcatttcctttgaggaataatgctacatgtaagaaatgtgagaaagattatccttgcagctgtatatcaggatttactgaaaaaaactgtgagaaagcaattgaccactgtaaactgctcagcatcaactgtctgaatgaagaatggtgtttcaatataattggaagattcaaatatgtatgcattccagggtgcacaaaaaatccatgttggtttttgaagaatgtttacctaattcatcaacacctctgctactgtggagtcaccttccatggtatttgccaagataaaggtcctgctcaatttgaatatgtgtggcaattgggatttgcaggatctgaaggcgaaaagtgccaaggggttattgatgcctatttctttctggctgcaaactgcactgaagatgcaacctatgtgaacgatcctgaagataataattcttcatgttggttcccacatgaaggcacaaaagagatttgtgcaaatggatgcagttgtttgagtgaagaagacagtcaggaatatcggtatctatgttttctcagatgggctggcaacatgtatctggaaaatacaactgatgatcaagaaaatgagtgtcaacatgaagctgtttgtaaagatgaaattaatagacccagatgcagctgttctcttagttacattggcagattgtgtgttgtcaatgttgactattgcttagggaaccacagtatatcagtgcatggcctctgcctggccctttcgcacaattgtaactgtagcggtctgcaaagatatgaaaggaacatctgtgagatagatactgaagactgcaaatctgcgtcctgcaaaaatggaacaactagtacacatttaaggggatatttcttccgcaagtgtgtcccaggatttaaaggtacgcaatgtgaaattgatatagatgagtgtgcttcacatccctgcaaaaatggagccacctgcattgaccaacctggtaattacttctgccagtgtgtgcctccatttaaagtggttgatggcttttcctgcttatgcaatccaggctatgttgggataagatgtgaacaggacattgatgactgcatcctgaatgcctgtgagcacaattctacctgcaaagacctgcatctcagctaccagtgtgtgtgcctatctgattgggaaggaaatttttgtgaacaagaatccaatgagtgtaaaatgaatccttgcaagaacaattccacctgtactgacctttacaaaagctatcgatgtgagtgtacatctggatggactggacagaactgtagtgaagaaataaatgaatgcgactctgatccatgcatgaatggaggtctttgtcatgaatctaccatccctggacaatttgtatgtctgtgcccacccctttatactggacaattttgccaccaacgctataacctttgtgacctacttcataacccttgcagaaacaactcaacatgcttagctttggtagacgcaaatcagcattgtatttgtagagaagaatttgaaggtaaaaactgtgaaattgatgtgaaagactgcctcttcctttcctgccaggattatggtgactgtgaagatatggtcaacaatttcaggtgtatttgcagacctgggttttctggatctctgtgtgaaattgaaattaatgaatgttcctctgaaccttgcaaaaataatggaacatgtgtggatctgacaaacagatttttttgtaattgtgaacctgagtaccatgggcccttctgtgaacttgatgtaaataaatgtaaaatctcaccttgtctagatgaagaaaattgtgtctacaggactgatggatacaactgcctctgtgcccctggttatacaggcatcaactgtgaaataaatctagatgaatgcctatcagagccctgtctccatgatggagtttgtatcgatggcatcaatcattatacctgtgactgcaagagtgggttttttggaacacactgtgaaacaaacgccaatgattgcctttcaaatccttgtctacatggaaggtgcacagaacttattaatgaatatccatgttcatgtgatgcagatgggactagcacacaatgtaagatcaaaattaatgactgcacatcaatcccttgtatgaatgaaggcttctgtcagaagtcagcacatggatttacttgcatttgcccacgtggatacactggtgcatactgtgaaaaaagcattgataattgtgctgagcctgaacttaattcagtcatctgtcttaatggagggatctgtgttgatgggcctggacatacttttgactgcagatgtcttcctggattttctggtcaattttgtgaaattaatataaatgaatgctcttcatcaccatgtctacatggtgcagactgtgaagatcacatcaatggatatgtttgcaaatgccaaccaggatggtctggacaccactgtgagaatgagcttgagtgcattcccaactcatgtgttcatgaactctgcatggagaatgaacctggctcgacatgtttatgcacacctggatttatgacctgctccattgggcttctttgtggtgatgaaataaggagaattacctgtttaactcccatctttcaaagaacagatcccatttccacacagacatatacaattcccccttctgagactttggtcagcagctttccatctataaaggctactagaataccagccataatggacacttacccagttgatcaaggtccaaaacagacaggcattgtcaagcacgacattctcccaaccactggtttggcaacattaagaattagcacacccttggaaagctacttactccaagaactgattgtcactagagagctttcagcaaaacacagtcttctttcttccgcagatgtttcctcttctcgattcctgaattttggtattcgtgacccagcacaaattgtccaggacaaaacatcggtatcacatatgcctattcgaacttcagcagccacactaggtttcttttttcctgataggagagcaaggaccccatttatcatgtcttccttaatgtcagattttatttttcctacacaatctttattatttgagaactgtcagactgttgctttatctgctaccccaacgacttcagtaattagaagcattccaggggctgatattgagctaaacaggcagtcattactctcccgtggattcctgcttatagctgcctccataagtgcaactccagttgtctctaggggggctcaagaggatattgaagaatattcagctgattctttaatttcaagaagagagcactggagattgctcagcccctcgatgtctcccatttttcctgctaaggtaattatatctaaacaggtaaccatcttaaactcatcagctctgcaccggttcagtacaaaagccttcaatcccagtgaatatcaggctattactgaggcttcaagcaaccagagactcacaaacatcaaatcacaggctgctgattctttaagagaattaagccaaacatgtgcaacatgttctatgactgaaataaaatcctctcgtgaattctcagatcaagttttgcatagcaaacagtcccacttttatgagacattctggatgaactcagcgatattagccagctggtatgcactaatgggagctcaaactatcacttctgggcattcattttcttctgctactgaaataacaccatcagtggcattcacagaagtgccatctttatttccttctaaaaagagtgcaaaaagaacaattttatcctcatccttggaagaatccattaccctatcaagtaatttggatgttaatttatgtttggataagacttgtttatccattgtcccttcacaaactatctcttcagacttgatgaattctgatttgacttcaaaaatgactactgatgaactgtcagtatcagaaaacattttaaaactattgaaaataagacaatatggcataactatgggacccactgaggtactaaatcaagagagcttattggacatggaaaaaagtaaaggatctcatacactgttcaaacttcacccaagtgatagttctctggattttgagttaaacttacaaatttatccggatgttactttaaagacatattcagaaattacacatgcaaatgacttcaaaaataatctgccaccattgacaggctcagtgcctgatttttcagaagtcaccaccaatgttgcattttatacagtttcagcaactccagcactttcaatacagacgtcttcctccatgtctgtaattaggccagattggccatattttacagattatatgacctctcttaaaaaagaggtcaagacttcttcagaatggtccaaatgggaacttcagcctagtgtgcaatatcaggaatttcccactgcaagccggcatcttcccttcactagatctcttactttgtcttcactggaatccattctggcacctcaacggctgatgatttctgatttcagttgtgttcgttattatggagattcttatctagaatttcagaatgtggctttaaatccacaaaataacatctccctagaatttcagaccttcagctcctatggacttctgctgtatgtcaagcaagactcaaatttagtagatggattttttattcaattgtttattgaaaatggtactttaaagtaccacttttactgtcctggtgaagcaaaatttaaaagcattaatactactgttagagtggacaacgggcaaaagtatacactgcttatcaggcaagaattggatccatgtaacgctgagctgactattttagggaggaatacacaaatatgcgaatctatcaatcatgtactcggaaaacccctgccaaaatcaggatctgtcttcattggtggatttccagaccttcatgggaaaatccagatgcctgtaccagtcaagaattttactggctgcatagaagttatagaaataaataactggagatctttcattccatccaaggcagtgaaaaactatcacattaacaattgcagatcccagggatttatgctgtctccaacagcctcctttgttgatgcttctgatgtgacacaaggggttgataccatgtggacttctgtcagcccctctgttgcagcaccctctgtgtgccagcaggatgtatgccacaatggaggcacatgccatgccatcttcctctccagtggcatagtgtcattccaatgtgactgtccactacatttcactggccgcttctgtgaaaaagatgcaggtttattctttccatctttcaatgggaattcctatttagaactgccctttttgaagtttgtcctggagaaggaacataacagaactgttaccatctacttgactataaaaacaaacagtttaaatggaactattctttacagtaatgggaataattgtggaaagcagtttcttcatttatttcttgtggaaggaaggccatcagttaaatatgggtgtggaaattctcaaaatattttgactgtttctgctaattacagcattaacacaaatgcattcacccctatcacaatacgctacacaacgcctgttggcagccctggagttgtttgtatgattgaaatgactgcagatggaaaacctccagtacagaagaaagacacagagatttcccatgcctctcaggcatattttgaatcaatgttccttggccatattcctgcaaatgttcaaattcataagaaagcaggtcctgtttatgggttcaggggctgcattctagaccttcaagtaaacaacaaagaattcttcatcatcgatgaagcacgacatggaaagaatattgagaactgccacgtcccttggtgtgctcatcatctgtgccgcaacaatggcacctgcatcagtgataatgaaaatctgttttgtgagtgtccaaggctgtattcaggcaagctgtgccagtttgcaagttgtgaaaacaacccatgtggaaatggtgccacctgtgttccaaaatccggaacagatattgtctgcctctgcccatatgggaggtctggacccctctgcactgatgctattaatattactcagccaaggttcagtggcacagatgcctttggatacacctcattcctggcttattcacggatctcagacatcagcttccattatgaattccacctgaagtttcagctggcaaacaaccactcagcactgcaaaataacttgatattttttactggacagaaaggccatgggttgaatggcgatgacttcctggctgtgggcctgctcaatggcagtgtggtttatagttataacctggggtctggcatagcaagcatcaggagcgagcccctcaatctgagccttggagtccacactgttcatctgggcaagttcttccaagagggctggctgaaggtagatgatcataaaaataaatccattatcgccccaggaagactggttggtctcaatgtcttcagtcagttttatgtaggtggctacagtgaatacactccagatctcttaccaaatggagcagattttaaaaatggttttcaaggctgtattttcactcttcaagttcgcactgagaaggatggccatttcagaggactgggaaatcctgagggccacccaaatgctggacgcagtgttggccagtgtcatgcttctccctgcagtttaatgaaatgtggcaatggtgggacatgcatagagagtggaactagtgtttactgcaattgtaccactgggtggaaaggatcattctgcacagagacagtttctacctgtgatcctgaacatgaccctccacaccactgtagcagaggagcaacctgcatttcattacctcatggatacacctgtttctgtcctctaggaaccactggaatctactgtgaacaagcacttatcctcattgtgatcttggaaaagccaaaaccagcagaacggaaagtgaagaaggaggctttatccataagtgatccatctttcagaagcaatgagttatcctggatgtcttttgcttcctttcatgttcgaaaaaagacacatattcaattgcagtttcagcctctcgctgcagatggtatcctattttatgctgcacaacacttaaaagcccaatcaggtgattttttatgcatctctttagtaaatagttccgttcaacttcgctacaaccttggcgacagaactatcattctagaaactctccaaaaagtaactataaacggaagtacttggcatataataaaagcaggaagagttggtgcagaaggctacctggatctagatgggataaatgtaacagaaaaggcctccactaaaatgagttctctggacacaaatacagacttctatattggaggagtatcttctttaaatcttgtaaatcccatggcaatagaaaatgaacctgtaggttttcaaggctgtatccgacaagttatcataaataatcaagaattacaattaactgaatttggagcaaaaggtggctcaaatgtaggtgactgtgatgggacagcctgtgggtacaacacatgcagaaatggaggtgaatgtacagtaaatggcacaactttttcttgcagatgtttgccagattgggctggaaatacatgtaaccagtctgtgtcctgtttgaataatctttgcctccaccaatctttatgtatacctgaccaatcattttcttacagttgcctgtgtactttgggttgggtgggaaggtattgtgaaaacaaaacttcattttcaactgcaaaatttatgggtaattcttacattaaatacattgatccaaattatagaatgagaaacctccagttcactactatatccttaaatttcagtaccactaaaacagaaggtctaattgtatggatgggaatagctcaaaatgaagaaaatgattttctggcaattggtctccataatcagaccttgaaaatagcagttaacttgggagaaagaatctctgtgcctatgagctataacaatggcacattctgttgtaataaatggcaccatgtagttgtaattcaaaatcagactcttatcaaggcctacataaataacagtctaattctttccgaggatattgatccacataaaaactttgtggctctaaactatgatggcatttgttatctagggggctttgaatatggtagaaaggtaaatatcgttactcaagagatttttaaaaccaattttgttggcaaaattaaagatgttgtattttttcaggaaccaaaaaacattgaactaattaaattagaaggatacaatgtttatgatggagatgaacaaaatgaggttacataagttaacactagagattttagtacacactatacataaatgcagttattttgatagttatttctttgatacattgcttacggggaatcaactgtttactatattacctgaaatagtctaaatgctaacatatctttttgataagattgtaaaatgtcactgaaggttctgattgtttttcctacatctaatttatctgtatatattttgattcatgttttaactccattagttcagtgcttattcacagaatgtgcttattcactttgcttattcactttttacctatccctaatgcttacattttaaaatcaacgtgtaaacacaattttaaaaatcaatgtgtaagctgaactttaaaatgtttaaaattcagttgggaatgaattagggataggtacaaataagaaaaaaatcaagttattaatcaaaggaaaaataaaaattatacaaagcaatgtaa

SEQ ID NO: 10251 - DNA, 10589 bp, Homo sapiens
  source 1..10589: mol_type = unassigned DNA
agaaacaaagtgatacacgctaggcatgtccagacattaaccgtaatcagaagcctcctagggttgcaagcctccttggctaatggttgggctttgtgcctcactcttctcttacacctggggagtcaagtctggatcctctgctccatatttatttagcaaataaaacactgatctcaaacagcaacggaacctgtgtacttgaggtgttttttgaaaactaatcagaagaggaatgcttatctcccaagaaaattgaaaccatctgtaaaagaatcttggctgtgctgtgttttgattagattgaagcttggtgtaaagagaaaacacaaaagaccgcagaatatttacaacatttgaattcctgtttctccatcaaagcacattgtcatcaaagctactttgggtatagaaaaaaggtcaattccaattcccaggaatccttaaccacaactttacttggaaatttccggtaatacttaaaacaccattttgcagcaattctttatgataaactgtaaaatacagctacccgaaaatgactgacaaatcaatcgtcattctgagcctgatggtttttcacagctctttcataaatggaaaaacatgtagacggcaattggtggaagaatggcatccacaaccctcatcatatgtggtaaattggacactaacagaaaacatctgcttggacttctacagagattgctggtttttgggtgtaaacactaaaatagatacttcaggcaatcaagctgttccccagatttgccctttgcaaattcaattaggagatatccttgtaatttcttctgaaccatctcttcaatttccagaaataaatttgatgaatgtttctgaaacatctttcgttggctgtgtgcaaaataccacaacggaagatcagttactttttggctgcagactaaaaggaatgcacactgttaattctaagtggctgagtgttgggacacattattttatcacagttatggcaagtggtccatcaccttgtccactgggacttcgactaaatgtgacagtgaaacagcagttctgccaggaatctctgagttcagaattttgctctggtcatggtaaatgtcttagtgaagcttggagcaagacatatagctgccattgccagcctccattttctggaaaatactgccaggaacttgatgcatgttcttttaaaccatgtaaaaataatggcagttgcattaataaaagagaaaattgggatgagcaagcatatgaatgtgtctgtcacccaccatttacaggaaagaattgctcagaaataattggccagtgtcaaccacatgtctgtttccatggaaactgcagcaatattacttcaaatagtttcatttgtgaatgtgatgagcaattttcaggtccattctgtgaggtgtcagcaaaaccttgtgtttctctgcttttttggaaaagaggaatttgcccaaatagcagttctgcttatacttatgaatgcccaaaaggatcttccagccaaaatggtgaaactgatgtcagtgagttttcattagtaccatgtcagaatggtactgactgcatcaaaatatcaaatgatgttatgtgcatctgttcaccaatatttacagatttgctttgtaagagcattcaaacatcatgtgagtcatttcctttgaggaataatgctacatgtaagaaatgtgagaaagattatccttgcagctgtatatcaggatttactgaaaaaaactgtgagaaagcaattgaccactgtaaactgctcagcatcaactgtctgaatgaagaatggtgtttcaatataattggaagattcaaatatgtatgcattccagggtgcacaaaaaatccatgttggtttttgaagaatgtttacctaattcatcaacacctctgctactgtggagtcaccttccatggtatttgccaagataaaggtcctgctcaatttgaatatgtgtggcaattgggatttgcaggatctgaaggcgaaaagtgccaaggggttattgatgcctatttctttctggctgcaaactgcactgaagatgcaacctatgtgaacgatcctgaagataataattcttcatgttggttcccacatgaaggcacaaaagagatttgtgcaaatggatgcagttgtttgagtgaagaagacagtcaggaatatcggtatctatgttttctcagatgggctggcaacatgtatctggaaaatacaactgatgatcaagaaaatgagtgtcaacatgaagctgtttgtaaagatgaaattaatagacccagatgcagctgttctcttagttacattggcagattgtgtgttgtcaatgttgactattgcttagggaaccacagtatatcagtgcatggcctctgcctggccctttcgcacaattgtaactgtagcggtctgcaaagatatgaaaggaacatctgtgagatagatactgaagactgcaaatctgcgtcctgcaaaaatggaacaactagtacacatttaaggggatatttcttccgcaagtgtgtcccaggatttaaaggtacgcaatgtgaaattgatatagatgagtgtgcttcacatccctgcaaaaatggagccacctgcattgaccaacctggtaattacttctgccagtgtgtgcctccatttaaagtggttgatggcttttcctgcttatgcaatccaggctatgttgggataagatgtgaacaggacattgatgactgcatcctgaatgcctgtgagcacaattctacctgcaaagacctgcatctcagctaccagtgtgtgtgcctatctgattgggaaggaaatttttgtgaacaagaatccaatgagtgtaaaatgaatccttgcaagaacaattccacctgtactgacctttacaaaagctatcgatgtgagtgtacatctggatggactggacagaactgtagtgaagaaataaatgaatgcgactctgatccatgcatgaatggaggtctttgtcatgaatctaccatccctggacaatttgtatgtctgtgcccacccctttatactggacaattttgccaccaacgctataacctttgtgacctacttcataacccttgcagaaacaactcaacatgcttagctttggtagacgcaaatcagcattgtatttgtagagaagaatttgaaggtaaaaactgtgaaattgatgtgaaagactgcctcttcctttcctgccaggattatggtgactgtgaagatatggtcaacaatttcaggtgtatttgcagacctgggttttctggatctctgtgtgaaattgaaattaatgaatgttcctctgaaccttgcaaaaataatggaacatgtgtggatctgacaaacagatttttttgtaattgtgaacctgagtaccatgggcccttctgtgaacttgatgtaaataaatgtaaaatctcaccttgtctagatgaagaaaattgtgtctacaggactgatggatacaactgcctctgtgcccctggttatacaggcatcaactgtgaaataaatctagatgaatgcctatcagagccctgtctccatgatggagtttgtatcgatggcatcaatcattatacctgtgactgcaagagtgggttttttggaacacactgtgaaacaaacgccaatgattgcctttcaaatccttgtctacatggaaggtgcacagaacttattaatgaatatccatgttcatgtgatgcagatgggactagcacacaatgtaagatcaaaattaatgactgcacatcaatcccttgtatgaatgaaggcttctgtcagaagtcagcacatggatttacttgcatttgcccacgtggatacactggtgcatactgtgaaaaaagcattgataattgtgctgagcctgaacttaattcagtcatctgtcttaatggagggatctgtgttgatgggcctggacatacttttgactgcagatgtcttcctggattttctggtcaattttgtgaaattaatataaatgaatgctcttcatcaccatgtctacatggtgcagactgtgaagatcacatcaatggatatgtttgcaaatgccaaccaggatggtctggacaccactgtgagaatgagcttgagtgcattcccaactcatgtgttcatgaactctgcatggagaatgaacctggctcgacatgtttatgcacacctggatttatgacctgctccattgggcttctttgtggtgatgaaataaggagaattacctgtttaactcccatctttcaaagaacagatcccatttccacacagacatatacaattcccccttctgagactttggtcagcagctttccatctataaaggctactagaataccagccataatggacacttacccagttgatcaaggtccaaaacagacaggcattgtcaagcacgacattctcccaaccactggtttggcaacattaagaattagcacacccttggaaagctacttactccaagaactgattgtcactagagagctttcagcaaaacacagtcttctttcttccgcagatgtttcctcttctcgattcctgaattttggtattcgtgacccagcacaaattgtccaggacaaaacatcggtatcacatatgcctattcgaacttcagcagccacactaggtttcttttttcctgataggagagcaaggaccccatttatcatgtcttccttaatgtcagattttatttttcctacacaatctttattatttgagaactgtcagactgttgctttatctgctaccccaacgacttcagtaattagaagcattccaggggctgatattgagctaaacaggcagtcattactctcccgtggattcctgcttatagctgcctccataagtgcaactccagttgtctctaggggggctcaagaggatattgaagaatattcagctgattctttaatttcaagaagagagcactggagattgctcagcccctcgatgtctcccatttttcctgctaaggtaattatatctaaacaggtaaccatcttaaactcatcagctctgcaccggttcagtacaaaagccttcaatcccagtgaatatcaggctattactgaggcttcaagcaaccagagactcacaaacatcaaatcacaggctgctgattctttaagagaattaagccaaacatgtgcaacatgttctatgactgaaataaaatcctctcgtgaattctcagatcaagttttgcatagcaaacagtcccacttttatgagacattctggatgaactcagcgatattagccagctggtatgcactaatgggagctcaaactatcacttctgggcattcattttcttctgctactgaaataacaccatcagtggcattcacagaagtgccatctttatttccttctaaaaagagtgcaaaaagaacaattttatcctcatccttggaagaatccattaccctatcaagtaatttggatgttaatttatgtttggataagacttgtttatccattgtcccttcacaaactatctcttcagacttgatgaattctgatttgacttcaaaaatgactactgatgaactgtcagtatcagaaaacattttaaaactattgaaaataagacaatatggcataactatgggacccactgaggtactaaatcaagagagcttattggacatggaaaaaagtaaaggatctcatacactgttcaaacttcacccaagtgatagttctctggattttgagttaaacttacaaatttatccggatgttactttaaagacatattcagaaattacacatgcaaatgacttcaaaaataatctgccaccattgacaggctcagtgcctgatttttcagaagtcaccaccaatgttgcattttatacagtttcagcaactccagcactttcaatacagacgtcttcctccatgtctgtaattaggccagattggccatattttacagattatatgacctctcttaaaaaagaggtcaagacttcttcagaatggtccaaatgggaacttcagcctagtgtgcaatatcaggaatttcccactgcaagccggcatcttcccttcactagatctcttactttgtcttcactggaatccattctggcacctcaacggctgatgatttctgatttcagttgtgttcgttattatggagattcttatctagaatttcagaatgtggctttaaatccacaaaataacatctccctagaatttcagaccttcagctcctatggacttctgctgtatgtcaagcaagactcaaatttagtagatggattttttattcaattgtttattgaaaatggtactttaaagtaccacttttactgtcctggtgaagcaaaatttaaaagcattaatactactgttagagtggacaacgggcaaaagtatacactgcttatcaggcaagaattggatccatgtaacgctgagctgactattttagggaggaatacacaaatatgcgaatctatcaatcatgtactcggaaaacccctgccaaaatcaggatctgtcttcattggtggatttccagaccttcatgggaaaatccagatgcctgtaccagtcaagaattttactggctgcatagaagttatagaaataaataactggagatctttcattccatccaaggcagtgaaaaactatcacattaacaattgcagatcccagggatttatgctgtctccaacagcctcctttgttgatgcttctgatgtgacacaaggggttgataccatgtggacttctgtcagcccctctgttgcagcaccctctgtgtgccagcaggatgtatgccacaatggaggcacatgccatgccatcttcctctccagtggcatagtgtcattccaatgtgactgtccactacatttcactggccgcttctgtgaaaaagatgcaggtttattctttccatctttcaatgggaattcctatttagaactgccctttttgaagtttgtcctggagaaggaacataacagaactgttaccatctacttgactataaaaacaaacagtttaaatggaactattctttacagtaatgggaataattgtggaaagcagtttcttcatttatttcttgtggaaggaaggccatcagttaaatatgggtgtggaaattctcaaaatattttgactgtttctgctaattacagcattaacacaaatgcattcacccctatcacaatacgctacacaacgcctgttggcagccctggagttgtttgtatgattgaaatgactgcagatggaaaacctccagtacagaagaaagacacagagatttcccatgcctctcaggcatattttgaatcaatgttccttggccatattcctgcaaatgttcaaattcataagaaagcaggtcctgtttatgggttcaggggctgcattctagaccttcaagtaaacaacaaagaattcttcatcatcgatgaagcacgacatggaaagaatattgagaactgccacgtcccttggtgtgctcatcatctgtgccgcaacaatggcacctgcatcagtgataatgaaaatctgttttgtgagtgtccaaggctgtattcaggcaagctgtgccagtttgcaagttgtgaaaacaacccatgtggaaatggtgccacctgtgttccaaaatccggaacagatattgtctgcctctgcccatatgggaggtctggacccctctgcactgatgctattaatattactcagccaaggttcagtggcacagatgcctttggatacacctcattcctggcttattcacggatctcagacatcagcttccattatgaattccacctgaagtttcagctggcaaacaaccactcagcactgcaaaataacttgatattttttactggacagaaaggccatgggttgaatggcgatgacttcctggctgtgggcctgctcaatggcagtgtggtttatagttataacctggggtctggcatagcaagcatcaggagcgagcccctcaatctgagccttggagtccacactgttcatctgggcaagttcttccaagagggctggctgaaggtagatgatcataaaaataaatccattatcgccccaggaagactggttggtctcaatgtcttcagtcagttttatgtaggtggctacagtgaatacactccagatctcttaccaaatggagcagattttaaaaatggttttcaaggctgtattttcactcttcaagttcgcactgagaaggatggccatttcagaggactgggaaatcctgagggccacccaaatgctggacgcagtgttggccagtgtcatgcttctccctgcagtttaatgaaatgtggcaatggtgggacatgcatagagagtggaactagtgtttactgcaattgtaccactgggtggaaaggatcattctgcacagagacagtttctacctgtgatcctgaacatgaccctccacaccactgtagcagaggagcaacctgcatttcattacctcatggatacacctgtttctgtcctctaggaaccactggaatctactgtgaacaagctttatccataagtgatccatctttcagaagcaatgagttatcctggatgtcttttgcttcctttcatgttcgaaaaaagacacatattcaattgcagtttcagcctctcgctgcagatggtatcctattttatgctgcacaacacttaaaagcccaatcaggtgattttttatgcatctctttagtaaatagttccgttcaacttcgctacaaccttggcgacagaactatcattctagaaactctccaaaaagtaactataaacggaagtacttggcatataataaaagcaggaagagttggtgcagaaggctacctggatctagatgggataaatgtaacagaaaaggcctccactaaaatgagttctctggacacaaatacagacttctatattggaggagtatcttctttaaatcttgtaaatcccatggcaatagaaaatgaacctgtaggttttcaaggctgtatccgacaagttatcataaataatcaagaattacaattaactgaatttggagcaaaaggtggctcaaatgtaggtgactgtgatgggacagcctgtgggtacaacacatgcagaaatggaggtgaatgtacagtaaatggcacaactttttcttgcagatgtttgccagattgggctggaaatacatgtaaccagtctgtgtcctgtttgaataatctttgcctccaccaatctttatgtatacctgaccaatcattttcttacagttgcctgtgtactttgggttgggtgggaaggtattgtgaaaacaaaacttcattttcaactgcaaaatttatgggtaattcttacattaaatacattgatccaaattatagaatgagaaacctccagttcactactatatccttaaatttcagtaccactaaaacagaaggtctaattgtatggatgggaatagctcaaaatgaagaaaatgattttctggcaattggtctccataatcagaccttgaaaatagcagttaacttgggagaaagaatctctgtgcctatgagctataacaatggcacattctgttgtaataaatggcaccatgtagttgtaattcaaaatcagactcttatcaaggcctacataaataacagtctaattctttccgaggatattgatccacataaaaactttgtggctctaaactatgatggcatttgttatctagggggctttgaatatggtagaaaggtaaatatcgttactcaagagatttttaaaaccaattttgttggcaaaattaaagatgttgtattttttcaggaaccaaaaaacattgaactaattaaattagaaggatacaatgtttatgatggagatgaacaaaatgaggttacataagttaacactagagattttagtacacactatacataaatgcagttattttgatagttatttctttgatacattgcttacggggaatcaactgtttactatattacctgaaatagtctaaatgctaacatatctttttgataagattgtaaaatgtcactgaaggttctgattgtttttcctacatctaatttatctgtatatattttgattcatgttttaactccattagttcagtgcttattcacagaatgtgcttattcactttgcttattcactttttacctatccctaatgcttacattttaaaatcaacgtgtaaacacaattttaaaaatcaatgtgtaagctgaactttaaaatgtttaaaattcagttgggaatgaattagggataggtacaaataagaaaaaaatcaagttattaatcaaaggaaaaataaaaattatacaaagcaatgtaaccatattgtattacatggcttagctacaacttatttatatgattcaacaatgtaaaacttgaacatagatttaaaccaaaaattattgcatgaatgtagaaagagaaggtgagaggagaggagaacaggctggtaagagctaaatccttatctttt

SEQ ID NO: 10252 - DNA, 2168 bp, Homo sapiens
  source 1..2168: mol_type = unassigned DNA
gtgttttttgaaaactaatcagaagaggaatgcttatctcccaagaaaattgaaaccatctgtaaaagaatcttggctgtgctgtgttttgattagattgaagcttggtgtaaagagaaaacacaaaagaccgcagaatatttacaacatttgaattcctgtttctccatcaaagcacattgtcatcaaagctactttgggtatagaaaaaaggtcaattccaattcccaggaatccttaaccacaactttacttggaaatttccggtaatacttaaaacaccattttgcagcaattctttatgataaactgtaaaatacagctacccgaaaatgactgacaaatcaatcgtcattctgagcctgatggtttttcacagctctttcataaatggaaaaacatgtagacggcaattggtggaagaatggcatccacaaccctcatcatatgtggtaaattggacactaacagaaaacatctgcttggacttctacagagattgctggtttttgggtgtaaacactaaaatagatacttcaggcaatcaagctgttccccagatttgccctttgcaaattcaattaggagatatccttgtaatttcttctgaaccatctcttcaatttccagaaataaatttgatgaatgtttctgaaacatctttcgttggctgtgtgcaaaataccacaacggaagatcagttactttttggctgcagactaaaaggaatgcacactgttaattctaagtggctgagtgttgggacacattattttatcacagttatggcaagtggtccatcaccttgtccactgggacttcgactaaatgtgacagtgaaacagcagttctgccaggaatctctgagttcagaattttgctctggtcatggtaaatgtcttagtgaagcttggagcaagacatatagctgccattgccagcctccattttctggaaaatactgccaggaacttgatgcatgttcttttaaaccatgtaaaaataatggcagttgcattaataaaagagaaaattgggatgagcaagcatatgaatgtgtctgtcacccaccatttacaggaaagaattgctcagaaataattggccagtgtcaaccacatgtctgtttccatggaaactgcagcaatattacttcaaatagtttcatttgtgaatgtgatgagcaattttcaggtccattctgtgaggtgtcagcaaaaccttgtgtttctctgcttttttggaaaagaggaatttgcccaaatagcagttctgcttatacttatgaatgcccaaaaggatcttccagccaaaatggtgaaactgatgtcagtgagttttcattagtaccatgtcagaatggtactgactgcatcaaaatatcaaatgatgttatgtgcatctgttcaccaatatttacagatttgctttgtaagagcattcaaacatcatgtgagtcatttcctttgaggaataatgctacatgtaagaaatgtgagaaagattatccttgcagctgtatatcaggatttactgaaaaaaactgtgagaaagcaattgaccactgtaaactgctcagcatcaactgtctgaatgaagaatggtgtttcaatataattggaagattcaaatatgtatgcattccagggtgcacaaaaaatccatgttggtttttgaagaatgtttacctaattcatcaacacctctgctactgtggagtcaccttccatggtatttgccaagataaaggtcctgctcaatttgaatatgtgtggcaattgggatttgcaggatctgaaggcgaaaagtgccaaggggttattgatgcctatttctttctggctgcaaactgcactgaagatgcaacctatgtgaacgatcctgaagataataattcttcatgttggttcccacatgaaggcacaaaagagatttgtgcaaatggatgcagttgtttgagtgaagaagacagtcaggaatatcggtatctatgttttctcagatgggctggcaacatgtatctggaaaatacaactgatgatcaagaaaatgagtgtcaacatgaagctgtttgtaaagatgaaattaatagacccaggtatttatgtatcatttgagcagataatatcacatatcaaaaagttataattaaattgatagtcatcgaa

SEQ ID NO: 10253 - DNA, 5450 bp, Homo sapiens
  source 1..5450: mol_type = unassigned DNA
agaaacaaagtgatacacgctaggcatgtccagacattaaccgtaatcagaagcctcctagggttgcaagcctccttggctaatggttgggctttgtgcctcactcttctcttacacctggggagtcaagtctggatcctctgctccatatttatttagcaaataaaacactgatctcaaacagcaacggaacctgtgtacttgaggtgttttttgaaaactaatcagaagaggaatgcttatctcccaagaaaattgaaaccatctgtaaaagaatcttggctgtgctgtgttttgattagattgaagcttggtgtaaagagaaaacacaaaagaccgcagaatatttacaacatttgaattcctgtttctccatcaaagcacattgtcatcaaagctactttgggtatagaaaaaaggtcaattccaattcccaggaatccttaaccacaactttacttggaaatttccggtaatacttaaaacaccattttgcagcaattctttatgataaactgtaaaatacagctacccgaaaatgactgacaaatcaatcgtcattctgagcctgatggtttttcacagctctttcataaatggaaaaacatgtagacggcaattggtggaagaatggcatccacaaccctcatcatatgtggtaaattggacactaacagaaaacatctgcttggacttctacagagattgctggtttttgggtgtaaacactaaaatagatacttcaggcaatcaagctgttccccagatttgccctttgcaaattcaattaggagatatccttgtaatttcttctgaaccatctcttcaatttccagaaataaatttgatgaatgtttctgaaacatctttcgttggctgtgtgcaaaataccacaacggaagatcagttactttttggctgcagactaaaaggaatgcacactgttaattctaagtggctgagtgttgggacacattattttatcacagttatggcaagtggtccatcaccttgtccactgggacttcgactaaatgtgacagtgaaacagcagttctgccaggaatctctgagttcagaattttgctctggtcatggtaaatgtcttagtgaagcttggagcaagacatatagctgccattgccagcctccattttctggaaaatactgccaggaacttgatgcatgttcttttaaaccatgtaaaaataatggcagttgcattaataaaagagaaaattgggatgagcaagcatatgaatgtgtctgtcacccaccatttacaggaaagaattgctcagaaataattggccagtgtcaaccacatgtctgtttccatggaaactgcagcaatattacttcaaatagtttcatttgtgaatgtgatgagcaattttcaggtccattctgtgaggtgtcagcaaaaccttgtgtttctctgcttttttggaaaagaggaatttgcccaaatagcagttctgcttatacttatgaatgcccaaaaggatcttccagccaaaatggtgaaactgatgtcagtgagttttcattagtaccatgtcagaatggtactgactgcatcaaaatatcaaatgatgttatgtgcatctgttcaccaatatttacagatttgctttgtaagagcattcaaacatcatgtgagtcatttcctttgaggaataatgctacatgtaagaaatgtgagaaagattatccttgcagctgtatatcaggatttactgaaaaaaactgtgagaaagcaattgaccactgtaaactgctcagcatcaactgtctgaatgaagaatggtgtttcaatataattggaagattcaaatatgtatgcattccagggtgcacaaaaaatccatgttggtttttgaagaatgtttacctaattcatcaacacctctgctactgtggagtcaccttccatggtatttgccaagataaaggtcctgctcaatttgaatatgtgtggcaattgggatttgcaggatctgaaggcgaaaagtgccaaggggttattgatgcctatttctttctggctgcaaactgcactgaagatgcaacctatgtgaacgatcctgaagataataattcttcatgttggttcccacatgaaggcacaaaagagatttgtgcaaatggatgcagttgtttgagtgaagaagacagtcaggaatatcggtatctatgttttctcagatgggctggcaacatgtatctggaaaatacaactgatgatcaagaaaatgagtgtcaacatgaagctgtttgtaaagatgaaattaatagacccagaagaatcctcaacacggtgataccacaccaaattcagcaacatatagaaaggtttatacagcatgaccaggtgggatttatcgtaagaatataagtttgatttagtggcttaaaatcaattaatgtaatttaatgtatcaatagaataaataaagaagaaaatgcatgataatgtagatggagaaaaaaattgtattacagaatctcacaacactttatgaaacaaacactcaacaaataaagaataaaagggaacttccacaatctgataagagaagttaaaaaaaaataagaagaatgaagaaacataactaacattatactttacggtgaaaggctgaaagactggaattttaaatcaaaacaatgagataacactttacacccagcaattctacttctagtatatactcaaaaaattgaaaatatatgttctttacaaaaatttatatgtgaatgtttacagttttgttcgaaagagtcaaaaagttgaaacaacccaaatgaccatcaactgatgaatggatatataaaatttgttatatccatacaatgaaatgttattcagcaatagacaaagatgaattactgatatgtgcttcaatacgaataaacattgaaaacattttgataaggaaaagtagtaagccacaaaagacacatagaatagtgctcaacaaatacttgtttaatgaaacaatgattttcagaagcttttttatttactaagaaaattatccttcgttttgtgatgttatttccttttttctgattttgtgattctcttttgtttgccattattttttgatatccagagaatcttggataaattacaaaatttttgtaatttatcaacactttaatgagttcttgatattgtctcataattaatactaacaatggagcccaacaaatgttgcagatacaagtattttatataaaattaagtttctctatatcagttgcaatatctagaaattatatgtgtgataccacctgttataatgtcaaaagatatgcaaaatgtttagaattaaaaaaaagatgctctaattctccattaaaaagaccctctatataccactaagctcaatgaaaaagagaaaattatatatacactgaataaatggaaatataatgcatggagttaaatattaggccttaaattagctaaaatattaattcttcccaaattaattcacacatttaatgcaatagtaaaaatattgcaagttattttagaaactaattatcatgttatatatatttatgaataatattttctaaattatgaagtcatctttgaaaaggaagactaatggggtgggatctgatgaaccatatgacatgacagactacataacacatatgggtgcctttaaaggaaaaaaaataataatgggtcaacagagagctctgacaacaacccgagtatatacgggaactcaatatatgagaaatttggctataatctcatttgaacatacagggttctttagtaaatggtattgaggaaatggctcataataagaccttaaatgaaactggattacaaccttataccttatatagaagtagactctaaatgtgtatagggatctaaaagtttaaggtaaaatgacgatataaatgaaagaaatgtagaaaaatatctttgtgatttcgggatggagaaatttttcaattaaactcaatttataaggcaaaataatgatagtattataatgatagacactaataatgttgatgatgttaacggacacaaagttaatgaatagcgtataaacattttcttttaaagtgtattttaaatgggtgcagattaaaattcattatataaatgatgtattgcaaacaggtctgcatattaccacatttttttgccctgaaatcttcaaaaaatttttctgggggtttataaaatgtttaatgagccaaagactaaatcataccagccatattgttacttaagaccaggaaagatttgctaagtctgggatgttaatttcttaataccatgcccagactgtgaagtgttcatgactcccacctgtttttgaagcctcaaatttatgtctaagtcaccaatccctacttgctaccagaaatatcataacagaatgaaatatattcattcatacatttattatttattgaatctcctctaactggaagatatttttcaaaatgttatgacaatgagacatgatacctgtccccaggtaatgtactatacataggtaagattatacactcttcagaacacatctcatggttcttctgtttcatttagaaagtgaacacatttttaaagtactaaagtaattatttttttcactttctgaacatacaagttgcttgattatagcagtgtgtcttctggctttctttctggaagttttaaatttaacctgtttcctttacaggctattttaggagattcacattttctgtgtaatgttaaatatatccaaaacataattttcagttataagtaagagttctgtttcaaagtgtagaatctaaaagtccataagaaaatcaggtgaagtttcaaaaactatttctgtagagtcaggaggcttgtaaaaatagagctttatgtgaatatggcacaaaagtatagtataatttgaccaggattttcttaaattatttctgatcccaaaagtctaataattatttattctaagactattgtaatttctgccgtgatgtccgtgattttattaacaagttgaatagttggttttaggtttatttatttattttggctatactatgcaaacttttctgccttcaagtaaaagttttatgtgggtatatttttacctttaaagcaaaaaagatatcgaactgcatatgaaagtgtcatattgaatgtatttttgggttggggccagtcttgaaaccactagatcaagtgtctaaatctttttgtctaaggcacttacatacactgatatattttctctctttattatgctctagaaaaccaaataatcttggttcttaaatccttatagtaaaatgatatagaaatcattcatttaagcaattctagagtacatatcattgtattacccatacacataccaaaattattataacaaacttcattaaatgaagcatttttgaataataaa

SEQ ID NO: 10254 - DNA, 2160 bp, Homo sapiens
  source 1..2160: mol_type = unassigned DNA
gccggtgaaggggcagaacaggcaggtgagagtctaagagggctcagtaatctgaagcttggtgggaagaagggattctgggctagaaagggtgcagaagcctgaagtagaaagagacgggattttggtccggggtggagagcgaatgcattgaaaagggccaaggcccaggataaggtagacatttaaaggggtacggatgcccaaggtagagcagacacttgaggagaccagctcagcaaacggaagacacttaaagtggtaggttctcaagagagaagaagtttttaagactagagctaagcaagacatttaaaaggacatgggttgggatttgggaacacgtttattccagaggcaggaacaaaggagtcgcttgtcaaggatctggttagagaagactagggtcttcctcgaaggaagcacgcgcacgcctgctctcccccattgtcttttctggcttctccaggttccctcgacccaggaccccctgttcccaggctatggcccccagtgccctgtagacctggcaggccccccgtgcttgcgacccctatttgggggtctgggtggctactggagggccttgcagaggggcagagaaggcaggaccatgacatctagggcctctgaactttctccggggcgcagcgtgacggctggcatcatcattgttggagatgagatccttaagggacacactcaggacaccaacaccttctttctgtgccggacactgcgctccctaggggtccaggtttgccgagtctcagttgtacctgatgaggtagccaccattgcagctgaggtcacttctttctccaaccgcttcacccatgtcctcacagcagggggcatcggccccactcatgatgatgtgacctttgaggcagtggcacaggcctttggagatgagctgaagccacaccccaagttggaagcagccaccaaagccctaggaggggaaggctgggagaagctatcattggtgccctcctctgcccgcctgcattatggcacagatccttgcactggtcaacctttcagattccctctggtctccgtccgaaacgtctacctcttcccaggcattccagagctgctgcggcgggtgctggaggggatgaagggactattccaaaacccagctgttcagttccactcaaaggagctatatgtggctgctgatgaagcctccatcgcccccattctggctgaggcccaggcccactttggacgtaggcttggcctgggttcctaccctgactggggcagcaactactatcaggtgaagctgactctagactcagaggaagaaggacccctggaggaatgcttggcctacctgactgcccgtttgccccagggatcgctggtcccctacatgcccaacgctgtggagcaggccagtgaggctgtatacaaactcgctgaatcagggtcttctttggggaaaaaggtggcaggtgccctacagaccattgagacctccctggctcagtacagcctcacccagctctgtgtgggcttcaacgggggcaaagactgcactgccctcctgcacctcttccatgcagctgtgcagaggaaattacctgatgttccaaaccccctccagatcctgtatatccgcagcatctcccctttccctgagctggaacagtttctacaggacactatcaagaggtataatctgcagatgttggaagctgagggcagcatgaagcaggccctgggtgaactgcaggcacggcacccccagctggaggctgtccttatgggcacccgccggactgacccctactcctgtagcctctgccctttcagccccactgacccaggctggcccgcattcatgcgcatcaacccactgctggactggacctacagagacatctgggattttctgcgtcagctgtttgtcccatactgtatcctgtatgaccgaggatacacatcactggggagtcgggagaataccgtgcggaacccggccctgaagtgcctgagcccaggaggacaccccacataccgtccagcctatctactggagaacgaagaagaggagcggaactcccgcacatgacctcccaccctaggagggagggaaggacaccgtcctagggtataacctggcaataaaccgtgcctctcactgtg

SEQ ID NO: 10255 - DNA, 1211 bp, Homo sapiens
  source 1..1211: mol_type = unassigned DNA
cttcatccctacagtactgatggcctcatcttccccttcaacccccagggacacactcaggacaccaacaccttctttctgtgccggacactgcgctccctaggggtccaggtttgccgagtctcagttgtacctgatgaggtagccaccattgcagctgaggtcacttctttctccaaccgcttcacccatgtcctcacagcagggggcatcggccccactcatgatgatgtgacctttgaggcagtggcacaggcctttggagatgagctgaagccacaccccaagttggaagcagccaccaaagccctaggaggggaaggctgggagaagctatcattggtgccctcctctgcccgcctgcattatggcacagatccttgcactggtcaacctttcagattccctctggtctccgtccgaaacgtctacctcttcccaggcattccagagctgctgcggcgggtgctggaggggatgaagggactattccaaaacccagctgttcagttccactcaaaggagctatatgtggctgctgatgaagcctccatcgcccccattctggctgaggcccaggcccactttggacgtaggcttggcctgggttcctaccctgactggggcagcaactactatcaggtgaagctgactctagactcagaggaagaaggacccctggaggaatgcttggcctacctgactgcccgtttgccccagggatcgctggtcccctacatgcccaacgctgtggagcaggccagtgaggctgtatacaaactcgctgaatcaggaaattacctgatgttccaaaccccctccagatcctgtatatccgcagcatctcccctttccctgagctggaacagtttctacaggacactatcaagagagcaagctataccagagaatcagatagcaagccctccctcagaggccaagggagcagaagagccatggatgggccccttcccaggacagcaggggtagaagtgggaaagatacacatcactggggagtcgggagaataccgtgcggaacccggccctgaagtgcctgagcccaggaggacaccccacataccgtccagcctatctactggagaacgaagaagaggagcggaactcccgcacatgacctcccaccctaggagggagggaaggacaccgtcctagggtataacctggcaataaaccgtgcctctcactgtg

SEQ ID NO: 10256 - DNA, 1730 bp, Homo sapiens
  source 1..1730: mol_type = unassigned DNA
gaacaagggaaagagccggtgaaggggcagaacaggcaggttccctcgacccaggaccccctgttcccaggctatggcccccagtgccctgtagacctggcaggccccccgtgcttgcgacccctatttgggggtctgggtggctactggagggccttgcagaggggcagagaaggcaggaccatgacatctagggcctctgaactttctccggggcgcagcgtgacggctggcatcatcattgttggagatgagatccttaagggacacactcaggacaccaacaccttctttctgtgccggacactgcgctccctaggggtccaggtttgccgagtctcagttgtacctgatgaggtagccaccattgcagctgaggtcacttctttctccaaccgcttcacccatgtcctcacagcagggggcatcggccccactcatgatgatgtgacctttgaggcagtggcacaggcctttggagatgagctgaagccacaccccaagttggaagcagccaccaaagccctaggaggggaaggctgggagaagctatcattggtgccctcctctgcccgcctgcattatggcacagatccttgcactggtcaacctttcagattccctctggtctccgtccgaaacgtctacctcttcccaggcattccagagctgctgcggcgggtgctggaggggatgaagggactattccaaaacccagctgttcagttccactcaaaggagctatatgtggctgctgatgaagcctccatcgcccccattctggctgaggcccaggcccactttggacgtaggcttggcctgggttcctaccctgactggggcagcaactactatcaggtgaagctgactctagactcagaggaagaaggacccctggaggaatgcttggcctacctgactgcccgtttgccccagggatcgctggtcccctacatgcccaacgctgtggagcaggccagtgaggctgtatacaaactcgctgaatcagggtcttctttggggaaaaaggtggcaggtgccctacagaccattgagacctccctggctcagtacagcctcacccagctctgtgtgggcttcaacgggggcaaagactgcactgccctcctgcacctcttccatgcagctgtgcagaggaaattacctgatgttccaaaccccctccagatcctgtatatccgcagcatctcccctttccctgagctggaacagtttctacaggacactatcaagaggtataatctgcagatgttggaagctgagggcagcatgaagcaggccctgggtgaactgcaggcacggcacccccagctggaggctgtccttatgggcacccgccggactgacccctactcctgtagcctctgccctttcagccccactgacccaggctggcccgcattcatgcgcatcaacccactgctggactggacctacagagacatctgggattttctgcgtcagctgtttgtcccatactgtatcctgtatgaccgaggatacacatcactggggagtcgggagaataccgtgcggaacccggccctgaagtgcctgagcccaggaggacaccccacataccgtccagcctatctactggagaacgaagaagaggagcggaactcccgcacatgacctcccaccctaggagggagggaaggacaccgtcctagggtataacctggcaataaaccgtgcctctcactgtg

SEQ ID NO: 10257 - DNA, 1111 bp, Homo sapiens
  source 1..1111: mol_type = unassigned DNA
gactattccaaaacccagctgttcagttccactcaaaggagctatatgtggctgctgatgaagcctccatcgcccccattctggctgaggcccaggcccactttggacgtaggcttggcctgggttcctaccctgactggggcagcaactactatcaggtgaagctgactctagactcagaggaagaaggacccctggaggaatgcttggcctacctgactgcccgtttgccccagggatcgctggtcccctacatgcccaacgctgtggagcaggccagtgaggctgtatacaaactcgctgaatcagggtcttctttggggaaaaaggtggcaggtgccctacagaccattgagacctccctggctcagtacagcctcacccagctctgtgtgggcttcaacgggggcaaagactgcactgccctcctgcacctcttccatgcagctgtgcagaggaaattacctgatgttccaaaccccctccagatcctgtatatccgcagcatctcccctttccctgagctggaacagtttctacaggacactatcaagaggtactaggggcctggaggtttgggctccaagagaagcttgacagagcccacgcccgacccctacttctgtttcttcctaaggtataatctgcagatgttggaagctgagggcagcatgaagcaggccctgggtgaactgcaggcacggcacccccagctggaggctgtccttatgggcacccgccggactgacccctactcctgtagcctctgccctttcagccccactgacccaggctggcccgcattcatgcgcatcaacccactgctggactggacctacagagacatctgggattttctgcgtcagctgtttgtcccatactgtatcctgtatgaccgaggatacacatcactggggagtcgggagaataccgtgcggaacccggccctgaagtgcctgagcccaggaggacaccccacataccgtccagcctatctactggagaacgaagaagaggagcggaactcccgcacatgacctcccaccctaggagggagggaaggacaccgtcctagggtataacctggcaataaaccgtgcctctcactgtg

SEQ ID NO: 10258 - DNA, 1803 bp, Homo sapiens
  source 1..1803: mol_type = unassigned DNA
gaaagagccggtgaaggggcagaacaggcaggttccctcgacccaggaccccctgttcccaggctatggcccccagtgccctgtagacctggcaggccccccgtgcttgcgacccctatttgggggtctgggtggctactggagggccttgcagaggggcagagaaggcaggaccatgacatctagggcctctgaactttctccggggcgcagcgtgacggctggcatcatcattgttggagatgagatccttaagttggaaacaacaaatggcttttgagtccaagagtgatgcaatcacagtgacgcattaaaacggttactccggagacatcagagcactgtggctggaggctgggagcctggccaggaagctgtcgccattgtccaggtgaaaggtgctaaggacctgcttggtggcagtggggacagaaagaagaaagcaggccaggcgtggtggctcacacctataattccagcactttgggaggctgaggcaggaggatcacttgagaccaggaattcaacaccagcctgggcaacatggcaagaccccatttctacaaaaaaaatttaaaatgagctgaatgtggtggcacgcgcctgtagtcccagctactcggaaggctggggtggcccttgaagccaggaggttgaggctgcagtgaactgtgactgagccactatactccagcctgggtgacagagacccagctttaaaaccaaacaaatggattttcccactcttgtgtccagtccaggcccctcagcagcctgaggtggtgtccttcaaagagcagagcactgcatcatcaggtggatgcagccatcatcttcaacccctccccttcatccctacagtactgatggcctcatcttccccttcaacccccagggacacactcaggacaccaacaccttctttctgtgccggacactgcgctccctaggggtccaggtttgccgagtctcagttgtacctgatgaggtagccaccattgcagctgaggtcacttctttctccaaccgcttcacccatgtcctcacagcagggggcatcggccccactcatgatgatgtgacctttgaggcagtggcacaggcctttggagatgagctgaagccacaccccaagttggaagcagccaccaaagccctaggaggggaaggctgggagaagctatcattggtgccctcctctgcccgcctgcattatggcacagatccttgcactggtcaacctttcagattccctctggtctccgtccgaaacgtctacctcttcccaggcattccagagctgctgcggcgggtgctggaggggatgaagggactattccaaaacccagctgttcagttccactcaaaggagctatatgtggctgctgatgaagcctccatcgcccccattctggctgaggcccaggcccactttggacgtaggcttggcctgggttcctaccctgactggggcagcaactactatcaggtgaagctgactctagactcagaggaagaaggacccctggaggaatgcttggcctacctgactgcccgtttgccccagggatcgctggtcccctacatgcccaacgctgtggagcaggccagtgaggctgtatacaaactcgctgaatcaggtagggaccttatggaggaggggcattatgcccaaagccattggtggcaccccagatctcagtaatgcaggggctgttgggtgcttcctgcaaatccctgagagggcagaagatagcttctgttaattcattattcttccaataaatgttgattgagtaccta

SEQ ID NO: 10259 - DNA, 1839 bp, Homo sapiens
  source 1..1839: mol_type = unassigned DNA
gggaaagagccggtgaaggggcagaacaggcaggttccctcgacccaggaccccctgttcccaggctatggcccccagtgccctgtagacctggcaggccccccgtgcttgcgacccctatttgggggtctgggtggctactggagggccttgcagaggggcagagaaggcaggaccatgacatctagggcctctgaactttctccggggcgcagcgtgacggctggcatcatcattgttggagatgagatccttaagggacacactcaggacaccaacaccttctttctgtgccggacactgcgctccctaggggtccaggtttgccgagtctcagttgtacctgatgaggtagccaccattgcagctgaggtcacttctttctccaaccgcttcacccatgtcctcacagcagggggcatcggccccactcatgatgatgtgacctttgaggcagtggcacaggcctttggagatgagctgaagccacaccccaagttggaagcagccaccaaagccctaggaggggaaggctgggagaagctatcattggtgccctcctctgcccgcctgcattatggcacagatccttgcactggtcaacctttcagattccctctggtctccgtccgaaacgtctacctcttcccaggcattccagagctgctgcggcgggtgctggaggggatgaagggactattccaaaacccagctgttcagttccactcaaaggagctatatgtggctgctgatgaagcctccatcgcccccattctggctgaggcccaggcccactttggacgtaggcttggcctgggttcctaccctgactggggcagcaactactatcaggtgaagctgactctagactcagaggaagaaggacccctggaggaatgcttggcctacctgactgcccgtttgccccagggatcgctggtcccctacatgcccaacgctgtggagcaggccagtgaggctgtatacaaactcgctgaatcagggtcttctttggggaaaaaggtggcaggtgccctacagaccattgagacctccctggctcagtacagcctcacccagctctgtgtgggcttcaacgggggcaaagactgcactgccctcctgcacctcttccatgcagctgtgcagaggaaattacctgatgttccaaaccccctccagatcctgtatatccgcagcatctcccctttccctgagctggaacagtttctacaggacactatcaagaggtataatctgcagatgttggaagctgagggcagcatgaagcaggccctgggtgaactgcaggcacggcacccccagctggaggctgtccttatgggcacccgccggactgacccctactcctgtagcctctgccctttcagccccactgacccaggctggcccgcattcatgcgcatcaacccactgctggactggacctacagagacatctgggattttctgcgtcagctgtttgtcccatactgtatcctgtatgaccgagggtaagggtattaggggaagggaatgggtaagggagtttttagggtgctgggatagggagggccaataggatcgcccaccctaccacatgcttgccctccaccctccctgctccagatacacatcactggggagtcgggagaataccgtgcggaacccggccctgaagtgcctgagcccaggaggacaccccacataccgtccagcctatctactggagaacgaagaagaggagcggaactcccgcacatgacctcccaccctaggagggagggaaggacaccgtcctagggtataacctggcaataaaccgtgcctctcactgtg

SEQ ID NO: 10260 - DNA, 2656 bp, Homo sapiens
  source 1..2656: mol_type = unassigned DNA
aggaaaggaacaagggaaagagccggtgaaggggcagaacaggcaggtgagagtctaagagggctcagtaatctgaagcttggtgggaagaagggattctgggctagaaagggtgcagaagcctgaagtagaaagagacgggattttggtccggggtggagagcgaatgcattgaaaagggccaaggcccaggataaggtagacatttaaaggggtacggatgcccaaggtagagcagacacttgaggagaccagctcagcaaacggaagacacttaaagtggtaggttctcaagagagaagaagtttttaagactagagctaagcaagacatttaaaaggacatgggttgggatttgggaacacgtttattccagaggcaggaacaaaggagtcgcttgtcaaggatctggttagagaagactagggtcttcctcgaaggaagcacgcgcacgcctgctctcccccattgtcttttctggcttctccaggttccctcgacccaggaccccctgttcccaggctatggcccccagtgccctgtagacctggcaggccccccgtgcttgcgacccctatttgggggtctgggtggctactggagggccttgcagaggggcagagaaggcaggaccatgacatctagggcctctgaactttctccggggcgcagcgtgacggctggcatcatcattgttggagatgagatccttaagggacacactcaggacaccaacaccttctttctgtgccggacactgcgctccctaggggtccaggtttgccgagtctcagttgtacctgatgaggtagccaccattgcagctgaggtcacttctttctccaaccgcttcacccatgtcctcacagcagggggcatcggccccactcatgatgatgtgacctttgaggcagtggcacaggcctttggagatgagctgaagccacaccccaagttggaagcagccaccaaagccctaggaggggaaggctgggagaagctatcattggtgccctcctctgcccgcctgcattatggcacagatccttgcactggtcaacctttcagattccctctggtctccgtccgaaacgtctacctcttcccaggcattccagagctgctgcggcgggtgctggaggggatgaagggactattccaaaacccagctgttcagttccactcaaaggagctatatgtggctgctgatgaagcctccatcgcccccattctggctgaggcccaggcccactttggacgtaggcttggcctgggttcctaccctgactggggcagcaactactatcaggtgaagctgactctagactcagaggaagaaggacccctggaggaatgcttggcctacctgactgcccgtttgccccagggatcgctggtcccctacatgcccaacgctgtggagcaggccagtgaggctgtatacaaactcgctgaatcagggtcttctttggggaaaaaggtggcaggtgccctacagaccattgagacctccctggctcagtacagcctcacccagctctgtgtgggcttcaacgggggcaaagactgcactgccctcctgcacctcttccatgcagctgtgcagaggaaattacctgatgttccaaaccccctccagatcctgtatatccgcagcatctcccctttccctgagctggaacagtttctacaggacactatcaagaggtactaggggcctggaggtttgggctccaagagaagcttgacagagcccacgcccgacccctacttctgtttcttcctaaggtataatctgcagatgttggaagctgagggcagcatgaagcaggccctgggtgaactgcaggcacggcacccccagctggaggctgtccttatgggcacccgccggactgacccctactcctgtagcctctgccctttcagccccactgacccaggctggcccgcattcatgcgcatcaacccactgctggtaatggggaagagggtttatcaccttcagtctcacgtgccccagcagtcactgcaccctagctcacctgcagtagtggggaggctagagcctggaacctggatgaaggggcctcatcatccaagggaggcagtgctatctgttcattcatccttttgaccaatatttattgagcccaaattcaatagcaggcattgcacttcctactgtggatagaatagtgacttagacttgtgctgtccaatatagccattaattatttatttatacttaaattttaattaattagaatgaaatacatatgactaaaaaccactgaattatatactttaaaaggatgaatttgatggtatgtggatacctcaatttttaaaattaagtacaattaaaaattcagttctggctgggcgcagtggctcacgcctgtaatcccagcactttgggaggccatggtgggcagatcacttgaggccaggagttcgagaccagcctggccaacatggcgaaaccctgtctctactaaaaatacaaaaaattagccaggcgtggtggcctgtagtcctagttactcgagaggctgaggcaggagaattgcttgaacccaggagacggaggttgcagtgagctgagatggcaccactgtactccagcctgggcaacagaacaagactctgtctc

SEQ ID NO: 10261 - DNA, 1238 bp, Homo sapiens
  source 1..1238: mol_type = unassigned DNA
atgcagccatcatcttcaacccctccccttcatccctacagtactgatggcctcatcttccccttcaacccccagggacacactcaggacaccaacaccttctttctgtgccggacactgcgctccctaggggtccaggtttgccgagtctcagttgtacctgatgaggtagccaccattgcagctgaggtcacttctttctccaaccgcttcacccatgtcctcacagcagggggcatcggccccactcatgatgatgtgacctttgaggcagtggcacaggcctttggagatgagctgaagccacaccccaagttggaagcagccaccaaagccctaggaggggaaggctgggagaagctatcattggtgccctcctctgcccgcctgcattatggcacagatccttgcactggtcaacctttcagattccctctggtctccgtccgaaacgtctacctcttcccaggcattccagagctgctgcggcgggtgctggaggggatgaagggactattccaaaacccagctgttcagttccactcaaaggagctatatgtggctgctgatgaagcctccatcgcccccattctggctgaggcccaggcccactttggacgtaggcttggcctgggttcctaccctgactggggcagcaactactatcaggtgaagctgactctagactcagaggaagaaggacccctggaggaatgcttggcctacctgactgcccgtttgccccagggatcgctggtcccctacatgcccaacgctgtggagcaggccagtgaggctgtatacaaactcgctgaatcaggaaattacctgatgttccaaaccccctccagatcctgtatatccgcagcatctcccctttccctgagctggaacagtttctacaggacactatcaagagagcaagctataccagagaatcagatagcaagccctccctcagaggccaagggagcagaagagccatggatgggccccttcccaggacagcaggggtagaagtgggaaagatacacatcactggggagtcgggagaataccgtgcggaacccggccctgaagtgcctgagcccaggaggacaccccacataccgtccagcctatctactggagaacgaagaagaggagcggaactcccgcacatgacctcccaccctaggagggagggaaggacaccgtcctagggtataacctggcaataaaccgtgcctctcactgtg

SEQ ID NO: 10262 - DNA, 1970 bp, Homo sapiens
  source 1..1970: mol_type = unassigned DNA
gcgcggagcagtgacggctgcgataatagcgaggcagcagtgcagctttcagagggtccgggctcagaggggttatgattcggagggttctgccgcacggcatgggccggggcctcttgacccggaggccaggcacgcgcagaggaggcttttctctggactgggatggaaaggtgtctgagattaagaagaagatcaagtcgatcctgcctggaaggtcctgtgatctactgcaagacaccagccacctgcctcccgagcactcggatgtggtgatcgtgggaggtggggtgcttggcttgtctgtggcctattggctgaagaagctggagagcagacgaggtgctattcgagtgctagtggtggaacgggaccacacgtattcacaggcctccactgggctctcagtaggtgggatttgtcagcagttctcattgcctgagaacatccagctctccctcttttcagccagctttctacggaacatcaatgagtacctggccgtagtcgatgctcctcccctggacctccggttcaacccctcgggctacctcttgctggcttcagaaaaggatgctgcagccatggagagcaacgtgaaagtgcagaggcaggagggagccaaagtttctctgatgtctcctgatcagcttcggaacaagtttccctggataaacacagagggagtggctttggcgtcttatgggatggaggacgaaggttggtttgacccctggtgtctgctccaggggcttcggcgaaaggtccagtccttgggagtccttttctgccagggagaggtgacacgttttgtctcttcatctcaacgcatgttgaccacagatgacaaagcggtggtcttgaaaaggatccatgaagtccatgtgaagatggaccgcagcctggagtaccagcctgtggaatgcgccattgtgatcaacgcagccggagcctggtctgcgcaaatcgcagcactggctggtgttggagaggggccgcctggcaccctgcagggcaccaagctacctgtggagccgaggaaaaggtatgtgtatgtgtggcactgcccccagggaccaggcctagagactccgcttgttgcagacaccagtggagcctattttcgccgggaaggattaggtagcaactacctaggtggtcgtagccccactgagcaggaagaaccggacccggcgaacctggaagtggaccatgatttcttccaggacaaggtgtggccccatttggccctgagggtcccagcttttgagactctgaaggttcagagcgcctgggccggctattacgactacaacacctttgaccagaatggcgtggtgggcccccacccgctagttgtcaacatgtactttgctactggcttcagtggtcacgggctccagcaggcccctggcattgggcgagctgtagcagagatggtactgaagggcaggttccagaccatcgacctgagccccttcctctttacccgcttttacttgggagagaagatccaggagaacaacatcatctgagcatgtgtgctctgcactggctccactggcttgcatcctggctgtgttcacagccttgtttgctgcttccatcttccccagtactgtgccaggccttctccccctccccagtgtcctctcctctcaggcaggccattgcacccatatggctgggcaggcacaggcagtgaggccgaggccaatagcgagtgatgagcgggatcctaggactgatctgtagcccatgctgatgtcacccaccagggcaatccatctggaggcctgagcaccctggcccaggactggcttcatcctggcactgaccaggaaagactgcctctgaccctcttagcagacagagcccaggcatgggagcactctggggcagcctggctcaggtttattgattttcgtctgtttaccctatccattaatcaatacatgtaattaactcct

SEQ ID NO: 10263 - DNA, 1427 bp, Homo sapiens
  source 1..1427: mol_type = unassigned DNA
agtgcagctttcagagggtccgggctcagaggggttatgattcggagggttctgccgcacggcatgggccggggcctcttgacccggaggccaggcacgcgcagaggaggcttttctctggtattcacaggcctccactgggctctcagtaggtgggatttgtcagcagttctcattgcctgagaacatccagctctccctcttttcagccagctttctacggaacatcaatgagtacctggccgtagtcgatgctcctcccctggacctccggttcaacccctcgggctacctcttgctggcttcagaaaaggatgctgcagccatggagagcaacgtgaaagtgcagaggcaggagggagccaaagtttctctgatgtctcctgatcagcttcggaacaagtttccctggataaacacagagggagtggctttggcgtcttatgggatggaggacgaaggttggtttgacccctggtgtctgctccaggggcttcggcgaaaggtccagtccttgggagtccttttctgccagggagaggtgacacgttttgtctcttcatctcaacgcatgttgaccacagatgacaaagcggtggtcttgaaaaggatccatgaagtccatgtgaagatggaccgcagcctggagtaccagcctgtggaatgcgccattgtgatcaacgcagccggagcctggtctgcgcaaatcgcagcactggctggtgttggagaggggccgcctggcaccctgcagggcaccaagctacctgtggagccgaggaaaaggtatgtgtatgtgtggcactgcccccagggaccaggcctagagactccgcttgttgcagacaccagtggagcctattttcgccgggaaggattaggtagcaactacctaggtggtcgtagccccactgagcaggaagaaccggacccggcgaacctggaagtggaccatgatttcttccaggacaaggtgtggccccatttggccctgagggtcccagcttttgagactctgaaggttcagagcgcctgggccggctattacgactacaacacctttgaccagaatggcgtggtgggcccccacccgctagttgtcaacatgtactttgctactggcttcagtggtcacgggctccagcaggcccctggcattgggcgagctgtagcagagatggtactgaagggcaggttccagaccatcgacctgagccccttcctctttacccgcttttacttgggagagaagatccaggagaacaacatcatctgagcatgtgtgctctgcactggctccactggcttgcatcctggctgtgttcacagccttgtttgctgcttccatcttccccagtactgtgccaggccttctccccctccccagtgtcctctcctctcaggcaggccattgcacccatatggct

SEQ ID NO: 10264 - DNA, 1825 bp, Homo sapiens
  source 1..1825: mol_type = unassigned DNA
gattcggagggttctgccgcacggcatgggccggggcctcttgacccggaggccaggcacgcgcagaggaggcttttctctgggtaaagttgaggacgacagagggtattgtggttctgggttgtccccaacctccgactgtgtgtccttcaggacccgaaaccatggcccacactggcaggacagtgggtcggcttggggaaggggactgggatggaaaggtgtctgagattaagaagaagatcaagtcgatcctgcctggaaggtcctgtgatctactgcaagacaccagccacctgcctcccgagcactcggatgtggtgatcgtgggaggtggggtgcttggcttgtctgtggcctattggctgaagaagctggagagcagacgaggtgctattcgagtgctagtggtggaacgggaccacacgtattcacaggcctccactgggctctcagtaggtgggatttgtcagcagttctcattgcctgagaacatccagctctccctcttttcagccagctttctacggaacatcaatgagtacctggccgtagtcgatgctcctcccctggacctccggttcaacccctcgggctacctcttgctggcttcagaaaaggatgctgcagccatggagagcaacgtgaaagtgcagaggcaggagggagccaaagtttctctgatgtctcctgatcagcttcggaacaagtttccctggataaacacagagggagtggctttggcgtcttatgggatggaggacgaaggttggtttgacccctggtgtctgctccaggggcttcggcgaaaggtccagtccttgggagtccttttctgccagggagaggtgacacgttttgtctcttcatctcaacgcatgttgaccacagatgacaaagcggtggtcttgaaaaggatccatgaagtccatgtgaagatggaccgcagcctggagtaccagcctgtggaatgcgccattgtgatcaacgcagccggagcctggtctgcgcaaatcgcagcactggctggtgttggagaggggccgcctggcaccctgcagggcaccaagctacctgtggagccgaggaaaaggtatgtgtatgtgtggcactgcccccagggaccaggcctagagactccgcttgttgcagacaccagtggagcctattttcgccgggaaggattaggtagcaactacctaggtggtcgtagccccactgagcaggaagaaccggacccggcgaacctggaagtggaccatgatttcttccaggacaaggtgtggccccatttggccctgagggtcccagcttttgagactctgaaggttcagagcgcctgggccggctattacgactacaacacctttgaccagaatggcgtggtgggcccccacccgctagttgtcaacatgtactttgctactggcttcagtggtcacgggctccagcaggcccctggcattgggcgagctgtagcagagatggtactgaagggcaggttccagaccatcgacctgagccccttcctctttacccgcttttacttgggagagaagatccaggagaacaacatcatctgagcatgtgtgctctgcactggctccactggcttgcatcctggctgtgttcacagccttgtttgctgcttccatcttccccagtactgtgccaggccttctccccctccccagtgtcctctcctctcaggcaggccattgcacccatatggctgggcaggcacaggcagtgaggccgaggccaatagcgagtgatgagcgggatcctaggactgatctgtagcccatgctgatgtcacccacca

SEQ ID NO: 10265 - DNA, 3933 bp, Homo sapiens
  source 1..3933: mol_type = unassigned DNA
ggagcggctgggaggttcgcgcgtttctcagggttcggtcggaggcggggaggccggagctgcgggcgtagggacctggcggctcctgaagcgcacgcgggcgggcggcaggatgggcctctccgctgcggccccgttgtggggtcccccggggctgctcctggccatcgccctgcacccagcgctgtcggtgcccccgcgccgggactactgcgtgctgggcgctgggcccgcgggcctgcagatggcctacttcctgcagcgcgctggacgcgactacgcagtgttcgagcgggccccgcggcccggcagcttcttcacacgctacccgcggcaccgcaagctcatcagcatcaacaagcggtacacgggcaaggctaacgccgagttcaacctccgccacgactggaactctctgctcagccacgacccccggctgctcttcagacactactcgcgtgcctacttccccgacgcccgcgacatggtgcgctacctgggtgacttcgcggacacgctggggctccgtgtccagtacaacaccaccatcgcccacgtcactctggacaaggaccgacaggcctggaatggccactacttcatcctaactgaccagaagggccaggtgcatcagtgcagcgtcctctttgtagccactggtttatcagtccccaaccaggttgacttccctggctccgaatatgcagagggttacgagtccgtgtccgtggaccctgaggactttgtaggccagaatgtgctgatcctgggtcgtgggaactcggcctttgagacagcagagaacatcttgggtgtcacaaactttatccatatgctcagccgctcccgggtccgtctgtcctgggccacccactacgttggagacctcagagccatcaacaatggcctgctggatacctaccagctcaagtccctggacgggctgctcgagtctgacctgacggatctggccatcctgaaggacagcaaaggcaagttccatgtcaccccgaaattcttcctggaagaagccaacaccaaccagagtgccgactccatcaccctcccccaggacgacaatgacaactttgccatgcgcgtgccctatgaccgggtaatccgctgcctgggctggaactttgacttctccattttcaataagtccctcagacttaactcgggaaatgcattcggcaagaagtacccgctgattcgagctagctacgaatccaaaggaagccggggtctgtttatcctgggtactgccagccactcggtggactaccggaaatctgctgggggcttcatccacggattccgatacacagtgcgtgctgttcaccggctcctggagcaccgccaccacagcgtcacctggcccgccactgagctccccatcacacagctgaccagctccatcgtgcggcgcgtgaatgaggcttctgggctctaccagatgttcggtgtgctggccgatgtcatcctgttgaaggagaattccacggcctttgagtacctggaggagttccccatacagatgctggcccagctggagacactcacagggaggaaggcaaagcacgggctcttcgtcatcaacatggaatatggcagaaatttctctggccccgacaaggacgtcttctttgatgaccggtctgtggggcacacagaagatgcctggcagtctaactttcttcatcctgtcatctactactatagatacctccccaccgaacaggaggtgaggttccgccctgcacactggcccctgcctcggcccacggccatccatcacatcgtggaagacttcttaacagactggactgccccgatcgggcacatcctacctctgaggcgcttcctggagaactgtttggacaccgatttgcgaagcttctatgcagagtcctgcttcctgttcgccctcacgcgccagaagttgccacccttttgccagcaggggtacctgaggatgcagggactcgtgagtaccgagagcctttggcagcacagagtggagagcaggctcctgcgggactatgcccccacaggcaggcgcctggaggacagcagccagcagcttggcgaccaagagccactaggttcccccctggctccagggcctctggctcagtccgtcgatagcaacaaagaggagctctgactgtcccttcctaagctgtgggcacagtggccaggcctccccacctaggcccatggtcagtccctctttccccgcaacctcacactcccgccaatgcgtgattgccaaagaccactcagatcatggcagtgtctgcagcaaagccaccagatggcacgtgagggctgaaagtcggggatgcggtggtctcctccctcctgtcagggggcagaagggcatcctctgccaggtgggagctgccttccccagcccagtttgtctgcaatggagctgtcgctgagccccaggccagcccagttctgccccgtctcaagtgctcctcttccttccaagcccctcctcagatgggcctgcatcccgcctgtggagtgcttcacaggggaaacccatccgcatcttaagagtttgtggcaagcgctttaaaacaaaagctctgatatcctcaacaaccacaatgggcaggtgggattgttgccccagatgactgctgaagacaccagctgtgggatgtcaagtaattccagggacccccagctgggagtccccgtctgtgtcacttgccacacactgcctcaacctccccgccccattttcagcagggtttgggcttagctacagagcccaagagggtcagccctgcttatcatcataggcccagcaggctgatctcgagcagcgataggacagctccctgcaaagccatcttagcaactttctcactgagaagcaggattcagagctgctctccccagttgcaccccctgactcatcttccagctggctcttctctcccatcctactcccttctgtctccctgccctctgccatcctgaaccatgccttgcttctaacctgcctggtcaagttttgtgaaacttatcctgctgtctcgggctggcacccatatgtgctcaccatgtgtaaggtgacatttccaaatgcctttgtgtgataatgatgatgaatttggttcctagtctcttcttcattgcccttcctcaccagcaatctgcactttcccatcaggcgtcttagtctcatttgtaagtgcataagataatcacagtgatttttcaaagcccaggatcataagtgattgctttttcactggttcttactaactcttcatgtatccactcagaattccaaggacaatcccagcactctgggaggcccaggcaggtggatcacctgaggtcaggagtttgagaccagcctgaccaacatggagaaaccctatctctactaaaaatacaaaactagccaggcgtggtagcacatgtctataatcccagctactggagaggctgaggcaggagaatcacttaaacccgggaggcagaggttgcagtgagccgagattgcgccattgcactccagcctaggtaacaagagggaaactccatctcaaaaaataagttaattaaattaaattaaaataaaacatgcgctgggtacagttgcttacacctgtaatcccagcactttgggaggccaaagtgggccgatcacctgagctcaggaattcgagaccagcctggccaacatagcaaaaccttgtctctactaacggtaaaaaaaattagctgggcatggtggagcatgcctgtcatcccagctacttgggaagctgaggcaggagaattgcttgaacctgggaggtggaggttgcagtgagcagagaccgagccactgtactccagcctaggtgacaaagcaagacccacagtaaagcccccacaccccatctcaaaaaaataaaaaat

SEQ ID NO: 10266 - DNA, 2184 bp, Homo sapiens
  source 1..2184: mol_type = unassigned DNA
tgacccagattgcagtgagagttcccgcaggccccgcctctttctgggcctcgtgtctcccagccgccgggccgggtgcgaggccttacccctctgatctgctgcaggatgggcctctccgctgcggccccgttgtggggtcccccggggctgctcctggccatcgccctgcacccagcgctgtcggtgcccccgcgccgggactactgcgtgctgggcgctgggcccgcgggcctgcagatggcctacttcctgcagcgcgctggacgcgactacgcagtgttcgagcgggccccgcggcccggcagcttcttcacacgctacccgcggcaccgcaagctcatcagcatcaacaagcggtacacgggcaaggctaacgccgagttcaacctccgccacgactggaactctctgctcagccacgacccccggctgctcttcagacactactcgcgtgcctacttccccgacgcccgcgacatggtgcgctacctgggtgacttcgcggacacgctggggctccgtgtccagtacaacaccaccatcgcccacgtcactctggacaaggaccgacaggcctggaatggccactacttcatcctaactgaccagaagggccaggtgcatcagtgcagcgtcctctttgtagccactggtttatcagtccccaaccaggttgacttccctggctccgaatatgcagagggttacgagtccgtgtccgtggaccctgaggactttgtaggccagaatgtgctgatcctgggtcgtgggaactcggcctttgagacagcagagaacatcttgggtgtcacaaactttatccatatgctcagccgctcccgggtccgtctgtcctgggccacccactacgttggagacctcagagccatcaacaatggcctgctggatacctaccagctcaagtccctggacgggctgctcgagtctgacctgacggatctggccatcctgaaggacagcaaaggcaagttccatgtcaccccgaaattcttcctggaagaagccaacaccaaccagagtgccgactccatcaccctcccccaggacgacaatgacaactttgccatgcgcgtgccctatgaccgggtaatccgctgcctgggctggaactttgacttctccattttcaataagtccctcagacttaactcgggaaatgcattcggcaagaagtacccgctgattcgagctagctacgaatccaaaggaagccggggtctgtttatcctgggtactgccagccactcggtggactaccggaaatctgctgggggcttcatccacggattccgatacacagtgcgtgctgttcaccggctcctggagcaccgccaccacagcgtcacctggcccgccactgagctccccatcacacagctgaccagctccatcgtgcggcgcgtgaatgaggcttctgggctctaccagatgttcggtgtgctggccgatgtcatcctgttgaaggagaattccacggcctttgagtacctggaggagttccccatacagatgctggcccagctggagacactcacagggaggaaggcaaagcacgggctcttcgtcatcaacatggaatatggcagaaatttctctggccccgacaaggacgtcttctttgatgaccggtctgtggggcacacagaagatgcctggcagtctaactttcttcatcctgtcatctactactatagatacctccccaccgaacaggaggtgaggttccgccctgcacactggcccctgcctcggcccacggccatccatcacatcgtggaagacttcttaacagactggactgccccgatcgggcacatcctacctctgaggcgcttcctggagaactgtttggacaccgatttgcgaagcttctatgcagagtcctgcttcctgttcgccctcacgcgccagaagttgccacccttttgccagcaggggtacctgaggatgcagggactcgtgagtaccgagagcctttggcagcacagagtggagagcaggctcctgcgggactatgcccccacaggcaggcgcctggaggacagcagccagcagcttggcgaccaagagccactaggttcccccctggctccagggcctctggctcagtccgtcgatagcaacaaagaggagctctgactgtcccttcctaagctgtgg

SEQ ID NO: 10267 - DNA, 4967 bp, Homo sapiens
  source 1..4967: mol_type = unassigned DNA
attggtccgggcgcgaggggcggagccgccgcggagcaagcgagccaagcgcggcctcattagaccacgggttgcagccggagcggctgggaggatgggcctctccgctgcggccccgttgtggggtcccccggggctgctcctggccatcgccctgcacccagcgctgtcggtgcccccgcgccgggactactgcgtgctgggcgctgggcccgcgggcctgcagatggcctacttcctgcagcgcgctggacgcgactacgcagtgttcgagcgggccccgcggcccggcagcttcttcacacgctacccgcggcaccgcaagctcatcagcatcaacaagcggtacacgggcaaggctaacgccgagttcaacctccgccacgactggaactctctgctcagccacgacccccggctgctcttcagacactactcgcgtgcctacttccccgacgcccgcgacatggtgcgctacctgggtgacttcgcggacacgctggggctccgtgtccagtacaacaccaccatcgcccacgtcactctggacaaggaccgacaggcctggaatggccactacttcatcctaactgaccagaagggccaggtgcatcagtgcagcgtcctctttgtagccactggtttatcagtccccaaccaggttgacttccctggctccgaatatgcagagggttacgagtccgtgtccgtggaccctgaggactttgtaggccagaatgtgctgatcctgggtcgtgggaactcggcctttgagacagcagagaacatcttgggtgtcacaaactttatccatatgctcagccgctcccgggtccgtctgtcctgggccacccactacgttggagacctcagagccatcaacaatggcctgctggatacctaccagctcaagtccctggacgggctgctcgagtctgacctgacggatctggccatcctgaaggacagcaaaggcaagttccatgtcaccccgaaattcttcctggaagaagccaacaccaaccagagtgccgactccatcaccctcccccaggacgacaatgacaactttgccatgcgcgtgccctatgaccgggtaatccgctgcctgggctggaactttgacttctccattttcaataagtccctcagacttaactcgggaaatgcattcggcaagaagtacccgctgattcgagctagctacgaatccaaaggaagccggggtctgtttatcctgggtactgccagccactcggtggactaccggaaatctgctgggggcttcatccacggattccgatacacagtgcgtgctgttcaccggctcctggagcaccgccaccacagcgtcacctggcccgccactgagctccccatcacacagctgaccagctccatcgtgcggcgcgtgaatgaggcttctgggctctaccagatgttcggtgtgctggccgatgtcatcctgttgaaggagaattccacggcctttgagtacctggaggagttccccatacagatgctggcccagctggagacactcacagggaggaaggcaaagcacgggctcttcgtcatcaacatggaatatggcagaaatttctctggccccgacaaggacgtcttctttgatgaccggtctgtggggcacacagaagatgcctggcagtctaactttcttcatcctgtcatctactactatagatacctccccaccgaacaggaggtgaggttccgccctgcacactggcccctgcctcggcccacggccatccatcacatcgtggaagacttcttaacagactggactgccccgatcgggcacatcctacctctgaggcgcttcctggagaactgtttggacaccgatttgcgaagcttctatgcagagtcctgcttcctgttcgccctcacgcgccagaagttgccacccttttgccagcaggggtacctgaggatgcagggactcgtgagtaccgagagcctttggcagcacagagtggagagcaggctcctgcgggactatgcccccacaggcaggcgcctggaggacagcagccagcagcttggcgaccaagagccactaggttcccccctggctccagggcctctggctcagtccgtcgatagcaacaaagaggagctctgactgtcccttcctaagctgtgggcacagtggccaggcctccccacctaggcccatggtcagtccctctttccccgcaacctcacactcccgccaatgcgtgattgccaaagaccactcagatcatggcagtgtctgcagcaaagccaccagatggcacgtgagggctgaaagtcggggatgcggtggtctcctccctcctgtcagggggcagaagggcatcctctgccaggtgggagctgccttccccagcccagtttgtctgcaatggagctgtcgctgagccccaggccagcccagttctgccccgtctcaagtgctcctcttccttccaagcccctcctcagatgggcctgcatcccgcctgtggagtgcttcacaggggaaacccatccgcatcttaagagtttgtggcaagcgctttaaaacaaaagctctgatatcctcaacaaccacaatgggcaggtgggattgttgccccagatgactgctgaagacaccagctgtgggatgtcaagtaattccagggacccccagctgggagtccccgtctgtgtcacttgccacacactgcctcaacctccccgccccattttcagcagggtttgggcttagctacagagcccaagagggtcagccctgcttatcatcataggcccagcaggctgatctcgagcagcgataggacagctccctgcaaagccatcttagcaactttctcactgagaagcaggattcagagctgctctccccagttgcaccccctgactcatcttccagctggctcttctctcccatcctactcccttctgtctccctgccctctgccatcctgaaccatgccttgcttctaacctgcctggtcaagttttgtgaaacttatcctgctgtctcgggctggcacccatatgtgctcaccatgtgtaaggtgacatttccaaatgcctttgtgtgataatgatgatgaatttggttcctagtctcttcttcattgcccttcctcaccagcaatctgcactttcccatcaggcgtcttagtctcatttgtaagtgcataagataatcacagtgatttttcaaagcccaggatcataagtgattgctttttcactggttcttactaactcttcatgtatccactcagaattccaaggacaatcccagcactctgggaggcccaggcaggtggatcacctgaggtcaggagtttgagaccagcctgaccaacatggagaaaccctatctctactaaaaatacaaaactagccaggcgtggtagcacatgtctataatcccagctactggagaggctgaggcaggagaatcacttaaacccgggaggcagaggttgcagtgagccgagattgcgccattgcactccagcctaggtaacaagagggaaactccatctcaaaaaataagttaattaaattaaattaaaataaaacatgcgctgggtacagttgcttacacctgtaatcccagcactttgggaggccaaagtgggccgatcacctgagctcaggaattcgagaccagcctggccaacatagcaaaaccttgtctctactaacggtaaaaaaaattagctgggcatggtggagcatgcctgtcatcccagctacttgggaagctgaggcaggagaattgcttgaacctgggaggtggaggttgcagtgagcagagaccgagccactgtactccagcctaggtgacaaagcaagacccacagtaaagcccccacaccccatctcaaaaaaataaaaaataaaaaagaacaaagtatgctacaacaaaagtgaaaagagaaaaagaattccaagaacccgggctttctggatccaaagctctttcatggggacgtcctcttcccctcttggcttggtccagactttttctttttctttttttttttttttgcaatggatttcgctcttgtcacccaggctggagtgcaatggcacgatgtcggctcactgcaacttctgcctcccgggtctaaacaattctcttccctcaacctcccaagtagctgggattacaagcgcctgccaccacgcccagctaatttttgtatttttagtagagacagggtttcaccacattggccaggctggtctcgaactcctgacctcaggtgatccacctgtcttggcctcctaaagtgttgggattacaggcatgagccaccacgctcggcccagtccagactttttaactacctggccccactgcagacacagttccctctagtccttcccagagttacaagaagagaactccagtagccttattctgtcagggacgaattgtttaccccatgataatgtaggatatcataaattcttcttcaaaggttttagcctgtaatttgttaagtacattgagttctgagatcctctccaaagaaccaatgtatcagtatgttcagctcacctgttctttgttcttcattttaacttttaatttcctcattctttatgtctccttgcccctagtttcagtaaacaatcccctcctagcctctgtcacctgctctgacctgagtcacctttagtcacctggtccgtaaccatctttcctgtctaaacttctcaccccaccactctggcttatacccctgctctctttaaaatagccagtcagaattagcttagattgtgcggtccaaccctagcccataggggaacaacacagcagtagggggtacctgcatcagggataagaacccattcccctcccttgttccggtgtgctctcgccattgcaccatccatgagacgcactcttgtatagaagtaaaattgccttgctgagaaaa

SEQ ID NO: 10268 - DNA, 567 bp, Homo sapiens
  source 1..567: mol_type = unassigned DNA
attagaccacgggttgcagccggagcggctgggagggtggaggttactacaatcataagcggggagccggtgcccctgaggaaggagaccctgagggagataagatggaggggctcgggattccggggagccccaagtcccagcttgaaacggtggagtccgggcaaatgagctctgaggacggcttctgggcctggccgtgacccagattgcagtgagagttcccgcaggccccgcctctttctgggcctcgtgtctcccagccgccgggccgggtgcgaggccttacccctctgatctgctgcaggatgggcctctccgctgcggccccgttgtggggtcccccggggctgctcctggccatcgccctgcacccagcgctgtcggtgcccccgcgccgggactactgcgtgctgggcgctgggcccgcgggcctgcagatggcctacttcctgcagcgcgctggacgcgactacgcagtgttcgagcgggccccgcggcccggcagcttcttcacacgctacccgcggcaccgcaagctcatcagcatcaacaagcggtacacgg

SEQ ID NO: 10269 - DNA, 3352 bp, Homo sapiens
  source 1..3352: mol_type = unassigned DNA
gctgccgacccggggcctctgtccttgggtcccagttatgcaacagtcagtcgaggctgtggggctggcccaggggctttatctgtctccctctccaacttttgccaagttacccttctgggcttccgccagccaggagcccacactccctcagccctcccacacgctcctctcacctcctagctgggcttcgctgacttgaacctggccgagtttgcgggctcgggctccacggtgcgctgctgcctgctcgagggatatgacacgaagaacactcgccaggacaactccatccttaaggtcaccattggtatgttcctgctctctggagatccctgcttcaagacgccaccatcgactgccaagtccatctccatcccaggccaggattcctccctgcagctgacgtgtaagggtggtgggaccagcagtgggggcagcagcaccaactccctgactgggtcccggccccccaaggctcggcccactattctcagctcagggctgccagaggaacccgaccagaacctgtccagccctgaggaggtgttccactctggccactcccgcaactccagctatgccagccagcagtccaagatctccggctacagcacagagcactcgcgctcctccagcctctcagacctgacgcaccgccgcaacacgtccaccagcagcagcgcctctgggggccttggcatgaccgtggagggccctgagggcagtgagcgggagcaccggcccccggagaagccgccgcggccaccccggcccctgcatctgtccgatcgctctttcaggcggaagaaggactcggtggagagccacccgacctgggtggacgacacgcggatcgatgcggatgccatcgtggagaagatcgtgcagagccaggatttcacagatggcagcaacaccgaggacagcaacctccggctgttcgtgagccgcgatggctctgccacgctgagcggcatccagcttgccaccagggtctcttctggggtctacgagccagttgtgattgaaagccattgaggagcaggtgtccgggctggagaagagtcctgctttctctggagtccagacctgtatcattccatgaggaactttccccttcagatcacctctgcgccacatctcatccatgcctcctccatgcactccagtccacactccccgtagcatcattccattgcccctcccatccatgctgggaccctcctggcccaccaaggcccaggcaccactgtgaatattctcctctgaaccactagagggcaggccaggcaggccaggcgggcccgtgcagcttgtgggcaagaaggagctggcaaggaccggcgctgctggagactgacccagccctctggctgaggacatgcagcggctcctaaatgtagagatgcctgtggctgagggggcctctctacctgtgtccccactcactccaggagcactggctttggtcacgtcttagcagcagggccttgctccgttgttcccttgccctggtggtgggggggccagaccacctccggaatcctgccacctgtgactgtctgactgcttagtgcttcagctgtcccttccttgtgtcctgggggacctgctggcggcctcttcctgggagccatgacctcagaccccacccacactccagatcgagacccctgcctccccccggcaaatgtcctcccgctgccttgcagcctgcactttgcacatgctcacccccagcacagtcccactggcccctcacctccccttccctgagctccttcccaaggactcctggtcactgcctgctgtgcagtcagaggcccagggtccagcagcccggcgggaacgggtgctgcctcttcctccagttagctccagctcaggtctgagacccgtgctgagaaaggtctgagcaccgaccgtgccctctgcccagggctgggtcctgagcagctggttttcctgcaggaaggttggagcaagcaaagtccttctctgccctcagggtcagctgcccagactggggcggatgccagagaggcaggtgggctgtggctggactggtccggagctggcttccttaccagaaaagcctcagccttcctctggaagcatcccccgttctgggcaagggggaagggctcctttaaggggtgtgctttcccagtggggagcagtctggccctgccccctactaaagcctctgctctcagcactttcccccaagtccttgtaacttgcttgaaggtgggttctggctgccagccagtccctggacaaactctcctgccccttttaaatttcactcattttgtataaacccagcaggctggtgtttacttagccctgtagcttttttcattttttctttccgtctttcttcttgagttcacggttcaatattgcctcctcgccctggtgaggggaggtgctgcttttctgccccacctgccggctggttccagcagcgctggggcccagctggggggccgggatgggggcttctctctctgggaggggtgcaggtgccctccccaggctgggagggttccttccctagctccccatctgcccccgctggtgagagttgggcttcttggtcttggaactccctggcattgggaacagagcatttccagcatttgttgttgttttactcacctaacccttagaaaatgaatgttagaaggtgcctgccgaggcgggacagagtgttcgctcgcgctggagaaggctctgctcagccctgagagtcccttcctgccccaccgatactggcactttaaaaaggaagctgaccgcacagtgtccagacgaattggcccccagaagatggggagttctgtcctgcccttctgtgtctgcgtgacctcacccagcctaggagggaggtgcattcagggtagatttgcctctcattcaaagttctggggctttgggtggaaaacagccagctttggcgctgttggggagactcctccagaccaggaaccccagaaggagacagagcctgccacatcctcccacgccaggccctgggccagggtgattggactgagaatttggccacaaccaaattgatgctggctggaaccagaggccagaaagcctggccttgtccccatgtgggagccctgtcctcagccctcttgtccccttgagctcagtgaattcccaccaggtgcccacagctcctggacttcaaattctatatattgagagagttggagagtatatcagagatatttttggaaaggagttggtctatgcaatgtcagtttggaatcttcttgaaagtttaatgtttttattaggagatttaaagaaaataaaggtctacaatatc

SEQ ID NO: 10270 - DNA, 4144 bp, Homo sapiens
  source 1..4144: mol_type = unassigned DNA
ccgcgcggcgtgagctccccggacatcgcgtctcgggatgctgcaagccagcgcggccgctcgcgcgcagccccgcacctccgcccctgcctctgcctcctgggccatgccctgctgtttacatgccggtgaggtccccggccgctccgaacccctccgagccccggctccccgagggtgaagcccgccggcccgcgaactggactggtggatctctcagacctggggccccggactccgatctccgccgtctccgccaccatcagggcgggatccggctctggtgttttgaggagggggtgtggtgtagggaaaggaatcccgtccctctccaccttttttcgccttcggggcttcagactcagggaactcgctcatggctttcttgatgaagaagaagaaattcaaattccaaactactttcaccctggaggagctgactgcggttcccttcgtgaacggggtcctcttctgcaaggtccggctgctggatggaggggattttgtcagcttgtcgtcaagggaggaggtacaggagaactgtgtgcggtggcgaaagaggttcaccttcgtgtgtaagatgagtgctaacccggccaccggcctgctggacccctgtgtcttccgtgtgtctgtgcgcaaggagctgaaaggcgggaaggcttattccaagctgggcttcgctgacttgaacctggccgagtttgcgggctcgggctccacggtgcgctgctgcctgctcgagggatatgacacgaagaacactcgccaggacaactccatccttaaggtcaccattggtatgttcctgctctctggagatccctgcttcaagacgccaccatcgactgccaagtccatctccatcccaggccaggattcctccctgcagctgacgtgtaagggtggtgggaccagcagtgggggcagcagcaccaactccctgactgggtcccggccccccaaggctcggcccactattctcagctcagggctgccagaggaacccgaccagaacctgtccagccctgaggaggtgttccactctggccactcccgcaactccagctatgccagccagcagtccaagatctccggctacagcacagagcactcgcgctcctccagcctctcagacctgacgcaccgccgcaacacgtccaccagcagcagcgcctctgggggccttggcatgaccgtggagggccctgagggcagtgagcgggagcaccggcccccggagaagccgccgcggccaccccggcccctgcatctgtccgatcgctctttcaggcggaagaaggactcggtggagagccacccgacctgggtggacgacacgcggatcgatgcggatgccatcgtggagaagatcgtgcagagccaggatttcacagatggcagcaacaccgaggacagcaacctccggctgttcgtgagccgcgatggctctgccacgctgagcggcatccagcttgccaccagggtctcttctggggtctacgagccagttgtgattgaaagccattgaggagcaggtgtccgggctggagaagagtcctgctttctctggagtccagacctgtatcattccatgaggaactttccccttcagatcacctctgcgccacatctcatccatgcctcctccatgcactccagtccacactccccgtagcatcattccattgcccctcccatccatgctgggaccctcctggcccaccaaggcccaggcaccactgtgaatattctcctctgaaccactagagggcaggccaggcaggccaggcgggcccgtgcagcttgtgggcaagaaggagctggcaaggaccggcgctgctggagactgacccagccctctggctgaggacatgcagcggctcctaaatgtagagatgcctgtggctgagggggcctctctacctgtgtccccactcactccaggagcactggctttggtcacgtcttagcagcagggccttgctccgttgttcccttgccctggtggtgggggggccagaccacctccggaatcctgccacctgtgactgtctgactgcttagtgcttcagctgtcccttccttgtgtcctgggggacctgctggcggcctcttcctgggagccatgacctcagaccccacccacactccagatcgagacccctgcctccccccggcaaatgtcctcccgctgccttgcagcctgcactttgcacatgctcacccccagcacagtcccactggcccctcacctccccttccctgagctccttcccaaggactcctggtcactgcctgctgtgcagtcagaggcccagggtccagcagcccggcgggaacgggtgctgcctcttcctccagttagctccagctcaggtctgagacccgtgctgagaaaggtctgagcaccgaccgtgccctctgcccagggctgggtcctgagcagctggttttcctgcaggaaggttggagcaagcaaagtccttctctgccctcagggtcagctgcccagactggggcggatgccagagaggcaggtgggctgtggctggactggtccggagctggcttccttaccagaaaagcctcagccttcctctggaagcatcccccgttctgggcaagggggaagggctcctttaaggggtgtgctttcccagtggggagcagtctggccctgccccctactaaagcctctgctctcagcactttcccccaagtccttgtaacttgcttgaaggtgggttctggctgccagccagtccctggacaaactctcctgccccttttaaatttcactcattttgtataaacccagcaggctggtgtttacttagccctgtagcttttttcattttttctttccgtctttcttcttgagttcacggttcaatattgcctcctcgccctggtgaggggaggtgctgcttttctgccccacctgccggctggttccagcagcgctggggcccagctggggggccgggatgggggcttctctctctgggaggggtgcaggtgccctccccaggctgggagggttccttccctagctccccatctgcccccgctggtgagagttgggcttcttggtcttggaactccctggcattgggaacagagcatttccagcatttgttgttgttttactcacctaacccttagaaaatgaatgttagaaggtgcctgccgaggcgggacagagtgttcgctcgcgctggagaaggctctgctcagccctgagagtcccttcctgccccaccgatactggcactttaaaaaggaagctgaccgcacagtgtccagacgaattggcccccagaagatggggagttctgtcctgcccttctgtgtctgcgtgacctcacccagcctaggagggaggtgcattcagggtagatttgcctctcattcaaagttctggggctttgggtggaaaacagccagctttggcgctgttggggagactcctccagaccaggaaccccagaaggagacagagcctgccacatcctcccacgccaggccctgggccagggtgattggactgagaatttggccacaaccaaattgatgctggctggaaccagaggccagaaagcctggccttgtccccatgtgggagccctgtcctcagccctcttgtccccttgagctcagtgaattcccaccaggtgcccacagctcctggacttcaaattctatatattgagagagttggagagtatatcagagatatttttggaaaggagttggtctatgcaatgtcagtttggaatcttcttgaaagtttaatgtttttattaggagatttaaagaaaataaaggtctacaatatctttaggttttttttttttcctgtttaccgcacaaactgaccacatggcatgtctatcaggatggagggtgtccatgttctcctctgtctttagggaggtgataaggagatgggcggaggggtgtttttttctttgactcccctcctttctaacagaatgttgccaccactgcttgagtgggctgtgtttgttcctctgtcccagcttctgttgtagaaaataacattgttaggggaactcaggctagtgtcagcgtcttggtttggggagaaaaaattaaatgtttcggtttttgtttcttt

SEQ ID NO: 10271 - DNA, 3367 bp, Homo sapiens
  source 1..3367: mol_type = unassigned DNA
ctgcctcaggaagcttggcttcccctcccatggggaagtgctggaatccactcttgcctgaccctcccataagaaacaagggaaattcctttacgtgagccgccttgctcagaacaaagcttggcgtgtttcttattcctcatcaatctgacaaaatgggtatttatttgtgcctctcaagcgtgtggcttggacatgatgttccgcatcgtggaagtggccgtgcaccaagtggaatatctgttactatagtaacagttcctttttattgataccagaataaacaggaatgcaaaggctgtctcacttgttggcacatttcagcagcctccgttcccaggggtttaagaaccgccctctagaggcagccctccttgctagtctgggacttcccggtggagtgaggaacccagcaacacgctcctgacttcccttcccaaggactcgacctgagaaccgccatgtactcggagatccagagggagcgggcagacattgggggcctgatggcccggccagaatacagagagtggaatccggagctcatcaagcccaagaagctgctgaaccccgtgaaggcctctcggagtcaccaggagctccaccgggagctgctcatgaaccacagaaggggccttggtgtggacagcaagccagagctgcagcgtgtcctagagcaccgccggcggaaccagctcatcaagaagaagaaggaggagctggaagccaagcggctgcagtgcccctttgagcaggagctgctgagacggcagcagaggctgaaccagctggaaaaaccaccagagaaggaagaggatcacgcccccgagtttattaaagtcagggaaaacctgcggagaattgccacactgaccagcgaagagagagagctgtagggccagctgccgggctcaggccactgcccaccctggcctggacagcctccttcagcccttctgtacctggcagccctgggccccaggccctgggacgtctgtgatgttcccacctgcttctgtagaaatgtgtcaccccagagggcctggctctccctgggaggctggggcccctaagctcctaggttttccttccaagcacccagccctcctgctccaagagggataacctgcacccctccctgcaaggggttcagagcccagcacaggagctttctctggcagaattgaggaggaagaggtggccctctgacttgacaagccttctgttctgcccaggccttcccaccaggaatctccgaggctccccagggccccgcttctccgtacaccccagctcctaggtctcagagaactcccccacctgtggttttacctgcagccagcagagcttagcttcaaggacacctgccttcaaagccactgaggggaggaagggcagggcagactgcagatggccttgttgctggcatcccggccaggtgggcggggactaacaaagacagctgtttagggtcttctcccctcacccatgctttcatcatcccctccgcacagcctccccgtccaggccttctaaccacacctacccagggctgccgcattcctgcactcagaagtctgcagcggtgcctcacaaacttgattgtgcataaaaatcactggggatcttgttaatacagcttctaactcaatagatctgggagatcctgcatttctaacaagctcccaggtaaggcggaggctgctggtgtgaggaccatgctgtgagcagcagggcgagagtgcccagggctgatatatattggaaatatcacccctgaagccatcgctggcccccacctcctgtggactgatgccccagggattcccaccccacttctgcaaccccaggtatccttcattatccaccccatcccagactcccaccccagggattgcccgtgaagactttggcctagcaaattgtgttggttatgtgagtgttgttttaatcagagatgtacatgattgccaatctgcatttcttaccagtgtgaccacactgttacgatgcaattctagccaaaaaaaaaaaaaaaaaaaaaaaaattttttttttttactttttcctagtcttatggaaagcaaatatacaatgattttcagtaggcttctggaatagaaacagtggtttgaagaccccactgccacctttatggactggcccctttgagtctgaatccccggcctctgtcacctgagacccaacccctagctgggccaactccagtgaattcacccatttttcttcttcagaaggcctttcctgtgtgagacccacatattttaaccttttgctcctatcccatttttaaagaattagagaataaaccaggcctgtttcttttcccctgaaatccctgcctctggcttcctaaacccatcatctaaggtgacagagcagtgctggaatagcatctcctttcactttcccaaaactgccacagatagctgccactggcatgctctttgattcctggaagcaaacgtgggactgtcggaggaaagggattgttctggtcttactcataactgggtggtttgagggtgactgaagtcgtgcttttcctgtgtgtgctgccagcacagggctgtaaatgcagatattgcgcctgtgtgcgtgtgtataagtcaagctccaagaggctcctgaatgtgactggcgtgctgagaatgtgtttacgctgtttaatgtctgccaggtgagggttacactgaagatgcacaatccctaaaataaagatcaccacttccccaaagaagcagccctcgggtccatgtgttgttcagacatgtgaagagaagcaagacagagggtctcagatggacgagggctctccaagggaatgcctggggattcacccagtggtccccagaggtgctccatggaggcaacaagtcattccatgaagccccagaggtagaagggacctcaagcaccacgccctccagggcagccgtgcagacgaccttggttcacttttcaggggtcgtcccaactctgtatctccagccactccaactgtggaggctgtaaatccagattttcactgttccagtctcctttgcagcttaggatggctatgtgatcaggtgtggccaatgaaattgaagaggaagtctacctgggcttctgggaaagcttttccaataaaagacacaggcatggctaacacctccctgggcctcttcttcctaccttgattgagggtgtgatgcctggagccacagcagccactttgctaccatgacaaaaaggccaagagaatcacagagtcattgaccctatcattatttcaccaagccaataccagccgccatccttctccagaattcttgtaaataaaataaatccctctttgtttaaa

SEQ ID NO: 10272 - DNA, 3465 bp, Homo sapiens
  source 1..3465: mol_type = unassigned DNA
ctgcctcaggaagcttggcttcccctcccatggggaagtgctggaatccactcttgcctgaccctcccataagaaacaagggaaattcctttacgtgagccgccttgctcagaacaaagcttggcgtgtttcttattcctcatcaatctgacaaaatgggtatttatttgtgcctctcaagcgtgtggcttggacatgatgttccgcatcgtggaagtggccgtgcaccaagtggaatatctgttactatagtaacagttcctttttattgataccagaataaacaggaatgcaaaggctgtctcacttgttggcacatttcagcagcctccgttcccaggggtttaagaaccgccctctagaggcagccctccttgctagtctgggacttcccggtggagtgaggaacccagcaacacgctcctgacttcccttcccaaggactcgacctgagaaggacacagcagtctctgaatttcatgctctcctctttgatgtgaagaaaatgaaaagctgaacagttgtggaactgtggatagagttagacaataaggccgccatgtactcggagatccagagggagcgggcagacattgggggcctgatggcccggccagaatacagagagtggaatccggagctcatcaagcccaagaagctgctgaaccccgtgaaggcctctcggagtcaccaggagctccaccgggagctgctcatgaaccacagaaggggccttggtgtggacagcaagccagagctgcagcgtgtcctagagcaccgccggcggaaccagctcatcaagaagaagaaggaggagctggaagccaagcggctgcagtgcccctttgagcaggagctgctgagacggcagcagaggctgaaccagctggaaaaaccaccagagaaggaagaggatcacgcccccgagtttattaaagtcagggaaaacctgcggagaattgccacactgaccagcgaagagagagagctgtagggccagctgccgggctcaggccactgcccaccctggcctggacagcctccttcagcccttctgtacctggcagccctgggccccaggccctgggacgtctgtgatgttcccacctgcttctgtagaaatgtgtcaccccagagggcctggctctccctgggaggctggggcccctaagctcctaggttttccttccaagcacccagccctcctgctccaagagggataacctgcacccctccctgcaaggggttcagagcccagcacaggagctttctctggcagaattgaggaggaagaggtggccctctgacttgacaagccttctgttctgcccaggccttcccaccaggaatctccgaggctccccagggccccgcttctccgtacaccccagctcctaggtctcagagaactcccccacctgtggttttacctgcagccagcagagcttagcttcaaggacacctgccttcaaagccactgaggggaggaagggcagggcagactgcagatggccttgttgctggcatcccggccaggtgggcggggactaacaaagacagctgtttagggtcttctcccctcacccatgctttcatcatcccctccgcacagcctccccgtccaggccttctaaccacacctacccagggctgccgcattcctgcactcagaagtctgcagcggtgcctcacaaacttgattgtgcataaaaatcactggggatcttgttaatacagcttctaactcaatagatctgggagatcctgcatttctaacaagctcccaggtaaggcggaggctgctggtgtgaggaccatgctgtgagcagcagggcgagagtgcccagggctgatatatattggaaatatcacccctgaagccatcgctggcccccacctcctgtggactgatgccccagggattcccaccccacttctgcaaccccaggtatccttcattatccaccccatcccagactcccaccccagggattgcccgtgaagactttggcctagcaaattgtgttggttatgtgagtgttgttttaatcagagatgtacatgattgccaatctgcatttcttaccagtgtgaccacactgttacgatgcaattctagccaaaaaaaaaaaaaaaaaaaaaaaaattttttttttttactttttcctagtcttatggaaagcaaatatacaatgattttcagtaggcttctggaatagaaacagtggtttgaagaccccactgccacctttatggactggcccctttgagtctgaatccccggcctctgtcacctgagacccaacccctagctgggccaactccagtgaattcacccatttttcttcttcagaaggcctttcctgtgtgagacccacatattttaaccttttgctcctatcccatttttaaagaattagagaataaaccaggcctgtttcttttcccctgaaatccctgcctctggcttcctaaacccatcatctaaggtgacagagcagtgctggaatagcatctcctttcactttcccaaaactgccacagatagctgccactggcatgctctttgattcctggaagcaaacgtgggactgtcggaggaaagggattgttctggtcttactcataactgggtggtttgagggtgactgaagtcgtgcttttcctgtgtgtgctgccagcacagggctgtaaatgcagatattgcgcctgtgtgcgtgtgtataagtcaagctccaagaggctcctgaatgtgactggcgtgctgagaatgtgtttacgctgtttaatgtctgccaggtgagggttacactgaagatgcacaatccctaaaataaagatcaccacttccccaaagaagcagccctcgggtccatgtgttgttcagacatgtgaagagaagcaagacagagggtctcagatggacgagggctctccaagggaatgcctggggattcacccagtggtccccagaggtgctccatggaggcaacaagtcattccatgaagccccagaggtagaagggacctcaagcaccacgccctccagggcagccgtgcagacgaccttggttcacttttcaggggtcgtcccaactctgtatctccagccactccaactgtggaggctgtaaatccagattttcactgttccagtctcctttgcagcttaggatggctatgtgatcaggtgtggccaatgaaattgaagaggaagtctacctgggcttctgggaaagcttttccaataaaagacacaggcatggctaacacctccctgggcctcttcttcctaccttgattgagggtgtgatgcctggagccacagcagccactttgctaccatgacaaaaaggccaagagaatcacagagtcattgaccctatcattatttcaccaagccaataccagccgccatccttctccagaattcttgtaaataaaataaatccctctttgtttaaa

SEQ ID NO: 10273 - DNA, 1432 bp, Homo sapiens
  source 1..1432: mol_type = unassigned DNA
ttcccccggcggcgtctcctcgcccgcccctccggccgccgccgtaacttgaccctcagcggggtttgggacttggggccgcgtcaccgtcgcggaggcgcttcggctccggactacgctcctgctgtgcgctcgcggggccagcagtgctggctctgcagtaggaggcgcgggggcatggcgcagaggctgggcgagtgggcccgggggccctccgatgccaccgggctctaccgggctgtgctgctccggtcggccgccatgtactcggagatccagagggagcgggcagacattgggggcctgatggcccggccagaatacagagagtggaatccggagctcatcaagcccaagaagctgctgaaccccgtgaaggcctctcggagtcaccaggagctccaccgggagctgctcatgaaccacagaaggggccttggtgtggacagcaagccagagctgcagcgtgtcctagagcaccgccggcggaaccagctcatcaagaagaagaaggaggagctggaagccaagcggctgcagtgcccctttgagcaggagctgctgagacggcagcagaggctgaaccagctggaaaaaccaccagagaaggaagaggatcacgcccccgagtttattaaagtcagggaaaacctgcggagaattgccacactgaccagcgaagagagagagctgtagggccagctgccgggctcaggccactgcccaccctggcctggacagcctccttcagcccttctgtacctggcagccctgggccccaggccctgggacgtctgtgatgttcccacctgcttctgtagaaatgtgtcaccccagagggcctggctctccctgggaggctggggcccctaagctcctaggttttccttccaagcacccagccctcctgctccaagagggataacctgcacccctccctgcaaggggttcagagcccagcacaggagctttctctggcagaattgaggaggaagaggtggccctctgacttgacaagccttctgttctgcccaggccttcccaccaggaatctccgaggctccccagggccccgcttctccgtacaccccagctcctaggtctcagagaactcccccacctgtggttttacctgcagccagcagagcttagcttcaaggacacctgccttcaaagccactgaggggaggaagggcagggcagactgcagatggccttgttgctggcatcccggccaggtgggcggggactaacaaagacagctgtttagggtcttctcccctcacccatgctttcatcatcccctccgcacagcctccccgtccaggccttctaaccacacctacccagggctgccgcattcctgcactcagaagtctgcagcggtgcctcacaaacttgattgtgcataaaaatcactggggatcttgtt

SEQ ID NO: 10274 - DNA, 2159 bp, Homo sapiens
  source 1..2159: mol_type = unassigned DNA
gctagtctgggacttcccggtggagtgaggaacccagcaacacgctcctgacttcccttcccaaggactcgacctgagaaccgccatgtactcggagatccagagggagcgggcagacattgggggcctgatggcccggccagaatacagagagtggaatccggagctcatcaagcccaagaagctgctgaaccccgtgaaggcctctcggagtcaccaggagctccaccgggagctgctcatgaaccacagaaggggccttggtgtggacagcaagccagagctgcagcgtgtcctagagcaccgccggcggaaccagctcatcaagaagaagaaggaggagctggaagccaagcggctgcagtgcccctttgagcaggagctgctgagacggcagcagaggctgaaccaggtgggtgatgggcacccagcagggaccacgcatcctccagggctgtcctccagggaggagctctgctgtggccacagctagtaagagggaagaggatcagcagacagagcactggactaagagtccactcctggcctgagtcctccctctgccattcactttgctaggtccttagggcgagtggcttccctgaacctcagcttcctcactggcccagtgtactgcatgctgattctgatttcattcttataactgtcttgtgagccaggtggcattcccattttagagatggggaagctgaggcccagagggggtgagtgatttgaaccaggctgcacaaggagaactcagtctcatgctctgtgccccagctaccaggctgatagcaaaactcatccccaggttggttctgtttccccactgagtgggcccttggtccaaactccacaggttttcagagtaggaatccccctagctccacccacttcactctctgcttctccctccttcagctggaaaaaccaccagagaaggaagaggatcacgcccccgagtttattaaagtcagggaaaacctgcggagaattgccacactgaccagcgaagagagagagctgtagggccagctgccgggctcaggccactgcccaccctggcctggacagcctccttcagcccttctgtacctggcagccctgggccccaggccctgggacgtctgtgatgttcccacctgcttctgtagaaatgtgtcaccccagagggcctggctctccctgggaggctggggcccctaagctcctaggttttccttccaagcacccagccctcctgctccaagagggataacctgcacccctccctgcaaggggttcagagcccagcacaggagctttctctggcagaattgaggaggaagaggtggccctctgacttgacaagccttctgttctgcccaggccttcccaccaggaatctccgaggctccccagggccccgcttctccgtacaccccagctcctaggtctcagagaactcccccacctgtggttttacctgcagccagcagagcttagcttcaaggacacctgccttcaaagccactgaggggaggaagggcagggcagactgcagatggccttgttgctggcatcccggccaggtgggcggggactaacaaagacagctgtttagggtcttctcccctcacccatgctttcatcatcccctccgcacagcctccccgtccaggccttctaaccacacctacccagggctgccgcattcctgcactcagaagtctgcagcggtgcctcacaaacttgattgtgcataaaaatcactggggatcttgttaatacagcttctaactcaatagatctgggagatcctgcatttctaacaagctcccaggtaaggcggaggctgctggtgtgaggaccatgctgtgagcagcagggcgagagtgcccagggctgatatatattggaaatatcacccctgaagccatcgctggcccccacctcctgtggactgatgccccagggattcccaccccacttctgcaaccccaggtatccttcattatccaccccatcccagactcccaccccagggattgcccgtgaagactttggcctagcaaattgtgttggttatgtgagtgttgttttaatcagagatgtacatgattgccaatctgcatttcttaccagtgtgaccacactgttacgatgcaattctagcc

SEQ ID NO: 10275 - DNA, 580 bp, Homo sapiens
  source 1..580: mol_type = unassigned DNA
agttgaatgaaggagtctgctctcagagtatctgctgtgggagagccccggaccccaagcatcttcaaaggtctattattaatggggctgtccagctgaagctgacatccgcacgcagccctcccagagctctgcacctcagccagcccacggcctccaccgtctggccctgtcggctgagtggtgcccagcaagaaaacatactctcctcaggccagatttcatagtgaaaatgagaagcagagacgaaatggctcagccgccatgtactcggagatccagagggagcgggcagacattgggggcctgatggcccggccagaatacagagagtggaatccggagctcatcaagcccaagaagctgctgaaccccgtgaaggcctctcggagtcaccaggagctccaccgggagctgctcatgaaccacagaaggggccttggtgtggacagcaagccagagctgcagcgtgtcctagagcaccgccggcggaaccagctcatcaagaagaagaaggaggagctggaagccaagcggctgcagtgcccctttgagcaggagctgctgagacggcagcaga

SEQ ID NO: 10276 - DNA, 2271 bp, Homo sapiens
  source 1..2271: mol_type = unassigned DNA
agttgaatgaaggagtctgctctcagagtatctgctgtgggagagccccggaccccaagcatcttcaaaggtctattattaatggggctgtccagctgaagctgacatccgcacgcagccctcccagagctctgcacctcagccagcccacggcctccaccgtctggccctgtcggctgagtggtgcccagcaaggtgagaaggccaagtcctgcccgctgggccaggcagaggtcacccgccgcgcctgagctaccggtgtgtgatgagaggactgccccacgtcttccctcatttcccagctgcctcagtttcccttcctgagagaggcagggttctgggaggtgaggagctgcagggacccaagaagggcatagaagccgcctggggacactggcccctctgtcaggatcaatcgccctaagcctgtctgaggcgctccgggcttaggagcagctgtgaaagccgcctttgtgcctgggagaatgagccgcaagaggacagggggccctcgccccgggagccccttgggtcctggctcctgagatcaacgccagcagggaggaccccagcctggcccctgcagcccacccaggcctggtgcccacttcgtgccatgggagcagcccaggggaagaagaaaacatactctcctcaggccagatttcatagtgaaaatgagaagcagagacgaaatggctcagccgccatgtactcggagatccagagggagcgggcagacattgggggcctgatggcccggccagaatacagagagtggaatccggagctcatcaagcccaagaagctgctgaaccccgtgaaggcctctcggagtcaccaggagctccaccgggagctgctcatgaaccacagaaggggccttggtgtggacagcaagccagagctgcagcgtgtcctagagcaccgccggcggaaccagctcatcaagaagaagaaggaggagctggaagccaagcggctgcagtgcccctttgagcaggagctgctgagacggcagcagaggctgaaccagctggaaaaaccaccagagaaggaagaggatcacgcccccgagtttattaaagtcagggaaaacctgcggagaattgccacactgaccagcgaagagagagagctgtagggccagctgccgggctcaggccactgcccaccctggcctggacagcctccttcagcccttctgtacctggcagccctgggccccaggccctgggacgtctgtgatgttcccacctgcttctgtagaaatgtgtcaccccagagggcctggctctccctgggaggctggggcccctaagctcctaggttttccttccaagcacccagccctcctgctccaagagggataacctgcacccctccctgcaaggggttcagagcccagcacaggagctttctctggcagaattgaggaggaagaggtggccctctgacttgacaagccttctgttctgcccaggccttcccaccaggaatctccgaggctccccagggccccgcttctccgtacaccccagctcctaggtctcagagaactcccccacctgtggttttacctgcagccagcagagcttagcttcaaggacacctgccttcaaagccactgaggggaggaagggcagggcagactgcagatggccttgttgctggcatcccggccaggtgggcggggactaacaaagacagctgtttagggtcttctcccctcacccatgctttcatcatcccctccgcacagcctccccgtccaggccttctaaccacacctacccagggctgccgcattcctgcactcagaagtctgcagcggtgcctcacaaacttgattgtgcataaaaatcactggggatcttgttaatacagcttctaactcaatagatctgggagatcctgcatttctaacaagctcccaggtaaggcggaggctgctggtgtgaggaccatgctgtgagcagcagggcgagagtgcccagggctgatatatattggaaatatcacccctgaagccatcgctggcccccacctcctgtggactgatgccccagggattcccaccccacttctgcaaccccaggtatccttcattatccaccccatcccagactcccaccccagggattgcccgtgaagactttggcctagcaaattgtgttggttatgtgagtgttgttttaatcagagatgtacatgattgccaatctgcatttcttaccagtgtgaccacactgttacgatgcaattctagcc

SEQ ID NO: 10277 - DNA, 3256 bp, Homo sapiens
  source 1..3256: mol_type = unassigned DNA
aggggcgcgcccgtgggtcgcggactgtccggttgctcccgcctccttccgtcggatccgcgctctcccgcggctgcgccggcccggccgcccaggagacaaagcgctgccgccgccgtcgccgccaccgggccagtcccgaaccatggccgggccaccccgcaacctcgcgcctcccgtcccgtcgccgccctaggcctgcgctgcgagatgcagaaacagaggcccagagagatgaatagcctgcctggggtcccccagcccagatgctgcagagctgacatttgaatccagagaagagcgagctgaggctggagctgagcagagggcagggaggcaagtggtggcctgagagtttgctgaggatgatggcttccagctccatctatttccccgcaaaggacatgatctcattcctttttatggctggatagttttccatggccccaggctcccctccaggccccgcgattgccaccatgaagctgaacgagcgcagcctggccttctacgccacctgtgacgccccggtggacaatgcaggcttcctgtacaagaagggtgggcggcacgcggcctaccaccggcgctggttcgtgctgcgcgggaacatgctcttctacttcgaggacgctgccagccgtgagcccgtgggcgtcatcatcctggagggctgcactgtggagctggtggaggccgccgaggagttcgccttcgctgtgcgctttgcggggacccgggcgcgcacctacgtgctggccgctgagagtcaggatgccatggagggctgggtcaaggccctgtcgcgtgccagcttcgactacctgcggctggtggtgcgcgagctggagcagcagctggcggctgtacgtggcgggggtggcatggccctgccccagccccagccccagtccctgcccttgcccccgtccctgccctctgccctggccccagtcccatccctgccttctgccccagccccggtcccagccctgcccctgccccgccggcccagtgccctcccgcccaaggagaatggctgcgctgtctggagcactgaggccaccttcaggcctggacccgagccccctccaccaccgcctcgccgccgggcctcggcaccccacgggcccctggacatggcccccttcgcccggctgcacgagtgctatggccaggagatccgggccctgcgtggccagtggctcagcagccgggtccagccctgaggccaccagggcgcctgttttagggggacacaagctctatgccctctgggacaggccgggtcctggagagactgggggagcagatcctgagggaaatcatgggcaaggctggcccccaggccctgagtggcctggttttgggggatgcaggctctgagaaggtgctggattctgagtgggcctttaggaccatgtgacccagaaggcctacccttgaggggaacgtcacgtgcaacactaaggagaatccagggcctgagggggaggtttcctgagaactccggccccaggctggcctgagctgccgggcagaggcctgtgctggcaacaggcattgccgggcctgcagctcagagggtcactgggactgagggcgatctgtggcctgaaaagcaaatgcacagttagtgcagctcctgaccaggccttcagggtggacagagggaggatcggtcatggcagccacacctgggcctggccttgctccgggacctgccagaggagctggcctggctctgtgcctgcctgcctccaggagcaggacggtggctgggagggtagtgactggggacacaggtgcaggtgttagtgcaggaccggaagggtgaggtggcctggtcctcggggctcctggcctgggctggctgaggcaggactctgccaaaagtcccctgccaggcctcatggtggtgctcctggtggcagtggctctctggccgcgggccctgtctgtgtctccgtggtggctctcacagggctctccagacactccttgactgcatccttcagtcttggcccctaggcctggggccccttgggagcttgcctgacctcccttcctgggctgggtagccatggcccgaggtgaccttctagcaggttcccccagggaggggaggccaccagctgactcaccgcctaggaaggcccaggtgctgacctagtggcggagaaaaagccgcacaccgagtgtggcttccagagcccctcttcagctccaggcagccccctctaacatgtcccctcctgagctcagcccccacccccatactcctggtggggaccaggtcttgcttggcttcggggctgaccgccggtcccctttcttctcaccacagtgcccatttttcatccagggagaacctcggggctgggacacctcctggccctcaccctgggtcatgtttacagtcctcagtgccccacaccggtggccccctgaggacacctccaccctgaccttgattttcccaaacgctgcctcttggtgacagactcagcccaaaaccccttccttctgtctctggagacccttgagcttggggaaatatggaggggtgtgtgtctgcaatcaaggcctctgcagctcacggctggcccggtgggctgggacttccgtctgaattttaaatacttagggttcatttttttttctctggcaacaaagcttgatgttttcactgctttagtttcctgtttgctggtgggaggggatacggtctgtgactctggacttgctctgggggaacagttgtcactgcccccggggagaggggcagcttgggctggagaagcacagccagagacagagcccctcgagagggatccttggctgcttcattgtcttccccccagcaagccctgctctccacaggcacctctggggtcttggtatggtccccgctcacctccttccagagtcctgagtggtgtgggtgtgggtggcacaggatctggggcatgggaggggttcagagcttcccagagccccgtgtcctggcagactcagctggtgggctggggtgttaaccccagtcctggcgtaggtttacagactctcaaggtacgttggccctggtctcctgggagagaggggtgagggatgtcccctaccaaagcacaaggtgggatcaggctgcctcctgggttgggtgtcgggggagctgtccggcagcctggcagggagatgcaagggctaaagtaaaattttgtcaagtaatggctgattgtgtcattttttttcccca

SEQ ID NO: 10278 - DNA, 3041 bp, Homo sapiens
  source 1..3041: mol_type = unassigned DNA
caaagcgctgccgccgccgtcgccgccaccgggccagtcccgaaccatggccgggccaccccgcaacctcgcgcctcccgtcccgtcgccgccctaggcctgcgctgcgagatgcagaaacagaggcccagagagatgaatagcctgcctggggtcccccagcccagatgctgcagagctgacatttgaatccagagaagagcgagctgaggctggagctgagcagagggcagggaggcaagtggtggcctgagaggccccaggctcccctccaggccccgcgattgccaccatgaagctgaacgagcgcagcctggccttctacgccacctgtgacgccccggtggacaatgcaggcttcctgtacaagaagggtgggcggcacgcggcctaccaccggcgctggttcgtgctgcgcgggaacatgctcttctacttcgaggacgctgccagccgtgagcccgtgggcgtcatcatcctggagggctgcactgtggagctggtggaggccgccgaggagttcgccttcgctgtgcgctttgcggggacccgggcgcgcacctacgtgctggccgctgagagtcaggatgccatggagggctgggtcaaggccctgtcgcgtgccagcttcgactacctgcggctggtggtgcgcgagctggagcagcagctggcggctgtacgtggcgggggtggcatggccctgccccagccccagccccagtccctgcccttgcccccgtccctgccctctgccctggccccagtcccatccctgccttctgccccagccccggtcccagccctgcccctgccccgccggcccagtgccctcccgcccaaggagaatggctgcgctgtctggagcactgaggccaccttcaggcctggacccgagccccctccaccaccgcctcgccgccgggcctcggcaccccacgggcccctggacatggcccccttcgcccggctgcacgagtgctatggccaggagatccgggccctgcgtggccagtggctcagcagccgggtccagccctgaggccaccagggcgcctgttttagggggacacaagctctatgccctctgggacaggccgggtcctggagagactgggggagcagatcctgagggaaatcatgggcaaggctggcccccaggccctgagtggcctggttttgggggatgcaggctctgagaaggtgctggattctgagtgggcctttaggaccatgtgacccagaaggcctacccttgaggggaacgtcacgtgcaacactaaggagaatccagggcctgagggggaggtttcctgagaactccggccccaggctggcctgagctgccgggcagaggcctgtgctggcaacaggcattgccgggcctgcagctcagagggtcactgggactgagggcgatctgtggcctgaaaagcaaatgcacagttagtgcagctcctgaccaggccttcagggtggacagagggaggatcggtcatggcagccacacctgggcctggccttgctccgggacctgccagaggagctggcctggctctgtgcctgcctgcctccaggagcaggacggtggctgggagggtagtgactggggacacaggtgcaggtgttagtgcaggaccggaagggtgaggtggcctggtcctcggggctcctggcctgggctggctgaggcaggactctgccaaaagtcccctgccaggcctcatggtggtgctcctggtggcagtggctctctggccgcgggccctgtctgtgtctccgtggtggctctcacagggctctccagacactccttgactgcatccttcagtcttggcccctaggcctggggccccttgggagcttgcctgacctcccttcctgggctgggtagccatggcccgaggtgaccttctagcaggttcccccagggaggggaggccaccagctgactcaccgcctaggaaggcccaggtgctgacctagtggcggagaaaaagccgcacaccgagtgtggcttccagagcccctcttcagctccaggcagccccctctaacatgtcccctcctgagctcagcccccacccccatactcctggtggggaccaggtcttgcttggcttcggggctgaccgccggtcccctttcttctcaccacagtgcccatttttcatccagggagaacctcggggctgggacacctcctggccctcaccctgggtcatgtttacagtcctcagtgccccacaccggtggccccctgaggacacctccaccctgaccttgattttcccaaacgctgcctcttggtgacagactcagcccaaaaccccttccttctgtctctggagacccttgagcttggggaaatatggaggggtgtgtgtctgcaatcaaggcctctgcagctcacggctggcccggtgggctgggacttccgtctgaattttaaatacttagggttcatttttttttctctggcaacaaagcttgatgttttcactgctttagtttcctgtttgctggtgggaggggatacggtctgtgactctggacttgctctgggggaacagttgtcactgcccccggggagaggggcagcttgggctggagaagcacagccagagacagagcccctcgagagggatccttggctgcttcattgtcttccccccagcaagccctgctctccacaggcacctctggggtcttggtatggtccccgctcacctccttccagagtcctgagtggtgtgggtgtgggtggcacaggatctggggcatgggaggggttcagagcttcccagagccccgtgtcctggcagactcagctggtgggctggggtgttaaccccagtcctggcgtaggtttacagactctcaaggtacgttggccctggtctcctgggagagaggggtgagggatgtcccctaccaaagcacaaggtgggatcaggctgcctcctgggttgggtgtcgggggagctgtccggcagcctggcagggagatgcaagggctaaagtaaaattttgtcaagtaa

SEQ ID NO: 10279 - DNA, 1448 bp, Homo sapiens
  source 1..1448: mol_type = unassigned DNA
gtccggttgctcccgcctccttccgtcggatccgcgctctcccgcggctgcgccggcccggccgcccaggagacaaagcgctgccgccgccgtcgccgccaccgggccagtcccgaaccatggccgggccaccccgcaacctcgcgcctcccgtcccgtcgccgccctaggcctgcgctgcgagatgcagaaacagaggcccagagagatgaatagcctgcctggggtcccccagcccagatgctgcagagctgacatttgaatccagagaagagcgagctgaggctggagctgagcagagggcagggaggcaagtggtggcctgagaggccccaggctcccctccaggccccgcgattgccaccatgaagctgaacgagcgcagcctggccttctacgccacctgtgacgccccggtggacaatgcaggcttcctgtacaagaagggtgggcggcacgcggcctaccaccggcgctggttcgtgctgcgcgggaacatgctcttctacttcgaggacgctgccagccgtgagcccgtgggcgtcatcatcctggtggcagtggctctctggccgcgggccctgtctgtgtctccgtggtggctctcacagggctctccagacactccttgactgcatccttcagtcttggcccctaggcctggggccccttgggagcttgcctgacctcccttcctgggctgggtagccatggcccgaggtgaccttctagcaggttcccccagggaggggaggccaccagctgactcaccgcctaggaaggcccaggtgctgacctagtggcggagaaaaagccgcacaccgagtgtggcttccagagcccctcttcagctccaggcagccccctctaacatgtcccctcctgagctcagcccccacccccatactcctggtggggaccaggtcttgcttggcttcggggctgaccgccggtcccctttcttctcaccacagtgcccatttttcatccagggagaacctcggggctgggacacctcctggccctcaccctgggtcatgtttacagtcctcagtgccccacaccggtggccccctgaggacacctccaccctgaccttgattttcccaaacgctgcctcttggtgacagactcagcccaaaaccccttccttctgtctctggagacccttgagcttggggaaatatggaggggtgtgtgtctgcaatcaaggcctctgcagctcacggctggcccggtgggctgggacttccgtctgaattttaaatacttagggttcatttttttttctctggcaacaaagcttgatgttttcactgctttagtttcctgtttgctggtgggaggggatacggtctgtgactctggacttgctctgggggaacagttgtcactgcccccggggagaggggcagcttgggctggagaagcacagccagagacagagc

SEQ ID NO: 10280 - DNA, 2317 bp, Homo sapiens
  source 1..2317: mol_type = unassigned DNA
aacattatttcagggatacaggagggtaggaggttatgaggctgtctggggaggcccgtgagacccaggccccaggctcccctccaggccccgcgattgccaccatgaagctgaacgagcgcagcctggccttctacgccacctgtgacgccccggtggacaatgcaggcttcctgtacaagaagggtgggcggcacgcggcctaccaccggcgctggttcgtgctgcgcgggaacatgctcttctacttcgaggacgctgccagccgtgagcccgtgggcgtcatcatcctggagggctgcactgtggagctggtggaggccgccgaggagttcgccttcgctgtgcgctttgcggggacccgggcgcgcacctacgtgctggccgctgagagtcaggatgccatggagggctgggtcaaggccctgtcgcgtgccagcttcgactacctgcggctggtggtgcgcgagctggagcagcagctggcggctgtacgtggcgggggtggcatggccctgccccagccccagccccagtccctgcccttgcccccgtccctgccctctgccctggccccagtcccatccctgccttctgccccagccccggtcccagccctgcccctgccccgccggcccagtgccctcccgcccaaggagaatggctgcgctgtctggagcactgaggccaccttcaggcctggacccgagccccctccaccaccgcctcgccgccgggcctcggcaccccacgggcccctggacatggcccccttcgcccggctgcacgagtgctatggccaggagatccgggccctgcgtggccagtggctcagcagccgggtccagccctgaggccaccagggcgcctgttttagggggacacaagctctatgccctctgggacaggccgggtcctggagagactgggggagcagatcctgagggaaatcatgggcaaggctggcccccaggccctgagtggcctggttttgggggatgcaggctctgagaaggtgctggattctgagtgggcctttaggaccatgtgacccagaaggcctacccttgaggggaacgtcacgtgcaacactaaggagaatccagggcctgagggggaggtttcctgagaactccggccccaggctggcctgagctgccgggcagaggcctgtgctggcaacaggcattgccgggcctgcagctcagagggtcactgggactgagggcgatctgtggcctgaaaagcaaatgcacagttagtgcagctcctgaccaggccttcagggtggacagagggaggatcggtcatggcagccacacctgggcctggccttgctccgggacctgccagaggagctggcctggctctgtgcctgcctgcctccaggagcaggacggtggctgggagggtagtgactggggacacaggtgcaggtgttagtgcaggaccggaagggtgaggtggcctggtcctcggggctcctggcctgggctggctgaggcaggactctgccaaaagtcccctgccaggcctcatggtggtgctcctggtggcagtggctctctggccgcgggccctgtctgtgtctccgtggtggctctcacagggctctccagacactccttgactgcatccttcagtcttggcccctaggcctggggccccttgggagcttgcctgacctcccttcctgggctgggtagccatggcccgaggtgaccttctagcaggttcccccagggaggggaggccaccagctgactcaccgcctaggaaggcccaggtgctgacctagtggcggagaaaaagccgcacaccgagtgtggcttccagagcccctcttcagctccaggcagccccctctaacatgtcccctcctgagctcagcccccacccccatactcctggtggggaccaggtcttgcttggcttcggggctgaccgccggtcccctttcttctcaccacagtgcccatttttcatccagggagaacctcggggctgggacacctcctggccctcaccctgggtcatgtttacagtcctcagtgccccacaccggtggccccctgaggacacctccaccctgaccttgattttcccaaacgctgcctcttggtgacagactcagcccaaaaccccttccttctgtctctggagacccttgagcttggggaaatatggaggggtgtgtgtctgcaatcaaggcctctgcagctcacggctggcccggtgggctgggacttccgtctgaattttaaatacttagggttcatttttttttctctggcaacaaagcttgatgttttcactg

SEQ ID NO: 10281 - DNA, 571 bp, Homo sapiens
  source 1..571: mol_type = unassigned DNA
gtccggttgctcccgcctccttccgtcggatccgcgctctcccgcggctgcgccggcccggccgcccaggagacaaagcgctgccgccgccgtcgccgccaccgggccagtcccgaaccatggccgggccaccccgcaacctcgcgcctcccgtcccgtcgccgccctaggcctgcgctgcgaggccccaggctcccctccaggccccgcgattgccaccatgaagctgaacgagcgcagcctggccttctacgccacctgtgacgccccggtggacaatgcaggcttcctgtacaagaagggtgggcggcacgcggcctaccaccggcgctggttcgtgctgcgcgggaacatgctcttctacttcgaggacgctgccagccgtgagcccgtgggcgtcatcatcctggagggctgcactgtggagctggtggaggccgccgaggagttcgccttcgctgtgcgctttgcggggacccgggcgcgcacctacgtgctggccgctgagagtcaggatgccatggagggctgggtcaaggccctgtcgcgtgccagcttcgactacctgcgg

SEQ ID NO: 10282 - DNA, 2991 bp, Homo sapiens
  source 1..2991: mol_type = unassigned DNA
attcctctgaaatgtctggcatgcagcaggaactcacaacattatttcagggatacaggagggccccaggctcccctccaggccccgcgattgccaccatgaagctgaacgagcgcagcctggccttctacgccacctgtgacgccccggtggacaatgcaggcttcctgtacaagaagggtgggcggcacgcggcctaccaccggcgctggttcgtgctgcgcgggaacatgctcttctacttcgaggacgctgccagccgtgagcccgtgggcgtcatcatcctggagggctgcactgtggagctggtggaggccgccgaggagttcgccttcgctgtgcgctttgcggggacccgggcgcgcacctacgtgctggccgctgagagtcaggatgccatggagggctgggtcaaggccctgtcgcgtgccagcttcgactacctgcggctggtggtgcgcgagctggagcagcagctggcggctgtacgtggcgggggtggcatggccctgccccagccccagccccagtccctgcccttgcccccgtccctgccctctgccctggccccagtcccatccctgccttctgccccagccccggtcccagccctgcccctgccccgccggcccagtgccctcccgcccaaggagaatggctgcgctgtctggagcactgaggccaccttcaggcctggacccgagccccctccaccaccgcctcgccgccgggcctcggcaccccacgggcccctggacatggcccccttcgcccggctgcacgagtgctatggccaggagatccgggccctgcgtggccagtggctcagcagccgggtccagccctgaggccaccagggcgcctgttttagggggacacaagctctatgccctctgggacaggccgggtcctggagagactgggggagcagatcctgagggaaatcatgggcaaggctggcccccaggccctgagtggcctggttttgggggatgcaggctctgagaaggtgctggattctgagtgggcctttaggaccatgtgacccagaaggcctacccttgaggggaacgtcacgtgcaacactaaggagaatccagggcctgagggggaggtttcctgagaactccggccccaggctggcctgagctgccgggcagaggcctgtgctggcaacaggcattgccgggcctgcagctcagagggtcactgggactgagggcgatctgtggcctgaaaagcaaatgcacagttagtgcagctcctgaccaggccttcagggtggacagagggaggatcggtcatggcagccacacctgggcctggccttgctccgggacctgccagaggagctggcctggctctgtgcctgcctgcctccaggagcaggacggtggctgggagggtagtgactggggacacaggtgcaggtgttagtgcaggaccggaagggtgaggtggcctggtcctcggggctcctggcctgggctggctgaggcaggactctgccaaaagtcccctgccaggcctcatggtggtgctcctggtggcagtggctctctggccgcgggccctgtctgtgtctccgtggtggctctcacagggctctccagacactccttgactgcatccttcagtcttggcccctaggcctggggccccttgggagcttgcctgacctcccttcctgggctgggtagccatggcccgaggtgaccttctagcaggttcccccagggaggggaggccaccagctgactcaccgcctaggaaggcccaggtgctgacctagtggcggagaaaaagccgcacaccgagtgtggcttccagagcccctcttcagctccaggcagccccctctaacatgtcccctcctgagctcagcccccacccccatactcctggtggggaccaggtcttgcttggcttcggggctgaccgccggtcccctttcttctcaccacagtgcccatttttcatccagggagaacctcggggctgggacacctcctggccctcaccctgggtcatgtttacagtcctcagtgccccacaccggtggccccctgaggacacctccaccctgaccttgattttcccaaacgctgcctcttggtgacagactcagcccaaaaccccttccttctgtctctggagacccttgagcttggggaaatatggaggggtgtgtgtctgcaatcaaggcctctgcagctcacggctggcccggtgggctgggacttccgtctgaattttaaatacttagggttcatttttttttctctggcaacaaagcttgatgttttcactgctttagtttcctgtttgctggtgggaggggatacggtctgtgactctggacttgctctgggggaacagttgtcactgcccccggggagaggggcagcttgggctggagaagcacagccagagacagagcccctcgagagggatccttggctgcttcattgtcttccccccagcaagccctgctctccacaggcacctctggggtcttggtatggtccccgctcacctccttccagagtcctgagtggtgtgggtgtgggtggcacaggatctggggcatgggaggggttcagagcttcccagagccccgtgtcctggcagactcagctggtgggctggggtgttaaccccagtcctggcgtaggtttacagactctcaaggtacgttggccctggtctcctgggagagaggggtgagggatgtcccctaccaaagcacaaggtgggatcaggctgcctcctgggttgggtgtcgggggagctgtccggcagcctggcagggagatgcaagggctaaagtaaaattttgtcaagtaatggctgattgtgtcattttttttccccatcaaaatccttgattgatttccctggcagagcccagagcaggctgtgcaagggcagggactagtgtgtggtcccacatggctggtgccctgccaggcacgttctcacttctcaagg

SEQ ID NO: 10283 - DNA, 2317 bp, Homo sapiens; identical to SEQ ID NO: 10280
  source 1..2317: mol_type = unassigned DNA

SEQ ID NO: 10284 - DNA, 574 bp, Homo sapiens
  source 1..574: mol_type = unassigned DNA
gactgtccggttgctcccgcctccttccgtcggatccgcgctctcccgcggctgcgccggcccggccgcccaggagacaaagcgctgccgccgccgtcgccgccaccgggccagtcccgaaccatggccgggccaccccgcaacctcgcgcctcccgtcccgtcgccgccctaggcctgcgctgcgagatgcagaaacagaggcccagagagatgaatagcctgcctggggtcccccagcccagatgctgcagagctgacatttgaatccagagaagagcgagctgaggctggagctgagcagagggcagggaggcaagtggctcccctccaggccccgcgattgccaccatgaagctgaacgagcgcagcctggccttctacgccacctgtgacgccccggtggacaatgcaggcttcctgtacaagaagggtgggcggcacgcggcctaccaccggcgctggttcgtgctgcgcgggaacatgctcttctacttcgaggacgctgccagccgtgagcccgtgggcgtcatcatcctggagggctgcactgtggagctggtggaggccgccga

SEQ ID NO: 10285 - DNA, 718 bp, Homo sapiens
  source 1..718: mol_type = unassigned DNA
aggggcgcgcccgtgggtcgcggactgtccggttgctcccgcctccttccgtcggatccgcgctctcccgcggctgcgccggcccggccgcccaggagacaaagcgctgccgccgccgtcgccgccaccgggccagtcccgaaccatggccgggccaccccgcaacctcgcgcctcccgtcccgtcgccgccctaggcctgcgctgcgagatgcagaaacagaggcccagagagatgaatagcctgcctggggtcccccagcccagatgctgcagagctgacatttgaatccagagaagagcgagctgaggctggagctgagcagagggcagggaggcaagtggtggcctgagagtttgctgaggatgatggcttccagctccatctatttccccgcaaaggacatgatctcattcctttttatggctggatagttttccatggccccaggctcccctccaggccccgcgattgccaccatgaagctgaacgagcgcagcctggccttctacgccacctgtgacgccccggtggacaatgcaggcttcctgtacaagaagggtgggcggcacgcggcctaccaccggcgctggttcgtgctgcgcgggaacatgctcttctacttcgaggacgctgccagccgtgagcccgtgggcgtcatcatcctggagggctgcactgtggagctggtggaggccgccgaggagttcgccttcgc

SEQ ID NO: 10286 - DNA, 2335 bp, Homo sapiens
  source 1..2335: mol_type = unassigned DNA
ggctcccgcggccacgttgcagcccaggcggaggcgcgggatctcgagctgggatcgccctcttgggcttcggtgcgatcggcggcgggaggttccctgggaaccaggtggtcgaagggctgagctgtgtggccagacaagaggtccctgccctcccccagtgagccctgctgttcccgtgggagccatgaagctgaacgagaggagtgtagcccactatgcactcagcgactccccagcggaccacatgggcttcctgcgcacctgggggggcccagggaccccaccgacccccagtggcactggccgaagatgctggtttgtcctcaagggcaacctgctattctcctttgagagtcgcgagggccgggccccactgagcctggtggtgctggaaggctgcacagtggaactggccgaggctcccgtgcccgaggagtttgcctttgccatctgctttgatgcccctggagtgcgcccacacctgctggccgcagaagggccggcggcccaggaggcctgggtgaaggtgctgtcccgggcaagctttggctacatgcgcctggtggtacgcgagttggagagccagttgcaggacgcacgccagagcctggctttgcaacgccgctcatcctggaagtctgttgccagccgctgtaagccccaggctcctaaccaccgagctgcgggcctggagaatggccactgcctctccaaggacagcagccctgtgggcttggttgaagaagcgggcagcaggtctgcagggtgggggttggctgagtgggagctgcagggccctgccagcctcctcctaggcaaggggcagagccctgtgtcccctgagacctcctgcttctctaccctgcatgactggtatggccaggagatcgtggagctgcggcagtgttggcagaagagggcccaggggagccactcaaaatgtgaggaacaggataggccctaagtctgggccctttgagtcaggaaaccagggccagttctttttcaggagttaaatgtttacccatttccaaggttgcgttttgggaggggacatgggttctctccttcctgctatttaggcattctccaggttcgagatccacccgtgtgtctggaagggactgcgggaccattccttccatcctctttatttcctgaggtccagagaaggaaggagacttagcagccacagagcaagaccccaatctcctgactgcactggcctgactgccccctcccaggggatgttaatgaaatgaaggaagtggggaatgtcacccgagactgtcacaggcttgccatacctttggcctacacaccgggctctagagccataatttccaacctggggagtctcctgtgcacttaaatccgaggtaggctgcagtatcggcttgaagctctgacactgtcagagaaagtggatttattgtgtcataggagtttctgggacccagctcttcctgagaggggtgggaagattggggatgggatcctcactcagcagtctgggtagggccctttgaggcagagggtcttcggccagtgaagagagatttattctgctcagagtgctggggtcccatcctttctccctggctgccctgttaacagatggtgctggaccttgccccggaaggggcttgtagcttttttacgtcaacgaaatgccctcctgtactctgtcttcagcagccaactcctggagctgccaagtgaggggttaaagaagaggtggggaggcagtgtggctccctgggaaaagtctgttgctttggttctcagtcctgggtattctaggagcttggacacgggattgcgtttcctgtgctaaaattctctctcctggctgggctccggtaaactgaagctgctcgagaaatcacctgggaactctcatagccgtttgtcacccagggtgtacttgccaggacctctccttgctactcttcccaaagtcgggaggcaaagcggctgggtcaccagagcctgaccatactgacgctccagggggaagacgcagaggccgggaagagacaccccctcccaaacacataaaacttgccccttcctagcctcggctcccctcactggggccttgggcaggaccgacccgcatccaactaggcctaaggggtaggctctgagcctcttacccctaagaggcggagatgcgcccaaggcgggcgcccggcctgttccccagccctgcctggaagccccgcagccactgcattttgtttaaacacagatagcacgggcctttctcttattgctacagtgttttgtacacggttaaaacactagtaaagctttttcgttattactc

SEQ ID NO: 10287 - DNA, 537 bp, Homo sapiens
  source 1..537: mol_type = unassigned DNA
gcgggctccgggaggaggtggccccagggaaggtgtggccgcggggaagtggcggcgaacagccccgacgcgaggacggggaaaccaaggcggcagccagggagaccctgaccgaggttccctgggaaccaggtggtcgaagggctgagctgtgtggccagacaagaggtccctgccctcccccagtgagccctgctgttcccgtgggagccatgaagctgaacgagaggagtgtagcccactatgcactcagcgactccccagcggaccacatgggcttcctgcgcacctgggggggcccagggaccccaccgacccccagtggcactggccgaagatgctggtttgtcctcaagggcaacctgctattctcctttgagagtcgcgagggccgggccccactgagcctggtggtgctggaaggctgcacagtggaactggccgaggctcccgtgcccgaggagtttgcctttgccatctgctttgatgcccctggagtgcgcccacacctgctggccgcagaagggccggcggccc

SEQ ID NO: 10288 - DNA, 1794 bp, Homo sapiens
  source 1..1794: mol_type = unassigned DNA
gaacgaggcggctgtggcggtggctgaggcggctgggcctagggtgcagcgggcgcgtctgcggctggtgttggcgcatctctagatgtcaccagcacctgcctagctgtcaaggagtggtttgtgtatcctgggaacccactgaggcacccggacctcgtcaggccgctgcagatgaccattccagggggaacgcctagtttgaaaatattatggctgaaccaagagccagaaatacaggttcggcgcttggacacactcctagcctgtttcaatctttcctcctcaagagaagagctgcaggctgtcgaaagcccatttcaagctttgtgctgcctcttgatctacctctttgtccaggtggacacgctttgcctggaggatttgcatgcgtttattgcgcaggccttgtgcctccaaggaaaatccacctcgcagcttgtaaatctacagcctgattacatcaaccccagagccgtgcagctgggctcccttctcgtccgcggcctcaccactctggttttagtcaacagcgcatgtggcttcccctggaagacgagtgatttcatgccctggaatgtatttgacgggaagctttttcatcagaagtacttgcaatctgaaaagggttatgctgtggaggttcttttagaacaaaatagatctcggctcaccaaattccacaacctgaaggcagtcgtctgcaaggcctgcatgaaggagaacagacgcatcactggccgagcccactggggctcacaccacgcagggaggtggggaagacagggctccagctaccacaggacgggctctgggtatagccgttccagtcagggacagccgtggagagaccagggaccaggaagcagacagtatgagcatgaccagtggagaaggtactagtcaacctccagaaagagtatggagagaaaaagaggcacacctggacgcagagccctgccagcgccctcctctgctgttgcagctgcaaggagaccatgcctgtgggagccaggcctcgcttgcatgaagaaggaacgatgcctttttcaatggtgtctccctcccattgtgcagaagagcttttgttggcttctctcccgagcttgtgcctgattctgtggcccaaaacaatcattgttaacatcttcatgtgtttcattctgatctttcattcatatatatgatgcctagctaatttcattttaaaataaatgggaatctgttgtattctgattttttattagcaacactagattatgaggggttatctcctgttattaaaaagtcagaaaacactatacagtagtcctcccttatctgcgggggagacatcccaagaccctcagtggatgcctgagactggatagtatggaatcctacatatctataccttggctttttcctctacgtacataccatgataaagcttaacaaagaacagtgagagattaacagcaaccaataactaataaaagctatgtgaatgtggtctctgtcaaaatatcgtgctgtaatcacccttcttgctatctgaaaaccaagaagaccactaagtgactaatggtcagagaagctggatgaggggctgattcatgtcctgggcatgacagagcgggaggcacaaggtttcatcacactattcacaatggcgagcaagttaaaacggatttcccatttaatttaattttcagacttcagttgaccatgagtaaccgaaaccacagaaagtgaagctggggatatttcagaaattcttttctaatcagaaattctaatcaaacataagtttcc

SEQ ID NO: 10289 - DNA, 5155 bp, Homo sapiens
  source 1..5155: mol_type = unassigned DNA
gtgaacgaggcggctgtggcggtggctgaggcggctgggcctagggtgcagcgggcgcgtctgcggctggtgttggcgcatctctagatcctttcccggagttcagttatgggtgtgagaggtttgcaaggatttgtgggaagtacctgcccacatatatgtacagtagtaaatttcaaagaactggcagagcaccaccgaagcaagtatcctggatgtacccctaccattgtggttgatgccatgtgttgtctcagatattggtatactccagaatcttggatctgcggtggccagtggcgagaatacttttctgctttgcgagattttgttaaaacttttacggcagctgggatcaagttgatattcttctttgatggcatggtggagcaggataagagagatgaatgggtgaaacgaaggctcaagaacaacagggagatatccaggatttttcattacatcaagtcacacaaggagcagccaggcagaaatatgttcttcatcccctcagggctagctgtgtttacacgatttgctctaaagacactgggccaggaaactttgtgttctttgcaggaagcagattatgaggtagcttcctatggcctccagcataactgtcttgggattctgggggaagacactgattacctaatctatgacacttgtccctacttttcaattagcgagctctgcctagagagcctggacaccgtcatgctctgcagagagaagctctgtgagagtctgggcctctgtgtggccgaccttcctcttctggcctgcctccttggcaacgacataatcccagagggcatgtttgaaagctttaggtacaaatgcttatcgtcctacacctctgtaaaagagaactttgacaaaaaaggtaacatcatattagctgtgtcagaccatatatcgaaagttctttacttgtatcaaggtgagaaaaaattagaagagatattacctctgggaccaaacaaagctcttttttataaaggaatggcatcatatcttttaccaggacaaaaatctccatggtttttccaaaaacccaaaggtgtaataactttggacaaacaagtaatatccacgagttcagacgccgaatccagggaagaagttcccatgtgttcagatgctgaatccaggcaagaagttcccatgtgtacaggccctgaatccaggcgagaagttcccgtgtatacagattctgaacccaggcaagaagttcccatgtgttcagaccctgaacccaggcaagaagttcccacgtgtacaggccctgaatccaggcgagaagttcccatgtgttcagaccctgaacccaggcaagaagttcccatgtgtacaggccctgaagccaggcaagaagttcccatgtatacagactctgaacccaggcaagaagttcccatgtatacagactctgaacccaggcaagaagttcccatgtatacaggctctgaacccaggcaagaagttcccatgtatacaggccctgaatccaggcaagaagttcccatgtatacaggccctgaatccaggcaagaagttttaatacggacagaccctgaatctaggcaagaaattatgtgtacaggccatgaatccaaacaggaagttcccatatgtacagatcctatatccaagcaagaagactccatgtgtacacacgctgaaatcaatcaaaaattacctgtagcaacagattttgaatttaagctagaagctctcatgtgtacaaaccctgaaattaaacaagaagaccccacaaatgtggggcctgaagtaaagcaacaagtaaccatggtttcagacactgaaatcttaaaggttgctagaacacatcacgtccaagcagaaagctacctggtgtacaacatcatgagcagtggagagattgaatgcagcaacaccctagaagatgagcttgaccaggccttacccagccaggccttcatttaccgtcccattcgacagcgggtctactcactcttactggaggactgtcaagatgtcaccagcacctgcctagctgtcaaggagtggtttgtgtatcctgggaacccactgaggcacccggacctcgtcaggccgctgcagatgaccattccagggggaacgcctagtttgaaaatattatggctgaaccaagagccagaaatacaggttcggcgcttggacacactcctagcctgtttcaatctttcctcctcaagagaagagctgcaggctgtcgaaagcccatttcaagctttgtgctgcctcttgatctacctctttgtccaggtggacacgctttgcctggaggatttgcatgcgtttattgcgcaggccttgtgcctccaaggaaaatccacctcgcagcttgtaaatctacagcctgattacatcaaccccagagccgtgcagctgggctcccttctcgtccgcggcctcaccactctggttttagtcaacagcgcatgtggcttcccctggaagacgagtgatttcatgccctggaatgtatttgacgggaagctttttcatcagaagtacttgcaatctgaaaagggttatgctgtggaggttcttttagaacaaaatagatctcggctcaccaaattccacaacctgaaggcagtcgtctgcaaggcctgcatgaaggagaacagacgcatcactggccgagcccactggggctcacaccacgcagggaggtggggaagacagggctccagctaccacaggacgggctctgggtatagccgttccagtcagggacagccgtggagagaccagggaccaggaagcagacagtatgagcatgaccagtggagaaggtactagtcaacctccagaaagagtatggagagaaaaagaggcacacctggacgcagagccctgccagcgccctcctctgctgttgcagctgcaaggagaccatgcctgtgggagccaggcctcgcttgcatgaagaaggaacgatgcctttttcaatggtgtctccctcccattgtgcagaagagcttttgttggcttctctcccgagcttgtgcctgattctgtggcccaaaacaatcattgttaacatcttcatgtgtttcattctgatctttcattcatatatatgatgcctagctaatttcattttaaaataaatgggaatctgttgtattctgattttttattagcaacactagattatgaggggttatctcctgttattaaaaagtcagaaaacactatacagtagtcctcccttatctgcgggggagacatcccaagaccctcagtggatgcctgagactggatagtatggaatcctacatatctataccttggctttttcctctacgtacataccatgataaagcttaacaaagaacagtgagagattaacagcaaccaataactaataaaagctatgtgaatgtggtctctgtcaaaatatcgtgctgtaatcacccttcttgctatctgaaaaccaagaagaccactaagtgactaatggtcagagaagctggatgaggggctgattcatgtcctgggcatgacagagcgggaggcacaaggtttcatcacactattcacaatggcgagcaagttaaaacggatttcccatttaatttaattttcagacttcagttgaccatgagtaaccgaaaccacagaaagtgaagctggggatatttcagaaattcttttctaatcagaaattctaatcaaacataagtttccaactatgtgttctcttggtcctcagaagtgtttgaatagaaaagtaacaactaacttcccatctttctggtggaagagttaattctgcctggagggttctgcctgggagacatgacagcatgtgtgtgactcctgtgtctgtttctgtggggtcatccctttcgtttcattttgccagggcctggctcaggattttttatggcagtgcctgtgaagacaagcctggccctccatccagtcacacaggaaatccacagagagcatgctgagagcagccagcggctgggctgccatcaggcctggtttatgatgccacaagtgaatggcacgtttgttcctctttatctctgagcattgaaggacttttggttaaaaaaaaaaattaagttcagagtaatccttttcatggaagaatcttcaggtcaccaaagaattgaaattttaagccccagattgtactgagctgtacctgtgggaaaaggaatggccagggtattgatgatggaaaagattcaaatgaggagttagaaggcaagccctctgtgggcagccgtcttccagaaacctcgaacttatgtctgtctccacctgagaaaggagaagaaaagctggtggtgacccctgctcctgctgggccatgccatggctctgaagatgccccgtgttcttaggaggtgctcacccctggcacctaaagacatttccttctggttgttgctctttaaaaacaaaataagcccctgaacgtgcttgcaggccagtttgtgtgcctgcacttgacgaattaccttgaccaacgggccaaaggcacagagctccaaggcatcatctttccttaaaatcctgagtgtttattaaaaagggacatggtctctaggtatcttattacatttgtatttcttacatttgaaatatcctaaccgctcccttcggtttcttcttaagaacatttacatctaattatttttcgtgcaagtcttgtaggacccacatgttttcctagctttggaaatcgatttttttcattcctcttatgaggatttccctatgtcagtaaacattaactttctatttcttccatttttgctcatttgaaacccctgctgcttctagatctatttctttgcacttgtataactttgaaataaattcctcatcccttagactaagagagtgggtgtctgtgaaaattgttttctccttcataatacctaaattctagtttgtcagtaaaatatttgtgtttggttaacaagctcttatttaagccattgagttagtataatctttattacctttgaaaaaccagagagctgaattttttgtcattctaagttgtaagtaacactgcagtcaagtcttctgatgaaatttccatatatcaaattgaaaataaagcaaaatatatttattactcataact

SEQ ID NO: 10290 - DNA, 3212 bp, Homo sapiens
  source 1..3212: mol_type = unassigned DNA
actcggttgccgcgcgtggacttacaagcccacgaagccatcgttcgtcacagcctggaaaagggagggggcatcgatctggtttatgtttggacctcgaggctccaccagcgctggcgcaggcaggaaggagatcctttcccggagttcagttatgggtgtgagaggtttgcaaggatttgtgggaagtacctgcccacatatatgtacagtagtaaatttcaaagaactggcagagcaccaccgaagcaagtatcctggatgtacccctaccattgtggttgatgccatgtgttgtctcagatattggtatactccagaatcttggatctgcggtggccagtggcgagaatacttttctgctttgcgagattttgttaaaacttttacggcagctgggatcaagttgatattcttctttgatggcatggtggagcaggataagagagatgaatgggtgaaacgaaggctcaagaacaacagggagatatccaggatttttcattacatcaagtcacacaaggagcagccaggcagaaatatgttcttcatcccctcagggctagctgtgtttacacgatttgctctaaagacactgggccaggaaactttgtgttctttgcaggaagcagattatgaggtagcttcctatggcctccagcataactgtcttgggattctgggggaagacactgattacctaatctatgacacttgtccctacttttcaattagcgagctctgcctagagagcctggacaccgtcatgctctgcagagagaagctctgtgagagtctgggcctctgtgtggccgaccttcctcttctggcctgcctccttggcaacgacataatcccagagggcatgtttgaaagctttaggtacaaatgcttatcgtcctacacctctgtaaaagagaactttgacaaaaaaggtaacatcatattagctgtgtcagaccatatatcgaaagttctttacttgtatcaaggtgagaaaaaattagaagagatattacctctgggaccaaacaaagctcttttttataaaggaatggcatcatatcttttaccaggacaaaaatctccatggtttttccaaaaacccaaaggtgtaataactttggacaaacaagtaatatccacgagttcagacgccgaatccagggaagaagttcccatgtgttcagatgctgaatccaggcaagaagttcccatgtgtacaggccctgaatccaggcgagaagttcccgtgtatacagattctgaacccaggcaagaagttcccatgtgttcagaccctgaacccaggcaagaagttcccacgtgtacaggccctgaatccaggcgagaagttcccatgtgttcagaccctgaacccaggcaagaagttcccatgtgtacaggccctgaagccaggcaagaagttcccatgtatacagactctgaacccaggcaagaagttcccatgtatacagactctgaacccaggcaagaagttcccatgtatacaggctctgaacccaggcaagaagttcccatgtatacaggccctgaatccaggcaagaagttcccatgtatacaggccctgaatccaggcaagaagttttaatacggacagaccctgaatctaggcaagaaattatgtgtacaggccatgaatccaaacaggaagttcccatatgtacagatcctatatccaagcaagaagactccatgtgtacacacgctgaaatcaatcaaaaattacctgtagcaacagattttgaatttaagctagaagctctcatgtgtacaaaccctgaaattaaacaagaagaccccacaaatgtggggcctgaagtaaagcaacaagtaaccatggtttcagacactgaaatcttaaaggttgctagaacacatcacgtccaagcagaaagctacctggtgtacaacatcatgagcagtggagagattgaatgcagcaacaccctagaagatgagcttgaccaggccttacccagccaggccttcatttaccgtcccattcgacagcgggtctactcactcttactggaggactgtcaagatgtcaccagcacctgcctagctgtcaaggagtggtttgtgtatcctgggaacccactgaggcacccggacctcgtcaggccgctgcagatgaccattccagggggaacgcctagtttgaaaatattatggctgaaccaagagccagaaatacaggttcggcgcttggacacactcctagcctgtttcaatctttcctcctcaagagaagagctgcaggctgtcgaaagcccatttcaagctttgtgctgcctcttgatctacctctttgtccaggtggacacgctttgcctggaggatttgcatgcgtttattgcgcaggccttgtgcctccaaggaaaatccacctcgcagcttgtaaatctacagcctgattacatcaaccccagagccgtgcagctgggctcccttctcgtccgcggcctcaccactctggttttagtcaacagcgcatgtggcttcccctggaagacgagtgatttcatgccctggaatgtatttgacgggaagctttttcatcagaagtacttgcaatctgaaaagggttatgctgtggaggttcttttagaacaaaatagatctcggctcaccaaattccacaacctgaaggcagtcgtctgcaaggcctgcatgaaggagaacagacgcatcactggccgagcccactggggctcacaccacgcagggaggtggggaagacagggctccagctaccacaggacgggctctgggtatagccgttccagtcagggacagccgtggagagaccagggaccaggaagcagacagtatgagcatgaccagtggagaaggtactagtcaacctccagaaagagtatggagagaaaaagaggcacacctggacgcagagccctgccagcgccctcctctgctgttgcagctgcaaggagaccatgcctgtgggagccaggcctcgcttgcatgaagaaggaacgatgcctttttcaatggtgtctccctcccattgtgcagaagagcttttgttggcttctctcccgagcttgtgcctgattctgtggcccaaaacaatcattgttaacatcttcatgtgtttcattctgatctttcattcatatatatgatgcctagctaatttcattttaaaataaatgggaatctgttg

SEQ ID NO: 10291 - DNA, 3721 bp, Homo sapiens
  source 1..3721: mol_type = unassigned DNA
gtcactcggcggcggcggtcgttccgggagcactccgggctccgatctccggtgtcacagcaaagatccgcgtctttccgatgaatccagccaatgccatccagtacacacgcgcaggaccggaggggccgggccgtgggaggaggctctgcgccgcggctgcccgggttcccctgcgctctgccctcggccgggtcgggtctccgcgggtgcgcgcagaggatctggctctcgccggcgcctgccgcccttatattcagccggccgcccgcatggctaatgagatgcaaatcagcagccccccaatctggcgagagctgtcacaaaggagccacttttccaaaccctcctctcaatggatcgccaaatgatcctttcccggagttcagttatgggtgtgagaggtttgcaaggatttgtgggaagtacctgcccacatatatgtacagtagtaaatttcaaagaactggcagagcaccaccgaagcaagtatcctggatgtacccctaccattgtggttgatgccatgtgttgtctcagatattggtatactccagaatcttggatctgcggtggccagtggcgagaatacttttctgctttgcgagattttgttaaaacttttacggcagctgggatcaagttgatattcttctttgatggcatggtggagcaggataagagagatgaatgggtgaaacgaaggctcaagaacaacagggagatatccaggatttttcattacatcaagtcacacaaggagcagccaggcagaaatatgttcttcatcccctcagggctagctgtgtttacacgatttgctctaaagacactgggccaggaaactttgtgttctttgcaggaagcagattatgaggtagcttcctatggcctccagcataactgtcttgggattctgggggaagacactgattacctaatctatgacacttgtccctacttttcaattagcgagctctgcctagagagcctggacaccgtcatgctctgcagagagaagctctgtgagagtctgggcctctgtgtggccgaccttcctcttctggcctgcctccttggcaacgacataatcccagagggcatgtttgaaagctttaggtacaaatgcttatcgtcctacacctctgtaaaagagaactttgacaaaaaaggtaacatcatattagctgtgtcagaccatatatcgaaagttctttacttgtatcaaggtgagaaaaaattagaagagatattacctctgggaccaaacaaagctcttttttataaaggaatggcatcatatcttttaccaggacaaaaatctccatggtttttccaaaaacccaaaggtgtaataactttggacaaacaagtaatatccacgagttcagacgccgaatccagggaagaagttcccatgtgttcagatgctgaatccaggcaagaagttcccatgtgtacaggccctgaatccaggcgagaagttcccgtgtatacagattctgaacccaggcaagaagttcccatgtgttcagaccctgaacccaggcaagaagttcccacgtgtacaggccctgaatccaggcgagaagttcccatgtgttcagaccctgaacccaggcaagaagttcccatgtgtacaggccctgaagccaggcaagaagttcccatgtatacagactctgaacccaggcaagaagttcccatgtatacagactctgaacccaggcaagaagttcccatgtatacaggctctgaacccaggcaagaagttcccatgtatacaggccctgaatccaggcaagaagttcccatgtatacaggccctgaatccaggcaagaagttttaatacggacagaccctgaatctaggcaagaaattatgtgtacaggccatgaatccaaacaggaagttcccatatgtacagatcctatatccaagcaagaagactccatgtgtacacacgctgaaatcaatcaaaaattacctgtagcaacagattttgaatttaagctagaagctctcatgtgtacaaaccctgaaattaaacaagaagaccccacaaatgtggggcctgaagtaaagcaacaagtaaccatggtttcagacactgaaatcttaaaggttgctagaacacatcacgtccaagcagaaagctacctggtgtacaacatcatgagcagtggagagattgaatgcagcaacaccctagaagatgagcttgaccaggccttacccagccaggccttcatttaccgtcccattcgacagcgggtctactcactcttactggaggactgtcaagatgtcaccagcacctgcctagctgtcaaggagtggtttgtgtatcctgggaacccactgaggcacccggacctcgtcaggccgctgcagatgaccattccagggggaacgcctagtttgaaaatattatggctgaaccaagagccagaaatacaggttcggcgcttggacacactcctagcctgtttcaatctttcctcctcaagagaagagctgcaggctgtcgaaagcccatttcaagctttgtgctgcctcttgatctacctctttgtccaggtggacacgctttgcctggaggatttgcatgcgtttattgcgcaggccttgtgcctccaaggaaaatccacctcgcagcttgtaaatctacagcctgattacatcaaccccagagccgtgcagctgggctcccttctcgtccgcggcctcaccactctggttttagtcaacagcgcatgtggcttcccctggaagacgagtgatttcatgccctggaatgtatttgacgggaagctttttcatcagaagtacttgcaatctgaaaagggttatgctgtggaggttcttttagaacaaaatagatctcggctcaccaaattccacaacctgaaggcagtcgtctgcaaggcctgcatgaaggagaacagacgcatcactggccgagcccactggggctcacaccacgcagggaggtggggaagacagggctccagctaccacaggacgggctctgggtatagccgttccagtcagggacagccgtggagagaccagggaccaggaagcagacagtatgagcatgaccagtggagaaggtactagtcaacctccagaaagagtatggagagaaaaagaggcacacctggacgcagagccctgccagcgccctcctctgctgttgcagctgcaaggagaccatgcctgtgggagccaggcctcgcttgcatgaagaaggaacgatgcctttttcaatggtgtctccctcccattgtgcagaagagcttttgttggcttctctcccgagcttgtgcctgattctgtggcccaaaacaatcattgttaacatcttcatgtgtttcattctgatctttcattcatatatatgatgcctagctaatttcattttaaaataaatgggaatctgttgtattctgattttttattagcaacactagattatgaggggttatctcctgttattaaaaagtcagaaaacactatacagtagtcctcccttatctgcgggggagacatcccaagaccctcagtggatgcctgagactggatagtatggaatcctacatatctataccttggctttttcctctacgtacataccatgataaagcttaacaaagaacagtgagagattaacagcaaccaataactaataaaagctatgtgaatgtggtctctgtc

SEQ ID NO: 10292 - DNA, 8057 bp, Homo sapiens
  source 1..8057: mol_type = unassigned DNA
cagatcgtcgcctatcctgcttgcgcagccgctatcgcgtctgcccaccgacgaagcatgggtgtccagggcttccaagagttcctggagaagcgctgtcccggggccgtggtgcccgtggacctcctaaaactcgcgcgcacggtctcgcgccagcagcagcagcagcacttgcaccgccagctgccgccgactgcagccctagcgcccggggctccacgcgccgccaggggctccgtgcctctgcaaccgccgcttccgcccgctgccttgggtgcctactccgggggcgcggggccgattcggcaccatcaccccgctcaccacttccaccatcatggccaagcgcagcccgggctgcaccctccgctgccgccgccgccgccccctcagctgcccggggcccgggtgctggtggacgccggctcggcgctgccgcggctctatggcggctaccagacggattgggtgtgtggcggccaatggaacgccatgctgggctacttgtcagcgctgtgccaggcttgtgcctatcctggcggcgacggcctggagctcgtggtcatgttcccggggggcctgggcaaggaccggctggccgagtggggccgtcggtgccaggccgagcggcagacagcgcaactgatcgtgggacacgtgggcaacaagggcacccctccaccgcgggcctggttcctgccaccggcctgcctgagccactgcgtgaggctagcactcatccgcttccgggtcaaggtctttcagagccttgaagaccaccatttggaagtggtggcgtttttcagggaaaatggcttccatggccttcttgcccatgactccgagtatgctctctacaatattccctcttactacagttcccatgctctgaaactgagctggaatgggaagaacctcactaccaaccagttcctgatgcaagaagtagccaagcagctgggcctgaagaggatgaatttccccatatttgctgcactgctaggtaaccacatcctcccagatgaggacctggctgcttttcactggagcctcttgggaccagaacatcctcttgcatcacttaaggttcgagctcatcagctggttcttcctccctgtgacgtggtgatcaaggctgtttctgagtatgtcagttccatcaaagatccctcaaacctggatgtagttgggaaggatgttttcaaacagtctcagtccaggacagaagataaaatagagcgattcaagaaagcagttgagtattattcagtcacaaccaaactctcttcgctgccagtgggtccctcctttctaggttttcggaataataggcttggaaatcctccccttccacgaaatcaagtgggcaccatttctgctggaaagccaatgttttctcatcaagtgccccagaaagtgaaatatccaccaccattcccagtgggacccaactcatctcttctcttctcctcccatgctttgggggaatcccatgctttttctgaggatcccatgctgcagaacagcccctttgccaattgggctgtctcctatgactcttctgcatcccagtttcccaattacctgccttctaaagcctcacctcctttgggaccagactcttcccactcctcttcctctgatggtgatgagccaaatggagctagctctgatcatatcacagaagcatttcatcaccagcctgagtggggaaatcccaatcgtgacagagggtcctgggcacagcctgttgatactggagtttcagaagcgagcctaggtgatggtgagccccacatcccatctctgctgtctatgtctacaaggaaccacatggatatcaccattccacccttacctccagtagctccagaagtcttgagagttgctgaacacagacaccggaggggtcttatgtacccatatatctaccatgtcctcactaagggtgaaattaagatccccgtatgtattgaggatgagtgtaacatggagctgcctccagctgctctcttattccggtcagctcgtcaatatgtatatggagttctttttagtctggcagagacacagaggaaaatggaacgcttggccatgcgacggcggctgcctgtggaagttccttcagtgatccttaaagagtggtctgcctataaagggaagtcacctcaaacccctgagctggtgtctgcactgacatttcgggaatggacttgcccaaacctcaagaagctctggctaggcaaagcagttgaagacaagaacagaaggatgcgggccttcctggcctgtatgaagtcggacacgcccagtatgctcaatccagctaatgtccccacccatctgctgctcatgtgttgtgtactccggtacatggttcagtggcctggtggccgaatcctgcatcgccatgagctagacaccttccttgcacaggcagtgtctacccagctttatgaaccagatcgactccaagaactcaagattgagaaactggatgcccgagggatccagcttgctgccctcttcatgagtggagtcgacacagctctgtttgctaatgatgcctgtggccagccagtcccttgggagcattgctgtccatggatttactttgatggcaagctgttccagagcaagctaattaaagcaggccgagagcgagtatctctggttgagctctgtgatggccaggctgacctggcaaccaaagtggaaaagatgagacagagcatccttgaaggagtcaacatgaatcatccaccgccttctgctctacttccgtcacctacttttgtgcctcccatggtgccctctctctaccctgtttcactttattcccgagctatgggctccatgccacttccccctcaagggaggagccggggatttgcaggtctccatccaatcccaccccaaggaggaaaactggagattgctgggatggttgtgggccagtgggctggcagcagatcctccaggggccgaggatccttcggcatgcaagtggtttctgtcggtgggccaggaaaggggcatggaaaagaacagactggtagaggatccaagggacacaaaaaaggaaataagcaaggctcttcagatggagtttctaaatccctggagcttcatcaaggtcggtctcgctcccaggtaaatggaaacagtggcgcattgatcaaggaagagaagagtgatcatcgtcttccagctccatcacaatgtgccttatccagagacagcaatgagtgtaataatggtaaccgctacctccctatgaataatagggagaagaaccacttacaagagcaaaagctagaaactgtggcacaacggaaagaggactgataagctgaagatggcttcaccaaaccaggaagagggaaaaacttttacttttctgattttaggcccaagctagaggaggatataaatgcttaccctagatttctccaggattttggtgggatgtcctattgtgtccatcttttccccttccctgcctgtttctgggacttcagattcagtggtctgtttctggagaagttctggtcaaagatgaatggcagtaagactaggtcctagtctcaaattgaagatatagcaccaatagtttatttatctcctctgggagcctagtaaggcagtagctgtcagaaattgggtatcatcacataaggtcctatagaaaagctctagctttggtttttctgagcatttataatgatactcattatcaaagacttatatgataaacctatgaggttgtggggacagctgtggcctcctgaggtttttttttgttttttttttttctctatgaagtggtatctacctcttcttcactccttccaacttacctacccctggattttgtaccaccacctctagctttggcctgacaatcagataggtagatgttttcagaaaagtaaggtagtattggttattttaatttttattttttattttatacacttcaaaaaaactatcaatggcctttgtactgggggattcaagtgaatcagaaaagtactgggcagatttttcctgcctctcaaccagtgcattgtttgtaaaatagaagatgtggcacagttcattcactccctattgcccacaccatgaaagggtgggaatcagtgtaatgaacttgagtacgaaagggactcaagagactgtgtgtgtgtgtgtgtgtgtgtgtgtgtgtgtgtgtgtgtgaatgtgtgcttgtgtgtgggtgtgggtggatgttgtgtgggtgggtgtatatatgaatgtgtgtatatgcatacacataccctttatataaagagacagatctatttatctatacatattttatatatatgtaagtgtgtgtgtatgtgtgtatatatgtgtgtatatatatatacacacatatatacacacatacatacatacatacatacatacatacatacatggtgatgtcccagaggatttactcaatttcccagaaatgcttccactgctatggagtggaaggtttcaaaagaccacacttttaatctgaaattcttactaagtcacagtgcattcacaactatgagaagttggatgggcttctctaaatcagacaaaaagtactttccagaaattgcctgttcagaacaataaactcttgggttgttacaagcttaatcttgaacagagccctcacatcccatatggtgaaaacaggaggttggaatgggattgggaagagttgggcatttccttatgaaggtttggagagaaaaggggggatgggaggtgactaccatttgaaagggctttcagccaatttggaggaaatctcttctggaactccagggtcaaattggtttcaggctagaattgattgacatgaatccctgaaggagagaggactagctttggaaagatagggtagggaagtgtgaggaaactatttgattttacacgcctagattgtttcatttgttcattgacattctgactactggatcttttcatttgctttgcaaggaagactttagaggactctggcctgggccttgagaagaattctattaaaagattctcagcctcctgtgtggccaggatctgcccaggataaagaggctattcctccttgctggagataatcttgagacaaccttgcatttccagtttccctccttgggcagcctaactatgagggagggaaacatggcttgcaataaattagcattgtgtcttcattcaggaattgaggcttccagcctcatatacctccttttgggctttgtgatattcttgcccaagaagtaccatttctacagaaatacaactgactaatcttctagcagggttctttttgaaaaaccccatgcaccttaacccacagcaggtccttggtgatttttgcccagacaaccagaaggctatttgcttactgcccacttacaatgaccagatcataggaaattgaaaacagtgtcagactatttagtcctaatctgtcccagattaagagaatccatgattttcagggggagggagccctgcaatgccttgacccctgcccagatacttcttacataaaccaaagaaaaatgacaagagtgtacatctaaccagacagaagtagaaacaaagtatagaaaaacctcctctttggaatcagctcccttaatgtggtcccccttctcttggacctgcccaacctttcacaacgtcttgaaggtaggacttctatatccagcaaaggaagggatagtagtaaatttacatggcttggaattttctttctggagccacagagggatgaatcctttggagctctaaaagcaaccagtatcactgagctgtgagatacctatatctccattttctaataggaagcacttggacttaaaattgctaagatattttttgcagttgctatttctgtgcatcttgaatctatctgacacaatcaaatgacagtattgttaactctcacaccattaagaaaatttcttattttgtaggcattcactgtgagaggtaaaattgctgctttggcaggtatgattccagtttgccaaacggcttttcttccttccacaacctctttttcccctagcccagggtgaaacaagtgggtcatctccaaccttgatttttatttggattcagcattttgggtttggaaggttacaagaaggaaccataaatggccatattcctagatttttatttatctgacaaaatacacaacttaaaagccaggaaaactaaggttcattacagggagatgaactttttctaattggaggacaaattgtggaaggtggggtctgatctttgcttcaccacttgaagagactgtcatccttcacctgaggttccatttctagcttttatgtgacctctcttgaacaaagtcatttgggaacccccagaaatgacccctttacattgtaggaccataagcaaaacactggttgtgtatagtcactgatccccaaggacttgcagttttttatttctgctggtgtgtcttgggatcagcttataactcctactcttacttagtcagtgaccagtccagtctggtctggaccaggcctgacaaacttctgctcacttgcatcattttcattctgagccagtaggactttgggtagactttaaagcccaagaattggtactcgctttggctagtgacatttgatttttgtctccatcttgatttctgacatcattggccaagtcacattaactttttttgatcactgagaaaaacagtcgaacaaggcattacagagggtggttaaggtagagggtggggggcaggaatgcttatgtaggatagaaagaatgtgggggtagctgtttggttatggtgatccagtcctttggaaccttacaaggctcctgtgggcatgtcaatgttaccattacagcctctacgacccacccacctttgaaaagtcagtacaagtagaccacagtttaaagtagttagtataattctactaaggtttaatcattatacttgttcacttcctggtgcatatttcctaaatatgcttggggtgtggggtggggggttgagttttcactgttccattgcgtgtcatcttatatttttctccatcctgtgactttggcatcttactcgactttctattttcttttcccttggcttattgcagtagtctgctggtgcaggtagagagctcagtgcacctattcccctgttactgctaattatcttgaatattgtcagaggttattttgatgttctaagaatataaagtcattttttacaaaatcatcttttccaagttaaaagcaaaataaaaaaatcccctgtgctagggtgcccatttcagcttttgacattgcccctgtacttttatagatgctctttttgtccgtgttggtagtaactaatgactagtgaattttcatgtaaatgaagcaaaataaatatttcagattttattaatctctcataacccagccaaatctgatgacttcattttaattgcttcccagaaagcacttcccctcctaccttctattctattctattctattctattctattctattctattctattctattctattctgttctattctgttctattctgtttttagaataacacactaggtaaagaaactttaactgcaaggagtcagtgacttttagtgctccctgataaatgatgttattgacaaaagtaaaaaattatttcattgtttttttcctgtattactatctcctctcctgtgcttttgacagtgtgtttagtggatggataatatgtatttctctttcccactcccagattccaaattccctgcctttttggcccacctcaccacaaaagctccatagtttattaatgtaagtttgaatggatgcttctttggggaaacttcaggagttaatggaagagtttcagaaaggaatgagaatgcctcaggagttgttctgtgatggaaattggtctgttgttctgttaatgctgatggaaagaaacttacaacgcttaataaaaatctattcttttagtaaaaaaaattgtgaaataa

SEQ ID NO: 10293 - DNA, 1140 bp, Homo sapiens
  source 1..1140: mol_type = unassigned DNA
cacgcgcccgcccccagcttcgcgcccagatcgtcgcctatcctgcttgcgcagccgctatcgcgtctgcccaccgacgaagcatgggtgtccagggcttccaagagttcctggagaagcgctgtcccggggccgtggtgcccgtggacctcctaaaactcgcgcgcacggtctcgcgccagcagcagcagcagcacttgcaccgccagctgccgccgactgcagccctagcgcccggggctccacgcgccgccaggggctccgtgcctctgcaaccgccgcttccgcccgctgccttgggtgcctactccgggggcgcggggccgattcggcaccatcaccccgctcaccacttccaccatcatggccaagcgcagcccgggctgcaccctccgctgccgccgccgccgccccctcagctgcccggggcccgggtgctggtggacgccggctcggcgctgccgcggctctatggcggctaccagacggattgggtgtgtggcggccaatggaacgccatgctgggctacttgtcagcgctgtgccaggcttgtgcctatcctggcggcgacggcctggagctcgtggtcatgttcccggggggcctgggcaaggaccggctggccgagtggggccgtcggtgccaggccgagcggcagacagcgcaactgatcgtgggacacgtgggcaacaagggcacccctccaccgcgggcctggttcctgccaccggcctgcctgagccactgcgtgaggctagcactcatccgcttccgggtcaagcaagctgccatgttgtgagctgccctatggagaggcccacaggaaaagaaactgagggaagcctccaaccaacactcagtgaggaactgaggccctcagtccaactacagcctgcaaggaactgaattgctgccaacagccacgtacgtgagtgagcttggaagcggatccttccccaggcaagccttgagatgactgcagccctggctggcaccttgattgaagcctgtaggagaccttgagccagaggacccagctaagccatgcctacagatactatgagataataaatgttgttttaagccactaagtttgggggctactttgttacacagaaatagataactgaaacaccatt

SEQ ID NO: 10294 - DNA, 8443 bp, Homo sapiens
  source 1..8443: mol_type = unassigned DNA
atgggggagctacccaaagcctggggaaggggagtcagtgctggaggtgactggagccgcggcgacggcggcagcagctgcggtggcggcgctctcagccgtggcagccgaggctgcagcccggcccagggcggctcagcggacaataaccgggctaggaacctgaccgggctggaccccactgtgatgcttcctgactgataatgttataacagtgcctggaagcctgaggctgcatttccagctggacgtacctcagttgtccccatcatcatggagacccaaaaggatgaagctgctcaggccaagggagctgcagcctctgggagtacccgtgaacaaacagcagaaaaaggagccaagaacaaggcagctgaggcgacagaaggaccaacctcagagccatcctcatccggcccaggtaggctgaagaaaactgccatgaaactctttggtggcaagaagggtatctgtactctgcctagtttctttggagggggacggagcaaaggttctgggaaaggcagctccaagaaaggtctcagcaagagcaagacccacgatggcctgagtgaagcagcccatggccctgaagatgttgtcagtgaaggaactggcttctccctgcctttgcctgagttaccctgccaatttcccagctctcagagtgcccatggggctttggagacaggctccagatgtaagacatctgtggctggagccacagagaaagctgtggctgagaagtttccctctatgcccaagccaaagaaaggcctaaaaggcttttttagcagtatccgccgtcaccggaagagcaaggtcactggggctgagcaaagtgagccaggggccaaggggcctgagagggtcagagccaggcctcatgagcacgtgagctcagcccctcaggtgccctgctttgaggagaccttccaagcccctagaaaggaaaatgctaacccccaagatgcccctgggccaaaagtttctccaacaccagaaccttctccaccagctactgagaaaatggcctgtaaagatccagaaaaacccatggaggcctgtgcctcagcacatgtgcaacccaagcctgcccctgaagccagtagcctagaggagccccatagcccagaaacaggggagaaggtagtagcaggagaggtaaacccacccaatggccctgtgggggacccactgagcctcttgtttggggatgtgacatccctgaaaagctttgattcattgacaggttgtggtgacataatagcagaacaggacatggacagtatgacagacagcatggcctctgggggccagagagcaaaccgagatgggaccaagcgaagttcctgcctggtgacctaccaaggaggtggggaggagatggccttgccagatgatgatgacgaggaggaagaagaggaagaagaggtggaattagaggaggaagaagaggaggttaaggaggaggaagaagatgatgacttagaatatctgtgggaaactgcccaaatgtatccacggcccaatatgaacctgggctaccatcccaccacatccccaggccaccacggctacatgctccttgacccagttaggtcttatcctggcctagcccctggggaacttttgactcctcagagtgaccagcaagaatccgcccccaatagtgatgaaggttattatgactccaccacacctggatttgaggatgattcaggtgaggccctggggcttgtccgcagggattgtctaccccgagacagctacagtggagatgccctatatgagttctatgagccagatgacagccttgagaactctccacctggagatgactgcctttatgacctccatggtcgaagctctgagatgtttgaccccttcttaaactttgagccctttttgtcctcccggccacctggggcaatggagacagaggaagaacggctagtgaccatccagaaacagttgttgtattgggagcttcggcgggagcagcttgaggcccaggaggcacgtgcccgagaagctcatgccagggaggcccacgccagggaggcctatactcgagaggcttatggcagggaagcctatgccagggaggcccacacttgggaagctcatggcagggaggccagaacccgagaagcccaggcccgagaggttcgttgtagagagactcaagtccgagagacccaggcccggcaggagaagcccgtcttagagtatcagatgaggcccttaggcccatcagtgatgggcctggcagcaggggtatcagggacctctcagatttcccaccggggaattacctcagctttccccaccactgcaagcagcgagccagactggagggacttccgtcctctggagaagcgttatgaaggaacctgctccaagaaagatcaaagtacctgcctgatgcagctcttccagagtgatgccatgtttgagccagacatgcaagaagcaaattttggaggatctcccaggagggcctaccctacttattcaccccctgaagatccagaggaagaggaggttgagaaggaagggaatgccactgtgagtttctcacaggccctggtagagttcaccagcaatgggaacctcttttccagcatgtcctgcagctctgactctgactcatctttcactcaaaacctccctgagctgcctcccatggtgacctttgacatcgctgatgtggaacgggatggggaaggcaagtgtgaagagaatcctgagttccacaatgatgaagatcttgcagcctccttggaagcctttgagctgggctactatcacaaacatgccttcaacaactaccatagtcgattctaccaaggcctgccctggggtgtgagcagcctccctcgatacttgggactgcctggcctgcaccctcgacctccacctgctgctatggccctcaacaggagaagccgctctctcgacactgcagagaccctggagatggagctctccaattcccacttggtccagggctacctcgagtctgatgagctgcaggcccagcaggaagattcagatgaggaggacgaagaggaggaagaaggagaatggagccgagacagtcccctttccctctatactgaacccccaggggcctatgattggcctgcttgggctccctgtcctcttccagtggggccaggtcctgcctggataagccccaaccagttggacaggccttccagccagtctccatataggcaggcaacctgttgcatacctcctatgaccatgtcaatatcactatcagtgccagagtcaagggcacctggggaatctgggcctcaactagctcgtccctcacacctacacctgcccatgggcccttgctataacctccagccacaggcctcccagagcatgagggccaggcctcgagatgtgctgctgcctgttgatgagcccagttgctcttccagttctggaggcttcagccccagccctctaccacaggccaagcctgtgggcatcacccatggcattcctcagctgcccagggtccggcctgagcacccccagcctcagcccactcactatgggccttccagccttgacctgtcaaaggagagggctgagcaaggtgcctctcttgccaccagctactcctccactgccatgaatggaaacctagccaagtagttattatcaattctggagtagggacacggggcctgagcatgtgaatggggatcaggggttgggcagaagggtgggggggtgggggttgttgtttaacttgaaaaccctttgggccaaggaaaactcctgtgagttttcaccttggttttcccacttgcctcttctgccatctatggccacgttcaactcaagtgcatctgcccagggaggctgctgctgctactgcactccagtttttgctttcgaggtttcttcttgtgacccacgctgggtttgggatgctgtaattttgtgcctattccagttgccaagttagtgattatatatatatatatatatatatatatatatatatatatatatacacacacacacacacacacacacacacacatacatacacacacacacacaaacacacatgcacacacatatatagcatgcatccttgacacaggctaaacctttagtgccccctgcccctttcccccaatgaatgatgaaccactgattagcagccaagtctgcattgcctcccgcttggggaagtggggcttatttgctattagcaatgtgaaattatggtacagatcctccccacccctattccttttggcctggcatagctgccatcattatatcagatgactataagctattcatcccagctagctgtccttagagaggatcaagtagcgtgtgtctcacagcctatcgctgtggactttggcatcatgaccagatgggggccttttaactgtcctgccatagcttgggttaaagacaaaaatgctaatccccttgatggagtgataaaattcatccatttgcaaacagaagacaaaacaaggttctgttgtggacactgccatagagtgttgagctccggaatgataggattttttttccttcttttaagcttgtgactacctgagttgcagatgcttttgaatttttgttcttttttcctctaaaggaaattttcataatctcatcacaaggaacacggtcttttaattgagataagggaagagaagcaacctaaattaggcttgactataggggctggggtttttgtggagtgtaggggaaagatagaaaatgagggtccatttatcacagccagcaagaaaggggatttcagaccatgcagagcttaaggtatctcagtttcttaaaagggaaaactcccttctcaagcctcccaacacaaaatgttccttaagccttgcccatcccatcatttggactctgtaataaggccccaggtttgcactcccaagacaggataccaaaggcatctcagctgctgttctgggccctttaaagagcttttatcttccaattagccgagtccttagcatcatcaaatgacagggcttcttggcagttgcagccctttatggaatgaatggcaccctcccttctcctgcatccatgcagttttcatgttaaactaggttggaaatactggtggggaagagcttgctgtcaggaagacattggaacaggctaatcttgccaagctcaacctctcattaatcacctgtaggagagggttccttttacatgtctttattggaaatggcatatggaacattttttgcttggctgtgttcactcaaattatgattattgcaccctcgccctcacatcccaccatctccatgcctgttgagagaagaagtcaacagggttcttgccattcctgagatatggcaatttagcttgggaacagatgctgtttgccccctaagtcaaggtgactttgtgggcaaactgtttcttggccaggggatgtgtccatgctggtctttgtcaccatttctcagattggggttggcccagtgcccttactcacaaatagcagacctggctggtagaagctgcacccctggaagcaccacatgaatttgcatggcactaacaccaccactcaagggacccagaccagctcttcaggctgactttggctacagatacattgtgaagaaatgtatctgttgtggagctggagaatgaaagagggtgaggaaggccctccttaccccaagcacagcattccaagagagaagtgcccaaattccaactttctggcctcttaccaaagctgctctgggatggtggggctgaaattggcctggctatttggcaggaagtaaacactcaccaaatgcctttacaacagggaagaacccacctcttgcctcttctttcagggcagcttgagctcctgtctacatgtggactgtgccagccacagcaggcggtagagccatcaccagcctccagaccctgctggagaagggccaccagcctatctgggaagagaaaaaggaggtggccaacctttggctaagggctgagagctgccctcaggatcaggaaggcagcatgaggcattgtctctgaggggcactggcatagccctgacacactttgttgggctttggaaggtcacacaccacagagtagggcctggggctgagtgagagttcatggtttggacagccttgctgcctgcaagtcccttcactgccctagccagcccaggaataggatccttaccacctgaagtggggcagccaggatatgtggctgcagaagcaggttcctttgaatttctagagctaagcagtttgtggctgaaacccaatggcagcctaggggaggaaggaagacctgtctggggacccatggtgttgacagcacagggtgacattgggagagccagccaagcttcaggcctgtttccaaacacagactagtgctggcttgggtggcagcaaatacaccccagaccactaaaactgttgatatcatgtccacacctccaagagtactactagatgaacaacatgtctccattgcaaggtcctggaataatgcttttggatgtgattttaagggaaaatgggacttagtggaagtagctgccttcatcttattacccaataggcctagtgccagacagctgtgatcctgagaattcccagatgagactggtccttggaggaccagtgaatgtggatagagaaggccacctagtaggcctctcccagggccaggatgccagtttcttggtgctttagagtctccaaggaagcactgccttggggcccagttcaagccagccctacctatctggcctcagcttgggtaccaggccacaagactgcccggataatgggttcagtaaacaccagtctctctccctccttagtcctatgccaagaagggaagtagcttcacacactcaggaggctgggtgtgtacccttcatcctgctgccagcagctttccttacctgtgccagtgccaccaccccacctgccctcagcccccaggcccagttgctagagggaggcatggggtttagcagggagacttcaagtttacccatgtgtatgttgcattcaagttgtttttaatatatatatatatatatatcaaaagtcaattatctatttttatattgtttgcattttatattcatggaaaacaatgtttatcaattgttcttttctgatttatttttaagcggtgctgtttacagttttaaacaaaacaaagatgacacaaaaattgctgctgcttgtgcagagggctggcatctcaactgcctagggccctccctctttcccctctccctaccttagctgtaccacactgtccgttccctccccccatgatagggacagcagaagatgcccaggtactgaagacaaacgccaagtgactcaggcgtgtgggacctggtagacagcttgtcattttctggctttattttatgtttttctttcttttgaacccttcttccccatgtctagaccctctgagagtactcatgtgtcttattttttttcctcgttatgttttgtgctttagttttgaaatcagagtgcccatgttgtgctatttgtcttgttgagtttctccaaaggagcattttgggaacattctccacccaatggggaaggaagggggtttcaaccatgtcccctttccccaagaagctgtgggagacagatgacaatgatgcttgcactatcaggaatttaccatctcgttgaggaaacccttgcataggacttcctaggagctcagttgattgtgacattttcccagaagagaggctttggggaactccttcacccctcttgctgctttgggggaatctcctcccctaccaccattccccctcccctgccctgctccagctcacacgtggatggtactttggggaacagtgactttcagggtgatggcttgctggcctgatccctgactttccaatcctatagtcactccaaagaagaaaatccacatggtatgtatatgtgtgagggttgggtctattgagaggtgggactttaattattgttattattattggtgcttatttttcctgctgtatatgggggtgggggtgggggggaataaaacaggaatgtatatttaggtcatgttaaataaaatggctggaggaaggagggaagaaattaggaactgcagtacatcatcaccccaggtgtaagagttatttctctcccagtgcagaaaggggagtgtggcccctggctgtacctgagcttcctcttctccatccctgagacatcacagaatcacccgggttctgacctctccacttctagctctcactgacatctggatatcttgatgcactgcctgtttgtaacaacatatacttctttgctgaatgctaataaacttctgggttcaagagggaacccctcagtca

SEQ ID NO: 10295 - DNA, 2415 bp, Homo sapiens
  source 1..2415: mol_type = unassigned DNA
atggagacccaaaaggatgaagctgctcaggccaagggagctgcagcctctgggagtacccgtgaacaaacagcagaaaaaggagccaagaacaaggcagctgaggcgacagaaggaccaacctcagagccatcctcatccggcccaggtaggctgaagaaaactgccatgaaactctttggtggcaagaagggtatctgtactctgcctagtttctttggagggggacggagcaaaggttctgggaaaggcagctccaagaaaggtctcagcaagagcaagacccacgatggcctgagtgaagcagcccatggccctgaagatgttgtcagtgaaggaactggcttctccctgcctttgcctgagttaccctgccaatttcccagctctcagagtgcccatggggctttggagacaggctccagatgtaagacatctgtggctggagccacagagaaagctgtggctgagaagtttccctctatgcccaagccaaagaaaggcctaaaaggcttttttagcagtatccgccgtcaccggaagagcaaggtcactggggctgagcaaagtgagccaggggccaaggggcctgagagggtcagagccaggcctcatgagcacgtgagctcagcccctcaggtgccctgctttgaggagaccttccaagcccctagaaaggaaaatgctaacccccaagatgcccctgggccaaaagtttctccaacaccagaaccttctccaccagctactgagaaaatggcctgtaaagatccagaaaaacccatggaggcctgtgcctcagcacatgtgcaacccaagcctgcccctgaagccagtagcctagaggagccccatagcccagaaacaggggagaaggtagtagcaggagaggtaaacccacccaatggccctgtgggggacccactgagcctcttgtttggggatgtgacatccctgaaaagctttgattcattgacaggttgtggtgacataatagcagaacaggacatggacagtatgacagacagcatggcctctgggggccagagagcaaaccgagatgggaccaagcgaagttcctgcctggtgacctaccaaggaggtggggaggagatggccttgccagatgatgatgacgaggaggaagaagaggaagaagaggtggaattagaggaggaagaagaggaggttaaggaggaggaagaagatgatgacttagaatatctgtgggaaactgcccaaatgtatccacggcccaatatgaacctgggctaccatcccaccacatccccaggccaccacggctacatgctccttgacccagttaggtcttatcctggcctagcccctggggaacttttgactcctcagagtgaccagcaagaatccgcccccaatagtgatgaaggttattatgactccaccacacctggatttgaggatgattcaggtgaggccctggggcttgtccgcagggattgtctaccccgagacagctacagtggagatgccctatatgagttctatgagccagatgacagccttgagaactctccacctggagatgactgcctttatgacctccatggtcgaagctctgagatgtttgaccccttcttaaactttgagccctttttgtcctcccggccacctggggcaatggagacagaggaagaacggctagtgaccatccagaaacagttgttgtattgggagcttcggcgggagcagcttgaggcccaggaggcacgtgcccgagaagctcatgccagggaggcccacgccagggaggcctatactcgagaggcttatggcagggaagcctatgccagggaggcccacacttgggaagctcatggcagggaggccagaacccgagaagcccaggcccgagaggttcgttgtagagagactcaagtccgagagacccaggcccggcaggagaagcccgtcttagagtatcagatgaggcccttaggcccatcagtgatgggcctggcagcaggggtatcagggacctctcagatttcccaccggggaattacctcagctttccccaccactgcaagcagcgagccagactggagggacttccgtcctctggagaagcgttatgaaggaacctgctccaagaaagatcaaagtacctgcctgatgcagctcttccagagtgatgccatgtttgagccagacatgcaagaagcaaattttggaggatctcccaggagggcctaccctacttattcaccccctgaagatccagaggaagaggaggttgagaaggaagggaatgccactgtgagtttctcacaggccctggtagagttcaccagcaatgggaacctcttttccagcataagatgcccaggtactgaagacaaacgccaagtgactcaggcgtgtgggacctggtag

SEQ ID NO: 10296 - DNA, 6129 bp, Homo sapiens
  source 1..6129: mol_type = unassigned DNA
gagaggctggcggcagtggtggctctcccggctgggttgtcagtcagtgagaggagggggaagatggctcaccgggacccgttctgctaggaagaaggggagcaggtggtgctgctactcgggaggaagcagagcagcctccgtcgctgtcgctgagagcctcacgagtcgaggtcctgcaggtggagctccggcagccgccctggttgaaggtttagaacagatgtggaaaaatgtttacttcagagaaaggggttgtggaggaatggttgtcagagtttaagacattaccagaaacatctttaccaaattatgccacaaatttgaaagacaagagttctttagtttcatctctctataaagttatccaggagccacaaagtgagttgctagaacctgtctgtcaccagctctttgaattctatcgcagtggagaggagcagttgcttcaatttacgctgcaatttctcccagaactaatttggtgctaccttgcagtctcagccagcagaaatgtgcatagcagtggatgcattgaagctcttcttctaggggtttacaatttggaaatagttgacaaacagggacataccaaagtattgagttttacgattccatctttatccaaaccatctgtataccatgaaccttccagcattgggtccatggctctgactgagagtgcactatcccagcatggtttgtcaaaagtggtatacagtggacctcatcctcaaagggagatgctgacagcacagaatcggtttgaagtgttgacattccttttgttgtgttacaatgctgccttaacttacatgcccagtgtttctcttcagtcactgtgtcaaatttgttcaagaatctgtgtttgtggatatcctcgacaacatgtaagaaaatataaaggtataagtagcaggataccagtttcttcaggattcatggtgcaaatgttaacagggatttattttgccttttataatggagaatgggatctagctcaaaaagcactggatgatattatatacagagcccagctagaattatatccagagccattgctggttgctaatgcaataaaggcttcattgcctcatggtcccatgaaatctaataaggaaggtacaaggtgtattcaagttgaaatcacaccaacttcctctcgaatatcaagaaatgcagtaaccagcatgtcaataaggggtcataggtggaaaagacatggaaatacagaattaacaggtcaagaagaactgatggagatatctgaagttgacgagggattttattccagggctgcgtctagtaccagccagtcgggtttatcaaacagtagtcacaattgtagtaacaagccaagtataggaaagaaccacagacggtcaggaggaagcaaaactggaggaaaagaaaaagaaactacaggggaatcttgcaaagatcactttgctcgaaaacaaactcagagagcccaaagtgagaatcttgagcttctctctttgaagagacttactttaacaaccagccaatccctacctaagcctagtagccatggtttggctaagaccgcagcgactgtatttagtaaatcctttgaacaagtcagtggtgtcacagtcccacataacccgtcatctgctgttggttgtggggctgggacagatgccaataggttttccgcttgtagtctccaagaagaaaagcttatttacgtttcagaaagaactgaacttccaatgaagcatcaatcaggtcagcagagacctcctagtattagcattactctgtccacagattaattagtaacatatttttctcccataacctagtgaacctggaaatacaactttgcttctttatgaaagtaccctgggtctttcatccgtattcctgacaggagccctgatgtcttaaattctgaaggctcccctgactttatgaagggaagattgtctaggttgcagtaagttgaaatatggttttgttatttcttgattaagattttttccccttggtttgagtcttttttttccctcctcttatttgttattgttgccctaagattgtcagtgacaataaattttgacaggttgtctaatcaagttggttatgtctcatgtgaggttgtaaggtggtttttcttgttttggtttggtttggttttttaatagctcctattttgatggctgtgtgtttggccttcagagtcaaagggagtctgcatgtatgggaactgttttatagagaatggggcagaggcacaactccaggaattctctagctcctggtcaggaagccaatctgaaaacaggcatgtggaaacacaaaaatgatgtgtatgaaaagcacctgatgaaaatatttgtaagcagatcatctttatgattagaacaatttgctcaaagccctggaaaatgcctggtaacccagtgcctagaatattatatgattccaggggatggctagaggcatttctgttgttatctctgaaacatttttatatcaaaaatcagattgctggtaggtgtgttgttttgaagtgttttatctggatttagcatgtgaagatccctttcaattattaaggtataataggctgtaaagctgatttaccctactgctggactttggaaatcctagttagtttggactcctataattcagagcatacgtcattggaagacttcctggaaatcagtgtaaatcttgcaacatagctctcaagataccactgtataatatgtaattgtttgtctgcaaatgcatttttcatctataaaatgtcatgaaagaaaataaaggtagtgaaatatggacaaaggacatttatatattaactaaagttgtttatgtttgtgttcttaaatttaaaacacgaagaaaaagaaatgtctttcttgttagtgaacaggcctgttttaaatatcttagtatgatatcaaaagaataatcaatttagttacctcccaactaaaaagtaaaaatgaaaaagacgacatggcagaagttgaaacaaacttgtatgtatctgtatgtgacctctagatggaaataaaagtttgatgtttgctagccgtggtccttttggctatggttgcggttcccctgtaaagcaaatgtacttaagtcatcattcagagtgagagagagaaagcacggctgaggctgagtcagttgaccgttgaggaagacctaaggagctgtccagttcttggctctttttcactgtgactgcacagcggtttccttcttcatagtcccttgctgtagtcaccaagagagcatgctagtgttttcctcttgttcctgcttatgcagagctcagatatatgaaaaatttgtatgctttgaaggctgccaaagcatttatactctggacatagttttaactgcaactgctttggctaccagtttaaaccgagttcttcaaaaagcatgaactcgttttcattcattagccctgtttacaatgtggattttgacataaatgaatttgattttcttttagctccagtaacagaatggaataagatctattgccataaattgtagttaagaactgtaaggcaatcgggcagtgaaacttgatattgtattaacttaataggaaccctgtgtacaatttaaaatatttgtaaaatatcactgtgaatttacagatgtctttttgtcattctttaacaatgaatttcccctgtgcatagttattaatagtattggtattattaaaaactaatttggcattttaagattggcattttaagcaagttgaggtgcttaggaaacattgtagaataagtttggggaaatgttagctgacagagctgagagatcagattttcatgttctatcactgtaatggaacctcatttagacctctctagacctttgctagctgtgtggtctgaggaccagtaagtaggattggcattatctggtatcttgttaaaaatgcagaatttcatgccactctaggtctactaaatcagaatttgcattcttaacaaggttcccaagtgatttttatgagaagaaagtatcagagtgcaaacaaattactcgtctaatatgtagaattcccagtggtctcacagccctagatcaaatgtgtcagacactagatcattataatcttcattggttttgacagctaattaattagtttaataatattgacatatggcttcttaagtatttgaattctagattgctaatgatccttatttttgcagtaaaaaagtaacactttatatttttcttgttaactataaatggaatcagagctgtaaatgcctgaaattttaagtgtgaaaaggggtgccacccttttatatactgcacaacaaatttgcatttgtatattctttttaaaaaatctctgaagacttgctcagtgaaatggttctgattttttgcttcaaatgatttgcactaattgattttctggagagcggagttacgttaacaacaaaattcttttatagttcctttgatactatttcaaataaggattacacattgaaagtttttatagaaattatgaaaattggataatcttaactatggtaaccattactattatccatactactttctccccactgaactttcaaatttgaaaattggggtagcttttgtaggtcactttcttataaagatgctgatggtcacagatctcctaagtatccagaataatatttttatcatgagaaggattccacacaaaattggggtcttgcaccccatatttcagaggatctgaacagaaattgtggcttcattgcacattttaaatctctatagattcttgaaatcacccaacctctcacatttgaaaacccaacggcctggagtattctggtggcactggagccagcactagctttttggaatccaagtggggagagaaacaaaaatagacttttcaagggactgtcccagactacccagggcaaatgtcttcccttcccttcctgaagccacaggaaagcaccctggagtcctttgtataccactatggaaatttttaaggcaagctctcaagacttgaagagttggaattctcggcatttaaatgatgcctgaagtttgttttgaaaaagcaatatttcattgctcttttcaattgtgaagcaactgctcagcaaatattactcatttttttaaaaagttgaattaaagggaaatatatttttaaaaccaaaatagatcaaaatgatcccagttttaagggattttgcctattttggaagaataaaactaaaatgttaaaactgttgaattacagagaacagatgtactctgagacataattttaaacaaatatttaaaataaggcaggttaacatttgcgtttaggcacaataaatctgtattaaagggaagcacatcaaggaaatatatacatgttgaataatgtaactgaaaaatattttttaaaaaccacttaaaaagaaaaataatttgatgggtactttaagcattgtagatagaaattaatgtataatagtgtcctcccagtctttgtatgaaaaattaaaactctctagtcctttaatgagcatgaatttatacttctacatttgttgcttagtaaaattatactcagtactttgagttattcagatttatgtttaatattgttaaattcttcatcagagagcataaatatattgtcttctatactttgtaacttgtgcatatctaaagaaactaacaacgaacattttgggagatgtttttgtgtttttttatagtagagttttagagtacatttgtcttaataggaagtttttaccataaacccaagattttatttcacgtattgttgctttctcttatatggaacttattgtgtacctcttacctttatttctaatcatttagtgatactaatcttttcatagtaaatatatttgtttctaattgtattcctagagtttacattcctaaagaataaacgacgactttggctatttttgtgtgttccctaccttcttaaggctatggaaataaactggagtttagttttttgaatttttgtatatttgtgtaaatgttctccatatgtagtactttatacaacaagtgttgcctcttgttttattgaaataaaaactgaaaaaaata

SEQ ID NO: 10297 - DNA, 1236 bp, Homo sapiens
  source 1..1236: mol_type = unassigned DNA
cgcatttccggcgacgcctcggtactgacctctgcagagccgggtggagcccattgacgtccagcgaagcgaggagcagcgatggacggtcgggtgcagctgataaaggccctcctggccttgccgatccggcctgcgacgcgtcgctggaggaacccgattccctttcccgagacgtttgacggcgataccgaccgactcccggagttcatcgtgcagacgggctcctacatgttcgtggacgagaacacgttctccagcgacgccctgaaggtgacgttcctcatcacccgcctcacagggcccgccctgcagtgggtgatcccctacatcaagaaggagagccccctcctcaatgattaccggggctttctggccgagatgaagcgagtctttggatgggaggaggacgaggacttctaggccgggagaccctcgggcctgggggcgggtgctctggggagggtccgctgtgttactggccgccgccagggtcgccaccggcgccctccctccgcgcctccctccccctcgagccgccgcgatgtcccctgcgctcctgttccctcccgcgtagtgcttgcctttgttccaggaatagcgctccaggctcctgctgccgcccctgggcctcactctggagcgagccgccgccctctccttccagccagccagcccctcccatgtacatttggacgctgtcctgcgctccagctgcaagctgggctcctgttacacactggacagaccacccactgccgccgctgccaagccctctcctccccaccagactgccagacgactacatcattctgcccacagacctgcgctgccacagccatcgccatccatcgcatcccaccgacagactgctgctcctagtgatctggactcacctcggaggtatctgggctggccacagtccctggacagtgatccagacagctggccgccccccaagggatctgtcaccttcagcgagacctatttcctccccacccccagaaacctcttgtgttcttgcctaggcccaggtgttcctggcagccaaatcgagtctctcattttctcttgtggaccagttagttttgcccataacgcagtattctgagtttgcaactgtctctctgatgtgtgccttttgttcaacacagtaacccctgcattctgctctgctctaatacactacctggagaaagtcttttccttattttcaataaatgtcagacattattg

SEQ ID NO: 10298 - DNA, 3957 bp, Homo sapiens
  source 1..3957: mol_type = unassigned DNA
ggcagggagggggccaaggcggccggctggagggacggggcccgaccgggagcggagccggagcggaagccgcagccgggcggcgggagcggcgggagcggcgggagcgggggaagcagggcgggccgggctccatggcgccagcggcgtccgcctgagcagcgcgggcaacagcggcggcgtcggccggatcgggccgcgacacctcctggccatgggggacgtgctgtccacgcacctggacgacgcccggcgccagcacatcgcagaaaaaaccgggaagatcctgacggagttcctccagttctatgaagaccagtatggcgtggctctcttcaacagcatgcgccatgagattgagggcacggggctgccgcaggcccagctgctctggcgcaaggtgccactggacgagcgcatcgtcttctcggggaacctcttccagcaccaggaggacagcaagaagtggagaaaccgcttcagcctcgtgccccacaactacgggctggtgctctacgaaaacaaagcggcctatgagcggcaggtcccaccacgagccgtcatcaacagtgcaggctacaaaatcctcacgtccgtggaccaatacctggagctcattggcaactccttaccagggaccacggcaaagtcgggcagtgcccccatcctcaagtgccccacacagttcccgctcatcctctggcatccttatgcgcgtcactactacttctgcatgatgacagaagccgagcaggacaagtggcaggctgtgctgcaggactgcatccggcactgcaacaatggaatccctgaggactccaaggtagagggccctgcgttcacagatgccatccgcatgtaccgacagtccaaggagctgtacggcacctgggagatgctgtgtgggaacgaggtgcagatcctgagcaacctggtgatggaggagctgggccctgagctgaaggcagagctcggcccgcggctgaaggggaaaccgcaggagcggcagcggcagtggatccagatctcggacgccgtgtaccacatggtgtacgagcaggccaaggcgcgcttcgaggaggtgctgtccaaggtgcagcaggtgcagccggccatgcaggccgtcatccgaactgacatggaccaaattatcacctccaaggagcaccttgccagcaagatccgagccttcatcctccccaaggcagaggtgtgcgtgcggaaccatgtccagccctacatcccatccatcctggaggccctgatggtccccaccagccagggcttcactgaggtgcgagatgtcttcttcaaggaggtcacggacatgaacctgaacgtcatcaacgagggcggcattgacaagctgggcgagtacatggagaagctgtcccggctggcgtaccaccccctgaagatgcagagctgctatgagaagatggagtcgctgcgactggacgggctgcagcagcgatttgatgtgtccagcacgtccgtgttcaagcagcgagcccagatccacatgcgggagcaaatggacaatgccgtgtatacgttcgagaccctcctgcaccaggagctggggaaggggcccaccaaggaggagctgtgcaagtccatccagcgggtcctggagcgggtgctgaagaaatacgactacgacagcagctctgtgcggaagaggttcttccgggaggcgctgctgcagatcagcatcccgttcctgctcaagaagctggcccctacctgcaagtcggagctgccccggttccaggagctgatcttcgaggactttgccaggttcatcctggtggaaaacacgtacgaggaggtggtgctgcagaccgtcatgaaggacatcctgcaggctgtgaaggaggccgcggtgcagaggaagcacaacctctaccgggacagcatggtcatgcacaacagcgaccccaacctgcacctgctggccgagggcgcccccatcgactggggcgaggagtacagcaacagcggcgggggcggcagccccagccccagcaccccggagtcagccaccctctcggaaaagcgacggcgcgccaagcaggtggtctctgtggtccaggatgaggaggtggggctgccctttgaggctagccctgagtcaccaccacctgcgtccccggacggtgtcactgagatccgaggcctgctggcccaaggtctgcggcctgagagccccccaccagccggccccctgctcaacggggcccccgctggggagagtccccagcctaaggccgcccccgaggcctcctcgccgcctgcctcacccctccagcatctcctgcctggaaaggctgtggaccttgggccccccaagcccagcgaccaggagactggagagcaggtgtccagccccagcagccaccccgccctccacaccaccaccgaggacagtgcaggggtgcagactgagttctaggccagtgggtccctgactgctgcacatggcacaggccgttcccttccggacccaggcaggctcagctctggggagggcaccctggtctgtgccttgtgggtggaggcggggcagggctgtgtggcaccgccagggagcgggcccacctgagtcactttattgggttcagtcaacactttcttgctccctgttttctcttctgtgggatgatctcagatgcaggggctggttttggggttttcctgcttgtgccaagggctggacactgctggggggctggaaagcccctcccttcctgtccttctgtggcctccatcccctcatgggtgctgccatccttcctggagagagggaggtgaaagctggtgtgagcccagtgggttcccgcccactcacccaggagctggctgggccaggaccgggagagggagcactgctgccctcctggccctgctccttccgcagttaggggtggaccgagcctcgctttccccactgttctggagggaaggggaaggagggggtcttcaggctggagccaggctgggggtgctgggtggagagatgagatttagggggtgcctcatggggtgggcaggcctggggtgaaatgagaaaggcccagaacgtgcaggtctgcggaggggaagtgtcctgagtgaaggaggggacccccatcctgggggatgctgggagtgagtgagtgagatggctgagtgagggttatggggagcctgaggttttatgggcctgtgtatccccttctcccggccccagcctgcctccctcctgcccgcctggcccacaggtctccctctggtccctgtccctctggtggttggggatggagcggcagcaaggggtgtaatggggctgggttctgtcttctacaggccaccccgaggtcctcagtggttgcctggggagccggacggggctcctgaggggtacaggttgggtgggccctccctgagggtctggggtcaggctttggcctctgctgcctctcagtcaccaagtcacctccctctgaaaatccagtcccttctttggatgtccttgtgagtcactctgggcctggctgtcgtccctcctcagcttcttgttcctgggacaagggtcaagccaggatgggcccaggcctgggatcccccaccccaggacccccaggccccctcccctgctgctttgcggggggcagggcagaaatggactccttttgggtccccgaggtggggtcccctcccagccctgcatcctccgtgccctagacctgctccccagaggaggggccttgacccacaggacgtgtggtggcgcctggcactcagggacccccagctgccgcagccctggtctctggcgcatctcttccctcttgtcccgaagatctgcgcctctagtgccttttgaggggttcccatcatccctccctgatattgtattgaaaatattatgcacactgttcatgcttctactaatcaataaacgctttatttaaa

SEQ ID NO: 10299 - DNA, 3760 bp, Homo sapiens
  source 1..3760: mol_type = unassigned DNA
caggaactgggccagttccggtcccttccttttggggctctcactctggaggatggggtggatgggagaaaaaaccgggaagatcctgacggagttcctccagttctatgaagaccagtatggcgtggctctcttcaacagcatgcgccatgagattgagggcacggggctgccgcaggcccagctgctctggcgcaaggtgccactggacgagcgcatcgtcttctcggggaacctcttccagcaccaggaggacagcaagaagtggagaaaccgcttcagcctcgtgccccacaactacgggctggtgctctacgaaaacaaagcggcctatgagcggcaggtcccaccacgagccgtcatcaacagtgcaggctacaaaatcctcacgtccgtggaccaatacctggagctcattggcaactccttaccagggaccacggcaaagtcgggcagtgcccccatcctcaagtgccccacacagttcccgctcatcctctggcatccttatgcgcgtcactactacttctgcatgatgacagaagccgagcaggacaagtggcaggctgtgctgcaggactgcatccggcactgcaacaatggaatccctgaggactccaaggtagagggccctgcgttcacagatgccatccgcatgtaccgacagtccaaggagctgtacggcacctgggagatgctgtgtgggaacgaggtgcagatcctgagcaacctggtgatggaggagctgggccctgagctgaaggcagagctcggcccgcggctgaaggggaaaccgcaggagcggcagcggcagtggatccagatctcggacgccgtgtaccacatggtgtacgagcaggccaaggcgcgcttcgaggaggtgctgtccaaggtgcagcaggtgcagccggccatgcaggccgtcatccgaactgacatggaccaaattatcacctccaaggagcaccttgccagcaagatccgagccttcatcctccccaaggcagaggtgtgcgtgcggaaccatgtccagccctacatcccatccatcctggaggccctgatggtccccaccagccagggcttcactgaggtgcgagatgtcttcttcaaggaggtcacggacatgaacctgaacgtcatcaacgagggcggcattgacaagctgggcgagtacatggagaagctgtcccggctggcgtaccaccccctgaagatgcagagctgctatgagaagatggagtcgctgcgactggacgggctgcagcagcgatttgatgtgtccagcacgtccgtgttcaagcagcgagcccagatccacatgcgggagcaaatggacaatgccgtgtatacgttcgagaccctcctgcaccaggagctggggaaggggcccaccaaggaggagctgtgcaagtccatccagcgggtcctggagcgggtgctgaagaaatacgactacgacagcagctctgtgcggaagaggttcttccgggaggcgctgctgcagatcagcatcccgttcctgctcaagaagctggcccctacctgcaagtcggagctgccccggttccaggagctgatcttcgaggactttgccaggttcatcctggtggaaaacacgtacgaggaggtggtgctgcagaccgtcatgaaggacatcctgcaggctgtgaaggaggccgcggtgcagaggaagcacaacctctaccgggacagcatggtcatgcacaacagcgaccccaacctgcacctgctggccgagggcgcccccatcgactggggcgaggagtacagcaacagcggcgggggcggcagccccagccccagcaccccggagtcagccaccctctcggaaaagcgacggcgcgccaagcaggtggtctctgtggtccaggatgaggaggtggggctgccctttgaggctagccctgagtcaccaccacctgcgtccccggacggtgtcactgagatccgaggcctgctggcccaaggtctgcggcctgagagccccccaccagccggccccctgctcaacggggcccccgctggggagagtccccagcctaaggccgcccccgaggcctcctcgccgcctgcctcacccctccagcatctcctgcctggaaaggctgtggaccttgggccccccaagcccagcgaccaggagactggagagcaggtgtccagccccagcagccaccccgccctccacaccaccaccgaggacagtgcaggggtgcagactgagttctaggccagtgggtccctgactgctgcacatggcacaggccgttcccttccggacccaggcaggctcagctctggggagggcaccctggtctgtgccttgtgggtggaggcggggcagggctgtgtggcaccgccagggagcgggcccacctgagtcactttattgggttcagtcaacactttcttgctccctgttttctcttctgtgggatgatctcagatgcaggggctggttttggggttttcctgcttgtgccaagggctggacactgctggggggctggaaagcccctcccttcctgtccttctgtggcctccatcccctcatgggtgctgccatccttcctggagagagggaggtgaaagctggtgtgagcccagtgggttcccgcccactcacccaggagctggctgggccaggaccgggagagggagcactgctgccctcctggccctgctccttccgcagttaggggtggaccgagcctcgctttccccactgttctggagggaaggggaaggagggggtcttcaggctggagccaggctgggggtgctgggtggagagatgagatttagggggtgcctcatggggtgggcaggcctggggtgaaatgagaaaggcccagaacgtgcaggtctgcggaggggaagtgtcctgagtgaaggaggggacccccatcctgggggatgctgggagtgagtgagtgagatggctgagtgagggttatggggagcctgaggttttatgggcctgtgtatccccttctcccggccccagcctgcctccctcctgcccgcctggcccacaggtctccctctggtccctgtccctctggtggttggggatggagcggcagcaaggggtgtaatggggctgggttctgtcttctacaggccaccccgaggtcctcagtggttgcctggggagccggacggggctcctgaggggtacaggttgggtgggccctccctgagggtctggggtcaggctttggcctctgctgcctctcagtcaccaagtcacctccctctgaaaatccagtcccttctttggatgtccttgtgagtcactctgggcctggctgtcgtccctcctcagcttcttgttcctgggacaagggtcaagccaggatgggcccaggcctgggatcccccaccccaggacccccaggccccctcccctgctgctttgcggggggcagggcagaaatggactccttttgggtccccgaggtggggtcccctcccagccctgcatcctccgtgccctagacctgctccccagaggaggggccttgacccacaggacgtgtggtggcgcctggcactcagggacccccagctgccgcagccctggtctctggcgcatctcttccctcttgtcccgaagatctgcgcctctagtgccttttgaggggttcccatcatccctccctgatattgtattgaaaatattatgcacactgttcatgcttctactaatcaataaacgctttatttaaagcca

SEQ ID NO: 10300 - DNA, 2028 bp, Homo sapiens
  source 1..2028: mol_type = unassigned DNA
agccttcatcctccccaaggcagaggtgtgcgtgcggaaccatgtccagccctacatcccatccatcctggaggccctgatggtccccaccagccagggcttcactgaggtgcgagatgtcttcttcaaggaggtcacggacatgaacctgaacgtcatcaacgagggcggcattgacaagctgggcgagtacatggagaagctgtcccggctggcgtaccaccccctgaagatgcagagctgctatgagaagatggagtcgctgcgactggacgggctgcagcagcgatttgatgtgtccagcacgtccgtgttcaagcagcgagcccagatccacatgcgggagcaaatggacaatgccgtgtatacgttcgagaccctcctgcaccaggagctggggaaggggcccaccaaggaggagctgtgcaagtccatccagcgggtcctggagcgggtgctgaagaaatacgactacgacagcagctctgtgcggaagaggttcttccgggaggcgctgctgcagatcagcatcccgttcctgctcaagaagctggcccctacctgcaagtcggagctgccccggttccaggagctgatcttcgaggactttgccaggttcatcctggtggaaaacacgtacgaggaggtggtgctgcagaccgtcatgaaggacatcctgcaggctgtgaaggaggccgcggtgcagaggaagcacaacctctaccgggacagcatggtcatgcacaacagcgaccccaacctgcacctgctggccgagggcgcccccatcgactggggcgaggagtacagcaacagcggcgggggcggcagccccagccccagcaccccggagtcagccaccctctcggaaaagcgacggcgcgccaagcaggtggtctctgtggtccaggatgaggaggtggggctgccctttgaggctagccctgagtcaccaccacctgcgtccccggacggtgtcactgagatccgaggcctgctggcccaaggtctgcggcctgagagccccccaccagccggccccctgctcaacggggcccccgctggggagagtccccagcctaaggccgcccccgaggcctcctcgccgcctgcctcacccctccagcatctcctgcctggaaaggctgtggaccttgggccccccaagcccagcgaccaggagactggagagcaggtgtccagccccagcagccaccccgccctccacaccaccaccgaggacagtgcaggggtgcagactgagttctaggccagtgggtccctgactgctgcacatggcacaggccgttcccttccggacccaggcaggctcagctctggggagggcaccctggtctgtgccttgtgggtggaggcggggcagggctgtgtggcaccgccagggagcgggcccacctgagtcactttattgggttcagtcaacactttcttgctccctgttttctcttctgtgggatgatctcagatgcaggggctggttttggggttttcctgcttgtgccaagggctggacactgctggggggctggaaagcccctcccttcctgtccttctgtggcctccatcccctcatgggtgctgccatccttcctggagagagggaggtgaaagctggtgtgagcccagtgggttcccgcccactcacccaggagctggctgggccaggaccgggagagggagcactgctgccctcctggccctgctccttccgcagttaggggtggaccgagcctcgctttccccactgttctggagggaaggggaaggagggggtcttcaggctggagccaggctgggggtgctgggtggagagatgagatttagggggtgcctcatggggtgggcaggcctggggtgaaatgagaaaggcccagaacgtgcaggtctgcggaggggaagtgtcctgagtgaaggaggggttcccatcatccctccctgatattgtattgaaaatattatgcacactgttcatgcttctactaatcaataaacgctttatttaaagcc

SEQ ID NO: 10301 - DNA, 5858 bp, Homo sapiens
  source 1..5858: mol_type = unassigned DNA
ccttccagccatgtgggttcagcggaaagagaagcaaaaccactcttcctaaaatgttagaagctgctcttcgcttaccttggggcctttgcattgggagctgtttttcacatcaaagaatatgtgctgaatggaattttagtattttgctgtcgttttaatattttcgtctggtcttcctcagttcttccagacgctttctgagagaatgggggcaggagctctagccatctgtcaaagtaaagcagcggttcggctgaaagaagacatgaaaaagatagtggcagtgccattaaatgaacagaaggattttacctatcagaagttatttggagtcagtctccaagaacttgaacggcaggggctcaccgagaatggcattccagcagtagtgtggaatatagtggaatatttgacgcagcatggacttacccaagaaggtctttttagggtgaatggtaacgtgaaggtggtggaacaacttcgactgaagttcgagagtggagtgcccgtggagctcgggaaggacggtgatgtctgctcagcagccagtctgttgaagctgtttctgagggagctgcctgacagtctgatcacctcagcgttgcagcctcgattcattcaactctttcaggatggcagaaatgatgttcaggagagtagcttaagagacttaataaaagagctgccagacacccactactgcctcctcaagtacctttgccagttcttgacaaaagtagccaagcatcatgtgcagaatcgcatgaatgttcacaatctcgccactgtatttgggccaaattgctttcatgtgccacctgggcttgaaggcatgaaggaacaggacctgtgcaacaagataatggctaaaattctagaaaattacaataccctgtttgaagtagagtatacagaaaatgatcatctgagatgtgaaaacctggctaggcttatcatagtaaaagaggtctattataagaactccctgcccatccttttaacaagaggcttagaaagagacatgccaaaaccacctccaaaaaccaagatcccaaaatccaggagtgagggatctattcaggcccacagagtactgcaaccagagctatctgatggcattcctcagctcagcttgcggctaagttatagaaaagcctgcttggaagacatgaattcagcagagggtgctattagtgccaagttggtacccagttcacaggaagatgaaagacctctgtcacctttctatttgagtgctcatgtaccccaagtcagcaatgtgtctgcaaccggagaactcttagaaagaaccatccgatcagctgtagaacaacatctttttgatgttaataactctggaggtcaaagttcagaggactcagaatctggaacactatcagcatcttctgccacatctgccagacagcgccgccgccagtccaaggagcaggatgaagttcgacatgggagagacaagggacttatcaacaaagaaaatactccttctgggttcaaccaccttgatgattgtattttgaatactcaggaagtcgaaaaggtacacaaaaatacttttggttgtgctggagaaaggagcaagcctaaacgtcagaaatccagtactaaactttctgagcttcatgacaatcaggacggtcttgtgaatatggaaagtctcaattccacacgatctcatgagagaactggacctgatgattttgaatggatgtctgatgaaaggaaaggaaatgaaaaagatggtggacacactcagcattttgagagccccacaatgaagatccaggagcatcccagcctatctgacaccaaacagcagagaaatcaagatgccggtgaccaggaggagagctttgtctccgaagtgccccagtcggacctgactgcattgtgtgatgaaaagaactgggaagagcctatccctgctttctcctcctggcagcgggagaacagtgactctgatgaagcccacctctcgccgcaggctgggcgcctgatccgtcagctgctggacgaagacagcgaccccatgctctctcctcggttctacgcttatgggcagagcaggcaatacctggatgacacagaagtgcctccttccccaccaaactcccattctttcatgaggcggcgaagctcctctctggggtcctatgatgatgagcaagaggacctgacacctgcccagctcacacgaaggattcagagccttaaaaagaagatccggaagtttgaagatagattcgaagaagagaagaagtacagaccttcccacagtgacaaagcagccaatccggaggttctgaaatggacaaatgaccttgccaaattccggagacaacttaaagaatcaaaactaaagatatctgaagaggacctaactcccaggatgcggcagcgaagcaacacactccccaagagttttggttcccaacttgagaaagaagatgagaagaagcaagagctggtggataaagcaataaagcccagtgttgaagccacattggaatctattcagaggaagctccaggagaagcgagcggaaagcagccgccctgaggacattaaggatatgaccaaagaccagattgctaatgagaaagtggctctgcagaaagctctgttatattatgaaagcattcatggacggccggtaacaaagaacgaacggcaggtgatgaagccactatacgacaggtaccggctggtcaaacagatcctctcccgagctaacaccatacccatcattggttccccctccagcaagcggagaagccctttgctgcagccaattatcgagggcgaaactgcttccttcttcaaggagataaaggaagaagaggaggggtcagaagacgatagcaatgtgaagccagacttcatggtcactctgaaaaccgatttcagtgcacgatgctttctggaccaattcgaagatgacgctgatggatttatttccccaatggatgataaaataccatcaaaatgcagccaggacacagggctttcaaatctccatgctgcctcaatacctgaactcctggaacacctccaggaaatgagagaagaaaagaaaaggattcgaaagaaacttcgggattttgaagacaactttttcagacagaatggaagaaatgtccagaaggaagaccgcactcctatggctgaagaatacagtgaatataagcacataaaggcgaaactgaggctcctggaggtgctcatcagcaagagagacactgattccaagtccatgtgaggggcatggccaagcacagggggctggcagctgcggtgagagtttactgtccccagagaaagtgcagctctggaaggcagccttggggctggccctgcaaagcatgcagcccttctgcctctagaccatttggcatcggctcctgtttccattgcctgccttagaaactggctggaagaagacaatgtgacctgacttaggcattttgtaattggaaagtcaagactgcagtatgtgcacatgcgcacgcgcatgcacgcacacacacacacagtagtggagctttcctaacactagcagagattaatcactacattagacaacactcatctacagagaatatacactgttcttccctggataactgagaaacaagagaccattctctgtctaactgtgataaaaacaagctcaggactttattctatagagcaaacttgctgtggagggccatgctctccttggacccagttaactgcaaacgtgcattggagccctatttgctgccgctgccattctagtgacctttccacagagctgcgccttcctcacgtgtgtgaaaggttttccccttcagccctcaggtagatggaagctgcatctgcccacgatggcagtgcagtcatcatcttcaggatgtttcttcaggacttcctcagctgacaaggaattttggtccctgcctaggaccgggtcatctgcagaggacagagagatggtaagcagctgtatgaatgctgattttaaaaccaggtcatgggagaagagcctggagattctttcctgaacactgactgcacttaccagtctgattttatcgtcaaacaccaagccaggctagcatgctcatggcaatctgtttggggctgttttgttgtggcactagccaaacataaaggggcttaagtcagcctgcatacagaggatcggggagagaaggggcctgtgttctcagcctcctgagtacttaccagagtttaatttttttaaaaaaaatctgcactaaaatccccaaactgacaggtaaatgtagccctcagagctcagcccaaggcagaatctaaatcacactattttcgagatcatgtataaaaagaaaaaaaagaagtcatgctgtgtggccaattataatttttttcaaagactttgtcacaaaactgtctatattagacattttggagggaccaggaaatgtaagacaccaaatcctccatctcttcagtgtgcctgatgtcacctcatgatttgctgttacttttttaactcctgcgccaaggacagtgggttctgtgtccacctttgtgctttgcgaggccgagcccaggcatctgctcgcctgccacggctgaccagagaaggtgcttcaggagctctgccttagacgacgtgttacagtatgaacacacagcagaggcaccctcgtatgttttgaaagttgccttctgaaagggcacagttttaaggaaaagaaaaagaatgtaaaactatactgacccgttttcagttttaaagggtcgtgagaaactggctggtccaatgggatttacagcaacattttccattgctgaagtgaggtagcagctctcttctgtcagctgaatgttaaggatggggaaaaagaatgcctttaagtttgctcttaatcgtatggaagcttgagctatgtgttggaagtgccctggttttaatccatacacaaagacggtacataatcctacaggtttaaatgtacataaaaatatagtttggaattctttgctctactgtttacattgcagattgctataatttcaaggagtgagattataaataaaatgatgcactttaggatgtttcctatttttgaaatctgaacatgaatcattcacatgaccaaaaattgtgtttttttaaaaatacatgtctagtctgtcctttaatagctctcttaaataagctatgatattaatcagatcattaccagttagcttttaaagcacatttgtttaagactatgtttttggaaaaatacgctacagaatttttttttaagctacaaataaatgagatgctactaattgttttggaatctgttgtttctgccaaaggtaaattaactaaagatttattcaggaatccccatttgaatttgtatgattcaataaaagaaaacaccaagtaagttatataaaataaattgtgtatgagatgttgtgttttcctttgtaatttccactaactaactaactaacttatattcttcatggaatggagcccagaagaaatgagaggaagcccttttcacactagatcttatttgaagaaatgtttgttagtcagtcagtcagtggtttctggctctgccgagggagatgtgttccccagcaaccatttctgcagcccagaatctcaaggcactagaggcggtgtcttaattaattggcttcacaaagacaaaatgctctggactgggatttttcctttgctgtgttgggaatatgtgtttattaattagcacatgccaacaaaataaatgtcaagagttatttcataagtgtaagtaaacttaagaattaaagagtgcagacttataattttc

SEQ ID NO: 10302 - DNA, 4945 bp, Homo sapiens
  source 1..4945: mol_type = unassigned DNA
attgaggagcagaaggagtagggtgcgggggaggaggaggagcgcctttagtgctgcagcagctgctgctctgattggcccggtggttcagctgcttccctggaacaaaaggtcaaagtggactgcagtgtaaatgtagagaagcagccgataaaatagcattgcctgaagaagtttggaggctgagagcagcagtagactggccaactgcagagcaagttgtttctccagccgtgcggtgcagcctcatgcccccaacccagcttagccactgtaagaagacgttcactgtacagacgaccaaacttgccgtggaagagacagttgtgagattcccttgcaaatttacatacgagaatggcttgtgaaatcatgcctctgcaaagttcacaggaagatgaaagacctctgtcacctttctatttgagtgctcatgtaccccaagtcagcaatgtgtctgcaaccggagaactcttagaaagaaccatccgatcagctgtagaacaacatctttttgatgttaataactctggaggtcaaagttcagaggactcagaatctggaacactatcagcatcttctgccacatctgccagacagcgccgccgccagtccaaggagcaggatgaagttcgacatgggagagacaagggacttatcaacaaagaaaatactccttctgggttcaaccaccttgatgattgtattttgaatactcaggaagtcgaaaaggtacacaaaaatacttttggttgtgctggagaaaggagcaagcctaaacgtcagaaatccagtactaaactttctgagcttcatgacaatcaggacggtcttgtgaatatggaaagtctcaattccacacgatctcatgagagaactggacctgatgattttgaatggatgtctgatgaaaggaaaggaaatgaaaaagatggtggacacactcagcattttgagagccccacaatgaagatccaggagcatcccagcctatctgacaccaaacagcagagaaatcaagatgccggtgaccaggaggagagctttgtctccgaagtgccccagtcggacctgactgcattgtgtgatgaaaagaactgggaagagcctatccctgctttctcctcctggcagcgggagaacagtgactctgatgaagcccacctctcgccgcaggctgggcgcctgatccgtcagctgctggacgaagacagcgaccccatgctctctcctcggttctacgcttatgggcagagcaggcaatacctggatgacacagaagtgcctccttccccaccaaactcccattctttcatgaggcggcgaagctcctctctggggtcctatgatgatgagcaagaggacctgacacctgcccagctcacacgaaggattcagagccttaaaaagaagatccggaagtttgaagatagattcgaagaagagaagaagtacagaccttcccacagtgacaaagcagccaatccggaggttctgaaatggacaaatgaccttgccaaattccggagacaacttaaagaatcaaaactaaagatatctgaagaggacctaactcccaggatgcggcagcgaagcaacacactccccaagagttttggttcccaacttgagaaagaagatgagaagaagcaagagctggtggataaagcaataaagcccagtgttgaagccacattggaatctattcagaggaagctccaggagaagcgagcggaaagcagccgccctgaggacattaaggatatgaccaaagaccagattgctaatgagaaagtggctctgcagaaagctctgttatattatgaaagcattcatggacggccggtaacaaagaacgaacggcaggtgatgaagccactatacgacaggtaccggctggtcaaacagatcctctcccgagctaacaccatacccatcattgaagaagaggaggggtcagaagacgatagcaatgtgaagccagacttcatggtcactctgaaaaccgatttcagtgcacgatgctttctggaccaattcgaagatgacgctgatggatttatttccccaatggatgataaaataccatcaaaatgcagccaggacacagggctttcaaatctccatgctgcctcaatacctgaactcctggaacacctccaggaaatgagagaagaaaagaaaaggattcgaaagaaacttcgggattttgaagacaactttttcagacagaatggaagaaatgtccagaaggaagaccgcactcctatggctgaagaatacagtgaatataagcacataaaggcgaaactgaggctcctggaggtgctcatcagcaagagagacactgattccaagtccatgtgaggggcatggccaagcacagggggctggcagctgcggtgagagtttactgtccccagagaaagtgcagctctggaaggcagccttggggctggccctgcaaagcatgcagcccttctgcctctagaccatttggcatcggctcctgtttccattgcctgccttagaaactggctggaagaagacaatgtgacctgacttaggcattttgtaattggaaagtcaagactgcagtatgtgcacatgcgcacgcgcatgcacgcacacacacacacagtagtggagctttcctaacactagcagagattaatcactacattagacaacactcatctacagagaatatacactgttcttccctggataactgagaaacaagagaccattctctgtctaactgtgataaaaacaagctcaggactttattctatagagcaaacttgctgtggagggccatgctctccttggacccagttaactgcaaacgtgcattggagccctatttgctgccgctgccattctagtgacctttccacagagctgcgccttcctcacgtgtgtgaaaggttttccccttcagccctcaggtagatggaagctgcatctgcccacgatggcagtgcagtcatcatcttcaggatgtttcttcaggacttcctcagctgacaaggaattttggtccctgcctaggaccgggtcatctgcagaggacagagagatggtaagcagctgtatgaatgctgattttaaaaccaggtcatgggagaagagcctggagattctttcctgaacactgactgcacttaccagtctgattttatcgtcaaacaccaagccaggctagcatgctcatggcaatctgtttggggctgttttgttgtggcactagccaaacataaaggggcttaagtcagcctgcatacagaggatcggggagagaaggggcctgtgttctcagcctcctgagtacttaccagagtttaatttttttaaaaaaaatctgcactaaaatccccaaactgacaggtaaatgtagccctcagagctcagcccaaggcagaatctaaatcacactattttcgagatcatgtataaaaagaaaaaaaagaagtcatgctgtgtggccaattataatttttttcaaagactttgtcacaaaactgtctatattagacattttggagggaccaggaaatgtaagacaccaaatcctccatctcttcagtgtgcctgatgtcacctcatgatttgctgttacttttttaactcctgcgccaaggacagtgggttctgtgtccacctttgtgctttgcgaggccgagcccaggcatctgctcgcctgccacggctgaccagagaaggtgcttcaggagctctgccttagacgacgtgttacagtatgaacacacagcagaggcaccctcgtatgttttgaaagttgccttctgaaagggcacagttttaaggaaaagaaaaagaatgtaaaactatactgacccgttttcagttttaaagggtcgtgagaaactggctggtccaatgggatttacagcaacattttccattgctgaagtgaggtagcagctctcttctgtcagctgaatgttaaggatggggaaaaagaatgcctttaagtttgctcttaatcgtatggaagcttgagctatgtgttggaagtgccctggttttaatccatacacaaagacggtacataatcctacaggtttaaatgtacataaaaatatagtttggaattctttgctctactgtttacattgcagattgctataatttcaaggagtgagattataaataaaatgatgcactttaggatgtttcctatttttgaaatctgaacatgaatcattcacatgaccaaaaattgtgtttttttaaaaatacatgtctagtctgtcctttaatagctctcttaaataagctatgatattaatcagatcattaccagttagcttttaaagcacatttgtttaagactatgtttttggaaaaatacgctacagaatttttttttaagctacaaataaatgagatgctactaattgttttggaatctgttgtttctgccaaaggtaaattaactaaagatttattcaggaatccccatttgaatttgtatgattcaataaaagaaaacaccaagtaagttatataaaataaattgtgtatgagatgttgtgttttcctttgtaatttccactaactaactaactaacttatattcttcatggaatggagcccagaagaaatgagaggaagcccttttcacactagatcttatttgaagaaatgtttgttagtcagtcagtcagtggtttctggctctgccgagggagatgtgttccccagcaaccatttctgcagcccagaatctcaaggcactagaggcggtgtcttaattaattggcttcacaaagacaaaatgctctggactgggatttttcctttgctgtgttgggaatatgtgtttattaattagcacatgccaacaaaataaatgtcaagagttatttcataagtgtaagtaaacttaagaattaaagagtgcagacttataattttc

SEQ ID NO: 10303 - DNA, 3169 bp, Homo sapiens
  source 1..3169: mol_type = unassigned DNA
attgcctgaagaagtttggaggctgagagcagcagtagactggccaactgcagagcaagttgtttctccagccgtgcggtgcagcctcatgcccccaacccagcttagccactgtaagaagacgttcactgtacagacgaccaaacttgccgtggaagagacagttgtgagattcccttgcaaatttacatacgagaatggcttgtgaaatcatgcctctgcaaagttcacaggaagatgaaagacctctgtcacctttctatttgagtgctcatgtaccccaagtcagcaatgtgtctgcaaccggagaactcttagaaagaaccatccgatcagctgtagaacaacatctttttgatgttaataactctggaggtcaaagttcagaggactcagaatctggaacactatcagcatcttctgccacatctgccagacagcgccgccgccagtccaaggagcaggatgaagttcgacatgggagagacaagggacttatcaacaaagaaaatactccttctgggttcaaccaccttgatgattgtattttgaatactcaggaagtcgaaaaggtacacaaaaatacttttggttgtgctggagaaaggagcaagcctaaacgtcagaaatccagtactaaactttctgagcttcatgacaatcaggacggtcttgtgaatatggaaagtctcaattccacacgatctcatgagagaactggacctgatgattttgaatggatgtctgatgaaaggaaaggaaatgaaaaagatggtggacacactcagcattttgagagccccacaatgaagatccaggagcatcccagcctatctgacaccaaacagcagagaaatcaagatgccggtgaccaggaggagagctttgtctccgaagtgccccagtcggacctgactgcattgtgtgatgaaaagaactgggaagagcctatccctgctttctcctcctggcagcgggagaacagtgactctgatgaagcccacctctcgccgcaggctgggcgcctgatccgtcagctgctggacgaagacagcgaccccatgctctctcctcggttctacgcttatgggcagagcaggcaatacctggatgacacagaagtgcctccttccccaccaaactcccattctttcatgaggcggcgaagctcctctctggggtcctatgatgatgagcaagaggacctgacacctgcccagctcacacgaaggattcagagccttaaaaagaagatccggaagtttgaagatagattcgaagaagagaagaagtacagaccttcccacagtgacaaagcagccaatccggaggttctgaaatggacaaatgaccttgccaaattccggagacaacttaaagaatcaaaactaaagatatctgaagaggacctaactcccaggatgcggcagcgaagcaacacactccccaagagttttggttcccaacttgagaaagaagatgagaagaagcaagagctggtggataaagcaataaagcccagtgttgaagccacattggaatctattcagaggaagctccaggagaagcgagcggaaagcagccgccctgaggacattaaggatatgaccaaagaccagattgctaatgagaaagtggctctgcagaaagctctgttatattatgaaagcattcatggacggccggtaacaaagaacgaacggcaggtgatgaagccactatacgacaggtaccggctggtcaaacagatcctctcccgagctaacaccatacccatcattggttccccctccagcaagcggagaagccctttgctgcagccaattatcgagggcgaaactgcttccttcttcaaggagataaaggaagaagaggaggggtcagaagacgatagcaatgtgaagccagacttcatggtcactctgaaaaccgatttcagtgcacgatgctttctggaccaattcgaagatgacgctgatggatttatttccccaatggatgataaaataccatcaaaatgcagccaggacacagggctttcaaatctccatgctgcctcaatacctgaactcctggaacacctccaggaaatgagagaagaaaagaaaaggattcgaaagaaacttcgggattttgaagacaactttttcagacagaatggaagaaatgtccagaaggaagaccgcactcctatggctgaagaatacagtgaatataagcacataaaggcgaaactgaggctcctggaggtgctcatcagcaagagagacactgattccaagtccatgtgaggggcatggccaagcacagggggctggcagctgcggtgagagtttactgtccccagagaaagtgcagctctggaaggcagccttggggctggccctgcaaagcatgcagcccttctgcctctagaccatttggcatcggctcctgtttccattgcctgccttagaaactggctggaagaagacaatgtgacctgacttaggcattttgtaattggaaagtcaagactgcagtatgtgcacatgcgcacgcgcatgcacgcacacacacacacagtagtggagctttcctaacactagcagagattaatcactacattagacaacactcatctacagagaatatacactgttcttccctggataactgagaaacaagagaccattctctgtctaactgtgataaaaacaagctcaggactttattctatagagcaaacttgctgtggagggccatgctctccttggacccagttaactgcaaacgtgcattggagccctatttgctgccgctgccattctagtgacctttccacagagctgcgccttcctcacgtgtgtgaaaggttttccccttcagccctcaggtagatggaagctgcatctgcccacgatggcagtgcagtcatcatcttcaggatgtttcttcaggacttcctcagctgacaaggaattttggtccctgcctaggaccgggtcatctgcagaggacagagagatggtaagcagctgtatgaatgctgattttaaaaccaggtcatgggagaagagcctggagattctttcctgaacactgactgcacttaccagtctgattttatcgtcaaacaccaagccaggctagcatgctcatggcaatctgtttggggctgttttgttgt

SEQ ID NO: 10304 - DNA, 2206 bp, Homo sapiens
  source 1..2206: mol_type = unassigned DNA
ctattaatgaaagccaccaggtgactggcagttttcggagtcaaagaagcctgtgtgtaggatctagggagtcaggtttgaaaaaaagatgtcagcgacttaagacccgtgtcacgtgactccctctacttgccagcactgaggctgtggatcaaatttcaactccaggcagtccttccagccatgtgggttcagcggaaagagaagcaaaaccactcttcctaaaatttcttccagacgctttctgagagaatgggggcaggagctctagccatctgtcaaagtaaagcagcggttcggctgaaagaagacatgaaaaagatagtggcagtgccattaaatgaacagaaggattttacctatcagaagttatttggagtcagtctccaagaacttgaacggcaggggctcaccgagaatggcattccagcagtagtgtggaatatagtggaatatttgacgcagcatggacttacccaagaaggtctttttagggtgaatggtaacgtgaaggtggtggaacaacttcgactgaagttcgagagtggagtgcccgtggagctcgggaaggacggtgatgtctgctcagcagccagtctgttgaagctgtttctgagggagctgcctgacagtctgatcacctcagcgttgcagcctcgattcattcaactctttcaggatggcagaaatgatgttcaggagagtagcttaagagacttaataaaagagctgccagacacccactactgcctcctcaagtacctttgccagttcttgacaaaagtagccaagcatcatgtgcagaatcgcatgaatgttcacaatctcgccactgtatttgggccaaattgctttcagtaagttagtggagttttactgttaatatcatcatgtccccctttgtgtttactactgtctgaaattactgggatgtagaagcatatttcagtctgaaaattcagccagcttattttggagaagttgtatcttgttcttgggcatgttagccttgtttttcatcccaatttgaagaaggtagctatgccctttttacaaaactataatttgcaataaatcaaatagccttatttaaaaatctggaaataagttatattttaattaaaaggggcatttaaaaaatctgtaatcagaaatgttgattagcagaaagagaaggagtatgacatagtgaataattttttaaatagtaataaagttcaaattattgccaatagatggaaaattatgaacagactatgccagtatcagaaaaatataacctcagcttcatttactggaaataaaccagtctattttagtagattctttgttgctagccacaggaacttttgtaaagcttaatattttattctccttcttattccataaagctctttaatttttgatacgtgaaatgtgatcctgcaatccagggactttgcttttaactctcctattaatcacctctgatatcaaatacattcttctagttaagagagagagaacatttacactccaaaagctctcagaaactcagcaactttttttttaatagcatatctacttctccacttcattaatatacaggcttattcagctgcccagaactagtaatattacagtcttcagaatgactgtctaaatttagattctggcttagatcctagtgactacagggttccaggtcattcacagcctaatttgggtagaagttctactgtaataactatcctgattgtaattctaaaggtgttaacttttaagtaatggcatttcataggatatgttagggtctcgtgaataaatatctcagatgcaggatccactaattttttgtcttattcagaagctccgtgatagtaaaaagtctatattttttcttatatttgttctgcccagtaaacctttgtttggtgacttacatgtgagaaaggtgtaagtagaaaactgttgaataattctgaaacctagattctagaacaggtaaaaatgaatttgtaaatagaatgcttatttagtaagcattaaacacagatccatacctcattactaacttagacattgggcttgatctggaatttctggtaatctgctccaggtagtcagtcagaatatcagtaagtaatgagtatttattataggttctaattagtatggttttacagtttttctattgttgtaaaatatacataaaataaaatatacc

SEQ ID NO: 10305 - DNA, 3268 bp, Homo sapiens
  source 1..3268: mol_type = unassigned DNA
accgccgccccgccctcggcggcacccacacccaggcgcgcccgcgcgcgcgcccggccccgtccctgtctggaagcacagctgaagatggcgagcccggcgcctccggagcacgccgaggagggatgcccggctcctgccgccgaggagcaggcgccgccgtcgccgccaccgccccaggcatcccccgcagagcggcagcagcaggaggaggaagcgcaggaagctggggcggcggagggcgcggggttgcaggtggaggaggccgcgggccgggcggcggccgcggtaacctggctgctcggggagccggtgctgtggctgggctgccgcgccgacgagctgctgagctggaagaggccgctgcggagcctgctcggcttcgtcgctgccaacctgctgttctggttccttgcattgactccatggagagtatatcacctgatttccgtcatgatacttgggcgtgttattatgcaaataataaaggatatggttttgtctagaacaagaggtgcacagttgtggagaagcctcagtgaaagctgggaagttatcaattccaaaccagatgaaagacccaggctcagccactgtattgcagaatcatggatgaatttcagcatatttcttcaagaaatgtctctttttaaacagcagagccctggcaagttttgtctcctggtctgtagtgtgtgcacattttttacgatcttgggaagttacattcctggggttatactcagctatctactgttactgtgtgcatttttgtgtccattgtttaaatgtaatgatattggacaaaaaatttacagcaaaattaagtcagttctgctgaaactggattttggaattggagaatatattaatcagaagaaacgtgagagatctgaagcagacaaagaaaaaagtcacaaagatgacagtgaattagacttttcagctctttgtcctaagattagcctcacggttgctgccaaagagttatctgtgtctgacacagacgtctcagaggtatcctggactgataatgggaccttcaacctttcagaaggatacactccacagacagacacttctgatgatcttgaccgacccagtgaggaagttttctctagagatctttcagattttccatctctagaaaatggcatgggaacaaatgatgaagatgaattaagccttggtttgcccactgagctcaagagaaagaaggaacagttggacagtggtcacagaccaagcaaagagacgcaatcagcagctggtctcacccttcctctgaacagtgaccaaacctttcacctgatgagcaacctggctggggatgttatcacagctgcagtgactgcagctatcaaagaccagttagagggtgtgcagcaagcactttctcaggctgcccccatcccagaagaggacacagacactgaagaaggtgatgactttgaactacttgaccagtcagagctggatcaaattgagagtgaattgggacttacacaagaccaggaagcagaagcacagcaaaataagaagtcttcaggtttcctttcaaatctgctgggaggccattaatctaggaatcagcttgcaacagagcacaaaaaacaccaaaaaaatttcaaacaagaaaaaaaaaaaaaaaaggaaaagaaaaaaattgaactgtaagctttaatgattactttagatttgttttattttccctcctgcagtgaattaattggatatatatcagctgacactgatagattgatatttctgatcgttatttttgtgtaataagcatggaaatgaactttatacacaccactgtgttgtcagagataaatattaggggttgtttttaaagcaaaaagaaaaaaacaaaaaccaaactattaaaatcctcctataaatattctttttctttacagtttttcaagcatgcaaaacagtttattgtaacttactgaaaaatattaacaattaattgtgaatacatgctgttaccagcttccttattcctaatacctggaaaatttttttttcaacggatagattttgatgtaaaaaagaccgaaattatcaaggtatcttagttgaaggacttgggaaatactatcaaaattaatttcttaggaaaaaatttaaaagtatatttaagtactctggatagactgaaacgtttccatgttatttctgcagttgtagacttaggcttatttgtaaagaagcatgctccattgactgccatctctagtcttgcagtgggtggtattaacccatagaaagcaagcagttgtgtatcacatagacaatggttatgatgtaaacagattcagttgttttgttgttcattcgtcatatgtttgtgatagggatgttgggagcacagctctattctgcctgctcagacttaagttagacccttatcttttatattatgtcatgaaaaaagtctcctaaaattgtgaaactagttcttgatgagtgatgtgatcatcagcaataaagatataataactctgttttcttagcctgtatagaggagaggaacttgcttggctttaaaatatatttatttgccatttaagtataaatatggaatctgtttcttattgggaagatagaatatatatattttcctttaaactttttaaggtcacttttaaataaccaaatttgatttatggtttttaacaaaggactaaagagctgaaaccaacctagttttgtttttgtgatataaactttaagtgtcgagggaccatgccagcaactaccaaaaatctcttaaatcttcaggtacagctggcattttggcagatgcatagagacatctgagaccctcagaaaggaaggataatccaagaatataggaaatctgtgttctcttcctttcattttatcccttatatttctaaagactaattataagtaatctgacattttaatgtagctactcttatttattttttctttctgaggtattaaaatatctggactgagttttgccaaatgttaaagggagaagagttactgaagactttgaacacttgctttttgtgattgcttatgtcattagtgcctcatgactgtgtttgatgtcctttattgatacaaagtgagcctgtgccttcattatcttgcccattttaatacaaatggaaacctggtgtttgaaaatctctgaactgtgtgggttttggaggaatatacctgaattttattcaataacagtttctggacaggaagaaaaatacagttacatatttataaa

SEQ ID NO: 10306 - DNA, 3145 bp, Homo sapiens
  source 1..3145: mol_type = unassigned DNA
atccaatgaaggttactggctgagcggggacaccttctcacaggactggagagagaatgcggggcagctgggcagggctcacttccagccgcctgtcacagtactgggagtaagaggtgacctatttatttttagaagggggcagtgataataacccagctcctagcttcattcaagggaggcaggcgctttggaagtttgtaaacaccaactttctgagtaagggaggagcactttttttccaaaaaggaaagaacgtctctactgggtttttttcctcctgatattcagcattagagtagaaaagaaactattgtttggccacattagccgtggttagcaggtgctgcagcctttgccactgttattatttttaaagggcagaaatgcctgaaggtgaagactttggaccaggcaaaagctgggaagttatcaattccaaaccagatgaaagacccaggctcagccactgtattgcagaatcatggatgaatttcagcatatttcttcaagaaatgtctctttttaaacagcagagccctggcaagttttgtctcctggtctgtagtgtgtgcacattttttacgatcttgggaagttacattcctggggttatactcagctatctactgttactgtgtgcatttttgtgtccattgtttaaatgtaatgatattggacaaaaaatttacagcaaaattaagtcagttctgctgaaactggattttggaattggagaatatattaatcagaagaaacgtgagagatctgaagcagacaaagaaaaaagtcacaaagatgacagtgaattagacttttcagctctttgtcctaagattagcctcacggttgctgccaaagagttatctgtgtctgacacagacgtctcagaggtatcctggactgataatgggaccttcaacctttcagaaggatacactccacagacagacacttctgatgatcttgaccgacccagtgaggaagttttctctagagatctttcagattttccatctctagaaaatggcatgggaacaaatgatgaagatgaattaagccttggtttgcccactgagctcaagagaaagaaggaacagttggacagtggtcacagaccaagcaaagagacgcaatcagcagctggtctcacccttcctctgaacagtgaccaaacctttcacctgatgagcaacctggctggggatgttatcacagctgcagtgactgcagctatcaaagaccagttagagggtgtgcagcaagcactttctcaggctgcccccatcccagaagaggacacagacactgaagaaggtgatgactttgaactacttgaccagtcagagctggatcaaattgagagtgaattgggacttacacaagaccaggaagcagaagcacagcaaaataagaagtcttcaggtttcctttcaaatctgctgggaggccattaatctaggaatcagcttgcaacagagcacaaaaaacaccaaaaaaatttcaaacaagaaaaaaaaaaaaaaaaggaaaagaaaaaaattgaactgtaagctttaatgattactttagatttgttttattttccctcctgcagtgaattaattggatatatatcagctgacactgatagattgatatttctgatcgttatttttgtgtaataagcatggaaatgaactttatacacaccactgtgttgtcagagataaatattaggggttgtttttaaagcaaaaagaaaaaaacaaaaaccaaactattaaaatcctcctataaatattctttttctttacagtttttcaagcatgcaaaacagtttattgtaacttactgaaaaatattaacaattaattgtgaatacatgctgttaccagcttccttattcctaatacctggaaaatttttttttcaacggatagattttgatgtaaaaaagaccgaaattatcaaggtatcttagttgaaggacttgggaaatactatcaaaattaatttcttaggaaaaaatttaaaagtatatttaagtactctggatagactgaaacgtttccatgttatttctgcagttgtagacttaggcttatttgtaaagaagcatgctccattgactgccatctctagtcttgcagtgggtggtattaacccatagaaagcaagcagttgtgtatcacatagacaatggttatgatgtaaacagattcagttgttttgttgttcattcgtcatatgtttgtgatagggatgttgggagcacagctctattctgcctgctcagacttaagttagacccttatcttttatattatgtcatgaaaaaagtctcctaaaattgtgaaactagttcttgatgagtgatgtgatcatcagcaataaagatataataactctgttttcttagcctgtatagaggagaggaacttgcttggctttaaaatatatttatttgccatttaagtataaatatggaatctgtttcttattgggaagatagaatatatatattttcctttaaactttttaaggtcacttttaaataaccaaatttgatttatggtttttaacaaaggactaaagagctgaaaccaacctagttttgtttttgtgatataaactttaagtgtcgagggaccatgccagcaactaccaaaaatctcttaaatcttcaggtacagctggcattttggcagatgcatagagacatctgagaccctcagaaaggaaggataatccaagaatataggaaatctgtgttctcttcctttcattttatcccttatatttctaaagactaattataagtaatctgacattttaatgtagctactcttatttattttttctttctgaggtattaaaatatctggactgagttttgccaaatgttaaagggagaagagttactgaagactttgaacacttgctttttgtgattgcttatgtcattagtgcctcatgactgtgtttgatgtcctttattgatacaaagtgagcctgtgccttcattatcttgcccattttaatacaaatggaaacctggtgtttgaaaatctctgaactgtgtgggttttggaggaatatacctgaattttattcaataacagtttctggacaggaagaaaaatacagttacatatttataaaa

SEQ ID NO: 10307 - DNA, 3762 bp, Homo sapiens
  source 1..3762: mol_type = unassigned DNA
ggaggcggggcgatggccacctcccaccgagtggcgaagctggtggcctccagtctccagaccccggtaaatcccatcactggagcgcgggtcgcccagtacgaacgcgaagaccccttaaaggccctggcggcagcggaggcgatcttggaggacgaagaggaggagaaagtggctcagcccgctggggcatcggctgatttgaacaccagcttttctggggtggatgaacatgcaccgataagctatgaggactttgtgaactttcctgatattcaccactctaatgaggagtatttcaagaaagtagaagagttgaaggctgcccacatagaaactatggcaaaattagagaaaatgtaccaggataaattacatttaaaggaagttcagccagtggtcatcagagaagactctcttagtgactcttccagatctgtatcagaaaagaactcctatcaccctgtctcattaatgacatcattttcagagcctgatttaggccagtcttcctccttgtatgtgtcctcctctgaagaggagttacccaacctagaaaaagagtatcctaggaaaaacagaatgatgacctatgctaaggagctcatcaacaatatgtggacagacttttgtgttgaggattatattcgctgtaaagatactggcttccatgcagctgaaaaaagaaggaagaaacgaaaagaatgggtgcccacaattacagtaccggagccttttcaaatgatgataagagaacagaagaaaaaagaagagtccatgaaatctaaatcagatatcgaaatggtacataaagcgctcaaaaaacaagaagaggatccagagtataagaagaaattccgagccaatccagttcctgcatctgtctttctccccctttaccatgatttagtcaagcaaaaagaagaacggagaaggtctctgaaggagaaaagcaaagaagctcttttggcctcacaaaagccatttaaatttatagcaagggaggaacagaagcgagcagcccgggaaaagcagctgagagactttcttaagtataaaaagaaaacaaatcgatttaaagccagacccattcctcgatctacttatggttcaactaccaatgacaagttaaaagaagaagagctctatcgaaaccttaggacacagctgagagcccaggagcatttacagaactcatctcctctgccttgtaggtcagcttgtggatgcaggaaccccaggtgtcctgaacaggctgtaaagttgaagtgtaaacacaaggttaggtgcccaactcctgattttgaggaccttcctgagagataccagaaacacctctcagaacacaagtctccaaaactcttaacagtgtgtaaaccatttgatcttcatgcatctccacatgcatctattaaaagagaaaaaattttggcagacatcgaagcagatgaagaaaatttaaaagaaacacgttggccttatttgtctccaaggcgtaagtcaccagtaagatgtgcaggtgtaaaccctgtgccttgtaactgcaaccctcccgtgcccacggtatcttccagaggacgagaacaagccgtaaggagatcacttgaggaaaagaaaatgttggaagaagagagaaatcggatcctaactaaacagaagcaaagaatgaaagaattgcagaaactcctgacaacccgggctaaggcttatgactcacatcaaagtttagctcaaatatctaaatccagagtaaaatgtctcagaaagagcgaaaaggaaaggatgagagaataccaacgagaactagaagaaagagaagaaaaattaaaaaagaggccactgctatttgaaagagttgctcagaaaaatgcaagaatggcagcagaaaagcattattctaataccctaaaagcactaggaatatctgatgagtttgtttcaaagaaaggccaaagtggaaaagtacttgagtacttcaacaatcaagagacgaaaagtgtcactgaagacaaagaaagctttaatgaagaagaaaaaatagaagaaagagagaatggggaagaaaattattttattgataccaacagccaggattcttacaaggaaaaagatgaagccaatgaggaaagtgaagaagagaaatctgttgaagaatcacactgaatcatcaaggtctcctctctatgcccttgctgttgtttgcagcgtcagggtgtcagcagccgcatttgtgtttagaacatctgtggggacgcttctgatatgtgcagggctgttgatcaaagtcatctgtagcctgaaaagcctgaatccagctgattggtcatttgatcagttagagtaaggctttgcctattcagttttaaaaatcattgtgtattatctgtttgcaactatgattttgtatttttaaaaagtgagaaccacagctgtcacaaactgattagttataaaaatatacattatttcattaattttactggaaaaaatggcttagtattgaaaggagagagaagtattggtctttggtggtttactttttaaaaattttggaaagtgtgaatcaataactatttttaattatactatttgcccattctttttctctgcagtgcatttcacagaataaatcctctaacttgttttgctgctctgagccatttttaaaagtatagaaaaaacgccgggtatggtggctcatgcctgtaatcccagcattttgggaggccgagacgggtggatcacgaggtcaggagatcgagaccatcctggctaacacgatgaaaccccgtctctactaaaaatacaaaaaattagccaggcgtggtggtgggcgcctgtagtcccagctacttgggaggcagaggcaggagaatggcatgaacccaggaggcagagcttgcagtgagccgagatcgcgccactgcactccagcttgggcaacagagcgagactccgtctccaaaaaaaaaaaaaaagtatagaaaaaaatggatacttgcaaatttacatttatttttgcactgagagtttactgttaaattgtctacaccatcatccctttttctttttatccttagttctagtccaaattatttttgatttgtaaattattaggaaagtttttatactagtttttttaaccctatgtattattacagatggaagtaattatggcatgtgtgagttataatctaaattaggggcaagtatccctttttttatatgatgaaattgtgcataataacttggctagggcaagtctccaaagtaattcagatttaactcttcactgctagacccagttgtgttcaactttttacatattattgccaacacactttatctctctgtgtacagtgttaatctgattttataaatctatatttttttctttaagcaaatttttgttttaaaatttgaagccaatcataaagataatatagcataagacattttcttttctaaaaacaatcagcatcattttaaaaggatgaactaatacaggtgtatgtaatagcagtgtttccaaactggcaatttatgctttaaatttaaaaataaggtcatttttctccatcaggggcaaatgtttacttgtaattttcttcctacagttcgtgttaaattactttttactattattatattgtaaactccttgggatttggcaccatttaaaaattcatctttgtattcccttaatatttggaacagtattgtacatatggtaggtacttaataaaggtttgaatgagtgtg

SEQ ID NO: 10308 - DNA, 3684 bp, Homo sapiens
  source 1..3684: mol_type = unassigned DNA
atagcaaccggctccctagctaggcgcccccgggttgccaggggccgcaccagctttcccgtcccgggccagcgcaggcgctcaggcctcggaggcggggcgatggccacctcccaccgagtggcgaagctggtggcctccagtctccagaccccggtaaatcccatcactggagcgcgggtcgcccagtacgaacgcgaagaccccttaaaggccctggcggcagcggaggcgatcttggaggacgaagaggaggagaaagtggctcagcccgctggggcatcggctgatttgaacaccagcttttctggggtggatgaacatgcaccgataagctatgaggactttgtgaactttcctgatattcaccactctaatgaggagtatttcaagaaagtagaagagttgaaggctgcccacatagaaactatggcaaaattagagaaaatgtaccaggataaattacatttaaaggaagttcagccagtggtcatcagagaagactctcttagtgactcttccagatctgtatcagaaaagaactcctatcaccctgtctcattaatgacatcattttcagagcctgatttaggccagtcttcctccttgtatgtgtcctcctctgaagaggagttacccaacctagaaaaagagtatcctaggaaaaacagaatgatgacctatgctaaggagctcatcaacaatatgtggacagacttttgtgttgaggattatattcgctgtaaagatactggcttccatgcagctgaaaaaagaaggaagaaacgaaaagaatgggtgcccacaattacagtaccggagccttttcaaatgatgataagagaacagaagaaaaaagaagagtccatgaaatctaaatcagatatcgaaatggtacataaagcgctcaaaaaacaagaagaggatccagagtataagaagaaattccgagccaatccagttcctgcatctgtctttctccccctttaccatgatttagtcaagcaaaaagaagaacggagaaggtctctgaaggagaaaagcaaagaagctcttttggcctcacaaaagccatttaaatttatagcaagggaggaacagaagcgagcagcccgggaaaagcagctgagagactttcttaagtataaaaagaaaacaaatcgatttaaagccagacccattcctcgatctacttatggttcaactaccaatgacaagttaaaagaagaagagctctatcgaaaccttaggacacagctgagagcccaggagcatttacagaactcatctcctctgccttgtaggtcagcttgtggatgcaggaaccccaggtgtcctgaacaggctgtaaagttgaagtgtaaacacaaggttaggtgcccaactcctgattttgaggaccttcctgagagataccagaaacacctctcagaacacaagtctccaaaactcttaacagtgtgtaaaccatttgatcttcatgcatctccacatgcatctattaaaagagaaaaaattttggcagacatcgaagcagatgaagaaaatttaaaagaaacacgttggccttatttgtctccaaggcgtaagtcaccagtaagatgtgcaggtgtaaaccctgtgccttgtaactgcaaccctcccgtgcccacggtatcttccagaggacgagaacaagccgtaagaaagagcgaaaaggaaaggatgagagaataccaacgagaactagaagaaagagaagaaaaattaaaaaagaggccactgctatttgaaagagttgctcagaaaaatgcaagaatggcagcagaaaagcattattctaataccctaaaagcactaggaatatctgatgagtttgtttcaaagaaaggccaaagtggaaaagtacttgagtacttcaacaatcaagagacgaaaagtgtcactgaagacaaagaaagctttaatgaagaagaaaaaatagaagaaagagagaatggggaagaaaattattttattgataccaacagccaggattcttacaaggaaaaagatgaagccaatgaggaaagtgaagaagagaaatctgttgaagaatcacactgaatcatcaaggtctcctctctatgcccttgctgttgtttgcagcgtcagggtgtcagcagccgcatttgtgtttagaacatctgtggggacgcttctgatatgtgcagggctgttgatcaaagtcatctgtagcctgaaaagcctgaatccagctgattggtcatttgatcagttagagtaaggctttgcctattcagttttaaaaatcattgtgtattatctgtttgcaactatgattttgtatttttaaaaagtgagaaccacagctgtcacaaactgattagttataaaaatatacattatttcattaattttactggaaaaaatggcttagtattgaaaggagagagaagtattggtctttggtggtttactttttaaaaattttggaaagtgtgaatcaataactatttttaattatactatttgcccattctttttctctgcagtgcatttcacagaataaatcctctaacttgttttgctgctctgagccatttttaaaagtatagaaaaaacgccgggtatggtggctcatgcctgtaatcccagcattttgggaggccgagacgggtggatcacgaggtcaggagatcgagaccatcctggctaacacgatgaaaccccgtctctactaaaaatacaaaaaattagccaggcgtggtggtgggcgcctgtagtcccagctacttgggaggcagaggcaggagaatggcatgaacccaggaggcagagcttgcagtgagccgagatcgcgccactgcactccagcttgggcaacagagcgagactccgtctccaaaaaaaaaaaaaaagtatagaaaaaaatggatacttgcaaatttacatttatttttgcactgagagtttactgttaaattgtctacaccatcatccctttttctttttatccttagttctagtccaaattatttttgatttgtaaattattaggaaagtttttatactagtttttttaaccctatgtattattacagatggaagtaattatggcatgtgtgagttataatctaaattaggggcaagtatccctttttttatatgatgaaattgtgcataataacttggctagggcaagtctccaaagtaattcagatttaactcttcactgctagacccagttgtgttcaactttttacatattattgccaacacactttatctctctgtgtacagtgttaatctgattttataaatctatatttttttctttaagcaaatttttgttttaaaatttgaagccaatcataaagataatatagcataagacattttcttttctaaaaacaatcagcatcattttaaaaggatgaactaatacaggtgtatgtaatagcagtgtttccaaactggcaatttatgctttaaatttaaaaataaggtcatttttctccatcaggggcaaatgtttacttgtaattttcttcctacagttcgtgttaaattactttttactattattatattgtaaactccttgggatttggcaccatttaaaaattcatctttgtattcccttaatatttggaacagtattgtacatatggtaggtacttaataaaggtttgaatgagtgtg

SEQ ID NO: 10309 - DNA, 4094 bp, Homo sapiens
  source 1..4094: mol_type = unassigned DNA
aaaggagcagcgccgagaattcaccggagctcggggaggcgaggcgggagccctgagctgaggccgggcagcgcggacccgcgcaggaggaggcggcggggacaccggcgagtccccagcagggcccctgggctcccggaagggtctccagccacctgcccttcccgagaagagagagctctgggccttcttcctgccagtctggtcttcgagtgcgttcaggacagatagaccttggcacaggctgccccgagattcctgcgacgctgtctgttcctgccttctgtggagcatggcacccacaggcttccaggacggatcatagacccgagcctccaggagggcgccctgtgcggctcactgcgcggtccctctcagctcccctgccacccagcctctgaggccggctcctgtcccggaaatgccctcgggcacctggatgaggccatcccagagcgggacccaactgtgccacccaccaagcctccccctgcgccccccgtgccctcgcatgtccggctgccagggcagactgtagaatgtctgtgccccagatccacgtggaagaagtgggtgcagaagagggggcgggagcagccgcaccacccgatgaccacctccggagcctgaaggccctcaccgagaaactgaggctggagacccgcaggccctcctacctggaatggcaggccaggctggaggagcatacctggcccttcccgaggccggctgcggagccacaggcgagcttggaggagggggagcgtggggggcaggagcccttgctccccctgagagaggctgggcagcaccccccttctgccaggagtgccagccaaggtgccagacccctgtccactggcaagctggaaggctttcagagcatcgatgaagctatagcctggctcaggaaggaactgacggagatgcggctgcaggaccagcaactggccagacagctcatgcgcctgcgtggcgacatcaacaagctgaaaatcgaacacacctgccgcctccacaggaggatgctcaacgatgccacctacgagctggaggagcgggatgagctggccgacctcttctgtgactcccctcttgcctcctccttcagcctctccacaccactcaagcttattggcgtgaccaagatgaacatcaactctcggaggttctctctctgctgaggagccctcagactgggcggaggggctggagcggagggcttgggctggaggggtgtcagaggaagctgaggccaagttactccagtgggtctcccggaggcaggggtccctgggactggcgactcaagggccccaggacctattcagtggtgctctcccacccaggggccctgggtgtggatgccagtgtctctgtgactggctcttgcttactacccaaagagctctgcagaagggccgctccaaccaagatgttaaaggagacctgggttcccaccataatccatccctccacggtcacgttcctgtttcctggaatcactggtgctatgaactgggattcccaaagggaggccccccaacaaagctgtcatttttgcagaaggctgtcccgcaagggccttgggggaaattaggcatgtcagatgtgcctgtctcacgtgctgttgctgtcctctaagtattgtctcaaattcaccctaagtacatgactcagcaacattgacagggagctactaggaagggaaaatcgaaaggcatgacaaatgggcacttggggacgcagccccagtggctggcagccagtgtctctggtgagcctgacactataaggctgtgtaaattgtaaattctggcgtgtgctgggacatgtgatgggggcactagcgtagcttgggtgcaacaagcacagatgtccccattgtctcccctggccacatgcatctccaaagagcctcttcactgccacccacaccccagggtgacagcctgggagaccactggtgactgaaccaggcaggtcctgaaagcattttccataactgaattctcctgcaggggcgtgaccggggcctcctggtggattctggtggtgtcaccttactgccctctctggaaagacaatctagggagcccagaggcccatcctgagcctcctctgagattttgtgcctgacctaaacaactagttttaataagactgttactgatgtgttgttcacttgttagtaactgatttttgtccaaatgcggaagccacttgtgtaggtcaactacagtgcgtaggatttgattttaagagtttctccctcccaacaggcttgaggatcagcaagttaagaccccagcaggttagggaggtcagtctggggtcatacggcatggcaggggtccctcggccagacccgtagaatcctgagataaggagtgtttctgacctttggtgtcatctagtcgagtcctctcattagtaaaggagcaaagtgaaacctgggggaggagaaggacttccctcaggttgcacagctgtttaggctatagaatattgatgtgtgaaaccattattgataatgcctagtagatcacatgtcaatgaacttgaaccccaaagatggtcgtgatgctttgccaaacccgcacactgccaacccctctactctccacctcagcccccacccacatctcccagagtattgcaattcagaacatttgggtcaaggtggagcaaggcactgacagtggccccacagggcatgtgtcactaatcactgtcccatggtctacgcacggcatctggctgctctgtctactgtgacttcttcctgtgtaatctcagtggggcccgtgtccacccacacatcgtgacccacataggggagaggttgcttttcttttgtgggctgagagtaggacaatgcaaatgaatgatctctagtagacagaaaagaacttggtctcttttttaaaatttcaaagagccagaagttctatgcctccttcaaagtaggcagaacaacgcagccaagatctactgtctgccatgctctgtgcaatgaagtctgcaggcctgaggaccatgtactgctgtccttcctcagagctctgcacaaacactgccaagtcctgaagacgcattcctttcctgccaacctctttccagataagcccttgaggtctcgggctgacctacacacacacacacacacacacacacacacacccccacacacacacacacgacagagaacatgccataaacatccttgaacccatgcaggaaagcccatcccatattctgaaaaaatgccaaattaggtttttctttctttttggaaatcagtcattacagtaaccgaaaccattgggttcagcgaaaatggaaagatttagctgaatgtagtcagtccaattaagttggatgcaactgagtgatttagttgcttgggtaacccagtgcttgcttgctttcttcattctctgggtggaaactaagatcaagacacatgtttggggataagttaaatgtctgagctattttgctcggtttatcctaagagaactttattatgggatgaggaggtgacccaagatgagaagtggagggggacagcgatgttttctaaacatcgtccagtgttgactggcttccttactttgcacagtgaacacaactaaccacattaattcagctttgtgaagtccctgctctctgtgggtctatgagtcagcagcaacattggcctaacctccgtcccagcctcctggctcaccacatgtgtacagtgctgtttgcagttgtactcattatccatccatctctctgccatccccaagcatcgctgggtgtaaaacgcaaactctccaccgacactgccatgcgtggtcatgtcttgatgccttcaggggctcagtagctatcaaagaggcctggagggcctgggcaggcttgacgatgcctgaccgagttcaagacccacaccctgtagcaataccaagtgctattacataatcaatggacgatttatacttttattttttatgattatttgtttctatattgctgttagaaaaagtgaaataaaaatacttcaaaagaagatatccatataaaaataaaaggagagaaaaatg

SEQ ID NO: 10310 - DNA, 2992 bp, Homo sapiens
  source 1..2992: mol_type = unassigned DNA
gtgtgccctccgcggggcatgatggggtagctggagatttccatcatggcggcgtccatttcgggctacaccttcagtgctgtgtgtttccacagcgccaacagcaacgcggaccacgaaggatttttactgggagaggtaagacaagaggaaacgtttagcatcagtgactcacaaatcagcaacacagaatttctgcaagtaattgaaatccataaccatcagccttgttcaaaactttttagtttttatgactacgcaagcaaagtgaatgaggagagtttggacaggattcttaaagatcggagaaagaaagtcattgggtggtacagattccggcgcaatacgcagcagcagatgtcctacagagagcaggttcttcacaagcagctcacccgcatcctcggcgtgcccgacctcgtctttcttctcttcagcttcatctccactgccaacaattccactcacgctttagaatatgtgctcttcagaccaaatagaaggtataatcagaggatatcactcgctattcccaatctaggaaatactagccagcaagagtacaaagtgtcttcagtgccaaatacttctcagagttatgccaaagtgattaaagaacatggtactgacttttttgacaaggatggagtgatgaaagacatcagggcgatttatcaggtttataatgcacttcaggagaaagttcaggcagtgtgtgcagatgttgaaaagagtgagcgagttgttgaatcttgtcaggcagaagtgaacaaattaagaagacaaatcactcagaggaaaaatgaaaaggaacaagaaagaagattgcagcaggcagtgttaagcagacagatgccgtctgaaagcttggacccagcgttcagtcctcggatgccgtcctctgggtttgcagctgaaggcagaagtacacttggagatgcagaggcctcggatcctcctcccccttactctgattttcacccaaacaatcaagaaagtactttgagccactctcgcatggaaaggagtgtctttatgcctcgacctcaagctgtgggctcttccaattatgcttccaccagtgccggactgaagtatcctggaagtggggctgaccttcctcctccccaaagagcagctggagacagtggtgaggattcagacgacagtgattatgaaaatttgattgaccctacagagccttctaatagtgaatactcacattcaaaggattctcgacccatggcacatcccgacgaggaccccaggaacactcagacctcccagatttaactaaacaaaagaaactctccacctagcactgtttttcttcattgcttactgagagggtttttgagaacttaatctggggggagaactgctttctcagataccttaactcccgagaagagagtccttgtgcacagaacttgtgggagcctccatccgctgctctttacctttggatacagtgtgcaagtttcatgacagaatcattaagataatcaaattgtcctaattctggtgcgattcatggatatactggtaaatttaggcaaagtgaaacttatcagcgtagtttctgttctttaaaataaattggaaattagagactaagcacaattagtctataaatgttctataaatcaaaaacttacctcttgcactatcatgccttgaaatttactttttcaaagggaaacaagtttagcagcagccttcaaagaacttctttctatgatgagccaaattcatctttgccagaaaagaaattttgataattccaagaagcctgattagaacaaatcagatataccttctcttgtctgcatgactttgtgagataaaagagagggcttccaacttttttctactagcttgatatgtattatcacttaaaatggttgcctttaaaaaaaaaaagtagagatactaattaccagtaagtaatcatccaaataaatacgtcataaaataaattaattattttttctttgatggattacagtgactactgtgttgcactggcacatttatggtctctgttctggaatcttggaggacacacagcagtggagaacagaaggagtgagttttataatgaacagattccagacacggtaggtttagctgagttcatacagaggagatataactcatttagatcttctgacaaatcctagtgttagttttatctgtggaggaaagacatttaataataaactgtttgggaatcttggtgaataaagattcattttcaagctgaataaccatacttattttattttaagttgccatttggggaataattgcagtatgtgtagagactctcttgggatgcacttatatttttatttaatgactacttgttttctagttttgcccacaacgtctgaaaccactaagacattcaggagcatgttgagcttctggtttggaaacagcaagacccaccatttatgacaaggacagccatgaggttaatacttggagtttaactgccttccctttgaactagttaaaatctgtaagaataaggaagttgttgaaggcttaaaatctgggttctgaaaaagtagtttcagtttataggatacacatttactcactgagctccagttccaatactaaattagacagtatcatatagacggaaaatgaaatgctagaactgccgttctttggatcgccactctatgggggtctgtcttttaactactctcctggttatgttggccttacaccactgccatttgatttaaaacgctgcagaccactttatctgcaaatgtgttccagttgttatcagctacctactacgcagcttcagcgccagtgtgaatttatttttttttaagtgccattaccgtctcctctgttcagattttgacattcaggaaaatatttttattttgatgccatactgaaatctacaatgtatatctgacaaagcagttaaatgtgacaataaaaaacttatttaatcatggta

SEQ ID NO: 10311 - DNA, 6894 bp, Homo sapiens
  source 1..6894: mol_type = unassigned DNA
acttccgaagagagaaccgccatgaagagagaagggggtgccgcccacctctgctccgacagcctcccggagtcccagcagcaagacggcaaccacgcacccaacttctccagccacggctcatgccgccgtcgccagcggcgccgacatgacaaggcgctgcatgcccgctaggccaggtttcccctcatccccagccccggggtcgtcgcccccgcgctgccatctgagacccggtagtaccgcccatgctgcagcgggaaagagaacagagagtcctggggacaggaagcagtcaattatagatttcttcaaaccagcttcaaaacaagacagacacatgttggattcaccacaaaaatcaaacatcaaatatggaggaagtagattgtctatcactgggacagagcagtttgaaaggaaactatcctcaccaaaagaatctaaacccaaaagggtgccaccagaaaagagccctattatagaagctttcatgaaaggtgttaaagagcaccatgaagatcatggtatacatgagtcacgtcggccttgtctgtcactagcctccaaatatttagccaaaggaacaaatatctatgttccttcttcatatcacttgccaaaggagatgaagtcactaaagaaaaaacatcgatccccagagagaaggaagtcactattcattcatgaaaataatgagaagaatgatagagatcgaggcaaaaccaatgcagactccaaaaagcagaccacagtggcagaagctgacatcttcaataacagctccagaagccttagcagcaggagcagcctgtccaggcaccacccggaagaaagcccactgggagctaaattccagttgtcactagcttcttactgcagagaacgagaactaaagaggttgagaaaggagcaaatggagcagagaatcaactccgagaattctttctcagaagcaagcagtctttccttaaaatctagtatagaaagaaaatataaaccaaggcaggaacaaaggaaacagaatgacatcatacctggaaaaaataatctgtcaaatgtggaaaatggacatctctcaagaaaaagatcctcttctgattcatgggaacctacttcagcaggctctaagcagaataaattccctgaaaaaagaaaaaggaactctgtggactcagatctgaaaagcacaagagaatctatgataccaaaagcaagagagtccttccttgagaagcgtcctgatggaccacatcagaaagaaaaatttataaaacatattgcactgaagacacctggtgatgtgttgcgcttagaagatatatccaaggaaccgagtgatgaaactgatggctcttctgcaggcttggcaccttcaaattctggcaattctggccaccattctaccaggaatagtgaccaaatccaagtggcaggtaccaaggagactaagatgcagaaaccccacttacctttatctcaggaaaagtctgcaattaaaaaagctagcaaccttcagaaaaataaaaccgctagctccacgacaaaggagaaggagacaaaactacctttactttcccgtgttccaagtgctggttcctctctagtaccattaaatgctaaaaattgtgctcttccagtttctaaaaaagataaagagcgttcctcatctaaagaatgttctgggcattctacagaatccaccaaacacaaggaacacaaagcaaagactaataaggccgattctaatgtatcttcagggaaaatttctgggggacctttgcgctcagaatatggcactcctacaaagtctccccctgctgctttggaagttgtgccatgtatcccaagccctgcagcaccttcagataaagccccttcagaaggagagagttcaggaaattccaatgcaggtagcagtgcactgaaaagaaaactaaggggtgattttgatagtgatgaagaaagtttaggttacaacctagacagtgatgaggaagaggaaacattaaagtcactggaagaaataatggctttgaacttcaatcagactcctgcagctacaggaaagcctcctgctctttccaaggggcttagatctcagtcatcagactatacaggacatgttcatcctggaacttacacaaataccttagaacgtctagtgaaggaaatggaagacacacaaaggctagatgaactgcagaagcaactacaagaagacataaggcaaggccgaggcattaaatccccaatcagaattggagaagaagacagtacagatgatgaggatggcctcttagaagagcacaaggaatttctaaagaaattttcagttacaattgatgctattcctgatcatcatccaggtgaagaaatatttaatttcctcaattctggaaaaattttcaatcagtataccttggatttaagagactctggttttattggacaaagtgctgtagaaaaacttattcttaaatcgggaaaaacagatcagatttttttgacaacacaaggtttccttacgtctgcttatcactatgtccagtgtcctgtccctgtgttaaagtggctgtttcggatgatgtcagttcatacagactgtattgtgtcagtgcagattttaagtacattgatggaaataacaattagaaatgataccttcagtgactcaccagtttggccatggatcccatcattgtctgatgtagcagctgtgtttttcaatatggggattgattttagatctttgtttcccctggagaatcttcagccagactttaatgaagactatctagtttctgaaacacagacaacatcaagggggaaagaaagtgaagattcatcttataagccaattttttcaacacttcctgaaaccaacattttaaatgtggttaagtttctaggcttgtgtacatctatacatccagaaggttaccaggatcgtgaaataatgttgctgattttaatgttatttaaaatgagtttggaaaaacagctgaaacagattcctttagtagactttcaaagcctcctgataaacctgatgaaaaacatcagagattggaacacaaaggtgcctgaactctgtctgggcataaatgaactctccagtcatccccacaacctcctgtggttggtacagctggtccctaattggacatcacgtggaaggcaactgagacagtgcctcagtctagtgattatttcaaagcttttggatgagaaacacgaagatgttcctaatgccagtaatctgcaggtatcagtcctacatcgctatcttgtgcagatgaagccttctgatttgttaaagaaaatggtcttgaagaaaaaggctgaacaaccagatggcattattgatgacagtcttcatttagaacttgaaaagcaggcatattacctgacctacattcttcttcatttagtcggtgaagttagttgttctcattctttttcttctggacaacggaaacactttgtgctactctgtggggctttggaaaagcatgttaaatgtgatattagggaagatgcaagacttttttacagaactaaggtgaaagacttggtcgccaggatacatggaaaatggcaggaaataatccagaactgtcggcctactcaggggcagcttcatgacttctgggtaccagattcttaataggagttgcagcagcaaaaatatgaaccaagagaaattcaataagagcctttcatagaggagtagaaaggattattacagaatccaatgaatgccaagaaaatgtacagcaaatgtgccacttgaatatctagtatgaagctggtaatgaagaaattgccatttctgaagcagatatgaaatatgatctgcttaattgttaaggcaactgacctttcaaaagtgcagagtcttattaaaagaggggaggggtagaagcagaataatagtcatatgtctaacctgccccagttaactcctcttgttaaattataagccagttatcttttttagatagtatttttgtcacttggataatcacaggaaatatataagaaaagagcttggactaacttgagaagttggacatggaaagcaagaccaagttccagttgggtttaattttccctcttggttattttcggacacaaagggaatgcttaaaactgagtttagtaataaaaagcataaatctcttctgtaacttttataaaccacagggaggtttcaatccatgcattttccttcattactcaagattataaatctgtttttaaaatacatctaaacaaacagttgagaaacaaaagtttggcatgttgtcagatccccttaagaggaagaggttaagctgtaaagtagtggccctgttttgatgccagaacattcatatgctgtttgttctggatttcttttaaatgcatgtattttaaatactggttaaatcttagaatcttggctatatcttagaattctggctcttggtaaccatattacagaagtctatattgtaaaagcctaaagatctggacaagtttccaacaaccttgtttccatgagtatataattttggcagacacctgaattctttgggacactgtgtctgtgtatgtgtgtgtgtgtgtgtgtgtgtgtgtgcgcttgtatcttgaagttgttgcacttcaaaaccacagctgctgtaaattcttaaacactggagagccatcctttggtttaaatggtagagggttagtggaagtgcacacgttgtttttagcccaggggtagtaacaaactcttactagccaactagaaaattattttgttgacgagatgtcccttttaggagggtttgtttcctgaaagaatgccaactttttttgttgttctttcagtattggcttgagtgacctgttctcctgagtgctctagtgtctccagttgtgggggggaaagatgatggaggggaacagaaactggacttgatgtttgcggtttgagaggcaagaaaataaaataactttctacctctaaattgaggcttaggagtaaaaagcattttgtcctaaatttatcatttaaaatagcatcagtaacttttgagctcatgtcaatcaagcattggcagtcagagattttatagggaagactaagtaaatccagtttccaagaacctaaactgattgaggctccaagagtcagaccaacaaaagttttattctgtgttgtttactggtaagaatattattatcttgatactacctctcaagggtattgttacaaaatgccacttatggttaaagagatagatacaaagagttctatttgacagaagcttgaaactctggcatctatctgcccaacgatgggggctttcgttctgtaatttaatcctttgtagatacattatttgtgtgtaattttatacgtgttcatatttttctcattttgcattgtgtaaagtgtacaaaatctcaaagtataaaatactgcttatattgcttgtaatttacagtgtgtaaatattttctaattgtgtacattgatgggggggacaagtgggttattcaggtttttttttaatgacccttttgtattgcagtttcaacagataactgtccatcaaatttaaaaccactttgatacatttttatttaacagttccaataagaaaaaaatctctatttttaattatatttctcctttagaaaaaaaatacttcatggtccctctaaaataaatggccagacctcagtttaggcccttgtatttatgactctggtagaggtcttcagactccaggtcatagtccagtcagtatttgcatttgggttctcatgaaaactttgtgactctcttttagcacaagtagcccatggtttttcttccaaatcaagtattttacttctcccttgagtccccatgctttgtctccctcctgctgctattgcccggtgaatgggatggtagagagggagaaatgttcattgcacagagaatgtcaggccactttggggacttggcaaacgaagcttgcactgagtggtggtgtgtttggcaatattactgtgccaaaaatcaccttgtctaattttatggatatgtatggcaaacttattacccttcttgcaagctgcacattaaggtacttgtaagtgtttatgcttttgtgtgtaactgtttgccttttctaactgcttttcttgttactgaaaatataattctactagttttatcacattaagaggctctccatgcacaaaatgcattgatgtagccgtaaagtaacagcatttgtacattttctatctcctgatggcagtggtgcctttgtcaccttttggaaggtttgcattttgtttctgctttcaagcgcaaatagtagcttgctttcagcttcacaaaaatctcctcaaatgtaaaagatacaaaatggcgtgttatcatccaggcttagttggagtatttgcatttttatttttatcaaaacaaatataattggtggggactggccagtaataatgtgtggcgtctttaagccaagagtaatttttaaattaaaaatgaaaattttaagaggtagcccattaaacaagctactgagttggagaattaggggatgactgtggtggtttgtcgctaaggaggcaacagtagggtccaggcggcggggcacgtagagcagttagcatgatccatggttattccttactcatgaacagtgtcggcgcacctcattatctgtgcatttgtttttcctgggcagtcctgtcagccagttaatccaccagctcttaggaagtaaatacagatttttttctttccttttttttttttttaaagattttatactacatcttgttaaagtcctatgaatgtgtgtgtgtgtgtgctattaaaactgctttttctcagtttgaaca

SEQ ID NO: 10312 - DNA, 3712 bp, Homo sapiens
  source 1..3712: mol_type = unassigned DNA
ccgccatgaagagagaagggggtgccgcccacctctgctccgacagcctcccggagtcccagcagcaagacggcaaccacgcacccaacttctccagccacggctcatgccgccgtcgccagcggcgccgacatgacaaggcgctgcatgcccgctaggccaggtttcccctcatccccagccccggggtcgtcgcccccgcgctgccatctgagacccggtagtaccgcccatgctgcagcgggaaagagaacagagagtcctggggacaggaagcagtcaattatagatttcttcaaaccagcttcaaaacaagacagacacatgttggattcaccacaaaaatcaaacatcaaatatggaggaagtagattgtctatcactgggacagagcagtttgaaaggaaactatcctcaccaaaagaatctaaacccaaaagggtgccaccagaaaagagccctattatagaagctttcatgaaaggtgttaaagagcaccatgaagatcatggtatacatgagtcacgtcggccttgtctgtcactagcctccaaatatttagccaaaggaacaaatatctatgttccttcttcatatcacttgccaaaggagatgaagtcactaaagaaaaaacatcgatccccagagagaaggaagtcactattcattcatgaaaataatgagaagaatgatagagatcgaggcaaaaccaatgcagactccaaaaagcagaccacagtggcagaagctgacatcttcaataacagctccagaagccttagcagcaggagcagcctgtccaggcaccacccggaagaaagcccactgggagctaaattccagttgtcactagcttcttactgcagagaacgagaactaaagaggttgagaaaggagcaaatggagcagagaatcaactccgagaattctttctcagaagcaagcagtctttccttaaaatctagtatagaaagaaaatataaaccaaggcaggaacaaaggaaacagaatgacatcatacctggaaaaaataatctgtcaaatgtggaaaatggacatctctcaagaaaaagatcctcttctgattcatgggaacctacttcagcaggctctaagcagaataaattccctgaaaaaagaaaaaggaactctgtggactcagatctgaaaagcacaagagaatctatgataccaaaagcaagagagtccttccttgagaagcgtcctgatggaccacatcagaaagaaaaatttataaaacatattgcactgaagacacctggtgatgtgttgcgcttagaagatatatccaaggaaccgagtgatgaaactgatggctcttctgcaggcttggcaccttcaaattctggcaattctggccaccattctaccaggaatagtgaccaaatccaagtggcaggtaccaaggagactaagatgcagaaaccccacttacctttatctcaggaaaagtctgcaattaaaaaagctagcaaccttcagaaaaataaaaccgctagctccacgacaaaggagaaggagacaaaactacctttactttcccgtgttccaagtgctggttcctctctagtaccattaaatgctaaaaattgtgctcttccagtttctaaaaaagataaagagcgttcctcatctaaagaatgttctgggcattctacagaatccaccaaacacaaggaacacaaagcaaagactaataaggccgattctaatgtatcttcagggaaaatttctgggggacctttgcgctcagaatatggcactcctacaaagtctccccctgctgctttggaagttgtgccatgtatcccaagccctgcagcaccttcagataaagccccttcagaaggagagagttcaggaaattccaatgcaggtagcagtgcactgaaaagaaaactaaggggtgattttgatagtgatgaagaaagtttaggttacaacctagacagtgatgaggaagaggaaacattaaagtcactggaagaaataatggctttgaacttcaatcagactcctgcagctacaggaaagcctcctgctctttccaaggggcttagatctcagtcatcagactatacaggacatgttcatcctggaacttacacaaataccttagaacgtctagtgaaggaaatggaagacacacaaaggctagatgaactgcagaagcaactacaagaagacataaggcaaggccgaggcattaaatccccaatcagaattggagaagaagacagtacagatgatgaggatggcctcttagaagagcacaaggaatttctaaagaaattttcagttacaattgatgctattcctgatcatcatccaggtgaagaaatatttaatttcctcaattctggaaaaattttcaatcagtataccttggatttaagagactctggttttattggacaaagtgctgtagaaaaacttattcttaaatcgggaaaaacagatcagatttttttgacaacacaaggtttccttacgtctgcttatcactatgtccagtgtcctgtccctgtgttaaagtggctgtttcggatgatgtcagttcatacagactgtattgtgtcagtgcagattttaagtacattgatggaaataacaattagaaatgataccttcagtgactcaccagtttggccatggatcccatcattgtctgatgtagcagctgtgtttttcaatatggggattgattttagatctttgtttcccctggagaatcttcagccagactttaatgaagactatctagtttctgaaacacagacaacatcaagggggaaagaaagtgaagattcatcttataagccaattttttcaacacttcctgaaaccaacattttaaatgtggttaagtttctaggcttgtgtacatctatacatccagaaggttaccaggatcgtgaaataatgttgctgattttaatgttatttaaaatgagtttggaaaaacagctgaaacagattcctttagtagactttcaaagcctcctgataaacctgatgaaaaacatcagagattggaacacaaaggtgcctgaactctgtctgggcataaatgaactctccagtcatccccacaacctcctgtggttggtacagctggtccctaattggacatcacgtggaaggcaactgagacagtgcctcagtctagtgattatttcaaagcttttggatgagaaacacgaagatgttcctaatgccagtaatctgcaggtatcagtcctacatcgctatcttgtgcagatgaagccttctgatttgttaaagaaaatggtcttgaagaaaaaggctgaacaaccagatggcattattgatgacagtcttcatttagaacttgaaaagcaggcatattacctgacctacattcttcttcatttagtcggtgaagttagttgttctcattctttttcttctggacaacggaaacactttgtgctactctgtggggctttggaaaagcatgttaaatgtgatattagggaagatgcaagacttttttacagaactaaggtgaaagacttggtcgccaggatacatggaaaatggcaggaaataatccagaactgtcggcctactcaggtgtcattttgttatacaatttcatgtattcttaatagttttgctgaatggcactcttcatactgtttgaaataaaatagggtataacagtgca

SEQ ID NO: 10313 - DNA, 2931 bp, Homo sapiens
  source 1..2931: mol_type = unassigned DNA
acttccgaagagagaaccgccatgaagagagaagggggtgccgcccacctctgctccgacagcctcccggagtcccagcagcaagacggcaaccacgcacccaacttctccagccacggctcatgccgccgtcgccagcggcgccgacatgacaaggcgctgcatgcccgctaggccaggtttcccctcatccccagccccggggtcgtcgcccccgcgctgccatctgagacccggtagtaccgcccatgctgcagcgggaaagagaacagagagtcctggggacaggaagcagtcaattatagatttcttcaaaccagcttcaaaacaagacagacacatgttggattcaccacaaaaatcaaacatcaaatatggaggaagtagattgtctatcactgggacagagcagtttgaaaggaaactatcctcaccaaaagaatctaaacccaaaagggtgccaccagaaaagagccctattatagaagctttcatgaaaggtgttaaagagcaccatgaagatcatggtatacatgagtcacgtcggccttgtctgtcactagcctccaaatatttagccaaaggaacaaatatctatgttccttcttcatatcacttgccaaaggagatgaagtcactaaagaaaaaacatcgatccccagagagaaggaagtcactattcattcatgaaaataatgagaagaatgatagagatcgaggcaaaaccaatgcagactccaaaaagcagaccacagtggcagaagctgacatcttcaataacagctccagaagccttagcagcaggagcagcctgtccaggcaccacccggaagaaagcccactgggagctaaattccagttgtcactagcttcttactgcagagaacgagaactaaagaggttgagaaaggagcaaatggagcagagaatcaactccgagaattctttctcagaagcaagcagtctttccttaaaatctagtatagaaagaaaatataaaccaaggcaggaacaaaggaaacagaatgacatcatacctggaaaaaataatctgtcaaatgtggaaaatggacatctctcaagaaaaagatcctcttctgattcatgggaacctacttcagcaggctctaagcagaataaattccctgaaaaaagaaaaaggaactctgtggactcagatctgaaaagcacaagagaatctatgataccaaaagcaagagagtccttccttgagaagcgtcctgatggaccacatcagaaagaaaaatttataaaacatattgcactgaagacacctggtgatgtgttgcgcttagaagatatatccaaggaaccgagtgatgaaactgatggctcttctgcaggcttggcaccttcaaattctggcaattctggccaccattctaccaggaatagtgaccaaatccaagtggcaggtaccaaggagactaagatgcagaaaccccacttacctttatctcaggaaaagtctgcaattaaaaaagctagcaaccttcagaaaaataaaaccgctagctccacgacaaaggagaaggagacaaaactacctttactttcccgtgttccaagtgctggttcctctctagtaccattaaatgctaaaaattgtgctcttccagtttctaaaaaagataaagagcgttcctcatctaaagaatgttctgggcattctacagaatccaccaaacacaaggaacacaaagcaaagactaataaggccgattctaatgtatcttcagggaaaatttctgggggacctttgcgctcagaatatggcactcctacaaagtctccccctgctgctttggaagttgtgccatgtatcccaagccctgcagcaccttcagataaagccccttcagaaggagagagttcaggaaattccaatgcaggtagcagtgcactgaaaagaaaactaaggggtgattttgatagtgatgaagaaagtttaggttacaacctagacagtgatgaggaagaggaaacattaaagtcactggaagaaataatggctttgaacttcaatcagactcctgcagctacaggaaagcctcctgctctttccaaggggcttagatctcagtcatcagactatacaggacatgttcatcctggaacttacacaaataccttagaacgtctagtgaaggaaatggaagacacacaaaggtttgttagcataaagattaatttgctaaatttaacattttgcttgtttgtgtggcttacttttaatttaccttttttaaaaaatcatgagaaattagcgtgcattttggactctgttgtcaactgtgttagaataagatatgttggccggacgcagtggctcatgcctgtaatcacaacactttgggagacccaggcaagattacttgagcccaggagttcaaggctgcggtgagtcgtgatggcgccacttcactgcagcctgggtggcagagtgagacccagtctcaaatgaaaaaaagaggccaggtgtgatggctcatgcctgtaatccagtactttaggaggccaaagcaggcaaatctcttgagcccaggagtttgagactagcctgggcaacatggtgaaaccccatctctacaaaaaatacaaaaattagccagtcatggtgccacatacctatggtcccagctactcaacaggctgaggttgggaggatcacctgagcccaaggaggtcaaggctgtagtgagctgtgattgagccactgcactccaatctgggtgacagaataagaccccgtctcaaaaaaaaaaaaagtggggggccaggcgcagtggctcacgcctgtaatcccagcactttgggaggccgaggcaggtggatcatgaggtcaggagatcgagaccatgctggctaacatggtgaaaccccatctctactaaaaaataaaaaaaaaaa

SEQ ID NO: 10314 - DNA, 1435 bp, Homo sapiens
  source 1..1435: mol_type = unassigned DNA
atgacacgcattacagagctctggagcagcccgcagtggaaagttggagctgaggtgtgtggcaggcagatgagggagcagagaactgctgaacagagtgagactcagaggacgtggttgagcatggctgcgaccctgcagttcctggtttgcctggtggtagccatttgtctcctctctggtgtgactacaacccagccccatgcagggcagcccatggacagcaccagcgtgggaggtggcctgcaggagccagaggccccggaagtgatgtttgagctgctctgggctgggctggagctggatgtcatggggcagctgcacatccaggatgaggaactagcgtccacacacccaggccgccgactcagactcctcctgcagcaccacgtgcccagtgacttggagggcactgagcagtggctgcagcagctccaggacctgcggaaggggcctcctcttagcacttgggactttgaacatctgctcctcacaggcctgtcctgcgtctaccggctccacgcagctagtgaggctgaggaacggggccgctgggcccaggtcttcgctctcctggcacaggaaacactctgggacctgtgcaaaggtttctgcccccaggaccggcccccttccctggggtcctgggcctccatccttgaccccttcccctgaccctcctcttttgttctttcacctgccattaccccctcccatctcctcctcaaccccccaggcagacccatcttgcgcaggggcttctgtctggcatctgattcttttcaccgtgttcagatctctgggcttggcttgcaccctggacaccccctctctgcttaccccgaccagatcttgtttcctagatcttgagaggctaagaacccaggctctgggtcgcaaggagtgcgcaaggagtgggcacagagctaagggcacgacttgcaggcagtgtgtgtgtgagtgtgtgtgtgtgtgtgtgtgtgtgtgtgtgtgtgtggagatcaggggtcagggttgagaagtgtgttcaagagatgctgaagggaagctgccccaagtaaggcctggtcagaccttccaactcctaccctggcagtctgtgacaggtcctgtggaattcacaggaatcctctaggtgctgagcatccccttttaggcacaaccaaggatttggggtctctgagcctccaagttcccatctgggttgggagaatcgactttttgagttctgtcagttggaagagtggagggaagcagggggagggaggaacattatctcttttggggtagggaggcaatatctcaacaagcgtcgggtgaatacctcagaggggggagtaaggctgggagaccaaggagagacaagcggaggtgggctggagcaggtgtggccctgattctgtgttgctcttctcataaaatgttctgtttcggc

SEQ ID NO: 10315 - DNA, 1388 bp, Homo sapiens
  source 1..1388: mol_type = unassigned DNA
agctgaggtgtgtggcaggcagatgagggagcagagaactgctgaacagagtgagactcagaggacgtggttgagcatggctgcgaccctgcagttcctggtttgcctggtggtagccatttgtctcctctctggtgtgactacaacccagccccatgcagggcagcccatggacagcaccagcgtgggaggtggcctgcaggagccagaggccccggaagtgatgtttgagctgctctgggctgggctggagctggatgtcatggggcagctgcacatccaggatgaggaactagcgtccacacacccaggccgccgactcagactcctcctgcagcaccacgtgcccagtgacttggagggcactgagcagtggctgcagcagctccaggacctgcggaaggggcctcctcttagcacttgggactttgaacatctgctcctcacaggcctgtcctgcgtctaccggctccacgcagctagtgaggctgaggaacggggccgctgggcccaggtcttcgctctcctggcacaggaaacactctgggacctgtgcaaaggtttctgcccccaggaccggcccccttccctggggtcctgggcctccatccttgaccccttcccctgaccctcctcttttgttctttcacctgccattaccccctcccatctcctcctcaaccccccaggcagacccatcttgcgcaggggcttctgtctggcatctgattcttttcaccgtgttcagatctctgggcttggcttgcaccctggacaccccctctctgcttaccccgaccagatcttgtttcctagatcttgagaggctaagaacccaggctctgggtcgcaaggagtgcgcaaggagtgggcacagagctaagggcacgacttgcaggcagtgtgtgtgtgagtgtgtgtgtgtgtgtgtgtgtgtgtgtgtgtgtgtggagatcaggggtcagggttgagaagtgtgttcaagagatgctgaagggaagctgccccaagtaaggcctggtcagaccttccaactcctaccctggcagtctgtgacaggtcctgtggaattcacaggaatcctctaggtgctgagcatccccttttaggcacaaccaaggatttggggtctctgagcctccaagttcccatctgggttgggagaatcgactttttgagttctgtcagttggaagagtggagggaagcagggggagggaggaacattatctcttttggggtagggaggcaatatctcaacaagcgtcgggtgaatacctcagaggggggagtaaggctgggagaccaaggagagacaagcggaggtgggctggagcaggtgtggccctgattctgtgttgctcttctcataaaatgttctgtttcggc

SEQ ID NO: 10316 - DNA, 2955 bp, Homo sapiens
  source 1..2955: mol_type = unassigned DNA
gcagcgccggcttcggatcgggagttggccgtcagctgcgccagaggcaggtgccagcggagagtgggtgggggtgccggcgccaggccaggctcggggaggccccgcgctacctctgcctctaggagtccaggcgcacagacaagctccccggagccgctcctgcttcgccaactccccactcgcgccgcccgtgccagccgccggcactggcgtctccgccgcccgcaggaggagtcgcgggagcactagcagccgccgccgagcgacagcatcctcaggagagacgccccgggctttgcagccggcggcctccgtccgccctccgcggtcgccccccgccccgtcgcccgtccgcccgcggtggcagccggcgccggcgccccggggcccttcacctgccgcgagcgtccgggcgggcgggcgcacgggagaaaaggcgcaagaagcgggcaccccgggaaccccattccctcggctcactcggcgcggagaagcgacgcccgctgactccgagagccccggtgctccgtgcacctggtccccaagttgaggagcgacacccctccacaggggactagcccgcgcggggagcattccggtctcactgaccccggcccacccgcgggactccaggcacctcttctgcccgcaccccgcgacccctcccgggaccccggagacagccggcctgcccccggcgtcccccttggccagcacgccatgccggggctgcgccgggaccgcctactgactctgctgctgctgggcgcgctgctctccgccgacctctacttccacctctggccccaagtacagcgccagctgcggcctcgggagcgcccgcgggggtgcccgtgcaccggccgcgcctcctccctggcgcgggactcggccgcagctgcctcggaccccggcacgatcgtgcacaacttttcccgaaccgagccccggactgaaccggctggcggcagccacagcgggtcgagctccaagttgcaggccctcttcgcccacccgctgtacaacgtcccggaggagccgcctctcctgggagccgaggactcgctcctggccagccaggaggcgctgcggtattaccggaggaaggtggcccgctggaacaggcgacacaagatgtacagagagcagatgaaccttacctccctggaccccccactgcagctccgactcgaggccagctgggtccagttccacctgggtattaaccgccatgggctctactcccggtccagccctgttgtcagcaaacttctgcaagacatgaggcactttcccaccatcagtgctgattacagtcaagatgagaaagccttgctgggggcatgtgactgcacccagattgtgaaacccagtggggtccacctcaagctggtgctgaggttctcggatttcgggaaggccatgttcaaacccatgagacagcagcgagatgaggagacaccagtggacttcttctacttcattgactttcagagacacaatgctgagatcgcagctttccatctggacaggattctggacttccgacgggtgccgccaacagtggggaggatagtaaatgtcaccaaggaaatcctagaggtcaccaagaatgaaatcctgcagagtgttttctttgtctctccagcgagcaacgtgtgcttcttcgccaagtgtccatacatgtgcaagacggagtatgctgtctgtggcaacccacacctgctggagggttccctctctgccttcctgccgtccctcaacctggcccccaggctgtctgtgcccaacccctggatccgctcctacacactggcaggaaaagaggagtgggaggtcaatcccctttactgtgacacagtgaaacagatctacccgtacaacaacagccagcggctcctcaatgtcatcgacatggccatcttcgacttcttgatagggaatatggaccggcaccattatgagatgttcaccaagttcggggatgatgggttccttattcaccttgacaacgccagagggttcggacgacactcccatgatgaaatctccatcctctcgcctctctcccagtgctgcatgataaaaaagaaaacacttttgcacctgcagctgctggcccaagctgactacagactcagcgatgtgatgcgagaatcactgctggaagaccagctcagccctgtcctcactgaaccccacctccttgccctggatcgaaggctccaaaccatcctaaggacagtggaggggtgcatagtggcccatggacagcagagtgtcatagtcgacggcccagtggaacagttggccccagactctggccaggctaacttgacaagctaagggctggcagagtccagtttcagaaaatacgcctggagccagagcagtcgactcgagtgccgaccctgcgtcctcactcccacctgttactgctgggagtcaagtcagctaggaaggaagcaggacattttctcaaacagcaagtggggcccatggaactgaatctttactccttggtgcaccgcttctgtcgtgcgttgccttgctccgtttttcccaaaaagcactggcttcatcaaggccaccgacgatctcctgagtgcactgggaaatctgggtataggtcaggcttggcagccttgatcccaggagagtactaatggtaacaagtcaaataaaaggacatcaagtggatacctgacttctcaggatccttattctagctacaagtcaaagataactcctggtccagacaaaacacctggcctatcacaagctgactaaaaatctgcactttgggccagcgcaggcaacagtaactctgacaggttcaaattagacctcacactttctactcatattctagtcactggacccatctgaatcagtaatccctactgcccggtcctggagtaacttcttagagatattataacaagtggcaaa

SEQ ID NO: 10317 - DNA, 4274 bp, Homo sapiens
  source 1..4274: mol_type = unassigned DNA
aaaggcgcaagaagcgggcaccccgggaaccccattccctcggctcactcggcgcggagaagcgacgcccgctgactccgagagccccggtgctccgtgcacctggtccccaagttgaggagcgacacccctccacaggggactagcccgcgcggggagcattccggtctcactgaccccggcccacccgcgggactccaggcacctcttctgcccgcaccccgcgacccctcccgggaccccggagacagccggcctgcccccggcgtcccccttggccagcacgccatgccggggctgcgccgggaccgcctactgactctgctgctgctgggcgcgctgctctccgccgacctctacttccacctctggccccaagtacagcgccagctgcggcctcgggagcgcccgcgggggtgcccgtgcaccggccgcgcctcctccctggcgcgggactcggccgcagctgcctcggaccccggcacgatcgtgcacaacttttcccgaaccgagccccggactgaaccggctggcggcagccacagcgggtcgagctccaagttgcaggccctcttcgcccacccgctgtacaacgtcccggaggagccgcctctcctgggagccgaggactcgctcctggccagccaggaggcgctgcggtattaccggaggaaggtggcccgctggaacaggcgacacaagatgtacagagagcagatgaaccttacctccctggaccccccactgcagctccgactcgaggccagctgggtccagttccacctgggtattaaccgccatgggctctactcccggtccagccctgttgtcagcaaacttctgcaagacatgaggcactttcccaccatcagtgctgattacagtcaagatgagaaagccttgctgggggcatgtgactgcacccagattgtgaaacccagtggggtccacctcaagctggtgctgaggttctcggatttcgggaaggccatgttcaaacccatgagacagcagcgagatgaggagacaccagtggacttcttctacttcattgactttcagagacacaatgctgagatcgcagctttccatctggacaggattctggacttccgacgggtgccgccaacagtggggaggatagtaaatgtcaccaaggaaatcctagaggtcaccaagaatgaaatcctgcagagtgttttctttgtctctccagcgagcaacgtgtgcttcttcgccaagtgtccatacatgtgcaagacggagtatgctgtctgtggcaacccacacctgctggagggttccctctctgccttcctgccgtccctcaacctggcccccaggctgtctgtgcccaacccctggatccgctcctacacactggcaggaaaagaggagtgggaggtcaatcccctttactgtgacacagtgaaacagatctacccgtacaacaacagccagcggctcctcaatgtcatcgacatggccatcttcgacttcttgatagggaatatggaccggcaccattatgagatgttcaccaagttcggggatgatgggttccttattcaccttgacaacgccagagggttcggacgacactcccatgatgaaatctccatcctctcgcctctctcccagtgctgcatgataaaaaagaaaacacttttgcacctgcagctgctggcccaagctgactacagactcagcgatgtgatgcgagaatcactgctggaagaccagctcagccctgtcctcactgaaccccacctccttgccctggatcgaaggctccaaaccatcctaaggacagtggaggggtgcatagtggcccatggacagcagagtgtcatagtcgacggcccagtggaacagttggccccagactctggccaggctaacttgacaagctaagggctggcagagtccagtttcagaaaatacgcctggagccagagcagtcgactcgagtgccgaccctgcgtcctcactcccacctgttactgctgggagtcaagtcagctaggaaggaagcaggacattttctcaaacagcaagtggggcccatggaactgaatctttactccttggtgcaccgcttctgtcgtgcgttgccttgctccgtttttcccaaaaagcactggcttcatcaaggccaccgacgatctcctgagtgcactgggaaatctgggtataggtcaggcttggcagccttgatcccaggagagtactaatggtaacaagtcaaataaaaggacatcaagtggatacctgacttctcaggatccttattctagctacaagtcaaagataactcctggtccagacaaaacacctggcctatcacaagctgactaaaaatctgcactttgggccagcgcaggcaacagtaactctgacaggttcaaattagacctcacactttctactcatattctagtcactggacccatctgaatcagtaatccctactgcccggtcctggagtaacttcttagagatattataacaagtggcaaaaataaaagagggatttgctaagaatatcagaaaaggagtgttccaatttgaagagtattacaattgaaataacatcaaatatgtcacactaagcagccagtaacagaataaataattacaacgaaggaaaaaaaaaggaaagtcctccaaggtcaggatggcatgggaacaggcctagcagggacacaagcctggagtaaggcaggaaaagagccaaggctgactacagcccaccaaccacaatcttcttccctaagaccccaggattgtccccggcccatccccaaaagaagaaaggggctatgtggaaaggtgaggccctctagatgcccctccctgtgacggctggctcaaaaaagactaagtcaggttttttattgaagcctcccttagaagaaagtgtagtagggattccttgtctcctctaccttctccctgacttgttgatatctgaaactccttttaataggaggctttgtttcttattccataattaatgaccgaaaacacaaaggacagtaaggtcttcattccatggagtgactagtcagtcaacaaaagtaaaaatgcctcatttcatcaaatcaacttttccagtaaaggccagagttcaaatactgtaagcatgagaatagaatggagctgtcactaaagagagtacaaggtcaagaaccagaaatgtctccaagctttctgcagtgtgagcaaagatagcctcgactggacaaataacacttctgaccccgtggtacccccacatgactggtatgctgcccctggactttgtgtctctctaaaatcactaccattcactgagatctgaccaggtgaggcactcaccaacgctacagaagcaacacacaggtttccaatcctctcaaacacagatacaacccccatcctccaatgtgcatggaagaactttaaatctcagagagagtaagcaaaatcacacaatttagtggtttagacctattccaaagtcttcttttcactgtaacacaaaacccaacagtatcccacccaatttatgaagtcaaatttgtttgcttaaaaaaaaaatcagctgggcatgggctcacacctgtaatcccagcactttgggcctaaacaggcagatcgcttggtctcaggagctcgagaccagcctgggtaacatgacaaaaccctgtctctacaaaaaaatacaaaaaaaaaaaaatttttttttaaatcaactctttaacagagaaaccttaatcccaaagatttccttaactgttgtggccctactgcagcatagggctccccacttcattcactgtctctcctgcttcaagatgtttcttccctgtggatgaagaaccaggagatcacacacagaaatgggaaaatatctgggtaaaaacattcaaagaatagcacaaaatggtttgggacttccaaataagactctcaggaaagcaggctacagctctacctcaaaacccgccacctcctataacgaaggactggttttccaatggcctatatacacattttgctgcactctacaaacagaaagcaataggcttgaatttcaccatgatatgtggtacacctaccttattattcacttatctttcaaccttccattactttttgattagtaacaaaattaagactcatttctcaaaaatatcagaaaaccaaccgtttcattcttactcgagttcttccagcatgttcattttgaactgtttacctcccatgaaataaaaagtctcttgactctg

SEQ ID NO: 10318 - DNA, 2080 bp, Homo sapiens
  source 1..2080: mol_type = unassigned DNA
aagaggagtgagttggtccccaggccacacagcccagtccttgacagtagccacagaccctgtaccagggacttgttgctagcttggcttttgaatctgaaaagctgcctcaatactcctttgccccatttcatattgatcctgggatcagcaggcctgggtctgttctcccctttagttcatttattcagttctaaagaaccttccatatacccaacactaggtgttatgggatacagaaatggaagactcagactctctccttgagaagctccttggtctagtggggagaacagacatgtagccagatcacgaaaacacagcacagcacttgctataaccagggagcacacgagaatcccatgggagggacacctggttcccgagcaagccctgggagaccaaggacctcactgctgtatccccaggacctagcaccctccctggcacatagcaggtactccacactagctgactgagtgaatcgatccatcagtcaagccgtcatgatcatcgtgggaaaagaagtaaccaggcagaatttctggaggacatgacagatcctaagggactctgtgaaggctgagaagagccctcggatgaaaatgggcatcggagcattgtaggcagaaaaccatgtgtgagagagaaagggcaggaacagcccatggaggtgctatgagtggcgcagggtccaagaggcttggtgagagggactgtggagggacgaggaagcaggtgagggtcactacctcctcctttcctgcctgccccggcctctcccctctggcacacagtatcccaaccatgggtttagtgtccaccagacttaaaggacccaggaccttctcaccacacggaatatgcagccttacgcgtccttgcccagggcctttctgaattttagaagctgccaccagcccagggcaggatcagggaggcagggattgggggggcagggggaggtgtggggagacccccgacaccctgccatcttggcttttccagccccaggacttcttctccccctcaggtgggaggtcaatcccctttactgtgacacagtgaaacagatctacccgtacaacaacagccagcggctcctcaatgtcatcgacatggccatcttcgacttcttgatagcctcagaagtggcggaggtcccagaggacagaaggtaacaggctcccctctcttcaaagaactggaagaagctcaaggggtcgtcactcataaggcaggcatctcaccctgccacgggcctgagtgggcgtcagattggaagctgtatgttcacttcaccaagtgaggggaaaccagggaatatggaccggcaccattatgagatgttcaccaagttcggggatgatgggttccttattcaccttgacaacgccagagggttcggacgacactcccatgatgaaatctccatcctctcgcctctctcccagtgctgcatgataaaaaagaaaacacttttgcacctgcagctgctggcccaagctgactacagactcagcgatgtgatgcgagaatcactgctggaagaccagctcagccctgtcctcactgaaccccacctccttgccctggatcgaaggctccaaaccatcctaaggacagtggaggggtgcatagtggcccatggacagcagagtgtcatagtcgacggcccagtggaacagttggccccagactctggccaggctaacttgacaagctaagggctggcagagtccagtttcagaaaatacgcctggagccagagcagtcgactcgagtgccgaccctgcgtcctcactcccacctgttactgctgggagtcaagtcagctaggaaggaagcaggacattttctcaaacagcaagtggggcccatggaactgaatctttactccttggtgcaccgcttctgtcgtgcgttgccttgctccgtttttcccaaaaagcactggcttcatcaaggccaccgacgatctcctgagtgcactgggaaatctgggtataggtcaggcttggcagccttgatcccaggagagtactaatggtaacaagtcaaataaaaggacatcaagtgg

SEQ ID NO: 10319 - DNA, 5984 bp, Homo sapiens
  source 1..5984: mol_type = unassigned DNA
gtgtgggactgccgctctgcgcggcgagaggtggcctgggaatggccgggccgggggtgggccggagccgctgtggcggcggcggcggctgggggcggtgagcgcggcgtggggctgcccctccccggaggcggcgggggcggccggggccgcgccgcaccgcaccgcgcgggcggccatggagcgagcctagggcccgacaggaactgtggaaggtgcatcagtgaagaaatggaccaatgtgtataatcatggaatctccttgctaaccatcaccaccagctctccttaatacatgagcaagagtgggtcaggggagaaggaaaagaggtcaacatgaagctaaagcagcgagtcgtgctgttagcaattctccttgtcatttttatcttcaccaaagttttcctgattgacaacttagatacatcagctgccaaccgggaggaccagagggcctttcaccgaatgatgactggcttgcgggtggagctggcacccaagctggaccataccttgcagtctccctgggagattgcagcccagtgggtggttccccgggaagtgtaccctgaagagacaccagagctgggggcagtcatgcatgccatggccaccaagaaaatcattaaagctgatgtgggttataaagggacacagctgaaagccttactgatacttgaaggaggccagaaagttgttttcaaacctaagcggtatagccgagaccatgtggtggaaggggaaccgtatgctggttatgatagacacaatgcagaggtagcagcctttcacttggacaggattctgggtttccaccgagcccccttggtagttggcagatttgttaatcttcggacagagatcaaacctgtcgccacagagcagctgttgagcaccttcctaactgtaggaaacaatacttgtttttatgggaagtgctattactgccgagaaacagaaccagcttgtgctgatggagacataatggagggatctgtcacactttggcttccagatgtgtggcctctgcagaagcaccgtcacccatggggcaggacttaccgagaaggcaaattggccaggtgggagtatgatgagagctactgtgatgctgtgaagaaaacgtccccttatgactctggcccgcgcctcttggacatcattgacacagctgtctttgattacctgattggcaatgctgaccgccatcactatgagagctttcaagatgatgaaggcgctagtatgctcatccttcttgataatgccaaaagctttgggaacccctcgctggatgaaagaagcattcttgcccctctctatcagtgttgcatcattcgggtgtccacctggaacagactgaactacctaaagaatggtgtgctaaagtctgccttaaaatctgccatggcccatgaccccatctccccagtgctctctgatcctcatctggacgccgtggaccagcggctcctgagtgtcctggccaccgtgaagcagtgcaccgaccagtttgggatggacacagtactggtggaagacaggatgcctctctcacacttgtaattctcgacacaaaataagtgaaacttctttttacaaagatagagaaacagcacaatcaattccaaatggtatgagatggattggaagtggccagcagcaagttctggtgacgggacagagtggccttggatgtctttggtattttctgtagtagaaactaaagcaaagaccacaagtttcagagcatggagacattcctgctgaatcgccttctcacctcctcggcaattgctcattctagggttgggcatcatagttggtcagtcttaattcccatgccaaaggacaaacaggtgtgacatttggatagatgaatactgggattggctctggagcatgtgttttgagttgaaccttgcagtcctttctctacgcccgtggattttgtggaaacactttgcaatctctttgtcttttttttttttaccagaactagttacattggaatgcttactgtcctacagagtggcagcaaataaaaccttgcattccatcaagccaaaatagcacactctgttagaggagatacatgtttaagatagaattggagggaaggacaaaaacagaaaaatgtttgggcttttaagccattgggtagtattgttttgatgatcttagaggagggaagaagagagagagacccaatggtagaaccagaatcagggagatgactgaactactgaaaaacaggttcccttgtatttaggatcttaaggtgtataaaaagcaaacatgactttgcacctaagtaaattctgcattctcatagttgtgtcccaattaaccaaaaagttgtctctagagaaaatactattacaatctaagcatgattctctgtggagactaattttttccccttttgccaaaagcagtccttcccaaattaacaaagcaaactgaaataataccttgaataacaggttgcctgtggtctctgtcatcctcgtttctcttctgaaatgaatttccacctctgcctttaaggcatttttgtcactgaagctgctgttcccaagagatcggcaacctttttgtccctttctcataagaaagggacactcctacaggtgagagtgtataccttactctctcagataagtggctggacttatcttgtgatttggggccatggaagattggaaacaaagattttaagccttcttctttttttcttttttcttttttttttgagaccaagtctcactctgttgcccaggctggagtgcagtggcacgatcttggcttactgcaacctccgtctcccaggttcaagcgattctcttgcctcagcctccagagtagctgggattacaggcgcccgccatcgtgcccagctaatttttatatttttagtggagacagggtttcgggtttcaccatgttggccaggttgatcttggactcctgaccccaggtgatccacctgcctcagccttccaaagtgctgggattacaggcatgagccaccgtggccggccaagattttaagccttctgagccttgaaattgaggaggttaaaaggaagagccttaagattttgatttatgtcaaatcctaattctatcattcagtcttgtttggagttctgaacccatgatgttgtattatgcttctttctcctcttagcactctcaaatttcaggtttgtaaaacacagtttttgttttgtgttctggcaaagtgatctcaacatgtaagtagttgcagtaaaacacaggggcaaaggaagacaggcctgatgtgcccactcatctatggactcagagctgtgtgctttgctcctgcatcttgttgaggtgctgttccagctttgcatttctgtcaagtagaggcgaatatataaacagtgtggttgaatacatttaatgccagccattggaaactagttttaggcaaccactctcaaaaacagctttagaatttatgcccagttttcttgcattgaaagataactgagtaataacctgtaactatttttaaatggcatgaaattaggaaacttttgtacattttatatacattttgagatgaacagaacaatgggctgagttataaaaagcgtgtattgaatttaagaagacagactagcacaaaacacagaattcgtgttaaccaaaggaggcattgatttcagttttaaggctactcagtgttgtgtgtccagggaaattcacagctcagtatgagaataccttggttagtgctcacccacaagcttccaggagccagctgggaggagacaataggaagagatgtcatctctgctctccctgtaaatgttagttgaactaagttatggatttgtggtctttcaaatacatgacgcctttagtatgccacactgaaatgaataagaagtcttctgaaactgggaacttcataacattgaaggcagaagattctgctaaggaaaaaagcaggcaggaaagaaaatgtctcatcctttcttgaaagcatttgcagaaaatatatcatttcattttattcccatctgttttcaaactcgtgatcttaaaaggcattctgatgataaatttagaattttcatctataaaatttagaactctaatccataaagttagaattgagctaatagagtggtatgacatggcactaaaaatataaatttttgttgtaagtcaggattggagtaagctggaaaagtatgtttaggcaaatcttggagaaaaccaaccataaacttacagctctaaaattcagaaagccctaaaatttcaaacactgtttgaaagaagaggtgggggccgggtgccgtggctcatgcctgtcatcccagcatttgggaggctgaggcaggcagatcacctgaggccaggagttcgagaccagcctggctggctagcatggtgagaccgtctctactaaaaatgcaaaaattaacagggcacggtggcatgcgcctgtagtcccagctactcgggaggctgaggcaggagaatcacttgaatccaggaggcgaaggttgcagtgagctgagattgtgctgctgcactccagcctgggagacagagcgagactctgtcttaaaaaaaaaaaaaggaggtgaatttttttttaagttttgtaacactgtcctactttatttattagaatctaaggctgttacaatcaagtcgttgcagggtttggatcagctgtaagttaggtatgcctaccaaacatccaaaggtagacgtggagacattttaatactacaaaactaggaaaatcagaactcatggccatttcctgccctcctccaacttgttaaaacatgtttattctaaagttcgaatggataaatttgagtataaaggttttgttataaaactgttctttagtgtaaggctgcattgtgggtttgggggaaatgtaaataattttctgtgtaaaacaaattcataggatctgatttgctcagagtattattcaagaatgtattaataaggcattgccccctgtttgcactcagggttaatatgtcaaatgaaatttaagaaggaaatggaagaattcaggtacattaattgcatattattttgggaaagatgagtcctatacgtggcaatttttcaatgtcatctgaagccagcattatcttccaaagaaatcgatcttttttttctaaaaaaaaaaaatgcttttgccttcccttcccttcccatccgccatatttcttcagcctttcttctcgatcacccgtgtattctttgaccagtaaatgaccacacctcaatgatggtaaaacagcatcatcagtaagctatcttatatgcctcatcctgtgagtttgagcttcaggaaacatgagtaaaagtatatgtaatgtatatagtcgtatatgtattctagcaagaaaaacatatttattttgacaaaggggaacactgactttctgaaggattcagaaagaaccttagtgaaaggttctcagtctctgagagtggaccctaattaacataaagaccattcatcagcgaataactactgagcaactctagtgtgccagcacaggccagacatactagtgagccaggcacatctggccttgggaaactcatcctacaggggaaggccagtttttttcccttcaattcctcaagtctgggtggtgacaaggtaggggctaggtactggactaccacaggtttttaggaactaaggtgtttctcataaacacaaaatgttgggtgaaactgggaacaactactcagaagctcatttatttgcttaaatggaaagtgtgggagccactaccctctcttttgatctgccaaggatttcctctcagagctgttgcacagacagagattgtacttggtaagataccaaacaagacagatatggatctaaatttctaatgtgttctatgggtttcaattctgaaaaaagaaaatgaataaagattttaataaat

SEQ ID NO: 10320 - DNA, 603 bp, Homo sapiens
  source 1..603: mol_type = unassigned DNA
ggccgcgccgagcgagcgctgggattggccgtcgggcaggcgctacgctaggacggaactgtggaaggtgcatcagtgaagaaatggaccaatgtgtataatcatggaatctccttgctaaccatcaccaccagctctccttaatacatgagcaagagtgggtcaggggagaaggaaaagaggtcaacatgaagctaaagcagcgagtcgtgctgttagcaattctccttgtcatttttatcttcaccaaagttttcctgattgacaacttagatacatcagctgccaaccgggaggaccagagggcctttcaccgaatgatgactggcttgcgggtggagctggcacccaagctggaccataccttgcagtctccctgggagattgcagcccagtgggtggttccccgggaagtgtaccctgaagagacaccagagctgggggcagtcatgcatgccatggccaccaagaaaatcattaaagctgatgtgggttataaagggacacagctgaaagccttactgatacttgaaggaggccagaaagttgttttcaaacctaagcggtatagccgagaccatgtggtggaaggggaaccgtatg

SEQ ID NO: 10321 - DNA, 2751 bp, Homo sapiens
  source 1..2751: mol_type = unassigned DNA
gcggccgctccggagaggccgagcggggacgggcccgagatggcgcggggacccagcgctccggcggcgggcgccctgcacgcggcccgggcccggggacagccccggagctggtagccgcccggcaccgatggaccttgacccgcgaggcggcgccgcgctcgtgcccagctgcagctagaggggcgcgcgggcagaacgcgctccaggcccgggccggcccgcgcggccatgaagatgatgctggtgcgccggttccgcgtgctcatcctgatggtgttcctggtggcctgcgcgctgcacatcgccctggacctgctgcccaggctggagcgacgcggcgcgcggccctcgggggagcccggctgttcgtgcgcgcagcccgccgccgaggtggccgcgcccggctgggcccaggttcggggccgccccggggagcccccggccgcctcctccgccgccggcgacgcgggctggcccaacaagcacacgctccgcatcctgcaggacttcagctccgacccctcctccaacctctcgtcccactcgctggagaaactgccgcccgcggccgagccggccgagcgcgccttgcgggggcgggatcccggcgccctaagaccccacgaccccgcgcaccggccgctgctgcgagaccccggcccgcgtcggtccgagtcgccccccggccccggcggagacgcctccctcctggccaggctgttcgagcacccgctttaccgggtggcggttccgccgctcacggaggaggacgtcctgttcaatgtgaacagcgacaccaggctcagccccaaagcggcggagaacccggactggccgcatgcgggtgctgaaggtgcagaattcctctcccccggggaggcggccgtggactcctatcccaactggctcaagttccacattggtatcaaccggtacgagctgtactccagacacaacccggccatcgaggccctgctgcacgacctcagctcccagaggatcaccagcgtggccatgaagtcggggggcacgcagctgaagctcatcatgaccttccagaattacgggcaagcgctgttcaaacccatgaaacaaacgagggagcaggagacaccccctgactttttttatttctctgactacgagaggcacaatgcggagattgctgccttccacctggacaggatcctggacttccgccgggtccctcccgtggccggcaggatggtcaacatgaccaaggagatccgggacgtcacacgggacaagaagctctggaggaccttcttcatctctccagccaacaacatctgcttctacggcgagtgttcctactactgctccacggagcacgccctgtgcgggaagccagaccagatcgagggctcgctggcggccttcctgcccgacctgtccctggccaagaggaagacctggcggaacccttggcggcgttcctaccacaagcgcaagaaggccgagtgggaggtggaccctgactactgcgaggaggtgaagcagacaccgccctacgacagcagccaccgcatcctggacgtcatggacatgacgatcttcgacttcctcatgggaaacatggaccgtcaccactacgagacttttgagaagtttgggaatgaaacgttcatcatccacttagacaatggaagagggtttgggaagtattcgcacgacgagctctccatcctggtgccgctacagcagtgctgcaggatccggaagtccacctacctgcgtctgcagctcctggccaaggaggagtacaagctgagcctgctgatggccgagtctctgcggggggaccaggtggcacccgtgctgtaccagccgcacctggaggccctggaccggcggctccgcgtcgtgctaaaggccgtccgggactgcgtggagaggaacgggctccacagcgtggtggatgacgacctggacactgagcacagagccgcctcggcgaggtagtgtccgccggccgctgcgctgcccgggacggagacagaggcgccggacctcccagcaagcgcatgcgcccgtcgtgaattcagtgaattcagaggcaggacgggatcatccggagtcgggagctgctgccacaggaggcgaggctccccaggtctcataggacacattttgtcagtgtttgaccagaaaagcttgggaaggaagcgctgtctgtgctcacggacagaggcggccggcgccggaggcattccatcctttctgtagggaaaggagcctttatttactattttgtatttatatttgatgaataagtatataaacagagacgtgtacacagatgccaatcacctaccaaaccaaacacgaggaccgccctccctggttctgggggcccctcaaggccaagctcacccctcaagtgctctcacactcgggacctaattcaagtaaaaaccctttctccttcctggggcctcggctcctggagggctggagggtctcgtctgaggacgggaggaggctctcgctggacgtctggcctgtgcgctggtggacggatgcctacgtggttttggaggacccgatgaccaggcgtcctgcgagtccgcccgctggcctgcagcacccacctcggacttggctgtggacggttggtgcaagtgcatcctgcagggctggctgtgcgcagctgtgggctgacctttgcagagttttgtggaatagtttgcaatgtcataaaagtgcaataaaggtacagcagatgtg

SEQ ID NO: 10322 - DNA, 4636 bp, Homo sapiens
  source 1..4636: mol_type = unassigned DNA
atcaggtcacgtgaggccggtcacgccccgggcagcttggctggggctaggcttccggggctctgcggtcctcggcctgtgctggcagcctcggagcccaccgagccgggcggctgggatgatgaaccggacgacccccgaccaggagctggtgccggcgtcggagcccgtgtgggagcggccgtggtcggtggaggagatccgcaggagcagccagagctggtcgctggcggccgacgcgggcctactacagtttctacaggaattctcacagcaaactatctctaggacccatgaaatcaagaaacaagtggacggactaatccgggaaaccaaagccacagattgtcgcctgcataatgtcttcaatgacttccttatgctctctaatacccagttcatagagaatcgtgtatatgatgaagaagtggaggagccagtactcaaggctgaggcagaaaaaacagagcaggagaagacacgagagcagaaagaagtagatctcattcctaaagtccaggaggctgtgaactatggcttacaagtattggacagtgcctttgagcaacttgatatcaaagcaggaaactcagactccgaggaagatgatgctaatgggcgggtggaactgatccttgaaccaaaggatctatacattgatcgtcctttaccatatctcattgggtcaaagctgttcatggaacaagaagatgtaggtcttggagagctgtccagtgaagaaggctctgtaggcagtgatcgtggcagtattgtggacactgaggaagagaaagaagaggaggagtcagatgaagattttgcccatcacagtgacaatgaacaaaaccagcacaccacacaaatgagtgatgaggaagaggatgatgatggctgtgacctttttgctgactctgagaaggaggaggaagatattgaggacattgaagaaaatactagacctaaaagaagcagacctacatcgtttgcagatgagctggctgcccgcatcaagggggatgccatgggtcgagtggacgaggagccgacaaccttaccctcaggagaagcaaaacctcggaagacactcaaagagaagaaggaaaggagaactccttcagacgatgaagaggataacttattcgcaccccccaagctgaccgacgaggacttctcgccatttggctctggaggtggcctgttcagtggcggcaaggggctatttgatgatgaggacgaggagagtgacctcttcacggaagcctcccaggatcggcaagctggagcctctgttaaggaggagtcttcatcatccaaacctggaaagaaaatcccagcaggagctgtttctgtatttttaggagacacggatgtgtttggtgctgcctccgttccatcactgaaggagccacagaagcctgagcagcccactccaaggaaaagcccctatggtccccctcccactggcctctttgatgatgatgatggtgatgatgatgacgactttttctcggcaccccacagcaaaccttctaaaacacgcaaagtccaatccactgccgatatctttggtgacgaagaaggagatctgttcaaagaaaaagccgtagcatcgccagaagccactgtgagtcagacagatgaaaataaagcaagagcagaaaaaaaggttaccttatcttacagcaaaaatctcaagccctcatcagaaacaaagactcaaaaaggcttattttcagatgaggaggactctgaggatttgttttcttctcaaagtgcgagtaacttaaaaggtgcatctctgctgcctggcaagctccccacgtcggtttccctgtttgatgatgaagatgaagaggataatctttttgggggtacagctgctaagaagcagacattgtctctacaagctcagagagaagagaaagcaaaagcctccgagctctccaaaaagaaagcatctgccctgttgttcagcagtgatgaggagtggaatattcctgcttcacagacccacttagcatctgacagcaggtctaaaggagaacccagggattctgggaccctccagagccaggaggccaaggctgtgaaaaagaccagtctctttgaggaagacaaagaagatgatctttttgccattgccaaggacagccaaaagaagacccagagagtgtcactcctctttgaagacgatgttgatagcggaggctctctgtttggctctcctcccacatctgttcctcctgcaacaaagaaaaaagagactgtctctgaggcaccacctttgctgttcagcgatgaagaagagaaggaggcacaacttggagtgaagtctgtggataagaaggttgagagtgccaaggagtcattaaaatttgggagaactgatgtggctgagtcagaaaaggaaggacttttgactagatctgctcaggaaacagtcaagcattctgatttattttcttcatcatccccatgggacaaaggaaccaagcctagaaccaaaactgttcttagcttgtttgatgaggaagaggataaaatggaagatcaaaacattatccaggctccacagaaagaagtaggaaagggctgcgatcctgatgcccaccccaagagcacaggtgtcttccaggatgaagagctgcttttcagccacaagctccaaaaggacaatgacccagatgttgacctttttgctggcaccaaaaaaaccaagctgttagagccaagtgttgggagcctgtttggggatgatgaagatgatgatcttttcagctctgccaagtcccagcctttggtacaagagaaaaagagagtagtgaaaaaagaccactctgttaactctttcaaaaaccagaaacatcctgaatccattcaaggtagtaaagaaaaaggcatatggaagccggaaacacctcaggcaaatttagcgatcaacccagcggccttgctgcccacagcggcttcccagatctctgaagtaaagcctgttttgccagaattggcttttccttcatctgaacacagaaggagccacggtctggaaagtgtgcctgtccttcccgggagtggggaggccggtgtgagttttgatcttccagctcaggcagacaccttacacagtgcaaacaagagccgtgtcaagatgagagggaagcgtagaccgcagacccgtgcagctaggcggctggctgctcaggagtccagcgaggctgaggacatgagcgtccccagaggacccattgcacagtgggctgatggcgccatttccccaaatggccatcggccacagctcagagcagccagtggagaagacagcactgaggaggccctggcagctgccgctgcaccttgggaaggtggtcctgtgcctggagtggacacaagcccctttgcaaagtctctgggtcattccagaggggaggctgacctttttgattctggggacattttttccacgggcactggatctcagtccgtggagagaacaaaacccaaggcaaagatagcagagaatcctgccaacccaccagtgggtggtaaagcaaagagccccatgtttcctgctctaggcgaggccagcagtgatgatgatctctttcagtctgctaaaccaaaaccagcaaagaaaacaaatccctttcctctcctggaagatgaggatgacctctttacagatcagaaagtcaagaagaatgagacaaaatccagtagtcagcaggatgtcatattaacaacacaagatatttttgaggatgatatatttgctacggaagcaattaaaccctctcagaaaaccagagagaaggagaaaacattggaatctaatttatttgatgataacattgatatctttgctgacttaactgtaaaaccaaaagaaaagtccaaaaagaaagtggaagccaagtctatatttgatgatgatatggatgacatcttctccactggtatccaggctaagacaaccaaaccaaaaagccgatctgcacaggccgcacctgaaccaagatttgaacacaaggtgtccaacatctttgatgatcccctgaatgcctttggaggccagtagagcacacagggtatccacatgttaccctgcagctacattgttgagttagtgatgatattgtatatgctcatggtcttaactggattacaaaaagcaaatactagaacagctagctcatcttttacccaatgtacttagtatttttctgcactggtttaatcatgcttaatactacaaaacaaaaataaatatttcacagtggttggtttgttttgtttttaaaccacagtttgatttagttagccttgctggggccataatatgcttcagggtgtgtaaaagaagaaatctctttgtggctttcatgggcagggaatctcagagatagcaaatgccacctgaccagaagtctttgttatatggatgggaaccctaacttagggcttgggcaggggaaagagaaagaagatgagagattatacttcatgagtcttagcaatatgggagcaggttttcactgaattctgagggtgcctctgcatgtcctccaaggcaaagtttggcaaactgtggcccccccactgtcatattttgttaataaaattttattggaacacaatc

SEQ ID NO: 10323 - DNA, 4435 bp, Homo sapiens
  source 1..4435: mol_type = unassigned DNA
ttggctggggctaggcttccggggctctgcggtcctcggcctgtgctggcagcctcggagcccaccgagccgggcggctgggatgatgaaccggacgacccccgaccaggagctggtgccggcgtcggagcccgtgtgggagcggccgtggtcggtggaggagatccgcaggagcagccagagctggtcgctggcggccgacgcgggccgtgtatatgatgaagaagtggaggagccagtactcaaggctgaggcagaaaaaacagagcaggagaagacacgagagcagaaagaagtagatctcattcctaaagtccaggaggctgtgaactatggcttacaagtattggacagtgcctttgagcaacttgatatcaaagcaggaaactcagactccgaggaagatgatgctaatgggcgggtggaactgatccttgaaccaaaggatctatacattgatcgtcctttaccatatctcattgggtcaaagctgttcatggaacaagaagatgtaggtcttggagagctgtccagtgaagaaggctctgtaggcagtgatcgtggcagtattgtggacactgaggaagagaaagaagaggaggagtcagatgaagattttgcccatcacagtgacaatgaacaaaaccagcacaccacacaaatgagtgatgaggaagaggatgatgatggctgtgacctttttgctgactctgagaaggaggaggaagatattgaggacattgaagaaaatactagacctaaaagaagcagacctacatcgtttgcagatgagctggctgcccgcatcaagggggatgccatgggtcgagtggacgaggagccgacaaccttaccctcaggagaagcaaaacctcggaagacactcaaagagaagaaggaaaggagaactccttcagacgatgaagaggataacttattcgcaccccccaagctgaccgacgaggacttctcgccatttggctctggaggtggcctgttcagtggcggcaaggggctatttgatgatgaggacgaggagagtgacctcttcacggaagcctcccaggatcggcaagctggagcctctgttaaggaggagtcttcatcatccaaacctggaaagaaaatcccagcaggagctgtttctgtatttttaggagacacggatgtgtttggtgctgcctccgttccatcactgaaggagccacagaagcctgagcagcccactccaaggaaaagcccctatggtccccctcccactggcctctttgatgatgatgatggtgatgatgatgacgactttttctcggcaccccacagcaaaccttctaaaacacgcaaagtccaatccactgccgatatctttggtgacgaagaaggagatctgttcaaagaaaaagccgtagcatcgccagaagccactgtgagtcagacagatgaaaataaagcaagagcagaaaaaaaggttaccttatcttacagcaaaaatctcaagccctcatcagaaacaaagactcaaaaaggcttattttcagatgaggaggactctgaggatttgttttcttctcaaagtgcgagtaacttaaaaggtgcatctctgctgcctggcaagctccccacgtcggtttccctgtttgatgatgaagatgaagaggataatctttttgggggtacagctgctaagaagcagacattgtctctacaagctcagagagaagagaaagcaaaagcctccgagctctccaaaaagaaagcatctgccctgttgttcagcagtgatgaggagtggaatattcctgcttcacagacccacttagcatctgacagcaggtctaaaggagaacccagggattctgggaccctccagagccaggaggccaaggctgtgaaaaagaccagtctctttgaggaagacaaagaagatgatctttttgccattgccaaggacagccaaaagaagacccagagagtgtcactcctctttgaagacgatgttgatagcggaggctctctgtttggctctcctcccacatctgttcctcctgcaacaaagaaaaaagagactgtctctgaggcaccacctttgctgttcagcgatgaagaagagaaggaggcacaacttggagtgaagtctgtggataagaaggttgagagtgccaaggagtcattaaaatttgggagaactgatgtggctgagtcagaaaaggaaggacttttgactagatctgctcaggaaacagtcaagcattctgatttattttcttcatcatccccatgggacaaaggaaccaagcctagaaccaaaactgttcttagcttgtttgatgaggaagaggataaaatggaagatcaaaacattatccaggctccacagaaagaagtaggaaagggctgcgatcctgatgcccaccccaagagcacaggtgtcttccaggatgaagagctgcttttcagccacaagctccaaaaggacaatgacccagatgttgacctttttgctggcaccaaaaaaaccaagctgttagagccaagtgttgggagcctgtttggggatgatgaagatgatgatcttttcagctctgccaagtcccagcctttggtacaagagaaaaagagagtagtgaaaaaagaccactctgttaactctttcaaaaaccagaaacatcctgaatccattcaaggtagtaaagaaaaaggcatatggaagccggaaacacctcaggcaaatttagcgatcaacccagcggccttgctgcccacagcggcttcccagatctctgaagtaaagcctgttttgccagaattggcttttccttcatctgaacacagaaggagccacggtctggaaagtgtgcctgtccttcccgggagtggggaggccggtgtgagttttgatcttccagctcaggcagacaccttacacagtgcaaacaagagccgtgtcaagatgagagggaagcgtagaccgcagacccgtgcagctaggcggctggctgctcaggagtccagcgaggctgaggacatgagcgtccccagaggacccattgcacagtgggctgatggcgccatttccccaaatggccatcggccacagctcagagcagccagtggagaagacagcactgaggaggccctggcagctgccgctgcaccttgggaaggtggtcctgtgcctggagtggacacaagcccctttgcaaagtctctgggtcattccagaggggaggctgacctttttgattctggggacattttttccacgggcactggatctcagtccgtggagagaacaaaacccaaggcaaagatagcagagaatcctgccaacccaccagtgggtggtaaagcaaagagccccatgtttcctgctctaggcgaggccagcagtgatgatgatctctttcagtctgctaaaccaaaaccagcaaagaaaacaaatccctttcctctcctggaagatgaggatgacctctttacagatcagaaagtcaagaagaatgagacaaaatccagtagtcagcaggatgtcatattaacaacacaagatatttttgaggatgatatatttgctacggaagcaattaaaccctctcagaaaaccagagagaaggagaaaacattggaatctaatttatttgatgataacattgatatctttgctgacttaactgtaaaaccaaaagaaaagtccaaaaagaaagtggaagccaagtctatatttgatgatgatatggatgacatcttctccactggtatccaggctaagacaaccaaaccaaaaagccgatctgcacaggccgcacctgaaccaagatttgaacacaaggtgtccaacatctttgatgatcccctgaatgcctttggaggccagtagagcacacagggtatccacatgttaccctgcagctacattgttgagttagtgatgatattgtatatgctcatggtcttaactggattacaaaaagcaaatactagaacagctagctcatcttttacccaatgtacttagtatttttctgcactggtttaatcatgcttaatactacaaaacaaaaataaatatttcacagtggttggtttgttttgtttttaaaccacagtttgatttagttagccttgctggggccataatatgcttcagggtgtgtaaaagaagaaatctctttgtggctttcatgggcagggaatctcagagatagcaaatgccacctgaccagaagtctttgttatatggatgggaaccctaacttagggcttgggcaggggaaagagaaagaagatgagagattatacttcatgagtcttagcaatatgggagcaggttttcactgaattctgagggtgcctctgcatgtcctccaaggcaaagtttggcaaactgtggcccccccactgtcatattttgttaataaaattttattggaacacaatc

SEQ ID NO: 10324 - DNA, 785 bp, Homo sapiens
  source 1..785: mol_type = unassigned DNA
tccccatgggacaaaggaaccaagcctagaaccaaaactgttcttagcttgtttgatgaggaagaggataaaatggaagatcaaaacattatccaggctccacagaaagaagtaggaaagggctgcgatcctgatgcccaccccaagagcacaggtgtcttccaggatgaagagctgcttttcagccacaagctccaaaaggacaatgacccagatgttgacctttttgctggcaccaaaaaaaccaagctgttagagccaagtgttgggagcctgtttggggatgatgaagatgatgatcttttcagctctgccaagtcccagcctttggtacaagagaaaaagagagtagtgaaaaaagaccactctgttaactctttcaaaaaccagaaacatcctgaatccattcaaggtagtaaagaaaaaggcatatggaagccggaaacacctcaggttagaaatcctctttaaggattttcagctcttgtttgcatcccagtacagagaaattccattatgcagacccacagttatttagacttgtctgcattaaggaggaaacagcaaccagggctacagctttgtcttcactgcacttcccccgagtcatctcccctctcctcactccacacgccagagtttcatgaatctatactttaatagttagtgttttttgatgccatgccagatttgactctgaagtggagttaaggtaggatgaagaatcttcttcccactaaagaatttatttctccctctggatttccttggaatagaattaaaat

SEQ ID NO: 10325 - DNA, 4623 bp, Homo sapiens
  source 1..4623: mol_type = unassigned DNA
gtcacgccccgggcagcttggctggggctaggcttccggggctctgcggtcctcggcctgtgctggcagcctcggagcccaccgagccgggcggctgggatgatgaaccggacgacccccgaccaggagctggtgccggcgtcggagcccgtgtgggagcggccgtggtcggtggaggagatccgcaggagcagccagagctggtcgctggcggccgacgcgggcctactacagtttctacaggaattctcacagcaaactatctctaggacccatgaaatcaagaaacaagtggacggactaatccgggaaaccaaagccacagattgtcgcctgcataatgtcttcaatgacttccttatgctctctaatacccagttcatagagaatcgtgtatatgatgaagaagtggaggagccagtactcaaggctgaggcagaaaaaacagagcaggagaagacacgagagcagaaagaagtagatctcattcctaaagtccaggaggctgtgaactatggcttacaagtattggacagtgcctttgagcaacttgatatcaaagcaggaaactcagactccgaggaagatgatgctaatgggcgggtggaactgatccttgaaccaaaggatctatacattgatcgtcctttaccatatctcattgggtcaaagctgttcatggaacaagaagatgtaggtcttggagagctgtccagtgaagaaggctctgtaggcagtgatcgtggcagtattgtggacactgaggaagagaaagaagaggaggagtcagatgaagattttgcccatcacagtgacaatgaacaaaaccagcacaccacacaaatgagtgatgaggaagaggatgatgatggctgtgacctttttgctgactctgagaaggaggaggaagatattgaggacattgaagaaaatactagacctaaaagaagcagacctacatcgtttgcagatgagctggctgcccgcatcaagggggatgccatgggtcgagtggacgaggagccgacaaccttaccctcaggagaagcaaaacctcggaagacactcaaagagaagaaggaaaggagaactccttcagacgatgaagaggataacttattcgcaccccccaagctgaccgacgaggacttctcgccatttggctctggaggtggcctgttcagtggcggcaaggggctatttgatgatgaggacgaggagagtgacctcttcacggaagcctcccaggatcggcaagctggagcctctgttaaggaggagtcttcatcatccaaacctggaaagaaaatcccagcaggagctgtttctgtatttttaggagacacggatgtgtttggtgctgcctccgttccatcactgaaggagccacagaagcctgagcagcccactccaaggaaaagcccctatggtccccctcccactggcctctttgatgatgatgatggtgatgatgatgacgactttttctcggcaccccacagcaaaccttctaaaacacgcaaagtccaatccactgccgatatctttggtgacgaagaaggagatctgttcaaagaaaaagccgtagcatcgccagaagccactgtgagtcagacagatgaaaataaagcaagagcagaaaaaaaggttaccttatcttacagcaaaaatctcaagccctcatcagaaacaaagactcaaaaaggcttattttcagatgaggaggactctgaggatttgttttcttctcaaagtgcgagtaacttaaaaggtgcatctctgctgcctggcaagctccccacgtcggtttccctgtttgatgatgaagatgaagaggataatctttttgggggtacagctgctaagaagcagacattgtctctacaagctcagagagaagagaaagcaaaagcctccgagctctccaaaaagaaagcatctgccctgttgttcagcagtgatgaggaggaccagtggaatattcctgcttcacagacccacttagcatctgacagcaggtctaaaggagaacccagggattctgggaccctccagagccaggaggccaaggctgtgaaaaagaccagtctctttgaggaagacaaagaagatgatctttttgccattgccaaggacagccaaaagaagacccagagagtgtcactcctctttgaagacgatgttgatagcggaggctctctgtttggctctcctcccacatctgttcctcctgcaacaaagaaaaaagagactgtctctgaggcaccacctttgctgttcagcgatgaagaagagaaggaggcacaacttggagtgaagtctgtggataagaaggttgagagtgccaaggagtcattaaaatttgggagaactgatgtggctgagtcagaaaaggaaggacttttgactagatctgctcaggaaacagtcaagcattctgatttattttcttcatcatccccatgggacaaaggaaccaagcctagaaccaaaactgttcttagcttgtttgatgaggaagaggataaaatggaagatcaaaacattatccaggctccacagaaagaagtaggaaagggctgcgatcctgatgcccaccccaagagcacaggtgtcttccaggatgaagagctgcttttcagccacaagctccaaaaggacaatgacccagatgttgacctttttgctggcaccaaaaaaaccaagctgttagagccaagtgttgggagcctgtttggggatgatgaagatgatgatcttttcagctctgccaagtcccagcctttggtacaagagaaaaagagagtagtgaaaaaagaccactctgttaactctttcaaaaaccagaaacatcctgaatccattcaaggtagtaaagaaaaaggcatatggaagccggaaacacctcaggcaaatttagcgatcaacccagcggccttgctgcccacagcggcttcccagatctctgaagtaaagcctgttttgccagaattggcttttccttcatctgaacacagaaggagccacggtctggaaagtgtgcctgtccttcccgggagtggggaggccggtgtgagttttgatcttccagctcaggcagacaccttacacagtgcaaacaagagccgtgtcaagatgagagggaagcgtagaccgcagacccgtgcagctaggcggctggctgctcaggagtccagcgaggctgaggacatgagcgtccccagaggacccattgcacagtgggctgatggcgccatttccccaaatggccatcggccacagctcagagcagccagtggagaagacagcactgaggaggccctggcagctgccgctgcaccttgggaaggtggtcctgtgcctggagtggacacaagcccctttgcaaagtctctgggtcattccagaggggaggctgacctttttgattctggggacattttttccacgggcactggatctcagtccgtggagagaacaaaacccaaggcaaagatagcagagaatcctgccaacccaccagtgggtggtaaagcaaagagccccatgtttcctgctctaggcgaggccagcagtgatgatgatctctttcagtctgctaaaccaaaaccagcaaagaaaacaaatccctttcctctcctggaagatgaggatgacctctttacagatcagaaagtcaagaagaatgagacaaaatccagtagtcagcaggatgtcatattaacaacacaagatatttttgaggatgatatatttgctacggaagcaattaaaccctctcagaaaaccagagagaaggagaaaacattggaatctaatttatttgatgataacattgatatctttgctgacttaactgtaaaaccaaaagaaaagtccaaaaagaaagtggaagccaagtctatatttgatgatgatatggatgacatcttctccactggtatccaggctaagacaaccaaaccaaaaagccgatctgcacaggccgcacctgaaccaagatttgaacacaaggtgtccaacatctttgatgatcccctgaatgcctttggaggccagtagagcacacagggtatccacatgttaccctgcagctacattgttgagttagtgatgatattgtatatgctcatggtcttaactggattacaaaaagcaaatactagaacagctagctcatcttttacccaatgtacttagtatttttctgcactggtttaatcatgcttaatactacaaaacaaaaataaatatttcacagtggttggtttgttttgtttttaaaccacagtttgatttagttagccttgctggggccataatatgcttcagggtgtgtaaaagaagaaatctctttgtggctttcatgggcagggaatctcagagatagcaaatgccacctgaccagaagtctttgttatatggatgggaaccctaacttagggcttgggcaggggaaagagaaagaagatgagagattatacttcatgagtcttagcaatatgggagcaggttttcactgaattctgagggtgcctctgcatgtcctccaaggcaaagtttggcaaactgtggcccccccactgtcatattttgttaataaaattttattggaacacaatc

SEQ ID NO: 10326 - DNA, 4669 bp, Homo sapiens
  source 1..4669: mol_type = unassigned DNA
ttggctggggctaggcttccggggctctgcggtcctcggcctgtgctggcagcctcggagcccaccgagccgggcggctgggatgatgaaccggacgacccccgaccaggagctggtgccggcgtcggagcccgtgtgggagcggccgtggtcggtggaggagatccgcaggagcagccagagctggtcgctggcggccgacgcgggcctactacagtttctacaggaattctcacagcaaactatctctaggacccatgaaatcaagaaacaagtggacggactaatccgggaaaccaaagccacagattgtcgcctgcataatgtcttcaatgacttccttatgctctctaatacccagttcatagagaatcgtgtatatgatgaagaagtggaggagccagtactcaaggctgaggcagaaaaaacagagcaggagaagacacgagagcagaaagaagtagatctcattcctaaagtccaggaggctgtgaactatggcttacaagtattggacagtgcctttgagcaacttgatatcaaagcaggaaactcagactccgaggaagatgatgctaatgggcgggtggaactgatccttgaaccaaaggatctatacattgatcgtcctttaccatatctcattgggtcaaagctgttcatggaacaagaagatgtaggtcttggagagctgtccagtgaagaaggctctgtaggcagtgatcgtggcagtattgtggacactgaggaagagaaagaagaggaggagtcagatgaagattttgcccatcacagtgacaatgaacaaaaccagcacaccacacaaatgagtgatgaggaagaggatgatgatggctgtgacctttttgctgactctgagaaggaggaggaagatattgaggacattgaagaaaatactagacctaaaagaagcagacctacatcgtttgcagatgagctggctgcccgcatcaagggggatgccatgggtcgagtggacgaggagccgacaaccttaccctcaggagaagcaaaacctcggaagacactcaaagagaagaaggaaaggagaactccttcagacgatgaagaggataacttattcgcaccccccaagctgaccgacgaggacttctcgccatttggctctggaggtggcctgttcagtggcggcaaggggctatttgatgatgaggacgaggagagtgacctcttcacggaagcctcccaggatcggcaagctggagcctctgttaaggaggagtcttcatcatccaaacctggaaagaaaatcccagcaggagctgtttctgtatttttaggagacacggatgtgtttggtgctgcctccgttccatcactgaaggagccacagaagcctgagcagcccactccaaggaaaagcccctatggtccccctcccactggcctctttgatgatgatgatggtgatgatgatgacgactttttctcggcaccccacagcaaaccttctaaaacaggcaaagtccaatccactgccgatatctttggtgacgaagaaggagatctgttcaaagaaaaagccgtagcatcgccagaagccactgtgagtcagacagatgaaaataaagcaagagcagaaaaaaaggttaccttatcttacagcaaaaatctcaagccctcatcagaaacaaagactcaaaaaggcttattttcagatgaggaggactctgaggatttgttttcttctcaaagtgcgagtaacttaaaaggtgcatctctgctgcctggcaagctccccacgtcggtttccctgtttgatgatgaagatgaagaggataatctttttgggggtacagctgctaagaagcagacattgtctctacaagctcagagagaagagaaagcaaaagcctccgagctctccaaaaagaaagcatctgccctgttgttcagcagtgatgaggaggaccagtggaatattcctgcttcacagacccacttagcatctgacagcaggtctaaaggagaacccagggattctgggaccctccagagccaggaggccaaggctgtgaaaaagaccagtctctttgaggaagacaaagaagatgatctttttgccattgccaaggacagccaaaagaagacccagagagtgtcactcctctttgaagacgatgttgatagcggaggctctctgtttggctctcctcccacatctgttcctcctgcaacaaagaaaaaagagactgtctctgaggcaccacctttgctgttcagcgatgaagaagagaaggaggcacaacttggagtgaagtctgtggataagaaggttgagagtgccaaggagtcattaaaatttgggagaactgatgtggctgagtcagaaaaggaaggacttttgactagatctgctcaggaaacagtcaagcattctgatttattttcttcatcatccccatgggacaaaggaaccaagcctagaaccaaaactgttcttagcttgtttgatgaggaagaggataaaatggaagatcaaaacattatccaggctccacagaaagaagtaggaaagggctgcgatcctgatgcccaccccaagagcacaggtgtcttccaggatgaagagctgcttttcagccacaagctccaaaaggacaatgacccagatgttgacctttttgctggcaccaaaaaaaccaagctgttagagccaagtgttgggagcctgtttggggatgatgaagatgatgatcttttcagctctgccaagtcccagcctttggtacaagagaaaaagagagtagtgaaaaaagaccactctgttaactctttcaaaaaccagaaacatcctgaatccattcaaggtagtaaagaaaaaggcatatggaagccggaaacacctcaggactcatcaggtctcgctccatttaaaaccaaagaaccatccactcggatcgggaagatacaagcaaatttagcgatcaacccagcggccttgctgcccacagcggcttcccagatctctgaagtaaagcctgttttgccagaattggcttttccttcatctgaacacagaaggagccacggtctggaaagtgtgcctgtccttcccgggagtggggaggccggtgtgagttttgatcttccagctcaggcagacaccttacacagtgcaaacaagagccgtgtcaagatgagagggaagcgtagaccgcagacccgtgcagctaggcggctggctgctcaggagtccagcgaggctgaggacatgagcgtccccagaggacccattgcacagtgggctgatggcgccatttccccaaatggccatcggccacagctcagagcagccagtggagaagacagcactgaggaggccctggcagctgccgctgcaccttgggaaggtggtcctgtgcctggagtggacacaagcccctttgcaaagtctctgggtcattccagaggggaggctgacctttttgattctggggacattttttccacgggcactggatctcagtccgtggagagaacaaaacccaaggcaaagatagcagagaatcctgccaacccaccagtgggtggtaaagcaaagagccccatgtttcctgctctaggcgaggccagcagtgatgatgatctctttcagtctgctaaaccaaaaccagcaaagaaaacaaatccctttcctctcctggaagatgaggatgacctctttacagatcagaaagtcaagaagaatgagacaaaatccagtagtcagcaggatgtcatattaacaacacaagatatttttgaggatgatatatttgctacggaagcaattaaaccctctcagaaaaccagagagaaggagaaaacattggaatctaatttatttgatgataacattgatatctttgctgacttaactgtaaaaccaaaagaaaagtccaaaaagaaagtggaagccaagtctatatttgatgatgatatggatgacatcttctccactggtatccaggctaagacaaccaaaccaaaaagccgatctgcacaggccgcacctgaaccaagatttgaacacaaggtgtccaacatctttgatgatcccctgaatgcctttggaggccagtagagcacacagggtatccacatgttaccctgcagctacattgttgagttagtgatgatattgtatatgctcatggtcttaactggattacaaaaagcaaatactagaacagctagctcatcttttacccaatgtacttagtatttttctgcactggtttaatcatgcttaatactacaaaacaaaaataaatatttcacagtggttggtttgttttgtttttaaaccacagtttgatttagttagccttgctggggccataatatgcttcagggtgtgtaaaagaagaaatctctttgtggctttcatgggcagggaatctcagagatagcaaatgccacctgaccagaagtctttgttatatggatgggaaccctaacttagggcttgggcaggggaaagagaaagaagatgagagattatacttcatgagtcttagcaatatgggagcaggttttcactgaattctgagggtgcctctgcatgtcctccaaggcaaagtttggcaaactgtggcccccccactgtcatattttgttaataaaattttattggaacacaatc

SEQ ID NO: 10327 - DNA, 868 bp, Homo sapiens
  source 1..868: mol_type = unassigned DNA
cctcggagcccaccgagccgggcggctgggatgatgaaccggacgacccccgaccaggagctggtgccggcgtcggagcccgtgtgggagcggccgtggtcggtggaggagatccgcaggagcagccagagctggtcgctggcggccgacgcgggccgtgtatatgatgaagaagtggaggagccagtactcaaggctgaggcagaaaaaacagagcaggagaagacacgagagcagaaagaagtagatctcattcctaaagtccaggaggctgtgaactatggcttacaagtattggacagtgcctttgagcaacttgatatcaaagcaggaaactcagactccgaggaagatgatgctaatgggcgggtggaactgatccttgaaccaaaggatctatacattgatcgtcctttaccatatctcattgggtcaaagctgttcatggaacaagaagatgtaggtcttggagagctgtccagtgaagaaggctctgtaggcagtgatcgtggcagtattgtggacactgaggaagagaaagaagaggaggagtcagatgaagattttgcccatcacagtgacaatgaacaaaaccagcacaccacacaaatgagtgatgaggaagaggatgatgatggctgtgacctttttgctgactctgagaaggaggaggaagatattgaggacattgaagaaaatactagacctaaaagaagcagacctacatcgtttgcagatgagctggctgcccgcatcaagggggatgccatgggtcgagtggacgaggagccgacaaccttaccctcaggagaagcaaaacctcggaagacactcaaagagaagaaggaaaggagaactccttcagacg

SEQ ID NO: 10328 - DNA, 4326 bp, Homo sapiens
  source 1..4326: mol_type = unassigned DNA
atgcccaggctttctggcaagtcagtgcgtgtatatgatgaagaagtggaggagccagtactcaaggctgaggcagaaaaaacagagcaggagaagacacgagagcagaaagaagtagatctcattcctaaagtccaggaggctgtgaactatggcttacaagtattggacagtgcctttgagcaacttgatatcaaagcaggaaactcagactccgaggaagatgatgctaatgggcgggtggaactgatccttgaaccaaaggatctatacattgatcgtcctttaccatatctcattgggtcaaagctgttcatggaacaagaagatgtaggtcttggagagctgtccagtgaagaaggctctgtaggcagtgatcgtggcagtattgtggacactgaggaagagaaagaagaggaggagtcagatgaagattttgcccatcacagtgacaatgaacaaaaccagcacaccacacaaatgagtgatgaggaagaggatgatgatggctgtgacctttttgctgactctgagaaggaggaggaagatattgaggacattgaagaaaatactagacctaaaagaagcagacctacatcgtttgcagatgagctggctgcccgcatcaagggggatgccatgggtcgagtggacgaggagccgacaaccttaccctcaggagaagcaaaacctcggaagacactcaaagagaagaaggaaaggagaactccttcagacgatgaagaggataacttattcgcaccccccaagctgaccgacgaggacttctcgccatttggctctggaggtggcctgttcagtggcggcaaggggctatttgatgatgaggacgaggagagtgacctcttcacggaagcctcccaggatcggcaagctggagcctctgttaaggaggagtcttcatcatccaaacctggaaagaaaatcccagcaggagctgtttctgtatttttaggagacacggatgtgtttggtgctgcctccgttccatcactgaaggagccacagaagcctgagcagcccactccaaggaaaagcccctatggtccccctcccactggcctctttgatgatgatgatggtgatgatgatgacgactttttctcggcaccccacagcaaaccttctaaaacaggcaaagtccaatccactgccgatatctttggtgacgaagaaggagatctgttcaaagaaaaagccgtagcatcgccagaagccactgtgagtcagacagatgaaaataaagcaagagcagaaaaaaaggttaccttatcttacagcaaaaatctcaagccctcatcagaaacaaagactcaaaaaggcttattttcagatgaggaggactctgaggatttgttttcttctcaaagtgcgagtaacttaaaaggtgcatctctgctgcctggcaagctccccacgtcggtttccctgtttgatgatgaagatgaagaggataatctttttgggggtacagctgctaagaagcagacattgtctctacaagctcagagagaagagaaagcaaaagcctccgagctctccaaaaagaaagcatctgccctgttgttcagcagtgatgaggaggaccagtggaatattcctgcttcacagacccacttagcatctgacagcaggtctaaaggagaacccagggattctgggaccctccagagccaggaggccaaggctgtgaaaaagaccagtctctttgaggaagacaaagaagatgatctttttgccattgccaaggacagccaaaagaagacccagagagtgtcactcctctttgaagacgatgttgatagcggaggctctctgtttggctctcctcccacatctgttcctcctgcaacaaagaaaaaagagactgtctctgaggcaccacctttgctgttcagcgatgaagaagagaaggaggcacaacttggagtgaagtctgtggataagaaggttgagagtgccaaggagtcattaaaatttgggagaactgatgtggctgagtcagaaaaggaaggacttttgactagatctgctcaggaaacagtcaagcattctgatttattttcttcatcatccccatgggacaaaggaaccaagcctagaaccaaaactgttcttagcttgtttgatgaggaagaggataaaatggaagatcaaaacattatccaggctccacagaaagaagtaggaaagggctgcgatcctgatgcccaccccaagagcacaggtgtcttccaggatgaagagctgcttttcagccacaagctccaaaaggacaatgacccagatgttgacctttttgctggcaccaaaaaaaccaagctgttagagccaagtgttgggagcctgtttggggatgatgaagatgatgatcttttcagctctgccaagtcccagcctttggtacaagagaaaaagagagtagtgaaaaaagaccactctgttaactctttcaaaaaccagaaacatcctgaatccattcaaggtagtaaagaaaaaggcatatggaagccggaaacacctcaggactcatcaggtctcgctccatttaaaaccaaagaaccatccactcggatcgggaagatacaagcaaatttagcgatcaacccagcggccttgctgcccacagcggcttcccagatctctgaagtaaagcctgttttgccagaattggcttttccttcatctgaacacagaaggagccacggtctggaaagtgtgcctgtccttcccgggagtggggaggccggtgtgagttttgatcttccagctcaggcagacaccttacacagtgcaaacaagagccgtgtcaagatgagagggaagcgtagaccgcagacccgtgcagctaggcggctggctgctcaggagtccagcgaggctgaggacatgagcgtccccagaggacccattgcacagtgggctgatggcgccatttccccaaatggccatcggccacagctcagagcagccagtggagaagacagcactgaggaggccctggcagctgccgctgcaccttgggaaggtggtcctgtgcctggagtggacacaagcccctttgcaaagtctctgggtcattccagaggggaggctgacctttttgattctggggacattttttccacgggcactggatctcagtccgtggagagaacaaaacccaaggcaaagatagcagagaatcctgccaacccaccagtgggtggtaaagcaaagagccccatgtttcctgctctaggcgaggccagcagtgatgatgatctctttcagtctgctaaaccaaaaccagcaaagaaaacaaatccctttcctctcctggaagatgaggatgacctctttacagatcagaaagtcaagaagaatgagacaaaatccagtagtcagcaggatgtcatattaacaacacaagatatttttgaggatgatatatttgctacggaagcaattaaaccctctcagaaaaccagagagaaggagaaaacattggaatctaatttatttgatgataacattgatatctttgctgacttaactgtaaaaccaaaagaaaagtccaaaaagaaagtggaagccaagtctatatttgatgatgatatggatgacatcttctccactggtatccaggctaagacaaccaaaccaaaaagccgatctgcacaggccgcacctgaaccaagatttgaacacaaggtgtccaacatctttgatgatcccctgaatgcctttggaggccagtagagcacacagggtatccacatgttaccctgcagctacattgttgagttagtgatgatattgtatatgctcatggtcttaactggattacaaaaagcaaatactagaacagctagctcatcttttacccaatgtacttagtatttttctgcactggtttaatcatgcttaatactacaaaacaaaaataaatatttcacagtggttggtttgttttgtttttaaaccacagtttgatttagttagccttgctggggccataatatgcttcagggtgtgtaaaagaagaaatctctttgtggctttcatgggcagggaatctcagagatagcaaatgccacctgaccagaagtctttgttatatggatgggaaccctaacttagggcttgggcaggggaaagagaaagaagatgagagattatacttcatgagtcttagcaatatgggagcaggttttcactgaattctgagggtgcctctgcatgtcctccaaggcaaagtttggcaaactgtggcccccccactgtcatattttgttaataaaattttattggaacacaatcaca

SEQ ID NO: 10329 - DNA, 4417 bp, Homo sapiens
  source 1..4417: mol_type = unassigned DNA
atcaggtcacgtgaggccggtcacgccccgggcagcttggctggggctaggcttccggggctctgcggtcctcggcctgtgctggcagcctcggagcccaccgagccgggcggctgggatgatgaaccggacgacccccgaccaggagctggtgccggcgtcggagcccgtgtgggagcggccgtggtcggtggaggagatccgcaggagcagccagagctggtcgctggcggccgacgcgggcctactacagtttctacaggaattctcacagcaaactatctctaggacccatgaaatcaagaaacaagtggacggactaatccgggaaaccaaagccacagattgtcgcctgcataatgtcttcaatgacttccttatgctctctaatacccagttcatagagaatcgtgtatatgatgaagaagtggaggagccagtactcaaggctgaggcagaaaaaacagagcaggagaagacacgagagcagaaagaagtagatctcattcctaaagtccaggaggctgtgaactatggcttacaagtattggacagtgcctttgagcaacttgatatcaaagcaggaaactcagactccgaggaagatgatgctaatgggcgggtggaactgatccttgaaccaaaggatctatacattgatcgtcctttaccatatctcattgggtcaaagctgttcatggaacaagaagatgtaggtcttggagagctgtccagtgaagaaggctctgtaggcagtgatcgtggcagtattgtggacactgaggaagagaaagaagaggaggagtcagatgaagattttgcccatcacagtgacaatgaacaaaaccagcacaccacacaaatgagtgatgaggaagaggatgatgatggctgtgacctttttgctgactctgagaaggaggaggaagatattgaggacattgaagaaaatactagacctaaaagaagcagacctacatcgtttgcagatgagctggctgcccgcatcaagggggatgccatgggtcgagtggacgaggagccgacaaatgaagaggataacttattcgcaccccccaagctgaccgacgaggacttctcgccatttggctctggaggtggcctgttcagtggcggcaaggggctatttgatgatgaggacgaggagagtgacctcttcacggaagcctcccaggatcggcaagctggagcctctgttaaggaggagtcttcatcatccaaacctggaaagaaaatcccagcaggagctgtttctgtatttttaggagacacggatgtgtttggtgctgcctccgttccatcactgaaggagccacagaagcctgagcagcccactccaaggaaaagcccctatggtccccctcccactggcctctttgatgatgatgatggtgatgatgatgacgactttttctcggcaccccacagcaaaccttctaaaacacgcaaagtccaatccactgccgatatctttggtgacgaagaaggagatctgttcaaagaaaaagccgtagcatcgccagaagccactgtgagtcagacagatgaaaataaagcaagagcagaaaaaaaggttaccttatcttacagcaaaaatctcaagccctcatcagaaacaaagactcaaaaaggcttattttcagatgaggaggactctgaggatttgttttcttctcaaagtgcgagtaacttaaaaggtgcatctctgctgcctggcaagctccccacgtcggtttccctgtttgatgatgaagatgaagaggataatctttttgggggtacagctgctaagaagcagacattgtctctacaagctcagagagaagagaaagcaaaagcctccgagctctccaaaaagaaagcatctgccctgttgttcagcagtgatgaggaggaccagtggaatattcctgcttcacagacccacttagcatctgacagcaggtctaaaggagaacccagggattctgggaccctccagagccaggaggccaaggctgtgaaaaagaccagtctctttgaggaagacaaagaagatgatctttttgccattgccaaggacagccaaaagaagacccagagagtgtcactcctctttgaagacgatgttgatagcggaggctctctgtttggctctcctcccacatctgttcctcctgcaacaaaggaaggacttttgactagatctgctcaggaaacagtcaagcattctgatttattttcttcatcatccccatgggacaaaggaaccaagcctagaaccaaaactgttcttagcttgtttgatgaggaagaggataaaatggaagatcaaaacattatccaggctccacagaaagaagtaggaaagggctgcgatcctgatgcccaccccaagagcacaggtgtcttccaggatgaagagctgcttttcagccacaagctccaaaaggacaatgacccagatgttgacctttttgctggcaccaaaaaaaccaagctgttagagccaagtgttgggagcctgtttggggatgatgaagatgatgatcttttcagctctgccaagtcccagcctttggtacaagagaaaaagagagtagtgaaaaaagaccactctgttaactctttcaaaaaccagaaacatcctgaatccattcaaggtagtaaagaaaaaggcatatggaagccggaaacacctcaggcaaatttagcgatcaacccagcggccttgctgcccacagcggcttcccagatctctgaagtaaagcctgttttgccagaattggcttttccttcatctgaacacagaaggagccacggtctggaaagtgtgcctgtccttcccgggagtggggaggccggtgtgagttttgatcttccagctcaggcagacaccttacacagtgcaaacaagagccgtgtcaagatgagagggaagcgtagaccgcagacccgtgcagctaggcggctggctgctcaggagtccagcgaggctgaggacatgagcgtccccagaggacccattgcacagtgggctgatggcgccatttccccaaatggccatcggccacagctcagagcagccagtggagaagacagcactgaggaggccctggcagctgccgctgcaccttgggaaggtggtcctgtgcctggagtggacacaagcccctttgcaaagtctctgggtcattccagaggggaggctgacctttttgattctggggacattttttccacgggcactggatctcagtccgtggagagaacaaaacccaaggcaaagatagcagagaatcctgccaacccaccagtgggtggtaaagcaaagagccccatgtttcctgctctaggcgaggccagcagtgatgatgatctctttcagtctgctaaaccaaaaccagcaaagaaaacaaatccctttcctctcctggaagatgaggatgacctctttacagatcagaaagtcaagaagaatgagacaaaatccagtagtcagcaggatgtcatattaacaacacaagatatttttgaggatgatatatttgctacggaagcaattaaaccctctcagaaaaccagagagaaggagaaaacattggaatctaatttatttgatgataacattgatatctttgctgacttaactgtaaaaccaaaagaaaagtccaaaaagaaagtggaagccaagtctatatttgatgatgatatggatgacatcttctccactggtatccaggctaagacaaccaaaccaaaaagccgatctgcacaggccgcacctgaaccaagatttgaacacaaggtgtccaacatctttgatgatcccctgaatgcctttggaggccagtagagcacacagggtatccacatgttaccctgcagctacattgttgagttagtgatgatattgtatatgctcatggtcttaactggattacaaaaagcaaatactagaacagctagctcatcttttacccaatgtacttagtatttttctgcactggtttaatcatgcttaatactacaaaacaaaaataaatatttcacagtggttggtttgttttgtttttaaaccacagtttgatttagttagccttgctggggccataatatgcttcagggtgtgtaaaagaagaaatctctttgtggctttcatgggcagggaatctcagagatagcaaatgccacctgaccagaagtctttgttatatggatgggaaccctaacttagggcttgggcaggggaaagagaaagaagatgagagattatacttcatgagtcttagcaatatgggagcaggttttcactgaattctgagggtgcctctgcatgtcctccaaggcaaagtttggcaaactgtggcccccccactgtcatattttgttaataaaattttattggaacacaatc

SEQ ID NO: 10330 - DNA, 4519 bp, Homo sapiens
  source 1..4519: mol_type = unassigned DNA
atcaggtcacgtgaggccggtcacgccccgggcagcttggctggggctaggcttccggggctctgcggtcctcggcctgtgctggcagcctcggagcccaccgagccgggcggctgggatgatgaaccggacgacccccgaccaggagctggtgccggcgtcggagcccgtgtgggagcggccgtggtcggtggaggagatccgcaggagcagccagagctggtcgctggcggccgacgcgggcctactacagtttctacaggaattctcacagcaaactatctctaggacccatgaaatcaagaaacaagtggacggactaatccgggaaaccaaagccacagattgtcgcctgcataatgtcttcaatgacttccttatgctctctaatacccagttcatagagaatcgtgtatatgatgaagaagtggaggagccagtactcaaggctgaggcagaaaaaacagagcaggagaagacacgagagcagaaagaagtagatctcattcctaaagtccaggaggctgtgaactatggcttacaagtattggacagtgcctttgagcaacttgatatcaaagcaggaaactcagactccgaggaagatgatgctaatgggcgggtggaactgatccttgaaccaaaggatctatacattgatcgtcctttaccatatctcattgggtcaaagctgttcatggaacaagaagatgtaggtcttggagagctgtccagtgaagaaggctctgtaggcagtgatcgtggcagtattgtggacactgaggaagagaaagaagaggaggagtcagatgaagattttgcccatcacagtgacaatgaacaaaaccagcacaccacacaaatgagtgatgaggaagaggatgatgatggctgtgacctttttgctgactctgagaaggaggaggaagatattgaggacattgaagaaaatactagacctaaaagaagcagacctacatcgtttgcagatgagctggctgcccgcatcaagggggatgccatgggtcgagtggacgaggagccgacaaccttaccctcaggagaagcaaaacctcggaagacactcaaagagaagaaggaaaggagaactccttcagacgatgaagaggataacttattcgcaccccccaagctgaccgacgaggacttctcgccatttggctctggaggtggcctgttcagtggcggcaaggggctatttgatgatgaggacgaggagagtgacctcttcacggaagcctcccaggatcggcaagctggagcctctgttaaggaggagtcttcatcatccaaacctggaaagaaaatcccagcaggagctgtttctgtatttttaggagacacggatgtgtttggtgctgcctccgttccatcactgaaggagccacagaagcctgagcagcccactccaaggaaaagcccctatggtccccctcccactggcctctttgatgatgatgatggtgatgatgatgacgactttttctcggcaccccacagcaaaccttctaaaacacgcaaagtccaatccactgccgatatctttggtgacgaagaaggagatctgttcaaagaaaaagccgtagcatcgccagaagccactgtgagtcagacagatgaaaataaagcaagagcagaaaaaaaggttaccttatcttacagcaaaaatctcaagccctcatcagaaacaaagactcaaaaaggcttattttcagatgaggaggactctgaggatttgttttcttctcaaagtgcgagtaacttaaaaggtgcatctctgctgcctggcaagctccccacgtcggtttccctgtttgatgatgaagatgaagaggataatctttttgggggtacagctgctaagaagcagacattgtctctacaagctcagagagaagagaaagcaaaagcctccgagctctccaaaaagaaagcatctgccctgttgttcagcagtgatgaggaggaccagtggaatattcctgcttcacagacccacttagcatctgacagcaggtctaaaggagaacccagggattctgggaccctccagagccaggaggccaaggctgtgaaaaagaccagtctctttgaggaagacaaagaagatgatctttttgccattgccaaggacagccaaaagaagacccagagagtgtcactcctctttgaagacgatgttgatagcggaggctctctgtttggctctcctcccacatctgttcctcctgcaacaaagaaaaaagagactgtctctgaggcaccacctttgctgttcagcgatgaagaagagaaggaggcacaacttggagtgaagtctgtggataagaaggttgagagtgccaaggagtcattaaaatttgggagaactgatgtggctgagtcagaaaaggaaggacttttgactagatctgctcaggaaacagtcaagcattctgatttattttcttcatcatccccatgggacaaaggaaccaagcctagaaccaaaactgttcttagcttgtttgatgaggaagaggataaaatggaagatcaaaacattatccaggctccacagaaagaagtaggaaagggctgcgatcctgatgcccaccccaagagcacaggtgtcttccaggatgaagagctgcttttcagccacaagctccaaaaggacaatgacccagatgttgacctttttgctggcaccaaaaaaaccaagctgttagagccaagtgttgggagcctgtttggggatgatgaagatgatgatcttttcagctctgccaagtcccagcctttggcaaatttagcgatcaacccagcggccttgctgcccacagcggcttcccagatctctgaagtaaagcctgttttgccagaattggcttttccttcatctgaacacagaaggagccacggtctggaaagtgtgcctgtccttcccgggagtggggaggccggtgtgagttttgatcttccagctcaggcagacaccttacacagtgcaaacaagagccgtgtcaagatgagagggaagcgtagaccgcagacccgtgcagctaggcggctggctgctcaggagtccagcgaggctgaggacatgagcgtccccagaggacccattgcacagtgggctgatggcgccatttccccaaatggccatcggccacagctcagagcagccagtggagaagacagcactgaggaggccctggcagctgccgctgcaccttgggaaggtggtcctgtgcctggagtggacacaagcccctttgcaaagtctctgggtcattccagaggggaggctgacctttttgattctggggacattttttccacgggcactggatctcagtccgtggagagaacaaaacccaaggcaaagatagcagagaatcctgccaacccaccagtgggtggtaaagcaaagagccccatgtttcctgctctaggcgaggccagcagtgatgatgatctctttcagtctgctaaaccaaaaccagcaaagaaaacaaatccctttcctctcctggaagatgaggatgacctctttacagatcagaaagtcaagaagaatgagacaaaatccagtagtcagcaggatgtcatattaacaacacaagatatttttgaggatgatatatttgctacggaagcaattaaaccctctcagaaaaccagagagaaggagaaaacattggaatctaatttatttgatgataacattgatatctttgctgacttaactgtaaaaccaaaagaaaagtccaaaaagaaagtggaagccaagtctatatttgatgatgatatggatgacatcttctccactggtatccaggctaagacaaccaaaccaaaaagccgatctgcacaggccgcacctgaaccaagatttgaacacaaggtgtccaacatctttgatgatcccctgaatgcctttggaggccagtagagcacacagggtatccacatgttaccctgcagctacattgttgagttagtgatgatattgtatatgctcatggtcttaactggattacaaaaagcaaatactagaacagctagctcatcttttacccaatgtacttagtatttttctgcactggtttaatcatgcttaatactacaaaacaaaaataaatatttcacagtggttggtttgttttgtttttaaaccacagtttgatttagttagccttgctggggccataatatgcttcagggtgtgtaaaagaagaaatctctttgtggctttcatgggcagggaatctcagagatagcaaatgccacctgaccagaagtctttgttatatggatgggaaccctaacttagggcttgggcaggggaaagagaaagaagatgagagattatacttcatgagtcttagcaatatgggagcaggttttcactgaattctgagggtgcctctgcatgtcctccaaggcaaagtttggcaaactgtggcccccccactgtcatattttgttaataaaattttattggaacacaatc

SEQ ID NO: 10331 - DNA, 5609 bp, Homo sapiens
  source 1..5609: mol_type = unassigned DNA
aaaaaaagtactgaagacattttccccgcacaactgctaaagctccagagacacgagcgtgtgtggcagcaagagccgccagttcgggaccaccgcagctggggtggcagcggcgcaggaggggtcgcggggagggagtggtgagcgcaggcggcaggggtctgggaaagacgaagtcgctatttgctgtctgagcgcgctcgcagctcctggaagtgttgccgcctctcggtttcgctctcgctcgctgcgctcctagaaggggcggccgcctccaggactgaccagggccaagtggcgctcggcgggcactacatggcggagggtgaagggtacttcgccatgtctgaggacgagctggcctgcagcccctacatccccctaggcggcgacttcggcggcggcgacttcggcggcggcgacttcggcggcggcgacttcggcggtggcggcagcttcggtgggcattgcttggactattgcgaaagccctacggcgcactgcaatgtgctgaactgggagcaagtgcagcggctggacggcatcctgagcgagaccattccgattcacgggcgcggcaacttccccacgctcgagctgcagccgagcctgatcgtgaaggtggtgcggcggcgcctggccgagaagcgcattggcgtccgcgacgtgcgcctcaacggctcggcagccagccatgtcctgcaccaggacagcggcctgggctacaaggacctggacctcatcttctgcgccgacctgcgcggggaaggggagtttcagactgtgaaggacgtcgtgctggactgcctgttggacttcttacccgagggggtgaacaaagagaagatcacaccactcacgctcaaggaagcttatgtgcagaaaatggttaaagtgtgcaatgactctgaccgatggagtcttatatccctgtcaaacaacagtggcaaaaatgtggaactgaaatttgtggattccctccggaggcagtttgaattcagtgtagattcttttcaaatcaaattagactctcttctgctcttttatgaatgttcagagaacccaatgactgagacatttcaccccacaataatcggggagagcgtctatggcgatttccaggaagcctttgatcacctttgtaacaagatcattgccaccaggaacccagaggaaatccgagggggaggcctgcttaagtactgcaacctcttggtgaggggctttaggcccgcctctgatgaaatcaagacccttcaaaggtatatgtgttccaggtttttcatcgacttctcagacattggagagcagcagagaaaactggagtcctatttgcagaaccactttgtgggattggaagaccgcaagtatgagtatctcatgacccttcatggagtggtaaatgagagcacagtgtgcctgatgggacatgaaagaagacagactttaaaccttatcaccatgctggctatccgggtgttagctgaccaaaatgtcattcctaatgtggctaatgtcacttgctattaccagccagccccctatgtagcagatgccaactttagcaattactacattgcacaggttcagccagtattcacgtgccagcaacagacctactccacttggctaccctgcaattaagaatcatttaaaaatgtcctgtggggaagccatttcagacaagacaggagagaaaaaaaaaaaaaagaaaaaaaaaagagtgatccagcccttattagggatgtgttttgtgcaatgatgatatgctcctggttttaagtttggcaaagcttatgtatcttttaatagatgtgggagcatgatctcgaaaggatccttttcccttctcttattctcctacccaattggattctatcctgcaaaaaaagagagacctgtcattagaagcaaccaggttctcctgatacaagagaagaaatgtgtgatgacaatatgggtttgctgtatctgctcccatagctttgccataggaaaaaaaaaagtggaaagtttcttttaagatggaattcataaaagggaaaatacggaggaaaaaaggtctcactccaacttgtgaatcagtttaggagttcagatattaatagtaacaatacaggaaaaaggggaactccaacgttgggattactgtctgaggcttgtagcaagtgctttctgtggaatgatcttgttttgctaacaaacggcttgctccaaatgaacagtagtaggttggtgcagttctcgtaacaatcagcagaacttatgatgacacaatccattaattccagctgcgtgcatagatcacatttttaaaatgtaaaaatgcaagcaaaaacagctgtaacaaagaaagtgtgctcaaggaccaaagatttaacagataaaaatacccaattagaagagatatagtagactatatgaagagagattatatttgttacacaccaatatacatcaaagtgcctgttgccttctgaaaatttgaagtggcaaaattattttatggtttaatgattattttattttatcagggactgcctcaagaagaaaataacataagcttgtgaatggtggagaaaatgccctattttttcttgcaaatacttgtataaagttaacatttgttgatctgatattatcataggtacatgtgtatgtgtgtataaattatatgtgtgtgtgtatatatacattttatatatacattttatatgtatatatacacagtagattgactatgatctagaataatgtctcaaataggaaatgtttaaatactgtgtgtttttatgttttcaacaggataacatgagacgtgggcatattgcaatgatgaattaaatccacatctaaaaaaattaaatgaaggagggaaccaagtaatatatttcataggaagagcagaaattatactgttttagtgggatttttttttctttttttttttttctttggtgagccataaaattccacaaatgggagaatatttgtttggcagagcactcttttttatattgaactgccattttgacagttggaacccatttattaaaaaaaaaattgcattcctctatgatgtttaatctagtggatcatggatcagtaataggctacttaaatccctgactgctaaaaaggatttccggtgatctaaacactacttgctaatgtttaaatgaattttaatgaatgcattctgcatttctggaccactagaatttagtaatgtgaaatgaccctttttacagaatatttgcacaattgcttaaaatttatatatgagatatatattatatataacattttataaatcatgtcaatatgaaacatctttgatctggttgtcacactgcatttaaatatttagtactgtactttaaatcgctttccattaaatcaaatccaactttattttctttcttacaaaaataccagttatacctttgtgaaatgaactggcattactatttcagttcaataacagctaatcctaaaaccaccctttctcctagccagtagttcctctagatactggtctctgaaaatgcatttgttaaaaacaaaacaaaactaacacataagaaccttccctttgtgttgtgaaacaaccacataatctccacaaccttagtggatgactgcttgctatgataattcctcgaagacccaattagaagattttcatcatcagttaaagagagaccacgggagaaaaaaatatcctcctgttggcagtataatttgtttgtttgtttatctagggatcctcagatgcttagtgctaggttaatccaggttaatccgtctggactaccttttgtgcatctttctttgaagccttaatgggaacctgatgggtttgctgtagcagcttccttgtgaattctgtcagagctgcaacagccgctgcactgccactcagttttctaaggaactcctcctactaccatcttggctcagtctccctcacttaagccctgggtttgaaaaattaattgcaacttcccaggaaacattgttcagtttgcagattaagcctggcactcacctatcagaaaccagagctccgcctgcttagttgtttcaaagttttctgaaagaaaactaggggagcacttgtgaacacaggagcagctggtgatctgctttcttaccctaactcttgacaaatgagtcgtctactattttaaagagtctggaggtctctgactctgccataacaataacctgctgttaatttataacacagatttttgtttggaagagccttatttgaaatacactttgatttattttcttaaatatttatattcttttcttgcttacttcagggttggtagcttagttggaagtgccagcacctggcacctattcatatagaacaggctgtactcaagacaacttctagcatttactttaagacttatataatttatttctattttgtgtgtactatagtcttgtgcatatgtagttgaacacacagtgaaatatatgtctctctttgtggatgtgcggcctaaaaatttgaatgtctggtgagagagagccatgtgtataggtcagagaaaagaacagctcccgactccctattagcgcctgtgatttgtttccttttgtgtttatctggcctagtgtgctgtttctttaaaccaggaagaagttttgtcttttggaggctcttctcacctgtccagcctggcatgtcagagaacacatagcctgtgacaatgccgtttttaaaggtttacttaatttgcagtaaatccagctgcctcaagaactcctacaccaagatggacatttcctttccagaaatgggatcaagtatctgctcactttggtattggatggactaataatgtagctccaaaaatgcaaggatggaagaatatgtgtaatccaaaccaaggaaggaaatgaaaagtgaacgtactgtttttaccacccctttctgtttgcttattgttggttgcttcactgtgcataaagttgttttcaatgcaacgcttgttaaataaatattgtgaactattttgtaaatgaaatgtattatgttgaaagctgtcagttcaaaaataagcttttttgttgttgttgaagatgaagtgtgttaggtgaaaccaaaaagccaaaaaaagtaatttcatatatagcatctatttgaatataatctttctttaaaatttcttttagcatagcattttcagtgctaagaaagaatctctatgttatattttgttaaaataatggctttctaacaaagcaaatggtaaagtacaaagttggaagatgtcaagttaacgagacttgctgcaaagccttgcagaacggaggaggctctgcctgctggctgtctctccctccaacctctctacaatcatgcctgctttgaggtgttctgttgcagcaagctgcaccttgggtcactcttttggaatattttgactataggctgcgtcacaggcagaaaaggagttgatggaaaatggactaaaaaactgacatgtttgaatcagtgctagagggaacagattgtgaattttgtttacagcatccaatatttggatttttttgtaaataaaaaagttatttttttctattga

SEQ ID NO: 10332 - DNA, 5751 bp, Homo sapiens
  source 1..5751: mol_type = unassigned DNA
ccgaggggactggctccgccacgccccgcccctggctcccccgggagggcggctcaggggcggggacgggggcgtggtcccgccgtataagaacggagggggcggcggcgggacggctcactcggtgccgctgcctaggggctgtagaggtcgcgccgctcctgctggggcctgcccacgccaaggacctgcctctgtcgcctcctcttctattgcccagtttccccagccagaacatcccctgaagatggcagaggagagcagctgtaccagggattgcatgtccttcagcgtgctcaactgggatcaggttagccggctgcatgaggtcctcactgaagttgtacctatccacggacgaggcaactttccaaccttggagataactctgaaggacatcgtccagaccgtccgcagtcggctggaggaggcaggcatcaaagtgcacgacgtccggctgaatggctccgcagctggccacgttttggtcaaagacaatggcttgggctgcaaagacctggacctaatcttccatgtggctcttccaacagaggcagaatttcagctggttagagatgtggttctgtgttcccttctgaacttcctgccagagggtgtgaacaagctcaaaatcagtccagtcactctgaaggaggcatatgtgcagaagctagtgaaggtttgcacggacactgaccgctggagcctgatctccctctccaacaagaacgggaagaacgtggagctgaagtttgtcgactccattcggcgtcagtttgagttcagtgtggactctttccaaatcatcctggattctttgcttttcttctatgactgttccaataatcccatctctgagcacttccaccccaccgtgattggggagagcatgtacggggactttgaggaagcttttgaccatctgcagaacagactgatcgccaccaagaacccagaagaaatcagaggcgggggacttctcaagtacagcaaccttcttgtgcgggacttcaggcccacagaccaggaagaaatcaaaactctagagcgctacatgtgctccaggttcttcatcgacttcccggacatccttgaacagcagaggaagttggagacttaccttcaaaaccacttcgctgaagaagagagaagcaagtacgactacctcatgatccttcgcagggtggtgaacgagagcaccgtgtgtctcatggggcatgaacgcaggcagactctgaacctcatctccctcctggccttgcgtgtgctggcggaacaaaacatcatccccagtgccaccaacgtcacctgttactaccagccggccccttacgtcagtgatggcaacttcagcaactactacgttgcccatcctccagtcacctacagccagccttaccctacctggctgccctgtaactaaccttgagacctgagggtttccacagtgggaaccccaatagggctagggctctcaggtaggggagcctccttctagatgtaggcatttggcttttaaaggggaactcagctctgattctgcttttttttttttttttcctttgtgtacccattggaatgggtctacagtgtatcatgagccaaccctcaaaggacccgtattacagtgccacgttggaaaacgctacaggaagcatgacctatccacatctttccaagatagacactaacatgtcatgtcccaaacattagcacgtgggggttgagctctgtgcagtaatcgagattgggagaatttgggcagcgcgtgagaagtgctaagctacttgttttctcacttgagcccgggtaggctgtgttggccctcacttgggattctcagcagttacatgaaagttgtgctgataatctcttctcttgtaccaattttagtcaggcagaaaatggtaaacatgagggtgctcttgtgacttaatttttgttcaagggactaaattgcttatgtttattccctgtcagcggagtggagaatgtcattcatcaataaaccaaagccaatagctggagaattgagatctggttgaaagtggtttatggtttacatgctgtactatcctgaggaattgcgagatattgctgaggggaaaaaaaaatgaccttttcttgaaatgtaacttgaaaacaaaataaaatgtggaacataatgtttaattagaattgtggtggtggtagtggaaggggataattgtaaataggaaacatgaatgttcatttttttctttaaagaattcttattaaatggctccctgccttttttttcttttttcctcatcagctctttcatggctgaattttgttttattcttcctaagactgaggattgtgctgagtccagagtcattgtggtaactgacatgagggtcttcccatgttttaactggaaacccactttggtcacattccaagtatgacacagctgttcttctggagtactttagctattttttgtttttgttcttttcgttttttttttttccaaaaatagtgacttccttctccaggtgtgtttgacagcaactcaattcaggaatttcggtagaactgagtgacctgtggaactgctttagaatctaacctgctgtcttcgtgctctgtgtgaaggggaagctggggggttagcatgaagtctggccttgtgtgcattggagcttccaaggcactttgaaatcattccagtatatttgggaagaattgagtgaatgagaatgctcttccttattctggtagatttgacttgtttataattctgcactttagaagaaaaacagtgttaatctgtagttgaaagaaagcttagtagatgagagagttctaggctactgtggctttttccagtagatttagatgagattatgtgttttgaaatgttttgtgggatcccttagaaagcatcacttcagggcagagacactcaatattgccagccagcttgggttctaaagtgatttaatcaaattcatgctcctgatcttttttttcccccttcctttggctatgaaaacccaaagcccggagtgattgttttctccttgctttaagcagtgaagttatcctaatgcaaaagagcttagtagaaaatgagtggtttacctttttttctaaaagtatattttcaagtttattctggaatgtgatgtcttggtcctcttaaaagcagatcagccatgactgaaactcaaggcttagctggtatctatgttgtgctacattaggtgactagaagccacttcttagtgtaatcagctcctgtttccctgtgagccttagttatattttaattcagtggctttgagtcaaggccggttctaattgaggggacccagtgtgcttcagtgttaagagtggggcaatgaagagtgaaccccaatgaagagtgatcccaactttggaaactatctggtcattcatgaccttaaaaagctgccatggtggtcaaatggcatgtgtttgcacaaaaatgaccgatgtgtttaaccaaagctttgaaatgtgatgaagccaccaacataagcacttgcctaacagaaatcagtatttcttctacttagaaggcttggggcccagggtaatgaggcaccagatgaagataagatctgcatcaaggaattaaatttccagtttgtccttggggttctttctgcttatgttttttcccccccatctggtaatagtcctcttctgagaatgaaaggaggcacagaagttgcgagaaagacccagtccccagtctttgccaccattgcaccatggttgtctcggagtcccttcacctgacctttttagtcagctcagatctttttgtagtttgagaatagacctattcaagagctatcagggttaaaagctgcactgaccaaagctgtacttttaaaacacaacccctgggctagtgatgtctctacttgctctatgagccttttgccagcctcagaataggcgaggtaaccttgaatttcagggccctggaaactctagctgaaacctgcctttcctaatgctcacacaagcaccaggtaccctgagcttatactgagtccagtggttcctattttatgtgtgtgtgtatgtgtgtgtgttgagtaacatgaaacttggcagtagcagagagcactgaagttcacatgcaagttctaatctaaagttaagcagtctcttatttgtttcgggactctgatttgactctttttctgatgctttcggcatgtctgcagcctgttctcctagcctgctgcttggagtcaggttgagcatcagtgagatgaagacagtaccttttcctctcacattggcagaatagcacgcactagatgcctgaccttgagctctagtctcccctttaaatcttaccttggcagtaacacattattcctcattcaataatttcaatgctgaaactgaactctattactaatgccttccaatcagagttcctgatggggatgcctgtgggatggcccacacctgggggacctggcagatggggtgagttgggtaaggaagatgatgcttagttcctgatagatgctacagatgtagtttggcatttcagtttttgtccagtttgattttcactggggtttgagtcacagcaagctgtgtatgaacttgtgttttgtggtgacacattaataatcaaattgctaaaaccctgaatctgcttattcttcagcttcacctctgcactaaccccttacccttatggtacgtcaggattttaactagtactgctttgttgactttgggaaatggtgccactcaaaagcaacttcctaacttgaggaataactcctttgtagtttactttctggtactggttggtgccttgtattgggatacagctatattcttagctcaaatgtcctctttttgagagcaaagtagttatccaatggtgagacgagaccctgacgctcatagaggccattccttcctgggtgtcggaccagggctctgtgtcagggaaaaccttctgggtggactttgtaagaatccagtttccaaggttagattcacatccttaatcttgcagagactagaatttcacagctcgctttggaacatattccaattcaaccagttaaaatcagaggaccaagtcgtgggggaggggggcggtgttgaggagaggtatttttaaagatctggcaacttttcaggattatttgtggagaactctaaggttaagatcaggaaataaaagactgtgtgtgtgtgtgtgtgtgcgtgtgtgtgttcaagtgcctaaatcttgtttacctatcactttaaaaaaataattgaagtgtaagctaaataaaatgcttggagttttgcctgggctagtgagagttggtgcaaattcttgtgtgtgtttgcataggaaggtgagatgaccatctactaaagaggaagtagctaaatacagatctgtgggtgtttttaaaaaaactcaacctatctggtgttttattttaatggataaaaatgtaatttttctaaggtagcaacttatttccaaattaatatagatgaaaaatagataccaattagactaaattgaaagctttttgttctatatttgcatagcctttgaaatatttcttagtgcctaggaggtctggggattcctctttcgtggtggtcactaaccttacttgatgcagataaaatcacttgtcaatgcaaaatgtgttagaacttgataaagctttgagtttgagaaataaaggtatatttaaaatttaaataaaa

SEQ ID NO: 10333 - DNA, 2739 bp, Homo sapiens
  source 1..2739: mol_type = unassigned DNA
tcggaagtgcggccgccggaactggctgttggtgggggtgcagcactgagccgccgacggggcgggtgggctttgctgccgagcaggcggcgccgtcttggggcctagcggcgaggcgacccgcacagtactgtaagattgatgttaaaggcatggtgttcaccccacttcatcagcgtacataagttatctcttcttttggacccttattttatgccataatgcaacaagctttagaactagctttggatcgtgcagagtatgtcattgaaagtgcccgacagagacctcctaaaaggaaatacctatcaagtggaagaaaatctgtatttcaaaaactttatgacttgtatattgaagaatgtgaaaaagaacctgaagttaagaaattaagaagaaatgtgaacttgttagagaagcttgttatgcaagagactttgtcatgtttagtggtcaatctatacccaggaaatgagggatattctctgatgctcaggggaaaaaacggatcagattccgagaccattcgactgccctatgaagaaggagagttgcttgaatatttggatgcagaagaattacctcctattttggttgatctcctagaaaaatctcaggttaatatttttcattgcggatgtgtcatagcagaaatacgtgactacaggcagtccagtaacatgaaatctcctggttaccaaagtcggcacattctcttacgtccaacaatgcagactttaatttgtgatgtacattcaataacaagtgataaccacaaatggacccaggaagacaaacttttgcttgagagccagctcatcctagctacagctgaaccactctgtcttgatccttctatagcagtcacctgcactgcaaacagactgctctataacaagcaaaagatgaacactcgcccaatgaaacggtgtttcaagaggtattccagatcctctctgaatcggcagcaagatctatctcattgtccacctcctcctcagctgaggttacttgatttcttacaaaaaagaaaggaaagaaaagcaggtcagcattatgacctcaaaatttctaaggcaggaaattgtgtagatatgtggaaacggagtccctgtaatttggccataccttctgaagtagatgtggagaaatatgctaaagtggaaaagtctatcaaatctgatgactcacagccaacagtctggccagcccatgatgtaaaagatgattatgtatttgaatgtgaagctggtactcagtatcagaaaacaaagctgaccatcttgcagtcgcttggagatccactttactatggtaaaatacagccatgtaaagcagatgaagaaagtgacagccagatgtctccatcacactcgtccacagatgatcattcaaattggttcattattggatcaaagaccgatgctgagagggtagtcaatcagtaccaagaattagtccagaatgaagccaaatgtccggtcaagatgtcacacagctccagtggctcagccagtctgagtcaggtttctccagggaaagaaacagatcaaactgaaaccgtgtcagttcagtcttcggtattggggaagggtgtaaaacatcgacccccaccaatcaaacttccctcaagctcaggaaatagttcctcaggtaactattttacaccacaacagacaagcagctttctcaaatctccaactcctcctccttcttctaagccatcaagtattcctcggaaatcatctgtggatctcaatcaagttagcatgctttctccagctgccctatcacctgccagctcatcacaaagaaccacggccacccaggtcatggcaaactctgctggacttaacttcatcaatgtagtgggctctgtttgtggggcccaggctttgatgagtggttcaaaccccatgctgggctgtaacactggtgccataactcctgcaggaataaacctgagcggccttctaccctcaggaggtctgctaccaaatgcactgcccagtgcaatgcaggcagcttctcaagcaggtgttccatttggtttaaaaaatacttcaagtctcaggcccttaaatctactccagcttccaggtggttcacttatttttaacactctgcagcagcagcaacagcagctctcccagtttacaccacaacaacctcagcagcccacaacttgtagtcctcaacagccaggggagcagggttctgagcaaggttcaaccagtcaagaacaggccttatctgctcagcaagctgctgttattaaccttactggagtaggaagttttatgcagtcacaggcagctgtgttgtctcagcttggctctgccgagaacagacctgagcaaagccttcctcagcagagattccagctctcctctgcctttcaacagcagcagcaacagatacaacagttgcgattcttgcagcatcaaatggctatggcagcagcagcagcacaaacagctcagctacatcatcatcggcatacaggcagccagtcaaaaagtaaaatgaagagaggcacgccaaccactccaaaattttgagtcttgcattactttttgttccttttttaaaaacacaagagcactgaatcaaaagaattgagtttctactttttgttttttttaatgtgtcagtattttacattgctagatgtacaaactttatacagaagcacaaccttatcatttttaaataaaaacagggaaatggtttaacaaa

SEQ ID NO: 10334 - DNA, 2681 bp, Homo sapiens
  source 1..2681: mol_type = unassigned DNA
ggtgcagcactgagccgccgacggggcgggtgggctttgctgccgagcaggcggcgccgtcttggggcctagcggcgaggcgacccgcacaggtgggcggtggcggtaggtgggtggccagcgactggcaacgcggtggcttagacgcgcgagatccggccagggtcagagtactgtaagattgatgttaaaggcatggtgttcaccccacttcatcagcgtacataagttatctcttcttttggacccttattttatgccataatgcaacaagctttagaactagctttggatcgtgcagagtatgtcattgaaagtgcccgacagagacctcctaaaaggaaatacctatcaagtggaagaaaatctgtatttcaaaaactttatgacttgtatattgaagaatgtgaaaaagaacctgaagttaagcagaaattaagaagaaatgtgaacttgttagagaagcttgttatgcaagagactttgtcatgtttagtggtcaatctatacccaggaaatgagggatattctctgatgctcaggggaaaaaacggatcagattccgagaccattcgactgccctatgaagaaggagagttgcttgaatatttggatgcagaagaattacctcctattttggttgatctcctagaaaaatctcaggttaatatttttcattgcggatgtgtcatagcagaaatacgtgactacaggcagtccagtaacatgaaatctcctggttaccaaagtcggcacattctcttacgtccaacaatgcagactttaatttgtgatgtacattcaataacaagtgataaccacaaatggacccaggaagacaaacttttgcttgagagccagctcatcctagctacagctgaaccactctgtcttgatccttctatagcagtcacctgcactgcaaacagactgctctataacaagcaaaagatgaacactcgcccaatgaaacggtgtttcaagaggtattccagatcctctctgaatcggcagcaagatctatctcattgtccacctcctcctcagctgaggttacttgatttcttacaaaaaagaaaggaaagaaaagcaggtcagcattatgacctcaaaatttctaaggcaggaaattgtgtagatatgtggaaacggagtccctgtaatttggccataccttctgaagtagatgtggagaaatatgctaaagtggaaaagtctatcaaatctgatgactcacagccaacagtctggccagcccatgatgtaaaagatgattatgtatttgaatgtgaagctggtactcagtatcagaaaacaaagctgaccatcttgcagtcgcttggagatccactttactatggtaaaatacagccatgtaaagcagatgaagaaagtgacagccagatgtctccatcacactcgtccacagatgatcattcaaattggttcattattggatcaaagaccgatgctgagagggtagtcaatcagtaccaagaattagtccagaatgaagccaaatgtccggtcaagatgtcacacagctccagtggctcagccagtctgagtcaggtttctccagggaaagaaacagatcaaactgaaaccgtgtcagttcagtcttcggtattggggaagggtgtaaaacatcgacccccaccaatcaaacttccctcaagctcaggaaatagttcctcaggtaactattttacaccacaacagacaagcagctttctcaaatctccaactcctcctccttcttctaagccatcaagtattcctcggaaatcatctgtggatctcaatcaagttagcatgctttctccagctgccctatcacctgccagctcatcacaaagaaccacggccacccaggtcatggcaaactctgctggacttaacttcatcaatgtagtgggctctgtttgtggggcccaggctttgatgagtggttcaaaccccatgctgggctgtaacactggtgccataactcctgcaggaataaacctgagcggccttctaccctcaggaggtctgctaccaaatgcactgcccagtgcaatgcaggcagcttctcaagcaggtgttccatttggtttaaaaaatacttcaagtctcaggcccttaaatctactccagcttccaggtggttcacttatttttaacactctgcagcagcagcaacagcagctctcccagtttacaccacaacaacctcagcagcccacaacttgtagtcctcaacagccaggggagcagggttctgagcaaggttcaaccagtcaagaacaggccttatctgctcagcaagctgctgttattaaccttactggagtaggaagttttatgcagtcacaggcagctgcagttgcgattcttgcagcatcaaatggctatggcagcagcagcagcacaaacagctcagctacatcatcatcggcatacaggcagccagtcaaaaagtaaaatgaagagaggcacgccaaccactccaaaattttgagtcttgcattactttttgttccttttttaaaaacacaagagcactgaatcaaaagaattgagtttctactttttgttttttttaatgtgtcagtattttacattgctagatgtacaaactttatacagaagcacaaccttatcatttttaaataaaaacagggaaatggtttaacaaa

SEQ ID NO: 10335 - DNA, 2843 bp, Homo sapiens
  source 1..2843: mol_type = unassigned DNA
tccccgcccctcggcccagcctgccaatcggaagtgcggccgccggaactggctgttggtgggggtgcagcactgagccgccgacggggcgggtgggctttgctgccgagcaggcggcgccgtcttggggcctagcggcgaggcgacccgcacagtactgtaagattgatgttaaaggcatggtgttcaccccacttcatcagcgtacataagttatctcttcttttggacccttattttatgccataatgcaacaagctttagaactagctttggatcgtgcagagtatgtcattgaaagtgcccgacagagacctcctaaaaggaaatacctatcaagtggaagaaaatctgtatttcaaaaactttatgacttgtatattgaagaatgtgaaaaagaacctgaagttaagcagaaattaagaagaaatgtgaacttgttagagaagcttgttatgcaagagactttgtcatgtttagtggtcaatctatacccaggaaatgagggatattctctgatgctcaggggaaaaaacggatcagattccgagaccattcgactgccctatgaagaaggagagttgcttgaatatttggatgcagaagaattacctcctattttggttgatctcctagaaaaatctcaggttaatatttttcattgcggatgtgtcatagcagaaatacgtgactacaggcagtccagtaacatgaaatctcctggttaccaaagtcggcacattctcttacgtccaacaatgcagactttaatttgtgatgtacattcaataacaagtgataaccacaaatggacccaggaagacaaacttttgcttgagagccagctcatcctagctacagctgaaccactctgtcttgatccttctatagcagtcacctgcactgcaaacagactgctctataacaagcaaaagatgaacactcgcccaatgaaacggtgtttcaagaggtattccagatcctctctgaatcggcagcaagatctatctcattgtccacctcctcctcagctgaggttacttgatttcttacaaaaaagaaaggaaagaaaagcaggtcagcattatgacctcaaaatttctaaggcaggaaattgtgtagatatgtggaaacggagtccctgtaatttggccataccttctgaagtagatgtggagaaatatgctaaagtggaaaagtctatcaaatctgatgactcacagccaacagtctggccagcccatgatgtaaaagatgattatgtatttgaatgtgaagctggtactcagtatcagaaaacaaagctgaccatcttgcagtcgcttggagatccactttactatggtaaaatacagccatgtaaagcagatgaagaaagtgacagccagatgtctccatcacactcgtccacagatgatcattcaaattggttcattattggatcaaagaccgatgctgagagggtagtcaatcagtaccaagaattagtccagaatgaagccaaatgtccggtcaagatgtcacacagctccagtggctcagccagtctgagtcaggtttctccagggaaagaaacagatcaaactgaaaccgtgtcagttcagtcttcggtattggggaagggtgtaaaacatcgacccccaccaatcaaacttccctcaagctcaggaaatagttcctcaggtaactattttacaccacaacagacaagcagctttctcaaatctccaactcctcctccttcttctaagccatcaagtattcctcggaaatcatctgtggatctcaatcaagttagcatgctttctccagctgccctatcacctgccagctcatcacaaagaaccacggccacccaggtcatggcaaactctgctggacttaacttcatcaatgtagtgggctctgtttgtggggcccaggctttgatgagtggttcaaaccccatgctgggctgtaacactggtgccataactcctgcaggaataaacctgagcggccttctaccctcaggaggtctgctaccaaatgcactgcccagtgcaatgcaggcagcttctcaagcaggtgttccatttggtttaaaaaatacttcaagtctcaggcccttaaatctactccagcttccaggtggttcacttatttttaacactctgcagcagcagcaacagcagctctcccagtttacaccacaacaacctcagcagcccacaacttgtagtcctcaacagccaggggagcagggttctgagcaaggttcaaccagtcaagaacaggccttatctgctcagcaagctgctgttattaaccttactggagtaggaagttttatgcagtcacaggcagctgcagttgcgattcttgcagcatcaaatggctatggcagcagcagcagcacaaacagctcagctacatcatcatcggcatacaggcagccagtcaaaaagtaaaatgaagagaggcacgccaaccactccaaaattttgagtcttgcattactttttgttccttttttaaaaacacaagagcactgaatcaaaagaattgagtttctactttttgttttttttaatgtgtcagtattttacattgctagatgtacaaactttatacagaagcacaaccttatcatttttaaataaaaacagggaaatggtttaacaaactagggttggtttgcctaagtcattgctttttaaaaatggtttcactatacataatatatatggaagtgacctaagaaataatagaaacatctttcagaagaatgtagtttgatatttatttagtataaaacgtttgtgcacagtgttaacaaatacaatttttacaaatctgttttg

SEQ ID NO: 10336 - DNA, 2625 bp, Homo sapiens
  source 1..2625: mol_type = unassigned DNA
agagacccggcaggccggggcggaggttgaggcagctaaactccaggtggacgcctacatcgcctttcgcggtgttgctaagccgaacttttaattttagtttgacttttgggttccagagacgggtatttccggacactggcaagaattttgccttgcgtgtcttcgaaggcggttttcttggtgtccatattgcataaaggcttgtcgctcctctgtggagatgacggttgtacagtactgtaagattgatgttaaaggcatggtgttcaccccacttcatcagcgtacataagttatctcttcttttggacccttattttatgccataatgcaacaagctttagaactagctttggatcgtgcagagtatgtcattgaaagtgcccgacagagacctcctaaaaggaaatacctatcaagtggaagaaaatctgtatttcaaaaactttatgacttgtatattgaagaatgtgaaaaagaacctgaagttaagcagaaattaagaagaaatgtgaacttgttagagaagcttgttatgcaagagactttgtcatgtttagtggtcaatctatacccaggaaatgagggatattctctgatgctcaggggaaaaaacggatcagattccgagaccattcgactgccctatgaagaaggagagttgcttgaatatttggatgcagaagaattacctcctattttggttgatctcctagaaaaatctcaggttaatatttttcattgcggatgtgtcatagcagaaatacgtgactacaggcagtccagtaacatgaaatctcctggttaccaaagtcggcacattctcttacgtccaacaatgcagactttaatttgtgatgtacattcaataacaagtgataaccacaaatggacccaggaagacaaacttttgcttgagagccagctcatcctagctacagctgaaccactctgtcttgatccttctatagcagtcacctgcactgcaaacagactgctctataacaagcaaaagatgaacactcgcccaatgaaacggtgtttcaagaggtattccagatcctctctgaatcggcagcaagatctatctcattgtccacctcctcctcagctgaggttacttgatttcttacaaaaaagaaaggaaagaaaagcaggtcagcattatgacctcaaaatttctaaggcaggaaattgtgtagatatgtggaaacggagtccctgtaatttggccataccttctgaagtagatgtggagaaatatgctaaagtggaaaagtctatcaaatctgatgactcacagccaacagtctggccagcccatgatgtaaaagatgattatgtatttgaatgtgaagctggtactcagtatcagaaaacaaagctgaccatcttgcagtcgcttggagatccactttactatggtaaaatacagccatgtaaagcagatgaagaaagtgacagccagatgtctccatcacactcgtccacagatgatcattcaaattggttcattattggatcaaagaccgatgctgagagggtagtcaatcagtaccaagaattagtccagaatgaagccaaatgtccggtcaagatgtcacacagctccagtggctcagccagtctgagtcaggtttctccagggaaagaaacagatcaaactgaaaccgtgtcagttcagtcttcggtattggggaagggtgtaaaacatcgacccccaccaatcaaacttccctcaagctcaggaaatagttcctcaggtaactattttacaccacaacagacaagcagctttctcaaatctccaactcctcctccttcttctaagccatcaagtattcctcggaaatcatctgtggatctcaatcaagttagcatgctttctccagctgccctatcacctgccagctcatcacaaagaaccacggccacccaggtcatggcaaactctgctggacttaacttcatcaatgtagtgggctctgtttgtggggcccaggctttgatgagtggttcaaaccccatgctgggctgtaacactggtgccataactcctgcaggaataaacctgagcggccttctaccctcaggaggtctgctaccaaatgcactgcccagtgcaatgcaggcagcttctcaagcaggtgttccatttggtttaaaaaatacttcaagtctcaggcccttaaatctactccagcttccaggtggttcacttatttttaacactctgcagcagcagcaacagcagctctcccagtttacaccacaacaacctcagcagcccacaacttgtagtcctcaacagccaggggagcagggttctgagcaaggttcaaccagtcaagaacaggccttatctgctcagcaagctgctgttattaaccttactggagtaggaagttttatgcagtcacaggcagctgcagttgcgattcttgcagcatcaaatggctatggcagcagcagcagcacaaacagctcagctacatcatcatcggcatacaggcagccagtcaaaaagtaaaatgaagagaggcacgccaaccactccaaaattttgagtcttgcattactttttgttccttttttaaaaacacaagagcactgaatcaaaag
